United States Patent Application Publication US 2018/0126003 A1 - sequence listing, part 149

SEQ ID NO: 261606 - DNA, 483 bp, Artificial Sequence
  derived and/or modified sequence
atggacaagctgaagaaggtgctgagcggccaggacaccgaggaccgtagcggcctctctgaggtcgtcgaggcttcctcgctctcctggtccactagaattaagggcttcatcgcatgtttcgctatcgggattctgtgcagcctcctcggcaccgtgttactgtgggtgccaagaaagggtctgcacctgttcgctgtgttctacacgttcgggaacattgcctcgataggctcaacaatctttcttatgggacctgtgaaacagctaaagcggatgtttgaacctacccgccttattgctaccattatggtgctgttatgtttcgccctaacactgtgctccgcattctggtggcacaacaagggtctcgccctcatcttctgcattcttcagtcactggccttgacatggtattcattgtcatttattcctttcgctcgggacgcagttaaaaagtgctttgccgtttgtctggcatag

SEQ ID NO: 261607 - DNA, 327 bp, Artificial Sequence
  derived and/or modified sequence
atggacaagctgaagaaggtgctgagcggccaggacaccgaggaccgctccggcctgagcgaggtcgtggaggcaagctccctgagttggagtacacgcattaaagggtttattgcatgttttgccatcggcattttgtgcagcctccttggtaccgtactgctgtgggtgccaagaaaaggtctgcacctgtttgcggttttctataccttcggcaacatcgcgagcatcggtagctgtgttctccaccttccttgcgtgctgccctttggaggaatcactcgggatctgcatctgtcttctgccttctgttccctgtggcactag

SEQ ID NO: 261608 - DNA, 327 bp, Artificial Sequence
  derived and/or modified sequence
atggacaagctgaagaaggtgctgagcggccaggacaccgaggaccgttcagggctcagtgaggtggtagaggcatcatcattatcgtggtccaccaggatcaaaggcttcattgcctgtttcgccattggaattctttgcagtctgttaggcaccgtactcctctgggtgcctcgaaaaggtctgcatctgttcgctgtgttttacacgtttgggaatattgccagcattgggtcttgcgtgctccatttaccatgtgtgctgccattcggtgggataaccagggatttgcatctctcaagtgcattctgttccttgtggcactag

SEQ ID NO: 261609 - DNA, 483 bp, Artificial Sequence
  derived and/or modified sequence
atggacaaacttaagaaagttctcagtggtcaggacactgaagataggtccgggctgtccgaagtggtggaagcgagctccctcagctggtcaacccgtattaagggctttatcgcttgctttgcgattggaatcctgtgtagcctgttagggaccgttctgctgtgggtgccccgaaaaggcctgcatctctttgcagttttttatacatttggcaatattgcctcgataggtagcaccattttcctcatgggcccagtcaaacagttaaagaggatgttcgaacctacccgacttatagcgaccattatggtgctgctgtgctttgctcttaccctctgctcagctttctggtggcacaacaaaggcctagctctgatcttctgcattctgcagtctttagctctgacttggtattcgttaagctttatcccattcgctcgtgatgccgtaaaaaagtgcttcgcagtgtgcctcgcatag

SEQ ID NO: 261610 - DNA, 327 bp, Artificial Sequence
  derived and/or modified sequence
atggacaagctaaaaaaggtactgtccggtcaagatacggaagaccgctcaggactctctgaagtcgtggaagctagctccctctcctggtctacacgcattaaaggctttatcgcctgctttgccatcgggattttgtgcagtttgctaggcacggtgctactgtgggtcccacgcaagggactccacctcttcgctgtgttctacaccttcgggaatatcgcaagtatcggaagttgcgtcttacacttgccttgcgtcctgccctttggaggaatcacaagggacctccacctatcttctgccttttgctcactgtggcactag

SEQ ID NO: 261611 - DNA, 327 bp, Artificial Sequence
  derived and/or modified sequence
atggacaagctaaagaaagtgctgagtggtcaggacaccgaagaccggagcggtcttagtgaagtggtggaggcaagttctctgagttggtccacccgcatcaagggttttattgcctgcttcgccattggcatactgtgctccctgctgggaacggtgctgctttgggtcccccgtaaggggcttcacctatttgcagtgttttacaccttcggaaatattgcatcaatcgggtcttgtgtgttgcaccttccctgtgtgctcccttttggcggaatcaccagagatctgcatctctccagcgccttttgttctttatggcactag

SEQ ID NO: 261612 - DNA, 1155 bp, Artificial Sequence
  derived and/or modified sequence
ggaagagccgtcaacttagcgagcgcaacaggctgccgctgaggagctggagctggtggggactgggccgcaatggacaagctgaagaaggtgctgagcgggcaggacacggaggaccggagcggcctgtccgaggttgttgaggcatcttcattaagctggagtaccaggataaaaggcttcattgcgtgttttgctataggaattctctgctcactgctgggtactgttctgctgtgggtgcccaggaagggactacacctcttcgcagtgttttatacctttggtaatatcgcatcaattgggagtaccatcttcctcatgggaccagtgaaacagctgaagcgaatgtttgagcctactcgtttgattgcaactatcatggtgctgttgtgttttgcacttaccctgtgttctgccttttggtggcataacaagggacttgcacttatcttctgcattttgcagtctttggcattgacgtggtacagcctttccttcataccatttgcaagggatgctgtgaagaagtgttttgccgtgtgtcttgcataattcatggccagttttatgaagctttggaaggcactatggacagaagctggtggacagttttgtaactatcttcgaaacctctgtcttacagacatgtgccttttatcttgcagcaatgtgttgcttgtgattcgaacatttgagggttacttttggaagcaacaatacattctcgaacctgaatgtcagtagcacaggatgagaagtgggttctgtatcttgtggagtggaatcttcctcatgtacctgtttcctctctggatgttgtcccactgaattcccatgaatacaaacctattcagcaacagcacataagccttgggtgcaagtgattcccaggtggcaaaaggcagccccatcagagatcacgggagcaacagtaagggacagagttttggggtccacttgtccctcagcatggaagccatcaccgtggtcctgcatagagtgagtctgcttctactctggcatctgagaacaagtgactctgctttagacaagcccctggagagcctggccatggagtgaggtagaaaagaagcactttttggtggtatatgctgtttctgaatttgaatctaagcattcttggtgttctga

SEQ ID NO: 261613 - DNA, 773 bp, Artificial Sequence
  derived and/or modified sequence
gtcaacttagcgagcgcaacaggctgccgctgaggagctggagctggtggggactgggccgcaatggacaagctgaagaaggtgctgagcgggcaggacacggaggaccggagcggcctgtccgaggttgttgaggcatcttcattaagctggagtaccaggataaaaggcttcattgcgtgttttgctataggaattctctgctcactgctgggtactgttctgctgtgggtgcccaggaagggactacacctcttcgcagtgttttatacctttggtaatatcgcatcaattgggagttgtgttttgcacttaccctgtgttctgccttttggtggcataacaagggacttgcacttatcttctgcattttgcagtctttggcattgacgtggtacagcctttccttcataccatttgcaagggatgctgtgaagaagtgttttgccgtgtgtcttgcataattcatggccagttttatgaagctttggaaggcactatggacagaagctggtggacagttttgtaactatcttcgaaacctctgtcttacagacatgtgccttttatcttgcagcaatgtgttgcttgtgattcgaacatttgagggttacttttggaagcaacaatacattctcgaacctgaatgtcagtagcacaggatgagaagtgggttctgtatcttgtggagtggaatcttcctcatgtacctgtttcctctctggatgttgtcccactgaattcccatgaatacaaacctattcagcaacagc

SEQ ID NO: 261614 - DNA, 491 bp, Artificial Sequence
  derived and/or modified sequence
gcctgggcggggcgcgccgcggttggcgcctgggcggctgggcggctgcctagcacccggaagagccgtcaacttagcgagcgcaacaggctgccgctgaggagctggagctggtggggactgggccgcaatggacaagctgaagaaggtgctgagcgggcaggacacggaggaccggagcggcctgtccgaggttgttgaggcatcttcattaagctggagtaccaggataaaaggcttcattgcgtgttttgctataggaattctctgctcactgctgggtactgttctgctgtgggtgcccaggaagggactacacctcttcgcagtgttttatacctttggtaatatcgcatcaattgggagttgtgttttgcacttaccctgtgttctgccttttggtggcataacaagggacttgcacttatcttctgcattttgcagtctttggcattgacgtggtacagcctttccttcataccatttgcaag

SEQ ID NO: 261615 - DNA, 78 bp, Artificial Sequence
  derived and/or modified sequence
ttgaccagaacacattacacaatgctaatcaactgcaaaggagaatatgaacagagaggaggacatggatattttgtg

SEQ ID NO: 261616 - protein, 712 aa, Artificial Sequence
  derived and/or modified sequence
MPDQDKKVKTTEKSTDKQQEITIRDYSDLKRLRCLLNVQSSKQQLPAINFDSAQNSMTKSEPAIRAGGHRARGQWHESTEAVELENFSINYKNERNFSKHPQRKLFQEIFTALVKNRLISREWVNRAPSIHFLRVLICLRLLMRDPCYQEILHSLGGIENLAQYMEIVANEYLGYGEEQHTVDKLVNMTYIFQKLAAVKDQREWVTTSGAHKTLVNLLGARDTNVLLGSLLALASLAESQECREKISELNIVENLLMILHEYDLLSKRLTAELLRLLCAEPQVKEQVKLYEGIPVLLSLLHSDHLKLLWSIVWILVQVCEDPETSVEIRIWGGIKQLLHILQGDRNFVSDHSSIGSLSSANAAGRIQQLHLSEDLSPREIQENTFSLQAACCAALTELVLNDTNAHQVVQENGVYTIAKLILPNKQKNAAKSNLLQCYAFRALRFLFSMERNRPLFKRLFPTDLFEIFIDIGHYVRDISAYEELVSKLNLLVEDELKQIAENIESINQNKAPLKYIGNYAILDHLGSGAFGCVYKVRKHSGQNLLAMKEVNLHNPAFGKDKKDRDSSVRNIVSELTIIKEQLYHPNIVRYYKTFLENDRLYIVMELIEGAPLGEHFSSLKEKHHHFTEERLWKIFIQLCLALRYLHKEKRIVHRDLTPNNIMLGDKDKVTVTDFGLAKQKQENSKLTSVVGTILYSCVQHLYLRSPAPALAT

SEQ ID NO: 261617 - protein, 96 aa, Artificial Sequence
  derived and/or modified sequence
MPDQDKKVKTTEKSTDKQQEITIRDYSDLKRLRCLLNVQSSKQQLPAINFDSAQNSMTKSEPAIRAGGHRARGQWHESTEAVELENFSINYKNERN

SEQ ID NO: 261618 - DNA, 2139 bp, Artificial Sequence
  derived and/or modified sequence
atgcccgaccaggacaagaaggtgaagaccaccgagaagagcaccgacaagcagcaggagatcaccatcagagactacagcgacctgaagagactgagatgcctgctgaacgtgcagagcagcaagcagcagctgcccgccatcaacttcgacagcgcccagaacagcatgaccaagagcgagcccgccatcagagccggcggccacagagccagaggccagtggcacgagagcaccgaggccgtggagctggagaacttcagcatcaactacaagaacgagagaaacttcagcaagcacccccagagaaagctgttccaggagatcttcaccgccctggtgaagaacagactgatcagcagagagtgggtgaacagagcccccagcatccacttcctgagagtgctgatctgcctgagactgctgatgagagacccctgctaccaggagatcctgcacagcctgggcggcatcgagaacctggcccagtacatggagatcgtggccaacgagtacctgggctacggcgaggagcagcacaccgtggacaagctggtgaacatgacctacatcttccagaagctggccgccgtgaaggaccagagagagtgggtgaccaccagcggcgcccacaagaccctggtgaacctgctgggcgccagagacaccaacgtgctgctgggcagcctgctggccctggccagcctggccgagagccaggagtgcagagagaagatcagcgagctgaacatcgtggagaacctgctgatgatcctgcacgagtacgacctgctgagcaagagactgaccgccgagctgctgagactgctgtgcgccgagccccaggtgaaggagcaggtgaagctgtacgagggcatccccgtgctgctgagcctgctgcacagcgaccacctgaagctgctgtggagcatcgtgtggatcctggtgcaggtgtgcgaggaccccgagaccagcgtggagatcagaatctggggcggcatcaagcagctgctgcacatcctgcagggcgacagaaacttcgtgagcgaccacagcagcatcggcagcctgagcagcgccaacgccgccggcagaatccagcagctgcacctgagcgaggacctgagccccagagagatccaggagaacaccttcagcctgcaggccgcctgctgcgccgccctgaccgagctggtgctgaacgacaccaacgcccaccaggtggtgcaggagaacggcgtgtacaccatcgccaagctgatcctgcccaacaagcagaagaacgccgccaagagcaacctgctgcagtgctacgccttcagagccctgagattcctgttcagcatggagagaaacagacccctgttcaagagactgttccccaccgacctgttcgagatcttcatcgacatcggccactacgtgagagacatcagcgcctacgaggagctggtgagcaagctgaacctgctggtggaggacgagctgaagcagatcgccgagaacatcgagagcatcaaccagaacaaggcccccctgaagtacatcggcaactacgccatcctggaccacctgggcagcggcgccttcggctgcgtgtacaaggtgagaaagcacagcggccagaacctgctggccatgaaggaggtgaacctgcacaaccccgccttcggcaaggacaagaaggacagagacagcagcgtgagaaacatcgtgagcgagctgaccatcatcaaggagcagctgtaccaccccaacatcgtgagatactacaagaccttcctggagaacgacagactgtacatcgtgatggagctgatcgagggcgcccccctgggcgagcacttcagcagcctgaaggagaagcaccaccacttcaccgaggagagactgtggaagatcttcatccagctgtgcctggccctgagatacctgcacaaggagaagagaatcgtgcacagagacctgacccccaacaacatcatgctgggcgacaaggacaaggtgaccgtgaccgacttcggcctggccaagcagaagcaggagaacagcaagctgaccagcgtggtgggcaccatcctgtacagctgcgtgcagcacctgtacctgagaagccccgcccccgccctggccacctag

SEQ ID NO: 261619 - DNA, 2178 bp, Artificial Sequence
  derived and/or modified sequence
atgcccgaccaggacaagaaggtgaagaccaccgagaagagcaccgacaagcagcaggagatcaccatcagagactacagcgacctgaagagactgagatgcctgctgaacgtgcagagcagcaagcagcagctgcccgccatcaacttcgacagcgcccagaacagcatgaccaagagcgagcccgccatcagagccggcggccacagagccagaggccagtggcacgagagcaccgaggccgtggagctggagaacttcagcatcaactacaagaacgagagaaacttcagcaagcacccccagagaaagctgttccaggagatcttcaccgccctggtgaagaacagactgatcagcagagagtgggtgaacagagcccccagcatccacttcctgagagtgctgatctgcctgagactgctgatgagagacccctgctaccaggagatcctgcacagcctgggcggcatcgagaacctggcccagtacatggagatcgtggccaacgagtacctgggctacggcgaggagcagcacaccgtggacaagctggtgaacatgacctacatcttccagaagctggccgccgtgaaggaccagagagagtgggtgaccaccagcggcgcccacaagaccctggtgaacctgctgggcgccagagacaccaacgtgctgctgggcagcctgctggccctggccagcctggccgagagccaggagtgcagagagaagatcagcgagctgaacatcgtggagaacctgctgatgatcctgcacgagtacgacctgctgagcaagagactgaccgccgagctgctgagactgctgtgcgccgagccccaggtgaaggagcaggtgaagctgtacgagggcatccccgtgctgctgagcctgctgcacagcgaccacctgaagctgctgtggagcatcgtgtggatcctggtgcaggtgtgcgaggaccccgagaccagcgtggagatcagaatctggggcggcatcaagcagctgctgcacatcctgcagggcgacagaaacttcgtgagcgaccacagcagcatcggcagcctgagcagcgccaacgccgccggcagaatccagcagctgcacctgagcgaggacctgagccccagagagatccaggagaacaccttcagcctgcaggccgcctgctgcgccgccctgaccgagctggtgctgaacgacaccaacgcccaccaggtggtgcaggagaacggcgtgtacaccatcgccaagctgatcctgcccaacaagcagaagaacgccgccaagagcaacctgctgcagtgctacgccttcagagccctgagattcctgttcagcatggagagaaacagacccctgttcaagagactgttccccaccgacctgttcgagatcttcatcgacatcggccactacgtgagagacatcagcgcctacgaggagctggtgagcaagctgaacctgctggtggaggacgagctgaagcagatcgccgagaacatcgagagcatcaaccagaacaaggcccccctgaagtacatcggcaactacgccatcctggaccacctgggcagcggcgccttcggctgcgtgtacaaggtgagaaagcacagcggccagaacctgctggccatgaaggaggtgaacctgcacaaccccgccttcggcaaggacaagaaggacagagacagcagcgtgagaaacatcgtgagcgagctgaccatcatcaaggagcagctgtaccaccccaacatcgtgagatactacaagaccttcctggagaacgacagactgtacatcgtgatggagctgatcgagggcgcccccctgggcgagcacttcagcagcctgaaggagaagcaccaccacttcaccgaggagagactgtggaagatcttcatccagctgtgcctggccctgagatacctgcacaaggagaagagaatcgtgcacagagacctgacccccaacaacatcatgctgggcgacaaggacaaggtgaccgtgagctgcctgaagtgcgccgcccccctgcccagcctgagctgcagctgcagcggccacatcaagagagccggcagcagcttcgccttctgctaccactggaagctgcccgacgccagccaggaggccaacgccatcatggtgcccgtgcagcccgccgagccctag

SEQ ID NO: 261620 - DNA, 2139 bp, Artificial Sequence
  derived and/or modified sequence
atgcctgatcaggataaaaaggttaagaccactgaaaaatccacagacaagcaacaggagatcactattcgagactactcagacctgaagagactgcgatgtctgctgaatgtacagtccagcaaacagcagcttcctgccataaactttgactctgcgcaaaattcgatgacaaagtcagagccggccatcagagcggggggccacagagctcgcggccagtggcatgagagcaccgaagctgtggagttagaaaatttctcaatcaactacaagaacgagcgtaacttctccaaacacccccagaggaaactgttccaggagatctttacagcactcgtcaaaaacaggctcatctctcgtgagtgggtgaatcgcgctccaagcattcacttcctgcgggtgctaatctgtctgagactgctgatgagagacccctgctaccaggagattctgcacagcctcggaggtattgaaaatttagcacagtacatggaaatagtggcaaatgagtaccttggttacggcgaggaacaacacacagtggacaaactagtaaacatgacgtacattttccagaagctggcagccgtaaaggaccagcgggaatgggtgacgacgtccggtgcgcataaaacactggtgaacctcctgggtgcacgggacacaaatgtactcctgggcagcctcctggccctagccagtctcgctgaaagccaggaatgccgagaaaaaatctctgaactgaacatcgttgagaatttgctgatgatactgcacgaatatgatttgttatctaaaagactgacagccgaactcttaaggctcctgtgtgccgagcctcaggtaaaagagcaggttaagctctacgaaggaatccctgtattgctgtccctccttcactccgaccatctgaagctgctctggagtatcgtctggatactggttcaagtgtgcgaggatcctgaaaccagtgttgagatccgaatctggggcggcataaaacagctgctgcacatcctgcagggtgaccgaaatttcgtgtcagaccattcgtccattgggtcgctgagtagcgccaacgccgctggtcgaatccagcagctccacctgtccgaagatttgtcccccagggaaatccaggaaaacactttcagcctccaggctgcgtgctgtgcagccctgacggaactggtgttgaatgacacgaatgcgcatcaagtcgttcaggagaatggcgtgtataccattgcaaaactgatcttaccaaacaagcaaaaaaatgctgccaaatcgaatctgctgcagtgctatgcctttcgtgcactgcgatttttgttttctatggagcggaacaggccactctttaaacgcctgttcccaactgacctgttcgagatatttattgatattggccattacgtgagagatatcagtgcctacgaagaacttgtgagcaaattaaacctgctggtggaggacgaactcaagcaaatcgctgaaaatatcgagtctattaaccaaaataaagcacccctcaagtacattgggaactacgccatccttgatcaccttggctctggcgcttttgggtgcgtctataaggtgcgaaaacacagcgggcagaacctcctggcaatgaaggaagttaatctgcataatcccgcttttggcaaggacaagaaggatcgtgattccagcgttagaaatatcgtttctgaactgacaatcattaaagagcagttgtatcatccaaatattgtgaggtactataagaccttcctggaaaacgacaggctttacatagtcatggaacttatcgaaggcgcccctctgggcgagcacttctcctccttgaaggaaaagcatcatcacttcacagaagagcgtctgtggaaaatatttattcagctctgtttagccctgagatatctgcataaagagaaacgcattgtccatagggatctgaccccaaacaatatcatgctaggtgacaaggataaggtgacagtaacagactttggcctggccaaacagaagcaagagaatagcaagctcacttcggtcgtaggcacgatcttgtacagttgcgttcagcacttgtatctgcgcagtcccgctcccgctctggcaacctag

SEQ ID NO: 261621 - DNA, 2178 bp, Artificial Sequence
  derived and/or modified sequence
atgcctgaccaggataaaaaagtaaaaacgaccgagaaatccacagacaaacagcaagaaattacgattcgggattatagtgatctcaagcgcctcagatgtttgcttaacgtccaaagttctaaacagcagttacccgccataaacttcgactccgcacagaactccatgaccaagtccgagcctgcaatcagagccggtgggcatagggcacgtggacagtggcacgagtctacagaggcagtcgaactggagaattttagtatcaactacaagaacgaacgcaatttttctaaacacccccagcgaaagctttttcaggaaatcttcaccgctctggtcaagaatcggctcatcagcagagaatgggttaatcgggccccctccatccacttccttcgagttctcatctgcctacgacttctgatgcgcgatccttgttaccaagagatactgcactcattaggtgggatcgagaatttggcccagtatatggaaatcgtcgccaacgagtaccttgggtacggcgaggaacagcatactgtagataagcttgtgaacatgacatatatctttcaaaaactggccgcagtcaaggaccagagggaatgggtgacaacgagtggggcgcataagaccctcgtaaacctcttgggtgcaagagataccaatgtgctgttggggtcgctgctggctctagccagcttggccgagagtcaagagtgtcgggaaaagatctcagaattgaacatcgtggagaacctgctgatgatcctgcatgaatatgaccttttgtctaagcggctcactgccgagctcctgcgcttgctctgtgctgagccacaggtgaaagaacaagtgaagctttatgagggcattcccgtcttactctctcttctccatagcgaccacctgaagctgctgtggtctatcgtatggatccttgtgcaagtctgtgaagaccccgaaacttcagtagaaatcaggatctggggaggcataaagcagcttctacacatcctccagggcgacaggaatttcgtgtctgatcattcctccattggttcactgagcagtgccaacgccgcggggaggatccaacaattgcatctgtccgaggatctgagcccccgggaaattcaagaaaacacgttctctctacaggccgcttgctgcgctgcgcttacagagttggtcctgaatgatactaacgctcaccaggtagtgcaggagaatggggtatatacaatcgctaagctcattctgcctaataagcagaagaacgccgccaagtcgaacctgttgcagtgctatgccttcagagctctgcggttcctgtttagcatggagcgcaaccgaccgttatttaaacgattgtttcccacggacctgttcgagatttttattgatatcgggcactacgtacgggatatctcggcgtacgaggaactggtgtctaaactgaatctgctggtagaagatgagcttaaacagattgcggaaaacatagaatccattaaccagaataaggctccactgaagtatatcggaaactatgctatcctagaccaccttggatccggcgccttcggttgcgtctacaaggtccgtaaacattccggccagaaccttttagctatgaaggaagtgaacctgcacaatcccgccttcgggaaagacaagaaggacagggactcttcagttaggaatattgtaagtgagctgacgatcattaaggagcagctctaccatccaaatatcgtgcgctattacaagactttccttgaaaatgatcgactgtacatcgttatggagctgattgagggcgcccctctgggagagcacttcagctcactaaaggaaaagcatcatcatttcaccgaggaaagactatggaagatctttattcaattatgtctggccctccggtacctgcacaaggagaaacggatcgttcaccgcgaccttactccgaacaatatcatgctcggtgataaggacaaagtcacagtatcatgtctgaaatgcgccgcgccactgcccagcttatcatgttcatgcagcggacatattaagcgtgccggtagttcgtttgcgttttgttaccattggaagctaccagacgctagccaggaggccaatgcgatcatggtcccggtgcagcccgcagaaccatag

SEQ ID NO: 261622 - DNA, 2139 bp, Artificial Sequence
  derived and/or modified sequence
atgccagaccaggacaagaaggtgaagaccacagagaagagcacagacaagcagcaggagatcaccatccgggactacagcgacctgaagaggctgcgctgcctgctgaatgtgcagagcagcaagcagcagctgcctgccatcaactttgacagcgcccagaacagcatgaccaagtctgagcccgccatccgggccggcggccaccgggcccggggccagtggcatgagagcacagaagctgtggagctggagaacttcagcatcaactacaagaatgaaagaaacttcagcaagcacccccagaggaagctgttccaggagatcttcaccgccctggtgaagaacagactcatcagccgggagtgggtgaacagagcccccagcatccacttcctgcgggtgctgatctgcctgcggctgctgatgagggacccctgctaccaggagatcctgcacagcctgggcggcatcgagaacctggcccagtacatggagatcgtggccaatgagtacctgggctatggagaggagcagcacacagtggacaagctggtgaacatgacctacatcttccagaagctggccgctgtgaaggaccagcgggagtgggtgaccaccagcggggcccacaagaccctggtgaacctgctgggcgcccgggacaccaacgtgctgctgggcagcctgctggccctggccagcctggccgagagccaggagtgccgggagaagatcagcgagctgaacatcgtggagaacctgctgatgatcctgcacgagtatgacctgctgagcaagaggctgacagctgagctgctgcggctgctgtgtgccgagccccaggtgaaggagcaggtgaagctgtatgagggcatccctgtgctgctgagcctgctgcacagcgaccacctgaagctgctgtggagcatcgtgtggatcctggtgcaggtgtgtgaggaccctgagacctctgtggagatccgcatctggggcggcatcaagcagctgctgcacatcctgcagggcgacaggaactttgtgtctgaccacagcagcatcggcagcctgagcagcgccaatgctgctggccgcatccagcagctgcacctgtctgaggacctgagcccccgggagatccaggagaacaccttcagcctgcaggccgcctgctgtgccgccctgacagagctggtgctgaatgacaccaatgcccaccaggtggtgcaggagaatggagtgtacaccatcgccaagctgatcctgcccaacaagcagaagaatgctgccaagagcaacctgctgcagtgctacgccttccgggccctgcgcttcctgttctccatggagaggaaccggcccctcttcaagaggctcttccccacagacctgtttgagatcttcattgatattggccactacgtgcgggacatcagcgcctatgaggagctggtgtccaagctgaacctgctggtggaggatgagctgaagcagattgctgaaaatattgagagcatcaaccagaacaaggcccccctgaagtacatcggcaactatgccatcctggaccacctgggcagcggggccttcggctgtgtgtacaaggtgaggaagcacagcggccagaacctgctggccatgaaggaggtgaacctgcacaacccagccttcggcaaggacaagaaggaccgggacagctctgtgagaaatattgtgtctgagctgaccatcatcaaggagcagctgtaccaccccaacatcgtgcgctactacaagaccttcctggagaatgaccggctgtacatcgtgatggagctgattgaaggagcccccctgggggagcacttcagcagcctgaaggagaagcaccaccacttcacagaggagcggctgtggaagatcttcatccagctgtgcctggccctgcgctacctgcacaaggagaagagaattgtgcaccgggacctgacccccaacaacatcatgctgggggacaaggacaaggtgacagtgacagactttggcctggccaagcagaagcaggagaacagcaagctgacctctgtggtgggcaccatcctgtacagctgtgtgcagcacctgtacctgcggagccctgccccagccctggccacctag

SEQ ID NO: 261623 - DNA, 2178 bp, Artificial Sequence
  derived and/or modified sequence
atgccagaccaggacaagaaggtgaagaccacagagaagagcacagacaagcagcaggagatcaccatccgggactacagcgacctgaagaggctgcgctgcctgctgaatgtgcagagcagcaagcagcagctgcctgccatcaactttgacagcgcccagaacagcatgaccaagtctgagcccgccatccgggccggcggccaccgggcccggggccagtggcatgagagcacagaagctgtggagctggagaacttcagcatcaactacaagaatgaaagaaacttcagcaagcacccccagaggaagctgttccaggagatcttcaccgccctggtgaagaacagactcatcagccgggagtgggtgaacagagcccccagcatccacttcctgcgggtgctgatctgcctgcggctgctgatgagggacccctgctaccaggagatcctgcacagcctgggcggcatcgagaacctggcccagtacatggagatcgtggccaatgagtacctgggctatggagaggagcagcacacagtggacaagctggtgaacatgacctacatcttccagaagctggccgctgtgaaggaccagcgggagtgggtgaccaccagcggggcccacaagaccctggtgaacctgctgggcgcccgggacaccaacgtgctgctgggcagcctgctggccctggccagcctggccgagagccaggagtgccgggagaagatcagcgagctgaacatcgtggagaacctgctgatgatcctgcacgagtatgacctgctgagcaagaggctgacagctgagctgctgcggctgctgtgtgccgagccccaggtgaaggagcaggtgaagctgtatgagggcatccctgtgctgctgagcctgctgcacagcgaccacctgaagctgctgtggagcatcgtgtggatcctggtgcaggtgtgtgaggaccctgagacctctgtggagatccgcatctggggcggcatcaagcagctgctgcacatcctgcagggcgacaggaactttgtgtctgaccacagcagcatcggcagcctgagcagcgccaatgctgctggccgcatccagcagctgcacctgtctgaggacctgagcccccgggagatccaggagaacaccttcagcctgcaggccgcctgctgtgccgccctgacagagctggtgctgaatgacaccaatgcccaccaggtggtgcaggagaatggagtgtacaccatcgccaagctgatcctgcccaacaagcagaagaatgctgccaagagcaacctgctgcagtgctacgccttccgggccctgcgcttcctgttctccatggagaggaaccggcccctcttcaagaggctcttccccacagacctgtttgagatcttcattgatattggccactacgtgcgggacatcagcgcctatgaggagctggtgtccaagctgaacctgctggtggaggatgagctgaagcagattgctgaaaatattgagagcatcaaccagaacaaggcccccctgaagtacatcggcaactatgccatcctggaccacctgggcagcggggccttcggctgtgtgtacaaggtgaggaagcacagcggccagaacctgctggccatgaaggaggtgaacctgcacaacccagccttcggcaaggacaagaaggaccgggacagctctgtgagaaatattgtgtctgagctgaccatcatcaaggagcagctgtaccaccccaacatcgtgcgctactacaagaccttcctggagaatgaccggctgtacatcgtgatggagctgattgaaggagcccccctgggggagcacttcagcagcctgaaggagaagcaccaccacttcacagaggagcggctgtggaagatcttcatccagctgtgcctggccctgcgctacctgcacaaggagaagagaattgtgcaccgggacctgacccccaacaacatcatgctgggggacaaggacaaggtgacagtgtcctgcctgaagtgtgccgcccccctgcccagcctgagctgcagctgcagcggccacatcaagagagctggcagcagctttgccttctgctaccactggaagctgcctgatgccagccaggaggccaatgccatcatggtgcctgtgcagcctgctgagccctag

SEQ ID NO: 261624 - DNA, 2139 bp, Artificial Sequence
  derived and/or modified sequence
atgcccgaccaggacaagaaggtgaagaccaccgagaagagcaccgacaaacagcaggagattactataagggactactccgacttgaagcggctgcggtgtttgctcaatgtacagtccagcaagcaacagctccccgctattaacttcgatagcgcccaaaattctatgacaaaatcagaaccagctatcagggctggaggccatcgggcccgaggacaatggcacgagtcaaccgaggcggtggagctagagaatttctctattaactataagaatgagcggaacttctctaaacacccccaacgtaagttgttccaggaaatctttactgcactcgtgaagaaccggcttatctcacgggagtgggtcaacagagctccttcaatccactttctccgtgtgctgatttgtctgagattactgatgagggatccatgttaccaggaaatactgcactccctgggcgggatcgaaaaccttgctcaatacatggagattgtagctaatgaatatctggggtacggcgaggagcagcataccgtggacaaactggtcaacatgacctatattttccaaaaactcgccgccgttaaagaccaaagggagtgggtgactacatctggagctcacaagacactcgttaatcttttaggggcgcgggacacaaacgtgctgctgggtagtcttcttgcacttgccagtcttgcagagagccaggagtgcagagagaagatctcagagctcaacatcgtagagaatctactcatgatcctgcacgaatacgatctgctgtctaagcgcttaaccgcagaactcctgaggcttctctgcgctgagcctcaggtgaaagagcaagtgaagctttacgaagggatcccagtgctactgtctctcctgcattcagatcatctgaagctcctatggagcatcgtgtggattttggtgcaggtgtgtgaggacccagagaccagcgttgaaatcagaatctggggagggataaagcagctgctccacatcctccagggggaccggaactttgtcagtgaccattctagcattgggagtctgtcctctgctaatgccgccggccgcatacagcagctccacctatccgaagatctgtccccacgagagatacaggaaaataccttctccctccaggccgcgtgttgcgcagctctcacggagcttgtgctgaatgataccaacgctcaccaagtcgtacaggaaaatggcgtctatactattgccaaattgattctccctaataaacagaaaaacgcggctaagtctaatctccttcaatgttacgcatttcgcgcattacgattccttttcagcatggagaggaacagaccacttttcaaacgccttttcccgactgatctgtttgaaatcttcattgacattggacactacgtgcgcgacataagtgcatacgaagagctggtgagcaaattaaatctgttggtcgaggacgaactgaagcagatagccgaaaacatcgagtcaatcaaccagaacaaagcccccttgaagtacattgggaactatgcaatcctagatcacctggggagcggcgcatttggatgtgtatataaagtccgaaagcatagcggccagaacctgctggctatgaaagaggtgaacttgcataatcctgccttcggcaaagataagaaggatcgcgacagctctgtgaggaacattgtgtccgagttaaccatcatcaaagagcagctgtatcaccctaacatagtgagatactataagaccttcctcgagaacgatcgcttgtacatagtcatggagttgatagagggtgctcctcttggagagcactttagttcccttaaggagaagcatcaccacttcacggaagaacgcctgtggaagattttcatacagctttgtttagctctgcgctacttgcacaaagagaagcgcatagtccatagagatctgactcccaataatatcatgctgggcgacaaggacaaagttaccgtgacagattttgggctggcaaaacagaaacaggaaaattccaaactcacatccgttgtcgggaccattttgtatagctgtgtgcagcatctgtatctgagatctcctgcaccagcgctggcgacctag

SEQ ID NO: 261625 - DNA, 2178 bp, Artificial Sequence
  derived and/or modified sequence
atgcccgaccaggacaagaaggtgaagaccaccgagaagagcaccgataagcagcaggagattaccatccgagactacagcgacttgaaaaggctgcggtgtctgctgaacgtgcagagctccaagcagcagttgcccgcaattaattttgattccgcgcagaattcaatgaccaagagtgagcccgcaatccgtgcagggggccacagggcccgggggcaatggcacgagagcactgaggccgtggagctcgagaacttcagtattaattataaaaatgagagaaatttttccaaacatccccaacgcaagctcttccaggaaatttttactgcacttgtgaaaaatcggctgatttcgcgagagtgggtgaaccgtgctccctcaatccatttccttcgggttctaatctgcctgcgcctcctgatgagggacccctgctaccaggagattcttcattcgctaggaggcatcgagaacctggcacaatatatggaaattgtagctaacgagtacctggggtatggcgaggaacaacatactgtagacaaactggtaaacatgacctacatattccaaaagctcgctgccgtgaaggatcaaagggaatgggtaaccacttcaggcgcccataaaaccttggtcaacctgctgggggcccgagatacgaatgtgctgttggggagtctcttggctttggcatccctcgctgaatctcaggaatgcagggaaaaaatttctgaactgaatattgtggaaaacctgctgatgatcttgcacgaatacgatttgctaagcaagcggttgacggccgaactgcttcgactgctgtgcgccgaacctcaggtgaaggaacaggtaaaactctacgaaggaattcccgtgttgctctccctgctgcattcagatcacctaaaactgctttggagtattgtttggatattggttcaggtgtgtgaggatcctgagaccagtgtggaaattaggatttggggtggaattaaacagcttttacacatcctgcagggagatcgcaatttcgtgtcagaccactcttccattggcagtctcagctcagcgaatgcagcaggaaggattcagcaactgcacttatccgaggacctcagtccccgtgaaatacaggaaaacacattctctctgcaggcagcctgctgtgcagccctcactgagctagtgctgaatgacaccaatgcgcatcaagtcgtgcaggagaacggagtctacacaatagcaaagctgattctccccaataaacaaaagaacgccgccaaatctaacctactccagtgttacgcctttagagcgctgaggttcctgttttccatggaaagaaatcgccctctgtttaagcgactgttcccaaccgatctgtttgagatattcatcgatatcggacattacgtgcgggacatcagcgcctacgaagagctggtctccaagctgaacctgctggtcgaagacgagttgaaacagatcgctgaaaacatcgagtctattaatcaaaataaggccccccttaaatacattggcaattacgctattttagatcacctggggagcggggcgttcggatgcgtgtataaggtccgtaagcacagcggccaaaacttgcttgccatgaaagaggtgaaccttcacaaccctgcgttcggtaaggacaagaaggacagggattctagtgtgcgaaatatagtttcagagctgaccatcatcaaggaacagctgtatcaccctaatatcgtgcggtattacaaaacttttctggaaaatgacagactgtacatcgtcatggagctgatcgagggagctccactcggtgagcatttttctagcctgaaggagaagcatcaccactttaccgaggagcgactgtggaagatcttcatacagttgtgtcttgctctgaggtacttgcacaaagagaagcggatcgtacacagagatttaacccctaacaacatcatgctaggcgataaggacaaagtgacagtgagctgtctaaaatgcgctgctcccctgccatctttgtcttgcagctgcagcggacatatcaagagagcagggtcctccttcgctttctgctaccattggaaactgccagacgcatcccaggaagctaacgcaataatggtcccggtgcaaccagctgagccatag

SEQ ID NO: 261626 - DNA, 2638 bp, Artificial Sequence
  derived and/or modified sequence
ctggaggaggatttgattggaaaaccaacggtgcagctggccgcggtgtccctgaggttgaggggaccgggaataggctggggggaggacgggacgggctgagactggacgggacccccggtctgcagcagcaggtgacagcagcagggacaatgataaggagattggcctgaaggagggaccgtccctcccgcgcgaaaagtcagaaatggccaatgaagcttttgcttataaaaggaatgcgatgttaattctggggcattgatgttttacaatgcctgatcaagataaaaaggtgaagaccacagaaaaatcaactgataaacagcaagaaatcaccatcagggactattcagatcttaaaagacttcggtgccttttgaacgtccaatcaagcaaacaacagcttccagccattaacttcgatagtgcccaaaatagcatgacgaagtctgagcccgccatcagggcgggtggacacagagctcggggtcagtggcatgaatccacagaagctgttgaacttgaaaattttagtataaactacaagaatgagagaaatttcagcaaacatcctcagcgtaaactatttcaggagatctttaccgccttggtgaaaaatagactcataagcagagagtgggttaatcgagccccatctattcattttctgagagtgttaatctgtctgaggctactaatgagggatccatgttatcaggaaatactccatagcttgggtgggattgaaaacctagctcagtatatggagattgtagccaatgagtacctcggctatggagaagagcagcacactgtggacaagctggtcaacatgacatatatttttcaaaaacttgctgcagtcaaagatcaaagagaatgggtcaccacaagtggagcccacaagacattagtaaatttacttggtgcccgagatactaatgttctattgggttcccttctggctctggctagtttagcagaaagtcaagaatgtagggagaagataagtgaactcaacattgtagaaaatctgttgatgattttacatgaatatgacttgctttctaaaagactaacagcggagttgctgcgcctactttgtgcagagccccaggtgaaagagcaggtgaagctctatgaggggataccggtcctcctcagtctgctccactctgaccacttgaagctcctctggagcattgtctggattctggtacaggtttgtgaggaccctgagaccagcgtggaaattcgcatttggggaggcatcaaacagcttcttcatattttacaaggagacagaaattttgtttctgatcactcctccattggaagcctgtccagtgcaaatgctgcaggccgaatccagcagcttcatttatcagaagacttgagccctagggaaatacaagaaaatactttctcacttcaagcagcctgctgtgctgccctcactgagctggtgctcaatgacaccaatgcccaccaggtggttcaggaaaatggtgtatatacaatagcaaaattaattttaccaaataagcaaaagaatgcagcaaaaagtaatctattacagtgttatgctttcagagccttgagatttctcttcagtatggaaagaaacagaccactctttaaaagacttttccccacagacttgtttgagatcttcattgacatagggcattatgtacgtgatatcagtgcttatgaagaattggtatccaagctgaatttattagtggaggatgaactgaagcaaattgctgaaaatattgaaagcattaatcagaacaaagctcctttgaaatatataggcaactatgcaattttggatcatcttggaagtggagcttttggctgtgtttacaaggttagaaagcatagtggtcaaaatcttttagcaatgaaagaggtcaatttacataacccagcatttggaaaggataagaaagatcgagacagcagcgtaaggaatattgtttctgaattaacaataattaaagagcagctttatcatcccaacattgtacgttattacaaaacatttctggaaaatgataggttgtacatagttatggagctgatagaaggagccccgcttggagagcatttcagttctttgaaggaaaaacatcaccattttactgaagaaagactatggaaaatatttatacagctgtgcttagctcttcgatacttacacaaggagaagaggattgtccatagagatctgacaccaaacaacattatgttgggggataaggacaaagtaaccgttactgactttggcctggcaaagcaaaaacaagaaaacagtaaactcacctctgtggttggaacaatcctgtattcttgtgtgcagcacctctaccttcgctctcctgctcctgctctggccacataaaacgtgctggctcctcctttgccttctgctatcattggaagcttcctgatgcctcccaagaagcaaatgccatcatggttcctgtacagcctgcagaaccgtgagccaattaaacctctcttctttctaaattacctagtctcaggtatttctttgtagtagtgcaagaacggattcatacactctttaaatgtgataaacaaaataaagtacaatccttatttc

SEQ ID NO: 261627 - DNA, 2452 bp, Artificial Sequence
  derived and/or modified sequence
ctggaggaggatttgattggaaaaccaacggtgcagctggccgcggtgtccctgaggttgaggggaccgggaataggctggggggaggacgggacgggctgagactggacgggacccccggtctgcagcagcaggtgacagcagcagggacaatgataaggagattggcctgaaggagggaccgtccctcccgcgcgaaaagtcagaaatggccaatgaagcttttgcttataaaaggaatgcgatgttaattctggggcattgatgttttacaatgcctgatcaagataaaaaggtgaagaccacagaaaaatcaactgataaacagcaagaaatcaccatcagggactattcagatcttaaaagacttcggtgccttttgaacgtccaatcaagcaaacaacagcttccagccattaacttcgatagtgcccaaaatagcatgacgaagtctgagcccgccatcagggcgggtggacacagagctcggggtcagtggcatgaatccacagaagctgttgaacttgaaaattttagtataaactacaagaatgagagaaatttcagcaaacatcctcagcgtaaactatttcaggagatctttaccgccttggtgaaaaatagactcataagcagagagtgggttaatcgagccccatctattcattttctgagagtgttaatctgtctgaggctactaatgagggatccatgttatcaggaaatactccatagcttgggtgggattgaaaacctagctcagtatatggagattgtagccaatgagtacctcggctatggagaagagcagcacactgtggacaagctggtcaacatgacatatatttttcaaaaacttgctgcagtcaaagatcaaagagaatgggtcaccacaagtggagcccacaagacattagtaaatttacttggtgcccgagatactaatgttctattgggttcccttctggctctggctagtttagcagaaagtcaagaatgtagggagaagataagtgaactcaacattgtagaaaatctgttgatgattttacatgaatatgacttgctttctaaaagactaacagcggagttgctgcgcctactttgtgcagagccccaggtgaaagagcaggtgaagctctatgaggggataccggtcctcctcagtctgctccactctgaccacttgaagctcctctggagcattgtctggattctggtacaggtttgtgaggaccctgagaccagcgtggaaattcgcatttggggaggcatcaaacagcttcttcatattttacaaggagacagaaattttgtttctgatcactcctccattggaagcctgtccagtgcaaatgctgcaggccgaatccagcagcttcatttatcagaagacttgagccctagggaaatacaagaaaatactttctcacttcaagcagcctgctgtgctgccctcactgagctggtgctcaatgacaccaatgcccaccaggtggttcaggaaaatggtgtatatacaatagcaaaattaattttaccaaataagcaaaagaatgcagcaaaaagtaatctattacagtgttatgctttcagagccttgagatttctcttcagtatggaaagaaacagaccactctttaaaagacttttccccacagacttgtttgagatcttcattgacatagggcattatgtacgtgatatcagtgcttatgaagaattggtatccaagctgaatttattagtggaggatgaactgaagcaaattgctgaaaatattgaaagcattaatcagaacaaagctcctttgaaatatataggcaactatgcaattttggatcatcttggaagtggagcttttggctgtgtttacaaggttagaaagcatagtggtcaaaatcttttagcaatgaaagaggtcaatttacataacccagcatttggaaaggataagaaagatcgagacagcagcgtaaggaatattgtttctgaattaacaataattaaagagcagctttatcatcccaacattgtacgttattacaaaacatttctggaaaatgataggttgtacatagttatggagctgatagaaggagccccgcttggagagcatttcagttctttgaaggaaaaacatcaccattttactgaagaaagactatggaaaatatttatacagctgtgcttagctcttcgatacttacacaaggagaagaggattgtccatagagatctgacaccaaacaacattatgttgggggataaggacaaagtaaccgttagttgtttaaagtgtgcagcacctctaccttcgctctcctgctcctgctctggccacataaaacgtgctggctcctcctttgccttctgctatcattggaagcttcctgatgcctcccaagaagcaaatgccatcatggttcctgtacagcctgcagaaccgtga

SEQ ID NO: 261628 - DNA, 2139 bp, Artificial Sequence
  derived and/or modified sequence
atgccagaccaagacaaaaaagtgaagaccaccgaaaaatcaacagataagcagcaggagatcacgattagagactattcagatctgaagcgcctgcgttgtttactcaatgttcagagctccaaacaacagctgccagccattaatttcgatagcgctcagaactccatgacgaagtccgaacccgctatacgggctggtggccacagggcacgcggacagtggcacgagtcaactgaggccgtcgagctcgagaacttcagtattaactacaagaatgaacggaatttttcaaagcatccccagagaaaactattccaggagatattcaccgccctcgtgaagaaccgcctcatctcacgagaatgggtgaacagagcccctagtatacatttcctaagggttctcatttgtttgagactgttgatgcgcgatccctgctaccaggagattctgcactctcttggaggaatagaaaatttagcccagtatatggaaatcgttgcgaatgagtacctgggttacggagaggagcagcacacagtggacaaactcgtcaacatgacctatatcttccagaagttggccgcagttaaagatcagagagaatgggtcaccacctctggcgctcacaagacactggtcaatttgctcggcgcacgagacacaaatgtgcttctgggatcattgttagcactggccagcctggccgaatcgcaagaatgcagagaaaaaattagcgaactgaacatcgttgagaacctgctgatgatacttcacgagtacgaccttctatccaaacgcctcaccgcagagctgctgcggcttctgtgtgcagaaccacaagtgaaagaacaagtcaagttatatgagggaatcccagtgctactatccttgctgcactccgatcacttaaaactgttgtggtcaatcgtatggatcctcgtacaggtctgcgaggatcctgagacgagcgtcgaaatccggatttggggcggaataaagcaactgctgcacattctgcagggagacaggaacttcgtgtctgatcacagcagcattggatcattgagctccgctaacgccgctggcagaatccagcagctccacctgtcagaagatttgagtcctcgggagattcaggagaacacgttttccctacaagctgcttgctgcgccgcattgaccgagcttgtcttgaatgacaccaacgcacaccaggtggtgcaagagaatggcgtttacactatcgcaaaactcatcttgcctaataagcagaaaaacgccgctaaatcaaatctattacagtgctacgctttccgagctcttagattcctatttagcatggagaggaacagaccactgttcaaacggctgtttcccaccgatctttttgagatttttattgatataggacattatgttcgggacatctctgcttacgaagagttagtctccaagctgaacctcttagtcgaggatgaactaaaacagatcgccgagaacatcgagtccatcaatcaaaataaagccccactgaagtacataggcaattacgccatactcgaccatttaggctcaggcgcatttggctgcgtatataaagttcgaaaacatagcgggcaaaacttgctggcgatgaaggaagtgaatctgcacaatcccgcatttggaaaagataaaaaggacagagattcgtcggtgagaaatattgtgtccgaactgactatcatcaaagaacaactctatcatcctaacatcgtacgttactacaagacatttttagaaaacgatcgtctctatatcgttatggagctgatcgagggcgcaccactcggggaacatttttcctccctcaaggaaaagcatcatcacttcacggaagaacgattgtggaagatctttatccaactctgtctcgccctgcgctatttgcataaggaaaaacggattgtccaccgtgacctaactcccaacaatatcatgttaggggataaggacaaagtgacagtgactgacttcggacttgctaaacagaaacaagaaaattccaagctcacttccgtggtagggacaatcctatacagttgtgttcagcatttatatctccggtcccccgcacccgctctcgctacttag

SEQ ID NO: 261629 - DNA, 2178 bp, Artificial Sequence
  derived and/or modified sequence
atgccagatcaggacaagaaggtcaagaccaccgagaaatctaccgacaagcagcaggaaatcaccattagagattacagcgaccttaagcgcttacgatgcctgcttaatgttcagagcagcaagcagcagctaccagccataaactttgactccgctcagaactctatgactaaaagtgagccagctatccgtgccggaggtcatcgtgctagaggccagtggcatgagtccactgaagccgtggagctggagaacttttccattaattacaaaaacgaacggaattttagtaagcatcctcagcgcaaactgtttcaggagatctttaccgccctcgtgaagaaccggcttatctcccgagagtgggttaatcgagctccatcaatccacttcctgcgggtgctcatttgtttgaggctcctaatgcgcgatccatgctatcaggagatactgcactcgctgggtggaatagagaacctggctcagtacatggagatcgtggcaaatgagtacttgggctacggagaagagcagcacacggtggataaattggtcaacatgacatacatcttccagaagcttgcggctgtcaaagatcaaagagaatgggtaacaacttccggcgctcataagaccctggttaaccttcttggggctcgggataccaatgtactcctaggctcactcctggctctggcttcattggcagagagccaggagtgtcgagaaaagatttctgaacttaatatagtagagaacttgctaatgatcttgcacgagtacgatttactgtctaagcggcttacagctgaactcctgcgcctgctttgcgctgaacctcaagttaaagaacaggtcaaactgtacgaaggcatcccagttctcctcagcctcctccattcagaccacctgaaactgctgtggtccatcgtttggatactggtacaggtgtgtgaggacccagagacatccgttgagatccggatctgggggggaatcaagcagctgctccacattctccagggtgataggaacttcgtctctgatcattcatccataggtagcctgtcaagcgctaatgctgccggaaggatacagcagctgcacctctccgaagaccttagcccgcgtgagattcaggagaacactttcagtctgcaggctgcctgctgcgctgctctcaccgaactggtacttaacgacactaacgctcaccaggtggtccaggaaaatggagtctatacgatagccaagctgattctgccaaacaaacagaaaaacgccgctaagtcaaatcttttacagtgttatgccttccgggctctccgcttcctctttagcatggagaggaaccggcctctgtttaagaggttatttcctaccgatctcttcgagatatttattgatatcgggcactacgtgagggatatcagcgcgtatgaagagttagtcagtaagctgaatctgctggtcgaggatgagctaaaacagattgccgaaaatatcgagtccatcaaccagaacaaagcccctctaaaatacattggaaactacgcgattttggaccatctggggtccggcgcatttggatgtgtctacaaagtcaggaagcacagtggtcaaaatctgcttgctatgaaagaggtgaaccttcataaccctgcttttggtaaagataagaaggatcgcgactcaagcgtccggaatatcgtttctgaacttacgatcattaaagagcaattgtaccacccgaatattgtgcgatattacaagacctttctggagaacgaccgcttgtatatcgtcatggaacttattgagggcgctcctttaggggagcatttttcttccttgaaggagaagcaccatcactttactgaagagcgcctctggaaaatttttattcagctgtgcctcgccctgcggtacctccacaaagagaagcgtatcgtgcaccgggacctgaccccaaacaacatcatgctcggggacaaggacaaagttacagtgtcatgtctaaaatgcgcagcaccgcttccatctctgtcttgtagttgcagcggccacattaagagagcaggttcatcctttgcattttgctatcactggaaactccctgacgctagccaggaagcgaatgccatcatggttcccgtgcaaccagccgaaccttag

SEQ ID NO: 261630 - protein, 639 aa, Artificial Sequence
  derived and/or modified sequence
MDRVLLRWISLFWLTAMVEGLQVTVPDKKKVAMLFQPTVLRCHFSTSSHQPAVVQWKFKSYCQDRMGESLGMSSTRAQSLSKRNLEWDPYLDCLDSRRTVRVVASKQGSTVTLGDFYRGREITIVHDADLQIGKLMWGDSGLYYCIITTPDDLEGKNEDSVELLVLGRTGLLADLLPSFAVEIMPEWVFVGLVLLGVFLFFVLVGICWCQCCPHSCCCYVRCPCCPDSCCCPQALYEAGKAAKAGYPPSVSGVPGPYSIPSVPLGGAPSSGMLMDKPHPPPLAPSDSTGGSHSVRKGYRIQADKERDSMKVLYYVEKELAQFDPARRMRGRYNNTISELSSLHEEDSNFRQSFHQMRSKQFPVSGDLESNPDYWSGVMGGSSGASRGPSAMEYNKEDRESFRHSQPRSKSEMLSRKNFATGVPAVSMDELAAFADSYGQRPRRADGNSHEARGGSRFERSESRAHSGFYQDDSLEEYYGQRSRSREPLTDADRGWAFSPARRRPAEDAHLPRLVSRTPGTAPKYDHSYLGSARERQARPEGASRGGSLETPSKRSAQLGPRSASYYAWSPPGTYKAGSSQDDQEDASDDALPPYSELELTRGPSYRGRDLPYHSNSEKKRKKEPAKKTNDFPTRMSLVV

SEQ ID NO: 261631 - DNA, 1920 bp, Artificial Sequence
  derived and/or modified sequence
atggacagagtgctgctgagatggatcagcctgttctggctgaccgccatggtggagggcctgcaggtgaccgtgcccgacaagaagaaggtggccatgctgttccagcccaccgtgctgagatgccacttcagcaccagcagccaccagcccgccgtggtgcagtggaagttcaagagctactgccaggacagaatgggcgagagcctgggcatgagcagcaccagagcccagagcctgagcaagagaaacctggagtgggacccctacctggactgcctggacagcagaagaaccgtgagagtggtggccagcaagcagggcagcaccgtgaccctgggcgacttctacagaggcagagagatcaccatcgtgcacgacgccgacctgcagatcggcaagctgatgtggggcgacagcggcctgtactactgcatcatcaccacccccgacgacctggagggcaagaacgaggacagcgtggagctgctggtgctgggcagaaccggcctgctggccgacctgctgcccagcttcgccgtggagatcatgcccgagtgggtgttcgtgggcctggtgctgctgggcgtgttcctgttcttcgtgctggtgggcatctgctggtgccagtgctgcccccacagctgctgctgctacgtgagatgcccctgctgccccgacagctgctgctgcccccaggccctgtacgaggccggcaaggccgccaaggccggctacccccccagcgtgagcggcgtgcccggcccctacagcatccccagcgtgcccctgggcggcgcccccagcagcggcatgctgatggacaagccccaccccccccccctggcccccagcgacagcaccggcggcagccacagcgtgagaaagggctacagaatccaggccgacaaggagagagacagcatgaaggtgctgtactacgtggagaaggagctggcccagttcgaccccgccagaagaatgagaggcagatacaacaacaccatcagcgagctgagcagcctgcacgaggaggacagcaacttcagacagagcttccaccagatgagaagcaagcagttccccgtgagcggcgacctggagagcaaccccgactactggagcggcgtgatgggcggcagcagcggcgccagcagaggccccagcgccatggagtacaacaaggaggacagagagagcttcagacacagccagcccagaagcaagagcgagatgctgagcagaaagaacttcgccaccggcgtgcccgccgtgagcatggacgagctggccgccttcgccgacagctacggccagagacccagaagagccgacggcaacagccacgaggccagaggcggcagcagattcgagagaagcgagagcagagcccacagcggcttctaccaggacgacagcctggaggagtactacggccagagaagcagaagcagagagcccctgaccgacgccgacagaggctgggccttcagccccgccagaagaagacccgccgaggacgcccacctgcccagactggtgagcagaacccccggcaccgcccccaagtacgaccacagctacctgggcagcgccagagagagacaggccagacccgagggcgccagcagaggcggcagcctggagacccccagcaagagaagcgcccagctgggccccagaagcgccagctactacgcctggagcccccccggcacctacaaggccggcagcagccaggacgaccaggaggacgccagcgacgacgccctgcccccctacagcgagctggagctgaccagaggccccagctacagaggcagagacctgccctaccacagcaacagcgagaagaagagaaagaaggagcccgccaagaagaccaacgacttccccaccagaatgagcctggtggtgtag

SEQ ID NO: 261632 - DNA, 1920 bp, Artificial Sequence
  derived and/or modified sequence
atggaccgggttctcctccgttggatctctttgttttggttaactgcgatggtggagggactccaggtgaccgttcccgacaagaagaaagttgccatgttattccaaccaacggtccttcggtgtcatttttctacttcttctcatcaaccagctgtggtgcagtggaaatttaaatcttattgccaggatagaatgggagaatctctcggaatgtcttcgactagagcacagagcctgtcaaaacgcaacctcgagtgggacccgtacctcgattgcctggatagtcgccgcactgtccgggttgttgccagcaaacaagggtccactgtgaccctgggcgatttctatagaggacgagagattacgatcgtccacgatgccgatctgcagatcgggaagctaatgtggggcgactccggcctgtattattgtatcattactactcctgacgacctggaaggtaagaatgaggacagcgtggaattactagttctgggtagaaccgggctgctcgccgacctgctaccgtccttcgcagtggaaattatgcccgaatgggtctttgttgggctggttctgttgggagtgttcctcttcttcgttctggttgggatctgctggtgccagtgttgcccacatagttgttgctgctacgttaggtgtccttgctgtccagattcttgttgctgtcctcaggctctgtacgaggcaggcaaggcggctaaggccggataccccccatctgtgagtggagttccagggccttacagcataccttcagtgcctctggggggtgctcccagttctgggatgctgatggacaagccccacccaccacctttagctcctagcgattcaacgggcggatctcattcagtgcggaaaggctatcgtatacaagctgacaaggaaagagactccatgaaggtgctctactatgttgagaaagagcttgctcaatttgatccagctcggcgcatgagaggcaggtataacaacaccatatccgagttgtctagcttgcatgaagaagactcgaattttaggcaaagctttcaccaaatgcgtagcaagcagttccctgtgtctggagatttggaatcaaacccggattattggagcggcgtgatgggcgggtcttcaggggcctcgcgaggaccaagcgccatggagtacaataaagaagacagagaatcttttaggcactcccagccaaggtccaaatctgaaatgctgtcccgtaagaactttgcaactggcgtgcctgctgtgagcatggacgagttagccgccttcgctgactcctacggacagcggcctaggcgcgcggatggcaacagtcacgaagcccgtgggggaagtagattcgaaaggagcgaatctcgagcgcattcgggcttctaccaagatgattcattggaagagtactacgggcaaaggagtcgaagcagggagccgctcactgacgctgaccgaggctgggccttcagcccggctcgacgacggcccgcagaggacgcgcacctacctaggttggtgagtcgaactcccggaacagccccaaagtacgatcacagctacctggggagcgctagggagcgccaggctcgcccagagggggcgtctagagggggcagcctcgaaactccctcaaaacggtcagcccagttgggaccgcgctcagcctcgtattatgcctggagcccacctgggacttacaaagccggaagtagccaagacgaccaggaggatgcctctgatgacgctttacctccctattctgagctggagctgacgaggggaccttcctacaggggaagggacctgccctaccacagcaattccgaaaagaagcgcaagaaagagcccgcgaaaaaaacaaatgattttccgactcgaatgtcattagtggtctag

SEQ ID NO: 261633 - DNA, 2572 bp, Artificial Sequence
  derived and/or modified sequence
gttccagccatttcccactttcctcactccgtaattcggctgggaagttggggaagatggatagggtcttgctgaggtggatttctctcttctggctaacagccatggtcgaaggccttcaggtcacagtgcccgacaagaagaaggtggccatgctcttccagcccactgtgcttcgctgccacttctcaacatcctcccatcagcctgcagttgtgcagtggaagttcaagtcctactgccaggatcgcatgggagaatccttgggcatgtcctctacccgggcccaatctctcagcaagagaaacctggaatgggacccctacttggattgtttggacagcaggaggactgttcgagtagtagcttcaaaacagggctcgactgtcaccctgggagatttctacaggggcagagagatcacgattgttcatgatgcagatcttcaaattggaaagcttatgtggggagacagcggactctattactgtattatcaccaccccagatgacctggaggggaaaaatgaggactcagtggaactgctggtgttgggcaggacagggctgcttgctgatctcttgcccagttttgctgtggagattatgccagagtgggtgtttgttggcctggtgctcctgggcgtcttcctcttcttcgtcctggtggggatctgctggtgccagtgctgccctcacagctgctgctgctatgtccgctgcccatgctgcccagattcctgctgctgccctcaagccttgtatgaagcagggaaagcagcaaaggccgggtaccctccctctgtctccggtgtccccggcccttactccatcccctctgtccctttgggaggagccccctcatctggcatgctgatggacaagccgcatccacctcccttggcaccaagtgactccactggaggaagccacagtgttcgcaaaggttaccggatccaggctgacaaagagagagactccatgaaggtcctgtactatgttgagaaggagctggctcagtttgatccagccagaaggatgagaggcagatataacaacaccatctcagaactcagctccctacatgaggaggacagcaatttccgccagtctttccatcagatgagaagcaagcagttccctgtgtctggggacttggagagcaatcctgactattggtcaggtgtcatgggaggcagcagtggggcaagccgcgggccctcagccatggagtataacaaagaggatcgagagagcttcaggcacagccagccgcgctccaagtcggagatgctgtcgcggaagaacttcgccacgggggtgccggccgtttccatggacgagctggcggccttcgctgactcctacggccagcggccccgccgggcagacggcaacagtcacgaggcgcggggcgggagccgcttcgagcgctcggagtcgcgggcgcacagcggcttctaccaggacgactccttggaggagtactacggtcagcgcagccgcagccgcgagcccctgaccgatgctgaccgcggctgggccttcagccccgcgcgccgcagacccgccgaggacgcgcacctgccgcggctggtgagccgcacgccaggcaccgcacccaaatacgaccactcgtacctgggcagcgcgcgggagcgccaggcgcggcccgagggcgccagccgcggtggcagcctggagacgccatccaagcggagcgcgcagctcggcccgcgcagcgcctcctactacgcttggtcgccgcccggcacctacaaggccggctcgtcgcaggacgaccaggaggacgcgtccgacgacgcgctgccgccctacagcgagctggagctgacccgcggcccgtcctaccgcggccgcgacctgccctaccacagcaactcggagaagaagaggaaaaaggagcccgccaagaaaaccaatgactttccaaccaggatgtcccttgtggtctgatgttgtcaacatttctctggataatgagaaatcagacatggactacggggacaagacacaaatctaagaaccagcaggcccaggaccttctctggccatcaccttggaagatttgctgatctctgctttggcaagggatggcaggcagcctttaagggaggctgatttcaaacctctgtgcccatctaactagtttgagaagcttaccaagaaagcaagaatgtgtgagaacattcctacatacagagtttctcaactatagcgtttatcctgcccagcctcctcccttaacagaaccaggactccatttgcaattctgaaagagagttagctctggactgctaaactccagaaattgcctatgcctacaatatgcttttctatacctcctgtgctatacttagagacagaagaatttattactactattagaaggccttcttctgacaagggaagatagcttcaagtcaaaatataccttttatccccatcactttacagtcactagtcaatgactgttgttacactaaaatcaaaaggcctttggtgagctcagtgacagtgacctctgggacaatcacagaaatgacttcact

SEQ ID NO: 261634 - DNA, 1920 bp, Artificial Sequence
  derived and/or modified sequence
atggacagagtgctgctgcgctggatcagcctcttctggctgacagccatggtggagggcctgcaggtgacagtgcctgacaagaagaaggtggccatgctgttccagcccaccgtgctgcgctgccacttcagcaccagcagccaccagcctgctgtggtgcagtggaagttcaagagctactgccaggacaggatgggagagagcctgggcatgagcagcacccgggcccagagcctgagcaagaggaacctggagtgggacccctacctggactgcctggacagcagaagaacagtgcgggtggtggccagcaagcagggcagcacagtgaccctgggggacttctaccggggccgggagatcaccatcgtgcatgatgctgacctgcagatcggcaagctgatgtggggagacagcggcctgtactactgcatcatcaccaccccagatgacctggagggcaagaatgaagacagcgtggagctgctggtgctgggccgcacaggcctgctggccgacctgctgcccagctttgctgtggagatcatgcctgagtgggtgtttgtgggcctggtgctgctgggcgtcttcctgttctttgtgctggtgggcatctgctggtgccagtgctgcccccacagctgctgctgctacgtgcgctgcccctgctgcccagacagctgctgctgcccccaggccctgtatgaggccggcaaggccgccaaggccggctacccaccttctgtgtctggagtgcccggcccctacagcatccccagcgtgcccctgggcggggcccccagcagcggcatgctgatggacaagccccaccccccacccctggcccccagcgacagcactggaggcagccacagcgtgaggaagggctaccgcatccaggccgacaaggagcgggacagcatgaaggtgctgtactacgtggagaaggagctggcccagtttgatcctgcccggaggatgaggggccgctacaacaacaccatcagcgagctgagcagcctgcacgaggaggacagcaacttccggcagagcttccaccagatgaggagcaagcagtttcctgtgtctggggacctggagagcaacccagactactggagcggcgtgatgggcggcagcagcggggccagccggggccccagcgccatggagtacaacaaggaggaccgggagagcttccgccacagccagcccaggagcaagtctgagatgctgagcaggaagaactttgccaccggggtgcctgctgtgtccatggatgagctggccgcctttgctgacagctatggccagaggccccggcgggcagatggcaacagccatgaggcccggggcggcagcagatttgagaggtctgagagccgggcccacagcggcttctaccaggatgacagcctggaggagtactacggccagaggagccgcagccgggagcccctgacagatgctgaccggggctgggccttctccccagcccggcggcggccagcagaagatgcccacctgccccggctggtgtccaggaccccaggcacagcccccaagtatgaccacagctacctgggcagcgcccgggagcggcaggcccggcctgagggcgccagcagaggaggcagcctggagacccccagcaagaggtctgcccagctgggccccaggtctgccagctactatgcctggagccccccaggcacctacaaggccggcagcagccaggatgaccaggaggatgccagtgatgatgccctgcccccctacagcgagctggagctgacccggggccccagctaccggggccgggacctgccctaccacagcaacagcgagaagaagaggaagaaggagcccgccaagaagaccaatgacttccccaccaggatgagcctggtggtgtag

SEQ ID NO: 261635 - DNA, 1920 bp, Artificial Sequence
  derived and/or modified sequence
atggaccgggtgctgctgcggtggatcagcctgttctggctgaccgccatggtcgagggcctgcaggtgacggtcccggacaagaagaaagtggccatgttgtttcagccaacagtccttcgatgtcacttctcgacaagttcccatcagccagcggtagtacaatggaagttcaaatcgtactgccaggaccgaatgggggagagcctcggcatgagcagcacccgtgctcagagcctgagcaagagaaacttggaatgggacccctaccttgactgcctggattcccggagaaccgtaagagtcgtcgcttccaaacaggggtccactgtgaccctcggagacttttacaggggtcgagaaatcacaatagtccacgacgcagatcttcagatcggaaaactaatgtggggcgatagcggtctctattactgcatcatcacaacccccgatgacctggaaggaaaaaatgaggatagcgttgagctgctagttctcggaaggacggggcttctggccgatttactgccttcattcgccgtggagatcatgccagagtgggtgttcgtgggactagtgctgctgggggtgttcctcttcttcgttctcgttgggatatgttggtgtcagtgttgcccccacagctgctgctgctacgtgcggtgtccatgctgcccggatagttgctgttgtcctcaggcactctatgaggctggcaaggccgcaaaagccggataccctccgagtgtatcaggtgtacctgggccgtactccattccgtccgttccccttgggggagctccctctagcggcatgttgatggacaagccccatccccccccgctggcccccagcgatagtacaggagggtcccactctgtgcggaagggatatcgaatacaggccgacaaggaaagggatagcatgaaggttctatactacgtggaaaaagaactggctcagtttgatccagcccggagaatgagaggacgctacaacaatacgatttccgagctgtcaagtctgcacgaggaggattctaatttccggcaaagcttccatcagatgcgcagcaagcaattccctgtgtcgggcgacctagaaagcaatcccgactactggtccggagttatgggcggatcttctggtgctagccgagggccgagtgctatggagtacaataaggaggatagagagagcttccggcatagccaaccgaggtctaaaagtgagatgctttcccgaaagaacttcgcaacaggcgtccccgcagtcagcatggacgagctggctgcttttgctgactcctacggacagaggcccaggcgggctgacgggaacagtcacgaagcacgcggtgggtcccggtttgaacgaagcgaatctcgagcccattccgggttctaccaggatgactctctggaggaatactatgggcaaagaagtagaagccgcgagccccttacggacgcagaccgaggctgggcattctctccggctcggagacggcctgcagaagatgctcacctgcctcgtctcgtatctcgaacaccaggaactgctccgaaatatgatcactcttacctgggatccgcccgcgagcgccaggcacggcccgaaggggcttcaaggggtgggtcactggagactccaagtaagaggagcgcgcagctcggtccccggagcgcttcatactacgcttggagccctcccgggacgtataaagctggctctagccaggacgaccaggaagatgcatctgacgacgcactcccgccctactcagagctcgaactaaccaggggcccatcctatcgcggtagagatcttccctaccattccaatagtgaaaagaaacggaaaaaagaaccagccaaaaaaacaaacgatttccccacccgaatgagcctagtggtttag

SEQ ID NO: 261636 - DNA, 1920 bp, Artificial Sequence
  derived and/or modified sequence
atggatcgggtcctactgcggtggatttctctcttttggctgaccgcaatggtggagggcctacaggtaacagtccctgataagaagaaggtcgccatgctgttccagccaaccgtgctacggtgccactttagtaccagctcacatcagcccgctgttgtgcagtggaaattcaagagctattgccaggatcgcatgggggagagcctaggaatgagctccacgcgtgcccagagcctatcaaagcgcaacttagaatgggatccgtacttagactgccttgatagccgacggactgttcgggtggtagcaagcaaacaggggtcaacagtcaccctgggcgatttctaccggggtcgggaaatcaccatcgtgcacgatgctgacctccagatcggtaaactaatgtggggggactcgggcttgtactattgtataataacgactccggacgacctggagggtaagaatgaggacagtgtagagttgcttgtactggggcgaaccggcctgctggccgacttattgcccagcttcgccgttgaaattatgcccgaatgggtattcgtgggacttgtccttctcggcgtctttctcttcttcgttctggtgggtatctgctggtgccagtgctgtccccacagttgctgttgttacgttcggtgtccctgctgtcctgactcatgctgttgtcctcaggctctgtatgaggctgggaaagccgctaaggccggttaccctcccagcgtgtctggggtaccaggaccttatagcattccatcagttcccttaggtggcgcaccctcatccgggatgttaatggacaaaccccaccctccaccattggccccttcggattcaacaggcggatcccacagcgtccggaaaggctacaggattcaggctgataaagagcgtgactccatgaaagtgctctattacgtagagaaggaattagctcagttcgaccccgctcgcagaatgcggggaagatataacaatacgataagtgagctaagctctttgcacgaggaagactcgaacttccgccagagtttccaccagatgcgaagcaaacagtttcctgtgagcggagatctggaatctaatcccgattattggtcaggcgtgatgggaggctcctcaggcgcaagccgagggccatcagccatggagtataataaggaggaccgggaatcgttcaggcactcccagcctagaagtaaatcagaaatgctgtccagaaaaaattttgccactggagtcccggctgtttcgatggatgagctggcggcattcgctgatagctatggtcagagaccaaggcgggcagatggaaactcccatgaagccaggggaggaagcaggtttgagcggtccgagagccgggcacattcaggattttatcaagatgactcactcgaggaatactatgggcagcggtccaggagccgagaacctttaaccgatgccgaccgcggttgggcttttagccctgcgagacgacggcctgcggaagatgcccacttaccacggctcgtatcacgcactcctggaactgccccaaagtatgatcactcatatctcggtagtgccagggaacgccaggccagacccgagggagcatccagagggggatcgctcgaaactcctagtaagaggtctgcacagctcgggccaaggtccgccagttattatgcatggagcccaccaggcacatacaaggcgggaagctcacaagacgaccaggaagatgcctccgatgacgcgctccccccatattccgaattggaactaacccggggaccgtcataccgaggtcgcgatctgccctaccatagcaattcagaaaagaagaggaagaaggaaccagcaaaaaaaaccaacgacttccccacgcgcatgtctctcgtggtgtag

SEQ ID NO: 261637 - protein, 198 aa, Artificial Sequence
  derived and/or modified sequence
MLLILLSVALLALSSAQNLNEDVSQEESPSLIAGNPQGPSPQGGNKPQGPPPPPGKPQGPPPQGGNKPQGPPPPGKPQGPPPQGDKSRSPRSPPGKPQGPPPQGGKPQGPPPQGGNKPQGPPPPGKPQGPPAQGGSKSQSARSPPGKPQGPPQQEGNNPQGPPPPAGGNPQQPQAPPAGQPQGPPRPPQGGRPSRPPQ

SEQ ID NO: 261638 - DNA, 396 bp, Artificial Sequence
  derived and/or modified sequence
atgggccccgccgccagacccagaagattcgtgcccggcccccccggcgacgccaccaccctggagctgtacaccaaggtgtgcctgcccagaaagagatggagactgcccctgggcagactggccagaagccccagactgcaggcccccagagtgagagccggcagcagccacagctgcaaggaggccgccaagtacgtgttccagaccttccacggcagcaagctgagcgccagcatcaagagaagcggcgtgagaggcaagagcatcctgggcatcagcatgcagatgaacggccccggcttccagctgagaagcggcttcccccccctgagagccgagctggcccccagccacgccagacccgaggccagcggcagatgccccggcggctag

SEQ ID NO: 261639 - protein, 178 aa, Artificial Sequence
  derived and/or modified sequence
MLLILLSVALLALSSAQNLNEDVSQEESPSLIAGNPQGPSPQGGNKPQGPPPPPGKPQGPPPQGGNKPQGPPPPGKPQGPPPQGDKSRSPRSPPGKPQGPPPQGGKPQGPPAQGGSKSQSARSPPGKPQGPPQQEGNNPQGPPPPAGGNPQQPQAPPAGQPQGPPRPPQGGRPSRPPQ

SEQ ID NO: 261640 - DNA, 785 bp, Artificial Sequence
  derived and/or modified sequence
ggccctgccccgtcggactgcccccagaaagcctcctgccccctgccagtgaagtccttcagtgagcccctccccagccagcccttccctggccccgccggatgtataaatgtaaaaatgaaggaattacattttatatgtgagcgagcaagccggcaagcgagcacagtattatttctccatcccctccctgcctgctccttggcacccccatgctgccttcagggagacaggcagggagggcttggggctgcacctcctaccctcccaccagaacgcaccccactgggagagctggtggtgcagccttcccctccctgtataagacactttgccaaggctctcccctctcgccccatccctgcttgcccgctcccacagcttcctgagggctaattctgggaagggagagttctttgctgcccctgtctggaagacgtggctctgggtgaggtaggcgggaaaggatggagtgttttagttcttgggggaggccaccccaaaccccagccccaactccaggggcacctatgagatggccatgctcaacccccctcccagacaggccctccctgtctccagggcccccaccgaggttcccagggctggagacttcctctggtaaacattcctccagcctcccctcccctggggacgccaaggaggtgggccacacccaggaagggaaagcgggcagccccgttttggggacgtgaacgttttaataatttttgctgaattcctttacaactaaataacacagatattgttataaataaaattgt

SEQ ID NO: 261641 - DNA, 597 bp, Artificial Sequence
  derived and/or modified sequence
atgctgctgatcctgctgagcgtggccctgctggccctgagcagcgcccagaaccttaacgaagatgtcagtcaggaagaaagtccgagcctgatcgctggaaacccacaaggcccctcgcctcaggggggtaataagcctcagggcccgccccctcctcctgggaagccgcagggtcctcctccccaggggggaaacaagccacaggggccgcctccccctggaaaacctcagggacctcccccacaaggcgacaaaagtaggagccccagatcaccgcccggtaagccccagggcccgccgccacagggggggaagccacagggtcctcccccacagggaggaaacaagcctcaggggcctccaccccctggcaagccccagggtcccccagcgcaggggggctcgaagagccagagtgcgcgttccccccccggcaagccgcagggcccccctcagcaggagggaaataacccgcagggcccccccccaccagccggcgggaatccacaacagccacaagccccacccgcaggccagccgcagggcccacccagacctccccagggagggagaccttcgaggcccccacaatag

SEQ ID NO: 261642 - DNA, 597 bp, Artificial Sequence
  derived and/or modified sequence
atgctgttgatcctgctgagcgtcgcgttactggcactgtcttccgcacaaaatcttaacgaagacgtctcacaagaggaatctcccagtctcattgccggaaatccccaaggtccatctccccaggggggtaacaaaccgcagggcccacccccaccacctggcaaaccacagggaccgccaccacaaggaggcaataagccccagggtccgccacctcctggtaaacctcaggggccacctcctcagggagacaagtcaagatccccgcgttccccacctgggaagccacaaggaccgccacctcagggcggtaagccacaaggaccccctccacagggtggtaataagcctcagggacctccacctcccggaaagccccaagggccaccagcgcaaggaggctccaaaagccagtcagccaggtccccaccaggaaagccacagggcccacctcagcaggaaggtaacaatccgcaagggccacctcctcccgcaggtggtaacccgcagcagccacaggcccctcccgcaggtcagccacaaggcccacctcgcccacctcagggtggccgtcccagcaggccaccccagtag

SEQ ID NO: 261643 - DNA, 597 bp, Artificial Sequence
  derived and/or modified sequence
atgctgctgatcctgctgagcgtggccctgctggccctgagcagcgcccagaacctgaacgaggacgtgagccaggaggagagccccagcctgatcgccggcaacccccagggccccagcccccagggcggcaacaagccccagggccccccccccccccccggcaagccccagggcccccccccccagggcggcaacaagccccagggcccccccccccccggcaagccccagggcccccccccccagggcgacaagagcagaagccccagaagcccccccggcaagccccagggcccccccccccagggcggcaagccccagggcccccccccccagggcggcaacaagccccagggcccccccccccccggcaagccccagggcccccccgcccagggcggcagcaagagccagagcgccagaagcccccccggcaagccccagggccccccccagcaggagggcaacaacccccagggcccccccccccccgccggcggcaacccccagcagccccaggccccccccgccggccagccccagggcccccccagacccccccagggcggcagacccagcagacccccccagtag

SEQ ID NO: 261644 - DNA, 537 bp, Artificial Sequence
  derived and/or modified sequence
atgctgctgatcctgctgagcgtggccctgctggccctgagcagcgcccagaacctgaacgaggacgtgagccaggaggagagccccagcctgatcgccggcaacccccagggccccagcccccagggcggcaacaagccccagggccccccccccccccccggcaagccccagggcccccccccccagggcggcaacaagccccagggcccccccccccccggcaagccccagggcccccccccccagggcgacaagagcagaagccccagaagcccccccggcaagccccagggcccccccccccagggcggcaagccccagggcccccccgcccagggcggcagcaagagccagagcgccagaagcccccccggcaagccccagggccccccccagcaggagggcaacaacccccagggcccccccccccccgccggcggcaacccccagcagccccaggccccccccgccggccagccccagggcccccccagacccccccagggcggcagacccagcagacccccccagtag

SEQ ID NO: 261645 - DNA, 1251 bp, Artificial Sequence
  derived and/or modified sequence
atgctgctgatcctgctgagcgtggccctgctggccctgagcagcgcccagaacctgaacgaggacgtgagccaggaggagagccccagcctgatcgccggcaacccccagggcgcccccccccagggcggcaacaagccccagggcccccccagcccccccggcaagccccagggcccccccccccagggcggcaaccagccccagggccccccccccccccccggcaagccccagggcccccccccccagggcggcaacaagccccagggcccccccccccccggcaagccccagggcccccccccccagggcgacaagagcagaagccccagaagcccccccggcaagccccagggcccccccccccagggcggcaaccagccccagggccccccccccccccccggcaagccccagggcccccccccccagggcggcaacaagccccagggcccccccccccccggcaagccccagggcccccccccccagggcgacaacaagagcagaagcagcagaagcccccccggcaagccccagggcccccccccccagggcggcaaccagccccagggccccccccccccccccggcaagccccagggcccccccccccagggcggcaacaagccccagggcccccccccccccggcaagccccagggcccccccccccagggcgacaacaagagccagagcgccagaagcccccccggcaagccccagggcccccccccccagggcggcaaccagccccagggccccccccccccccccggcaagccccagggcccccccccccagggcggcaacaagccccagggcccccccccccccggcaagccccagggcccccccccccagggcggcagcaagagcagaagcagcagaagcccccccggcaagccccagggcccccccccccagggcggcaaccagccccagggccccccccccccccccggcaagccccagggcccccccccccagggcggcaacaagccccagggcccccccccccccggcaagccccagggcccccccccccagggcggcagcaagagcagaagcgccagaagcccccccggcaagccccagggccccccccagcaggagggcaacaacccccagggcccccccccccccgccggcggcaacccccagcagccccaggccccccccgccggccagccccagggcccccccagacccccccagggcggcagacccagcagacccccccagtag

SEQ ID NO: 261646 - protein, 1221 aa, Artificial Sequence
  derived and/or modified sequence
MECALLLACAFPAAGSGPPRGLAGLGRVAKALQLCCLCCASVAAALASDSSSGASGLNDDYVFVTPVEVDSAGSYISHDILHNGRKKRSAQNARSSLHYRFSAFGQELHLELKPSAILSSHFIVQVLGKDGASETQKPEVQQCFYQGFIRNDSSSSVAVSTCAGLSGLIRTRKNEFLISPLPQLLAQEHNYSSPAGHHPHVLYKRTAEEKIQRYRGYPGSGRNYPGYSPSHIPHASQSRETEYHHRRLQKQHFCGRRKKYAPKPPTEDTYLRFDEYGSSGRPRRSAGKSQKGLNVETLVVADKKMVEKHGKGNVTTYILTVMNMVSGLFKDGTIGSDINVVVVSLILLEQEPGGLLINHHADQSLNSFCQWQSALIGKNGKRHDHAILLTGFDICSWKNEPCDTLGFAPISGMCSKYRSCTINEDTGLGLAFTIAHESGHNFGMIHDGEGNPCRKAEGNIMSPTLTGNNGVFSWSSCSRQYLKKFLSTPQAGCLVDEPKQAGQYKYPDKLPGQIYDADTQCKWQFGAKAKLCSLGFVKDICKSLWCHRVGHRCETKFMPAAEGTVCGLSMWCRQGQCVKFGELGPRPIHGQWSAWSKWSECSRTCGGGVKFQERHCNNPKPQYGGLFCPGSSRIYQLCNINPCNENSLDFRAQQCAEYNSKPFRGWFYQWKPYTKVEEEDRCKLYCKAENFEFFFAMSGKVKDGTPCSPNKNDVCIDGVCELVGCDHELGSKAVSDACGVCKGDNSTCKFYKGLYLNQHKANEYYPVVLIPAGARSIEIQELQVSSSYLAVRSLSQKYYLTGGWSIDWPGEFPFAGTTFEYQRSFNRPERLYAPGPTNETLVFEILMQGKNPGIAWKYALPKVMNGTPPATKRPAYTWSIVQSECSVSCGGGYINVKAICLRDQNTQVNSSFCSAKTKPVTEPKICNAFSCPAYWMPGEWSTCSKACAGGQQSRKIQCVQKKPFQKEEAVLHSLCPVSTPTQVQACNSHACPPQWSLGPWSQCSKTCGRGVRKRELLCKGSAAETLPESQCTSLPRPELQEGCVLGRCPKNSRLQWVASSWSECSATCGLGVRKREMKCSEKGFQGKLITFPERRCRNIKKPNLDLEETCNRRACPAHPVYNMVAGWYSLPWQQCTVTCGGGVQTRSVHCVQQGRPSSSCLLHQKPPVLRACNTNFCPAPEKREDPSCVDFFNWCHLVPQHGVCNHKFYGKQCCKSCTRKI

SEQ ID NO: 261647 - protein, 274 aa, Artificial Sequence
  derived and/or modified sequence
MECALLLACAFPAAGSGPPRGLAGLGRVAKALQLCCLCCASVAAALASDSSSGASGLNDDYVFVTPVEVDSAGSYISHDILHNGRKKRSAQNARSSLHYRFSAFGQELHLELKPSAILSSHFIVQVLGKDGASETQKPEVQQCFYQGFIRNDSSSSVAVSTCAGLSGLIRTRKNEFLISPLPQLLAQEHNYSSPAGHHPHVLYKRTAEEKIQRYRGYPGSGRNYPGYSPSHIPHASQSRETEYHHRRLQKQHFCGRRKKCICSQASHRGHLSKV

SEQ ID NO: 261648 - DNA, 1632 bp, Artificial Sequence
  derived and/or modified sequence
agacgctcacaccgacacagacagacgcacagacgggcgggcagacaccgacagtctcccaaccgtttgcgctccagtcccggcccagggagccccccgtaccctctggggtgccgcaaactgcagctcggcaggcccgcgccgggagaagggagggcgcgcaggcggccggaggaggggaggtcccagcgcgcccccgctgcgatgtgaacggcggcggctctcacctggagccgcacctggggcgccgagctccggggccgcggaaagaatgcgcgccgcccgtgcgctccgcctgccgcgtctggccacccgcagccgccgcgtccgcacctgaccatggagtgcgccctcctgctcgcgtgtgccttcccggctgcgggttcgggcccgccgaggggcctggcgggactggggcgcgtggccaaggcgctccagctgtgctgcctctgctgtgcgtcggtcgccgcggccttagccagtgacagcagcagcggcgccagcggattaaatgatgattacgtctttgtcacgccagtagaagtagactcagccgggtcatatatttcacacgacattttgcacaacggcaggaaaaagcgatcggcgcagaatgccagaagctccctgcactaccgattttcagcatttggacaggaactgcacttagaacttaagccctcggcgattttgagcagtcactttattgtccaggtacttggaaaagatggtgcttcagagactcagaaacccgaggtgcagcaatgcttctatcagggatttatcagaaatgacagctcctcctctgtcgctgtgtctacgtgtgctggcttgtcaggtttaataaggacacgaaaaaatgaattcctcatctcgccattacctcagcttctggcccaggaacacaactacagctcccctgcgggtcaccatcctcacgtactgtacaaaaggacagcagaggagaagatccagcggtaccgtggctaccccggctctggccggaattatcctggttactccccaagtcacattccccatgcatctcagagtcgagagacagagtatcaccatcgaaggttgcaaaagcagcatttttgtggacgacgcaagaaatgtatatgctcccaagcctcccacagaggacacctatctaaggtttgatgaatatgggagctctgggcgacccagaagatcagctggaaaatcacaaaagggcctcaatgtggaaaccctcgtggtggcagacaagaaaatggtggaaaagcatggcaagggaaatgtcaccacatacattctcacagtaatgaacatggtttctggcctatttaaagatgggactattggaagtgacataaacgtggttgtggtgagcctaattcttctggaacaagaacctggtttgcccccatcagtggaatgtgctctaagtaccgaagttgtaccatcaatgaggacacaggacttggccttgccttcaccatcgctcatgagtcagggcacaactttggtatgattcacgatggagaagggaatccctgcagaaaggctgaaggcaatatcatgtctcccacactgaccggaaacaatggagtgttttcatggtcttcctgcagccgccagtatctcaag

SEQ ID NO: 261649 - DNA, 3666 bp, Artificial Sequence
  derived and/or modified sequence
atggaatgcgcccttctgttagcttgtgcgttcccagccgccgggagcggcccgcctcgcggcttggccgggttaggtcgagttgccaaagccctgcagctgtgttgtctatgttgtgcgtccgttgccgctgccctcgcatccgacagcagctcaggcgcatcggggcttaatgacgactacgtcttcgtcactcctgttgaggtcgatagtgccgggagttacataagtcatgatatcctgcacaacggacgaaagaagaggagcgcacagaatgccaggtcctctctgcactatagatttagtgctttcggacaggagctccacttggagctcaaacctagtgctattctctcttctcactttattgtacaggtcctcggtaaggacggcgcatctgaaacgcaaaaacccgaagtccagcagtgtttctaccaagggttcattcggaacgactcctcatcttccgtagccgtaagcacatgtgccggcttgagcggcctgattagaacaagaaagaacgagttcctgattagtcccctgccccagttgctggcccaggagcataattactcatctcccgctggccatcacccacacgtgctatacaagcgcaccgcagaggaaaaaatccagcgctataggggctaccctgggtccggtaggaactatcctggctattctccctcacacattcctcatgcctctcaatccagagagaccgaataccaccaccgtaggcttcagaaacagcacttttgcggacgacgcaaaaaatacgccccaaaacctcctacagaagacacatacttaaggttcgatgagtatggatcatccggtcgtcctaggcggagtgcgggcaagagtcagaaaggcctcaacgtggagacgcttgtggtagccgacaagaaaatggtggagaagcatggaaagggcaacgtcactacttacattttgacagtgatgaatatggtatccggactattcaaggatggcaccattggatcagatatcaacgttgtcgtcgtgagcctgattctactggaacaggagcctgggggtctgctgatcaatcaccatgctgatcagagtctcaattctttctgtcagtggcagtccgcgttgattgggaagaacggcaagaggcacgaccatgctattctgctgacagggttcgacatctgttcttggaaaaacgagccatgcgacacgctgggcttcgcccccatctccggtatgtgttctaagtaccggtcttgtactatcaatgaggacaccgggttgggcctagctttcaccattgcccacgagagtggccacaacttcgggatgatccacgacggtgagggaaatccctgccgtaaggcggagggaaatattatgagtcccacgctaaccggaaacaacggcgttttttcctggtccagttgctcacgtcagtacctcaaaaagtttctcagcactcctcaagcgggttgccttgtggacgagccaaaacaggcagggcagtacaagtatccagacaaactcccgggacagatatatgatgctgacacacagtgtaaatggcagttcggagcgaaagcgaaactctgctcactcgggtttgtcaaagacatctgtaagagcctgtggtgtcacagggtaggccacaggtgcgagaccaaattcatgcctgccgccgaagggacagtctgcggtctgagcatgtggtgtcggcaaggtcagtgtgtgaagtttggcgaactggggccacgtcctatacatggtcagtggtccgcctggtcaaagtggagcgagtgcagtcggacctgtgggggaggcgttaaatttcaggagagacattgcaataatccaaagccacagtacggaggtctcttttgtcctggctcctcaagaatatatcagctatgtaacatcaatccatgcaatgagaattctctcgattttagggcacagcagtgcgctgagtataattccaagccttttcgcggctggttctaccagtggaaaccctataccaaagttgaggaggaggatagatgcaaactctactgcaaagctgagaacttcgaattttttttcgccatgagcgggaaagtgaaggacgggacaccttgctctcctaataaaaatgatgtgtgtatcgatggggtgtgcgagctcgttggatgcgaccacgaactgggctcaaaggcagtgtctgacgcgtgtggtgtctgcaaaggggacaactctacatgcaaattctacaagggcctctacctaaaccaacacaaagccaatgagtattatccagttgtcctcatccctgctggagcacgctcgatcgaaatccaggaactccaagtcagttcgagttaccttgcagttcgctccctttcacaaaagtactacctgactgggggatggtcgattgactggccaggcgagtttcctttcgccggaacgacctttgagtaccagcggtctttcaacagacccgaaaggctgtatgcaccggggcccacaaatgagacactcgtgtttgagatattgatgcaaggtaagaacccaggaatcgcttggaaatatgcactgcccaaagtgatgaacggcacaccacccgccacaaagcgcccagcatacacttggagcattgtgcagagtgaatgcagtgtgtcgtgtggcggtggctatattaacgtgaaagctatttgtctgagggaccagaacacccaagtgaattctagcttctgcagcgctaaaacaaaacctgtgactgagcctaaaatctgtaatgcattcagctgtccagcctattggatgcctggcgagtggagtacatgctcaaaggcctgtgctggaggacagcagagcaggaagatccagtgtgtgcaaaagaagccttttcaaaaagaggaagcagttcttcattctctgtgcccggtatcaacccccacacaggttcaggcctgtaattctcatgcctgtccgcctcagtggagtctgggcccctggtcccagtgttctaaaacttgcggtagaggagtccggaagcgcgaactcctgtgtaaaggcagtgccgcggaaacgctgccagaaagccagtgcacaagtctgccccggccggagcttcaagaaggttgcgtgctggggcggtgtccaaaaaacagccggctgcagtgggtagcttctagttggtcagagtgttctgcaacgtgtggactgggcgtcaggaaacgagagatgaagtgcagtgaaaaagggtttcagggcaagctgataacctttcccgagcgccggtgcagaaacattaaaaagcctaatcttgacctcgaggaaacatgcaaccgtagagcctgcccagcacaccctgtttacaacatggtggcaggttggtactccctgccctggcaacagtgcacggtcacctgtggagggggcgtccaaactcggtcagttcactgtgttcagcaggggcgccccagctctagttgtctgctccatcagaagcccccggtgttgcgggcctgtaacacaaacttctgccccgccccggaaaagcgggaggatccaagctgtgtggatttttttaactggtgtcatttggtcccgcagcacggagtgtgcaaccataagttttacggcaaacaatgttgcaagtcctgtacaagaaaaatttag

SEQ ID NO: 261650 - DNA, 825 bp, Artificial Sequence
  derived and/or modified sequence
atggaatgcgcccttctcttggcgtgcgcttttcccgcagctggttcaggacctccacgggggctagccggtctgggcagagtcgctaaagcactacagctctgttgcctgtgctgcgcgagcgtggcagctgctcttgcctccgactcctcctctggggcttccggactgaacgatgattacgttttcgtcacgcctgtagaagtcgatagcgccggatcctatatttcccacgacattctgcacaatggaagaaagaagcgctcagctcaaaatgcaagatcctctttgcattacagattcagcgccttcgggcaggagcttcacttggaactaaaaccatcagcaattctgtcttcacacttcattgtgcaagttctggggaaagacggcgcctccgaaacccagaagcccgaggtgcaacagtgtttctaccaaggcttcattcgtaacgactcatctagttcagtggctgtcagcacatgtgccgggctgtccggactaatcaggacacggaaaaatgagtttttgattagtccactgccccagttgcttgcccaggagcacaactactcctcccctgccggccaccatccccacgtcttgtacaagcgtacggcagaggagaagatccagaggtaccgcggatatccagggtcaggtcgcaattaccctggatatagcccgtctcatataccacacgcctctcagtcccgcgaaactgaataccaccatcggcgtctgcagaaacagcacttctgtgggcgacgaaagaagtgcatatgtagccaggcgagccacagaggtcatctgtccaaagtttag

SEQ ID NO: 261651 - DNA, 3666 bp, Artificial Sequence
  derived and/or modified sequence
atggagtgtgccctgctgctggcctgtgccttccctgctgctggcagcggccccccccggggcctggccggcctgggccgggtggccaaggccctgcagctgtgctgcctgtgctgtgcctctgtggccgccgccctggccagtgacagcagcagcggggccagcggcctgaatgatgattatgtgtttgtgacccctgtggaggtggacagcgctggcagctacatcagccatgacatcctgcacaatggaaggaagaagaggtctgcccagaatgcccggagcagcctgcactaccgcttcagcgccttcggccaggagctgcacctggagctgaagcccagcgccatcctgagcagccacttcatcgtgcaggtgctgggcaaggatggagccagcgagacccagaagccagaggtgcagcagtgcttctaccagggcttcatcagaaatgacagcagcagctctgtggccgtgtccacctgtgccggcctgagcggcctcatccgcaccaggaagaatgagttcctgatcagccccctgccccagctgctggcccaggagcacaactacagcagccctgctggccaccacccccacgtgctgtacaagaggacagctgaggagaagatccagcgctaccggggctacccaggcagcggcaggaactacccaggctacagccccagccacatcccccacgccagccagagccgggagacagagtaccaccaccggcggctgcagaagcagcacttctgtggccgcaggaagaagtatgcccccaagccacccacagaggacacctacctgcgctttgatgaatatggcagcagcggccggcccaggagatctgctgggaagagccagaagggcctgaatgtggagaccctggtggtggccgacaagaagatggtggagaagcatggaaaaggaaatgtgaccacctacatcctgactgtgatgaacatggtgtctggcctcttcaaggatggcaccatcggcagtgacatcaacgtggtggtggtgtccctcatcctgctggagcaggagcccggcggcctgctgatcaaccaccacgccgaccagagcctgaacagcttctgccagtggcagagcgccctgattggcaagaatggcaagagacatgaccacgccatcctgctgaccggctttgacatctgctcctggaagaatgagccctgtgacaccctgggctttgcccccatcagcggcatgtgcagcaagtaccgcagctgcaccatcaatgaagacaccggcctgggcctggccttcaccatcgcccacgagagcggccacaactttggcatgattcatgatggagagggcaacccctgcaggaaggccgagggcaacatcatgagccccaccctgaccggcaacaatggagtcttctcctggagcagctgcagccggcagtacctgaagaagttcctgagcaccccccaggccggctgcctggtggatgagcccaagcaggccggccagtacaagtacccagacaagctgcccggccagatctatgatgctgacacccagtgcaagtggcagtttggagccaaggccaagctgtgcagcctgggctttgtgaaggacatctgcaagagcctgtggtgccaccgggtgggccaccgctgtgagaccaagttcatgcctgctgctgagggcaccgtgtgtggcctgtccatgtggtgccggcagggccagtgtgtgaagtttggagagctgggcccccggcccatccacggccagtggagcgcctggagcaagtggagcgagtgcagcaggacctgtggcggcggcgtgaagttccaggagcggcactgcaacaaccccaagccccagtatggaggcctcttctgccccggcagcagccgcatctaccagctgtgcaacatcaacccctgcaatgaaaacagcctggacttccgggcccagcagtgtgccgagtacaacagcaagcccttccggggctggttctaccagtggaagccctacaccaaggtggaggaggaggaccgctgcaagctgtactgcaaggcagaaaattttgagttcttctttgccatgtctgggaaggtgaaggatggcaccccctgcagccccaacaagaatgatgtgtgcattgatggagtgtgtgagctggtgggctgtgaccacgagctgggcagcaaggctgtgtctgatgcctgtggggtgtgcaagggggacaacagcacctgcaagttctacaagggcctgtacctgaaccagcacaaggccaatgagtactaccctgtggtgctgatcccagctggggcccggagcattgagatccaggagctgcaggtgagcagcagctacctggccgtgcgcagcctgagccagaagtactacctgactggaggctggagcattgactggccaggagagttcccctttgctggcaccacctttgagtaccagaggagcttcaacagacctgagcggctgtatgcccctggccccaccaatgagaccctggtgtttgagatcctgatgcagggcaagaaccctggcatcgcctggaagtatgccctgcccaaggtgatgaatggcaccccaccagccaccaagaggcctgcctacacctggagcatcgtgcagagcgagtgcagcgtgtcctgtggcggcggctacatcaacgtgaaggccatctgcctgcgggaccagaacacccaggtgaacagcagcttctgcagcgccaagaccaagcctgtgacagagcccaagatctgcaatgccttcagctgcccagcctactggatgcctggagagtggagcacctgcagcaaggcctgtgccggcggccagcagagcaggaagatccagtgtgtgcagaagaagcccttccagaaggaggaggccgtgctgcacagcctgtgccctgtgtccacccccacccaggtgcaggcctgcaacagccacgcctgccccccccagtggagcctgggcccctggagccagtgcagcaagacctgtggccggggcgtgaggaagcgggagctgctgtgcaagggcagcgctgctgagaccctgcctgagagccagtgcaccagcctgcccaggcctgagctgcaggagggctgtgtgctgggccgctgccccaagaacagccggctgcagtgggtggccagctcctggagcgaatgttctgccacctgtggcctgggcgtgaggaagcgggagatgaagtgcagcgagaagggcttccagggcaagctgatcaccttccctgagcggcgctgcaggaacatcaagaagcccaacctggacctggaggagacctgcaacagaagagcctgcccagcccaccctgtgtacaacatggtggccggctggtacagcctgccctggcagcagtgcaccgtgacctgtggcggcggcgtgcagaccaggtctgtgcactgtgtgcagcagggccggcccagcagcagctgcctgctgcaccagaagccccctgtgctgcgggcctgcaacaccaacttctgcccagcccctgagaagcgggaggaccccagctgtgtggacttcttcaactggtgccacctggtgccccagcacggcgtgtgcaaccacaagttctacggcaagcagtgctgcaagagctgcaccaggaagatctag

SEQ ID NO: 261652 - DNA, 825 bp, Artificial Sequence
  derived and/or modified sequence
atggagtgtgccctgctgctggcctgtgccttccctgctgctggcagcggccccccccggggcctggccggcctgggccgggtggccaaggccctgcagctgtgctgcctgtgctgtgcctctgtggccgccgccctggccagtgacagcagcagcggggccagcggcctgaatgatgattatgtgtttgtgacccctgtggaggtggacagcgctggcagctacatcagccatgacatcctgcacaatggaaggaagaagaggtctgcccagaatgcccggagcagcctgcactaccgcttcagcgccttcggccaggagctgcacctggagctgaagcccagcgccatcctgagcagccacttcatcgtgcaggtgctgggcaaggatggagccagcgagacccagaagccagaggtgcagcagtgcttctaccagggcttcatcagaaatgacagcagcagctctgtggccgtgtccacctgtgccggcctgagcggcctcatccgcaccaggaagaatgagttcctgatcagccccctgccccagctgctggcccaggagcacaactacagcagccctgctggccaccacccccacgtgctgtacaagaggacagctgaggagaagatccagcgctaccggggctacccaggcagcggcaggaactacccaggctacagccccagccacatcccccacgccagccagagccgggagacagagtaccaccaccggcggctgcagaagcagcacttctgtggccgcaggaagaagtgcatctgcagccaggccagccaccggggccacctgagcaaggtgtag

SEQ ID NO: 261653 - DNA, 3666 bp, Artificial Sequence
  derived and/or modified sequence
atggagtgcgccctgctgctggcctgcgccttccccgccgccggcagcggccccccccgtgggctggccggtctcggcagggtcgccaaggccctgcaactttgttgcttgtgctgcgcgtcagttgccgcagcactcgcgtccgatagtagctctggtgcctcgggacttaatgacgattatgtgtttgtcacacctgtcgaggtagattccgccgggtcgtacatctcccatgacattctgcataatgggcgtaagaagaggtctgcccagaatgcacgaagcagcttgcactacagattttccgcattcggacaagaattacatcttgagcttaaacctagtgcaatcctgtcctcacatttcatcgttcaggtactcgggaaggatggggcctccgaaacccagaaaccagaggtgcagcagtgcttttatcagggattcataagaaatgatagttcgtcttccgttgcagtgtccacttgtgctggcctgagtggattgataaggacccgcaaaaatgagttcctcatttcccctctgccccagctactggctcaggagcataactacagctcacccgccgggcatcatccacacgtgttatataaacgtacggccgaggagaagatccagagatatagaggttacccgggatctggtagaaactaccctggctacagcccctcccatatcccccatgccagtcaaagccgggagactgaatatcatcaccgtaggctgcagaaacaacatttttgcggaagacgcaagaaatatgcccctaagcctcctacagaagatacttacctccgattcgacgagtacggatcttcaggacgacctcgccgcagcgccggcaaatcacagaaaggcctgaacgtcgagaccttggtcgtggcagataagaagatggttgagaagcacgggaagggtaacgttacgacatatatcctgacggtaatgaacatggtttcagggttatttaaggacggtacaattgggtctgacattaacgtggttgtggtgtccctcatactcctagagcaggaacccgggggactgcttataaatcaccatgcagatcagagtctgaatagcttctgccagtggcagagcgccctgatcggaaagaatgggaagcggcacgaccacgccattctgcttacagggtttgacatttgtagttggaagaacgaaccctgcgacaccctcggattcgccccgataagcggaatgtgtagcaaatatagatcctgcaccattaatgaggacacggggctaggtttggccttcaccattgcacacgagagtggccataattttggtatgattcacgacggtgaaggaaatccttgtagaaaggcagagggcaacatcatgtctcctaccttgacggggaataatggcgtgtttagctggagcagttgctcgcgccaatacctgaagaaattcctgtccactccacaggctggatgtcttgtggatgagcccaagcaggccggccagtacaaatatcccgataagcttcctggtcagatctatgacgccgatacccagtgtaagtggcagttcggcgcgaaggccaaactgtgctccttgggcttcgtcaaagacatttgcaagtcattatggtgccatagagtcggtcatcggtgcgagacaaagtttatgcctgcagctgaaggcacagtatgcggactctccatgtggtgccgccaggggcagtgcgtgaagtttggcgaactcgggcctcggcccatccatggccagtggtctgcttggagtaaatggagcgagtgttcacggacctgcggggggggcgtgaagtttcaggaacggcactgcaataatcccaagcctcagtatggggggcttttctgccctggatcatcacgaatttaccagctgtgcaacattaatccgtgtaacgagaatagcttggattttcgggcacagcagtgtgccgagtacaatagcaagccctttcgcggctggttttatcagtggaagccctacacgaaagtggaggaggaagatcgttgcaagctctattgcaaagcggagaatttcgaattcttcttcgccatgagtgggaaagttaaggatggcactccctgcagcccaaataagaatgatgtttgcattgatggcgtctgtgagctggtgggctgtgatcacgaattaggatcaaaagccgtttcagacgcttgtggtgtctgtaagggagacaattcgacgtgcaaattctacaagggactgtatctgaaccagcacaaggcgaatgagtattatcctgtggtgctcatcccagcaggtgcaaggtcaattgagatccaagagctccaggtaagctcttcctacctggctgtaagaagtttgagccagaaatattatctgacaggcggttggtccatcgattggcctggtgagttccctttcgcaggaacaaccttcgagtaccagcgatcttttaaccgcccggagcgattgtatgcacctggaccaactaatgaaaccttggtcttcgagatcctaatgcaggggaagaacccaggcatcgcctggaaatatgcgttacccaaagttatgaacgggactccccccgctactaagcggcccgcctatacatggagtatagtacagtccgagtgttcagtatcttgtggtgggggctatattaacgtgaaggccatatgtctaagggatcagaacacccaagtgaatagctccttctgctccgctaaaaccaagcccgttactgaacccaagatctgcaacgctttcagttgccctgcctactggatgccaggtgagtggagcacttgctccaaagcctgtgcaggtggccagcagtctagaaagatccaatgcgtccagaagaaaccctttcagaaagaggaggcagtgcttcactctctgtgtcctgtaagtacccccacacaggtacaggcctgtaacagtcacgcttgccctcctcagtggagccttggcccctggtctcagtgctccaagacttgtgggaggggtgtgagaaagcgcgagctcctgtgtaaaggaagcgccgcagagaccttaccggaatctcagtgtactagtctaccccgacccgagctccaagaaggttgtgttctggggagatgtccaaaaaattcccgcctccagtgggtagcgagcagctggagcgaatgttccgccacctgcggccttggcgtgagaaaacgggagatgaaatgctctgagaaaggtttccagggaaagctgataactttcccagaaaggcggtgtcgcaatattaaaaaacctaacctcgaccttgaggaaacatgcaaccgcagggcttgccctgcacatcccgtgtacaacatggtggccggctggtatagccttccttggcaacaatgtacagtaacttgtggcgggggagtccaaacgaggtccgtgcactgtgtacagcaaggtcggccttcgtctagctgtctgctccaccagaaacctcctgtcttaagagcctgtaatacaaatttctgtcccgctccagaaaagcgggaagacccaagttgcgtggacttttttaactggtgccatctcgtaccccaacacggagtgtgcaatcataaattctacggcaaacagtgctgtaagtcctgcacgcgcaaaatttag

SEQ ID NO: 261654 - DNA, 825 bp, Artificial Sequence
  derived and/or modified sequence
atggagtgcgccctgctgctggcctgcgccttccccgccgccggctccggccccccgagaggactggctggattaggacgtgtcgctaaagcacttcaactgtgttgtctttgttgcgcgtctgtcgctgcggcactggcatcagatagctcgtcaggagcttccggcctgaacgatgattacgtgttcgttaccccagtcgaagtggactctgctggtagttatattagccacgacatcctgcataatggccggaagaaacgatccgcgcagaatgctcggtcctcgctgcattatcggttttccgctttcgggcaggagctgcatttggagttaaaaccatcagctattctgtcatcccatttcattgtacaggtgttggggaaggatggtgccagcgagacccagaaacctgaggtgcagcagtgtttctatcaaggatttatcaggaatgatagtagctcttccgtagcagtgtctacctgcgccggactctcaggactgatacgcactcgtaaaaatgaattcctgattagccctcttccacagctgctcgcacaagagcacaactactcatcacccgctggacaccacccccacgtactgtacaagcgcacagcagaggaaaaaattcagcgttataggggatatcccggatctggcagaaattatcccggctattcgcctagccacatcccacatgcctcgcagagtagagagaccgaatatcaccaccggcgcctccaaaagcagcacttttgcggacggcggaagaaatgcatttgctctcaggccagccatagaggccacctatccaaggtgtag

SEQ ID NO: 261655 - DNA, 3666 bp, Artificial Sequence
  derived and/or modified sequence
atggaatgcgcactgctgctggcttgtgcatttccggctgcgggatctggcccaccacgcggattggctgggctcggtcgcgttgccaaggccctccagctgtgctgtctctgctgcgcaagtgttgcagcagcactggccagtgactctagtagtggggcatccgggctcaatgatgactacgttttcgttacaccagtggaggtggacagtgccggttcatatattagccacgatatcctgcacaacggcaggaagaaacgctctgctcagaacgctcgttccagcctacattaccggtttagtgccttcggccaggaactgcacctagagttaaaacccagcgctatcctgagcagtcactttatcgtgcaggtgctcggtaaggatggggcatctgagactcaaaaaccggaagtccagcaatgcttttaccagggctttatacgtaacgactcatcttccagcgtcgcagtctctacctgtgccggactctcggggcttatacgcaccaggaaaaacgagtttctcatctcccccctcccacagcttctggctcaggagcataactatagctcccccgctggccatcatccacacgtgttgtacaaaaggactgcggaagaaaaaatccagcgctacagaggataccccggatcagggagaaactaccccggatactcccccagccacattccacacgcttctcagtcacgagagacagagtatcaccatcgtcgcctgcagaagcaacatttctgcgggaggagaaagaagtacgcccctaagccccctactgaggatacttatctcaggtttgacgaatacggctctagtgggaggccgcgtaggtccgcaggaaaaagccaaaaagggcttaacgtggagacgctggttgtcgctgacaaaaaaatggtcgaaaagcacggcaagggcaatgtgaccacatatattctgactgtgatgaatatggtgagcggcctatttaaggatggcactatcgggtccgatataaatgtcgtggtcgtcagtctcatcctgctggaacaggaaccaggaggcttgcttataaaccaccatgctgaccagagtctcaacagcttctgtcagtggcagtcagccctaatagggaagaacggcaagcgccacgatcacgccattctcctcacaggtttcgatatttgtagttggaagaatgagccctgtgatactctcgggttcgccccaattagcggtatgtgttcaaaatatcggtcatgtaccattaacgaagataccggactgggtttagcattcaccatcgcacatgagtctgggcataatttcgggatgattcacgatggcgaggggaatccgtgtcgcaaggccgagggaaacataatgtctcccaccctgacaggcaataacggcgtatttagttggtccagctgcagccggcagtacctgaagaagtttcttagtacccctcaggctgggtgccttgtcgatgagccgaaacaagccggtcagtataaatatcctgacaaactgccaggtcagatttacgatgctgatactcaatgcaagtggcagttcggggctaaggcaaaactttgttccctggggtttgtgaaggacatttgtaagagcctttggtgccacagagtcggccacaggtgcgagaccaaattcatgcctgctgccgagggtacagtttgcggacttagcatgtggtgtcggcagggacagtgcgtaaaattcggcgagctgggcccacgtcccattcatgggcagtggtcagcctggtccaagtggtctgagtgctcacgaacctgcggaggaggtgtgaaattccaggagaggcactgtaacaacccaaagccccaatatggaggactgttctgccctggtagttccagaatttaccagctgtgtaatattaatccctgtaatgagaacagtctcgacttcagagcccagcagtgtgccgaatacaattccaaacccttccgcggttggttttaccagtggaagccatataccaaggtcgaagaggaagacaggtgcaaactgtactgtaaagctgagaacttcgaatttttcttcgccatgtccggcaaagtcaaagacggaaccccctgttctccgaacaagaatgatgtgtgtatcgatggggtttgcgaactcgtcggatgcgaccacgagttaggctctaaagccgtgagcgacgcttgcggagtgtgtaagggcgacaactccacctgcaagttctacaaaggcctatacttaaatcaacacaaggctaacgaatactaccctgtcgtcctcattcctgcgggagccaggagtattgaaatccaggaactgcaggtttcaagttcctacttggccgtcaggtctctgtctcagaagtattatctcactggaggctggtcgatcgattggccgggagagttcccattcgccggtacaactttcgagtatcagcggtccttcaaccgacccgagcggctctacgcacccggtcctactaacgagaccctcgtttttgaaatcctgatgcagggtaaaaatcccggaatcgcctggaaatacgcgttacctaaggtcatgaacggaacaccccctgccaccaaacgccctgcctacacatggagtattgtccagagcgagtgtagcgttagttgcgggggagggtatatcaacgtgaaggctatttgcttgagggaccagaacacccaggtgaacagctccttttgctcagctaagactaaacccgtgaccgagccaaagatctgtaacgctttctcatgccccgcttattggatgcccggtgaatggtctacatgttccaaggcttgcgcaggcggacagcagtcacggaaaattcagtgcgtgcagaagaaaccatttcagaaagaggaggccgtgctacacagcctgtgtcctgtgagcacaccaacccaagttcaggcctgtaactcacacgcgtgccccccacagtggagccttggcccatggtctcagtgcagcaaaacttgcggtagaggggtaagaaagagagaactcctgtgtaaggggtccgccgcagaaaccttaccagaatctcagtgcacatctctccctcgaccagaactgcaggagggttgcgtgctgggacggtgtcccaaaaactcccgtctccagtgggtggccagcagctggtcagaatgcagcgccacctgcggcctaggtgttcggaaaagagagatgaagtgtagcgaaaaaggttttcagggtaaactgatcacattcccagaacgaaggtgccgtaacattaagaaaccaaacctggatctcgaggagacttgcaatcggagggcctgccccgctcaccccgtctacaatatggtggccggttggtactccctcccctggcagcaatgtactgtcacttgtgggggaggcgtccagacacgatctgtccactgcgtgcagcagggcaggccaagtagcagctgtctactgcaccaaaagccaccagtcctgcgcgcatgcaacacaaatttctgccctgccccagagaaaagagaggacccttcatgcgttgacttctttaactggtgccatcttgttccacagcatggagtctgcaatcataagttttacggtaagcaatgctgcaagtcctgcaccagaaaaatttag

SEQ ID NO: 261656 - DNA, 825 bp, Artificial Sequence
  derived and/or modified sequence
atggagtgcgctctactcctcgcatgcgcattccccgcagctggaagtggccctccgagaggactagccggactcgggagggtggctaaggccttacagctgtgttgtctctgctgcgcatccgtggccgcagcactggctagcgattcgagtagcggagctagcggtctgaacgatgactatgtttttgtcaccccagtcgaggttgactctgccggaagctatatttctcacgacatcctgcataacggtcgaaaaaagaggagtgctcaaaatgcaagaagcagtttgcactacagattctcggcctttgggcaggagctgcacctggagctaaaacctagtgcgattctcagctcccacttcatcgtccaggtcctgggcaaggatggcgcatcagagactcagaaaccggaggtacagcaatgtttctaccagggtttcattcgtaatgacagttcttcttctgttgcagtctctacctgtgctggattaagcggcctgatcagaacccggaaaaacgagtttctcatctcccccctcccgcaactgcttgctcaggagcacaattactccagtccagccggacaccaccctcatgttctgtacaaacgtaccgccgaggagaagatccagaggtaccgtggatatcccggatcaggcaggaactatcctggctatagtccctcgcatatacctcacgcatctcagtcccgcgagacggaataccaccatagaagactgcagaaacagcatttctgtggcagacgcaagaagtgcatctgttcacaagctagtcaccgaggacacctgagtaaggtgtag

SEQ ID NO: 261657 - DNA, 3666 bp, Artificial Sequence
  derived and/or modified sequence
atggagtgcgccctgctgctggcctgcgccttccccgccgccggcagcggcccccccagaggcctggccggcctgggcagagtggccaaggccctgcagctgtgctgcctgtgctgcgccagcgtggccgccgccctggccagcgacagcagcagcggcgccagcggcctgaacgacgactacgtgttcgtgacccccgtggaggtggacagcgccggcagctacatcagccacgacatcctgcacaacggcagaaagaagagaagcgcccagaacgccagaagcagcctgcactacagattcagcgccttcggccaggagctgcacctggagctgaagcccagcgccatcctgagcagccacttcatcgtgcaggtgctgggcaaggacggcgccagcgagacccagaagcccgaggtgcagcagtgcttctaccagggcttcatcagaaacgacagcagcagcagcgtggccgtgagcacctgcgccggcctgagcggcctgatcagaaccagaaagaacgagttcctgatcagccccctgccccagctgctggcccaggagcacaactacagcagccccgccggccaccacccccacgtgctgtacaagagaaccgccgaggagaagatccagagatacagaggctaccccggcagcggcagaaactaccccggctacagccccagccacatcccccacgccagccagagcagagagaccgagtaccaccacagaagactgcagaagcagcacttctgcggcagaagaaagaagtacgcccccaagccccccaccgaggacacctacctgagattcgacgagtacggcagcagcggcagacccagaagaagcgccggcaagagccagaagggcctgaacgtggagaccctggtggtggccgacaagaagatggtggagaagcacggcaagggcaacgtgaccacctacatcctgaccgtgatgaacatggtgagcggcctgttcaaggacggcaccatcggcagcgacatcaacgtggtggtggtgagcctgatcctgctggagcaggagcccggcggcctgctgatcaaccaccacgccgaccagagcctgaacagcttctgccagtggcagagcgccctgatcggcaagaacggcaagagacacgaccacgccatcctgctgaccggcttcgacatctgcagctggaagaacgagccctgcgacaccctgggcttcgcccccatcagcggcatgtgcagcaagtacagaagctgcaccatcaacgaggacaccggcctgggcctggccttcaccatcgcccacgagagcggccacaacttcggcatgatccacgacggcgagggcaacccctgcagaaaggccgagggcaacatcatgagccccaccctgaccggcaacaacggcgtgttcagctggagcagctgcagcagacagtacctgaagaagttcctgagcaccccccaggccggctgcctggtggacgagcccaagcaggccggccagtacaagtaccccgacaagctgcccggccagatctacgacgccgacacccagtgcaagtggcagttcggcgccaaggccaagctgtgcagcctgggcttcgtgaaggacatctgcaagagcctgtggtgccacagagtgggccacagatgcgagaccaagttcatgcccgccgccgagggcaccgtgtgcggcctgagcatgtggtgcagacagggccagtgcgtgaagttcggcgagctgggccccagacccatccacggccagtggagcgcctggagcaagtggagcgagtgcagcagaacctgcggcggcggcgtgaagttccaggagagacactgcaacaaccccaagccccagtacggcggcctgttctgccccggcagcagcagaatctaccagctgtgcaacatcaacccctgcaacgagaacagcctggacttcagagcccagcagtgcgccgagtacaacagcaagcccttcagaggctggttctaccagtggaagccctacaccaaggtggaggaggaggacagatgcaagctgtactgcaaggccgagaacttcgagttcttcttcgccatgagcggcaaggtgaaggacggcaccccctgcagccccaacaagaacgacgtgtgcatcgacggcgtgtgcgagctggtgggctgcgaccacgagctgggcagcaaggccgtgagcgacgcctgcggcgtgtgcaagggcgacaacagcacctgcaagttctacaagggcctgtacctgaaccagcacaaggccaacgagtactaccccgtggtgctgatccccgccggcgccagaagcatcgagatccaggagctgcaggtgagcagcagctacctggccgtgagaagcctgagccagaagtactacctgaccggcggctggagcatcgactggcccggcgagttccccttcgccggcaccaccttcgagtaccagagaagcttcaacagacccgagagactgtacgcccccggccccaccaacgagaccctggtgttcgagatcctgatgcagggcaagaaccccggcatcgcctggaagtacgccctgcccaaggtgatgaacggcaccccccccgccaccaagagacccgcctacacctggagcatcgtgcagagcgagtgcagcgtgagctgcggcggcggctacatcaacgtgaaggccatctgcctgagagaccagaacacccaggtgaacagcagcttctgcagcgccaagaccaagcccgtgaccgagcccaagatctgcaacgccttcagctgccccgcctactggatgcccggcgagtggagcacctgcagcaaggcctgcgccggcggccagcagagcagaaagatccagtgcgtgcagaagaagcccttccagaaggaggaggccgtgctgcacagcctgtgccccgtgagcacccccacccaggtgcaggcctgcaacagccacgcctgccccccccagtggagcctgggcccctggagccagtgcagcaagacctgcggcagaggcgtgagaaagagagagctgctgtgcaagggcagcgccgccgagaccctgcccgagagccagtgcaccagcctgcccagacccgagctgcaggagggctgcgtgctgggcagatgccccaagaacagcagactgcagtgggtggccagcagctggagcgagtgcagcgccacctgcggcctgggcgtgagaaagagagagatgaagtgcagcgagaagggcttccagggcaagctgatcaccttccccgagagaagatgcagaaacatcaagaagcccaacctggacctggaggagacctgcaacagaagagcctgccccgcccaccccgtgtacaacatggtggccggctggtacagcctgccctggcagcagtgcaccgtgacctgcggcggcggcgtgcagaccagaagcgtgcactgcgtgcagcagggcagacccagcagcagctgcctgctgcaccagaagccccccgtgctgagagcctgcaacaccaacttctgccccgcccccgagaagagagaggaccccagctgcgtggacttcttcaactggtgccacctggtgccccagcacggcgtgtgcaaccacaagttctacggcaagcagtgctgcaagagctgcaccagaaagatctag

SEQ ID NO: 261658 - DNA, 825 bp, Artificial Sequence
  derived and/or modified sequence
atggagtgcgccctgctgctggcctgcgccttccccgccgccggcagcggcccccccagaggcctggccggcctgggcagagtggccaaggccctgcagctgtgctgcctgtgctgcgccagcgtggccgccgccctggccagcgacagcagcagcggcgccagcggcctgaacgacgactacgtgttcgtgacccccgtggaggtggacagcgccggcagctacatcagccacgacatcctgcacaacggcagaaagaagagaagcgcccagaacgccagaagcagcctgcactacagattcagcgccttcggccaggagctgcacctggagctgaagcccagcgccatcctgagcagccacttcatcgtgcaggtgctgggcaaggacggcgccagcgagacccagaagcccgaggtgcagcagtgcttctaccagggcttcatcagaaacgacagcagcagcagcgtggccgtgagcacctgcgccggcctgagcggcctgatcagaaccagaaagaacgagttcctgatcagccccctgccccagctgctggcccaggagcacaactacagcagccccgccggccaccacccccacgtgctgtacaagagaaccgccgaggagaagatccagagatacagaggctaccccggcagcggcagaaactaccccggctacagccccagccacatcccccacgccagccagagcagagagaccgagtaccaccacagaagactgcagaagcagcacttctgcggcagaagaaagaagtgcatctgcagccaggccagccacagaggccacctgagcaaggtgtag

SEQ ID NO: 261659 - DNA, 5913 bp, Artificial Sequence
  derived and/or modified sequence
aatcaccgcgcggtggagaggcgggcgctcggctccggcgcgctgggggagccagctggcgctgtcttccccatcgcctcagacgctcacaccgacacagacagacgcacagacgggcgggcagacaccgacagtctcccaaccgtttgcgctccagtcccggcccagggagccccccgtaccctctggggtgccgcaaactgcagctcggcaggcccgcgccgggagaagggagggcgcgcaggcggccggaggaggggaggtcccagcgcgcccccgctgcgatgtgaacggcggcggctctcacctggagccgcacctggggcgccgagctccggggccgcggaaagaatgcgcgccgcccgtgcgctccgcctgccgcgtctggccacccgcagccgccgcgtccgcacctgaccatggagtgcgccctcctgctcgcgtgtgccttcccggctgcgggttcgggcccgccgaggggcctggcgggactggggcgcgtggccaaggcgctccagctgtgctgcctctgctgtgcgtcggtcgccgcggccttagccagtgacagcagcagcggcgccagcggattaaatgatgattacgtctttgtcacgccagtagaagtagactcagccgggtcatatatttcacacgacattttgcacaacggcaggaaaaagcgatcggcgcagaatgccagaagctccctgcactaccgattttcagcatttggacaggaactgcacttagaacttaagccctcggcgattttgagcagtcactttattgtccaggtacttggaaaagatggtgcttcagagactcagaaacccgaggtgcagcaatgcttctatcagggatttatcagaaatgacagctcctcctctgtcgctgtgtctacgtgtgctggcttgtcaggtttaataaggacacgaaaaaatgaattcctcatctcgccattacctcagcttctggcccaggaacacaactacagctcccctgcgggtcaccatcctcacgtactgtacaaaaggacagcagaggagaagatccagcggtaccgtggctaccccggctctggccggaattatcctggttactccccaagtcacattccccatgcatctcagagtcgagagacagagtatcaccatcgaaggttgcaaaagcagcatttttgtggacgacgcaagaaatatgctcccaagcctcccacagaggacacctatctaaggtttgatgaatatgggagctctgggcgacccagaagatcagctggaaaatcacaaaagggcctcaatgtggaaaccctcgtggtggcagacaagaaaatggtggaaaagcatggcaagggaaatgtcaccacatacattctcacagtaatgaacatggtttctggcctatttaaagatgggactattggaagtgacataaacgtggttgtggtgagcctaattcttctggaacaagaacctggaggattattgatcaaccatcatgcagaccagtctctgaatagtttttgtcaatggcagtctgccctcattggaaagaatggcaagagacatgatcatgccatcttactaacaggatttgatatttgttcttggaagaatgaaccatgtgacactctagggtttgcccccatcagtggaatgtgctctaagtaccgaagttgtaccatcaatgaggacacaggacttggccttgccttcaccatcgctcatgagtcagggcacaactttggtatgattcacgatggagaagggaatccctgcagaaaggctgaaggcaatatcatgtctcccacactgaccggaaacaatggagtgttttcatggtcttcctgcagccgccagtatctcaagaaattcctcagcacacctcaggcggggtgtctagtggatgagcccaagcaagcaggacagtataaatatccggacaaactaccaggacagatttatgatgctgacacacagtgtaaatggcaatttggagcaaaagccaagttatgcagccttggttttgtgaaggatatttgcaaatcactttggtgccaccgagtaggccacaggtgtgagaccaagtttatgcccgcagcagaagggaccgtttgtggcttgagtatgtggtgtcggcaaggccagtgcgtaaagtttggggagctcgggccccggcccatccacggccagtggtccgcctggtcgaagtggtcagaatgttcccggacatgtggtggaggagtcaagttccaggagagacactgcaataaccccaagcctcagtatggtggcttattctgtccaggttctagccgtatttatcagctgtgcaatattaacccttgcaatgaaaatagcttggattttcgggctcaacagtgtgcagaatataacagcaaacctttccgtggatggttctaccagtggaaaccctatacaaaagtggaagaggaagatcgatgcaaactgtactgcaaggctgagaactttgaatttttttttgcaatgtccggcaaagtgaaagatggaactccctgctccccaaacaaaaatgatgtttgtattgacggggtttgtgaactagtgggatgtgatcatgaactaggctctaaagcagtttcagatgcttgtggcgtttgcaaaggtgataattcaacttgcaagttttataaaggcctgtacctcaaccagcataaagcaaatgaatattatccggtggtcctcattccagctggcgcccgaagcatcgaaatccaggagctgcaggtttcctccagttacctcgcagttcgaagcctcagtcaaaagtattacctcaccgggggctggagcatcgactggcctggggagttccccttcgctgggaccacgtttgaataccagcgctctttcaaccgcccggaacgtctgtacgcgccagggcccacaaatgagacgctggtctttgaaattctgatgcaaggcaaaaatccagggatagcttggaagtatgcacttcccaaggtcatgaatggaactccaccagccacaaaaagacctgcctatacctggagtatcgtgcagtcagagtgctccgtctcctgtggtggaggttacataaatgtaaaggccatttgcttgcgagatcaaaatactcaagtcaattcctcattctgcagtgcaaaaaccaagccagtaactgagcccaaaatctgcaacgctttctcctgcccggcttactggatgccaggtgaatggagtacatgcagcaaggcctgtgctggaggccagcagagccgaaagatccagtgtgtgcaaaagaagcccttccaaaaggaggaagcagtgttgcattctctctgtccagtgagcacacccactcaggtccaagcctgcaacagccatgcctgccctccacaatggagccttggaccctggtctcagtgttccaagacctgtggacgaggggtgaggaagcgtgaactcctctgcaagggctctgccgcagaaaccctccccgagagccagtgtaccagtctccccagacctgagctgcaggagggctgtgtgcttggacgatgccccaagaacagccggctacagtgggtcgcttcttcgtggagcgagtgttctgcaacctgtggtttgggtgtgaggaagagggagatgaagtgcagcgagaagggcttccagggaaagctgataactttcccagagcgaagatgccgtaatattaagaaaccaaatctggacttggaagagacctgcaaccgacgggcttgcccagcccatccagtgtacaacatggtagctggatggtattcattgccgtggcagcagtgcacagtcacctgtgggggaggggtccagacccggtcagtccactgtgttcagcaaggccggccttcctcaagttgtctgctccatcagaaacctccggtgctacgagcctgtaatacaaacttctgtccagctcctgaaaagagagaggatccatcctgcgtagatttcttcaactggtgtcacctagttcctcagcatggtgtctgcaaccacaagttttacggaaaacaatgctgcaagtcatgcacaaggaagatctgatcttggtgtcctccccagcaccttagggccaggggcttacctttcaacctctagagagaccagctgcctttgagaccaggagctgagcaccgagaaccatctgtgagctgccgctgtgatgaaggagcctgctctgaggaacagacaggttgccagtaggcttctagctcaattccctgaagcacgtggtactctgaagcacttgaaaatgggaagcgatgacaaatctgactttaaaaaaaatctttgatttgcactgttatatgcaagaagtggtgaatcacactgagatacgtcgatttggggagagacccccttttgaacttcaaagggttcaagggcaaagacatctgttttaaaaaggtcctttatgacttcaggtcaaagactgagactcagaactttcaaatctggatggaataccttgcctaactgttgcgtggagttcacagttcgactaaccctgtgaacacccaagccaggagttctatgagaagccaaatggtgctcgcaattgtgcttgctgctggactggcaagcttcatgttatgtttatttggtgtgcgtgtgtctttattattttgtgtaaactatattctgcttatagagagtctctgagactaaaattgacaacttgaaaagtattccaaggaatattatgaaaatagggcaacatggactgtttaagatctccatgtaattgaaattcatgcaaggaaacaactcatagaaaagataaatatggatgcccttcacatgttatcaacctcgtaacttttggtgcttgctgaatcagtccatgaaaagctacagcccgctctttgggaatgctacatacccatttctggtatttaaaaaatatctaggaggagctaaatgacaaaacacagcagtgttttgagggagaaaggaccatcatttataatgctctgtacatactaccagagctgcttggaaaattaaaggccacttgtggctttttcctaccaactgatacgtttaaatttgccctaggattgagctaacagcaaaaaaaaaaaaaaaaaaaagagagaaagaaaggagtaaacagtggtaataaaaaaatccatctgtcttcttgctatgttaatattaataaatcataatatgacaagaccctcactgaataagagtattttcagtcatcagaagccagctgttggtaggcattaatgagtttaaaattgttctcaattgaaaaaacatcacactattttgccaaaaccaaagtaattataatactgtgtcctcctgtaattttttgagaagtggttataaagggcatatttacataaattctactttattcctcaacttctttgatgaatgtaacccaattttacttctttaaaaagtctcaattcaagctggattagccagctcagcataatcaactagacagtggtttgttaaatttagcagcatacttcgttcccattctaattaaagtcatgagttcttgaatcccagagaaataatgcttaggaacttctctcaatctgcttggcttggcctagagaagtggccattttatcaacaggaaaaaaaaaaattttctctactacaaccccgttgccttctgaaaaacagcaagttatttctttatataattatcattttattattttatggaaaattaatttattaattaatagcctattatgtgttctcacttgcttctctaagtaatattttgagataaaatgttgaataaaaccatggattatagagaaaagtcaaaatatatgtgtaatatttaattattttataagttttataataaagtattccatttctttatctttga

SEQ ID NO: 261660 - protein, 501 aa, Artificial Sequence
  derived and/or modified sequence
MWDQRLVRLALLQHLRAFYGIKVKGVRGQCDRRRHETAATEIGGKIFGVPFNALPHSAVPEYGHIPSFLVDACTSLEDHIHTEGLFRKSGSVIRLKALKNKVDHGEGCLSSAPPCDIAGLLKQFFRELPEPILPADLHEALLKAQQLGTEEKNKATLLLSCLLADHTVHVLRYFFNFLRNVSLRSSENKMDSSNLAVIFAPNLLQTSEGHEKMSSNTEKKLRLQAAVVQTLIDYASDIGRVPDFILEKIPAMLGIDGLCATPSLEGFEEGEYETPGEYKRKRRQSVGDFVSGALNKFKPNRTPSITPQEERIAQLSESPVILTPNAKRTLPVDSSHGFSSKKRKSIKHNFNFELLPSNLFNSSSTPVSVHIDTSSEGSSQSSLSPVLIGGNHLITAGVPRRSKRIAGKKVCRVESGKAGCFSPKISHKEKVRRSLRLKFNLGKNGREVNGCSGVNRYESVGWRLANQQSLKNRIESVKTGLLFSPDVDEKLPKKGTFTYYC

SEQ ID NO: 261661 - DNA, 1506 bp, Artificial Sequence
  derived and/or modified sequence
atgtgggatcagcggctcgtccggcttgctcttctgcagcacctaagagctttctatggaataaaagtgaagggcgtgcgaggacagtgcgatcgaagaaggcacgagacagctgccaccgaaatcggaggtaagatattcggcgtgccattcaacgccctccctcactccgccgtaccagaatatgggcatattccatcatttttagtggacgcgtgtacatccttagaagatcacatccataccgaagggttgttccgaaagtctgggagcgtcattcgattgaaagcactgaagaataaggtcgatcatggagaaggctgcctcagttccgcccccccctgcgacatcgcaggactcctcaaacaattctttcgcgagttgccggaacctattttacctgctgatctgcatgaggctctattaaaagcccagcagctgggtacggaggaaaagaataaagccacacttttgctctcctgtttgctggccgatcatactgtgcacgtactcagatatttttttaatttcctgagaaacgtgtcactgcggtccagtgagaacaaaatggactccagtaacctggctgttatcttcgctcctaacctgttgcagacttctgaagggcacgagaagatgagttccaataccgagaagaagctaaggttgcaggccgcagtcgttcaaactctaatcgattacgcatcggacattggtagggttccagacttcattttggagaagattcccgccatgttgggcatcgacggcctgtgcgcaaccccaagcctggaagggtttgaagaaggggagtacgagacccccggagaatacaagcggaaacgccgccagagcgtaggagatttcgtctcgggtgccctgaacaaatttaaacccaacaggactccttcaatcacacctcaagaagaaaggattgcacagttgtctgagtcaccggtgattctcaccccgaatgcaaaacggacattgcctgtagatagctcccacgggttctcatccaagaaacgcaaaagcattaagcataactttaacttcgagcttctgccatcgaatctctttaactcttcttcaaccccagtgtccgtccacattgatacctctagcgaaggtagtagccaaagttcactctccccagttctgattggcggaaatcacctcatcaccgcaggcgtccctcggaggtccaagagaatcgcaggtaagaaagtctgccgggtggagagtggtaaggccgggtgttttagtccgaagatctcgcataaagagaaggtccggcggtcccttcggctgaaattcaaccttggcaaaaacggcagggaagtgaatggctgcagcggagtaaacaggtacgagagtgtgggttggcggcttgccaaccaacagagcctgaagaacagaatcgagtcggttaagacaggactgttgttttcccccgacgtggacgagaaactgccgaaaaaagggacctttacatattactgctag

SEQ ID NO: 261662 - DNA, 1506 bp, Artificial Sequence
  derived and/or modified sequence
atgtgggaccagaggctggtgcggctggccctgctgcagcacctgcgggccttctacggcatcaaggtgaagggcgtgcggggccagtgtgacagaagaagacatgaaacagctgccacagagatcggcggcaagatctttggagtgcccttcaatgccctgccccacagcgctgtgcctgaatatggccacatccccagcttcctggtggatgcctgcaccagcctggaggaccacatccacacagagggcctcttcaggaagagcggcagcgtcatccggctgaaggccctgaagaacaaggtggaccacggggagggctgcctgagcagcgccccaccctgtgacattgctggcctgctgaagcagttcttccgggagctgcctgagcccatcctgcctgctgacctgcacgaggccctgctgaaggcccagcagctgggcacagaggagaagaacaaggccaccctgctgctgagctgcctgctggccgaccacacagtgcacgtgctgcgctacttcttcaacttcctgagaaatgtgtccctgcggagcagcgagaacaagatggacagcagcaacctggccgtcatctttgcccccaacctgctgcagaccagcgagggccacgagaagatgagcagcaacacagagaagaagctgcggctgcaggccgctgtggtgcagaccctgattgattatgccagtgacatcggccgggtgcctgacttcatcctggagaagatcccagccatgctgggcattgatggcctgtgtgccacccccagcctggagggctttgaggagggggagtatgagaccccaggagagtacaagaggaagaggcggcagagcgtgggggactttgtgtctggggccctgaacaagttcaagcccaacagaacacccagcatcaccccccaggaggagcgcatcgcccagctgtctgagagccctgtgatcctgaccccaaatgccaagaggaccctgcctgtggacagcagccacggcttcagcagcaagaagaggaagagcatcaagcacaacttcaactttgagctgctgcccagcaacctcttcaacagcagcagcacccctgtgtctgtgcacatcgacaccagcagcgagggcagcagccagagcagcctgagccctgtgctgattggaggcaaccacctgatcacagctggggtgccccggcgcagcaagagaattgctgggaagaaggtgtgccgggtggagagcggcaaggccggctgcttcagccccaagatcagccacaaggagaaggtgcggcgcagcctgcggctgaagttcaacctgggcaagaatggccgggaggtgaatggctgcagcggcgtgaacagatatgaatctgtgggctggaggctggccaaccagcagagcctgaagaaccgcatcgagagcgtgaagacaggcctgctcttctccccagatgtggatgagaagctgcccaagaagggcaccttcacctactactgctag

SEQ ID NO: 261663 - DNA, 1506 bp, Artificial Sequence
  derived and/or modified sequence
atgtgggaccagcggctggtgcggctggccctgctgcagcacctgagggctttttatgggatcaaggtcaaaggggtgcgggggcaatgcgacagaaggcgacacgaaactgctgccacagaaattggcggcaagattttcggcgtgccgtttaatgcccttcctcacagtgccgtcccagagtacggtcacataccaagctttcttgttgatgcttgtacctctttggaagatcacatccacacggaaggcctgtttaggaagagcgggtccgttatccgcttgaaagctctgaaaaacaaagtggaccacggcgaagggtgcctctcatcagcaccaccttgcgacatagccggcctcctcaaacaattctttagggagctcccagaacccatcctccctgctgacctgcatgaggcactcctgaaggcccaacaattaggcacggaggagaaaaacaaggccacactcctcctgagctgcttactagccgaccacaccgtgcacgtgcttaggtacttcttcaattttttaaggaacgtgagtcttagaagctctgagaataagatggactcctcaaacctagccgtgatctttgcaccaaaccttctacaaaccagcgaaggacatgagaagatgtcctcaaatactgagaaaaaattgagactgcaggccgcggtcgtgcagactcttatcgactatgcctctgatataggaagggttccagacttcatcctggaaaaaatccccgccatgcttggaattgacgggctatgtgcaacccctagcctggaaggattcgaggagggagagtacgagactcccggtgagtataagcgcaagcggaggcagtcggttggagattttgtttccggtgcactgaataagtttaaaccaaaccggaccccttcaatcacaccgcaggaggagaggatagcccagctctcagagtcacccgtgatcttgacgccaaatgccaagcgaaccctgcccgtcgattcaagccacggcttttccagtaagaagcggaagagcattaaacataactttaacttcgagctcctgccgtcaaatctgtttaatagctcctctaccccagtgtctgtgcatatcgatacgagctcagagggatctagccagtcatccctatctccagtactgattgggggaaatcacctcattacagctggtgttccacgacgatctaagcgcatcgccggcaagaaagtgtgccgggtggagagcgggaaagccggatgtttttcaccaaaaatctctcacaaggagaaggtgagacgctccctgcgactgaagtttaacttagggaaaaatggccgggaggtgaatgggtgttccggagtgaaccgctatgaatccgtggggtggcgcttagccaatcaacagagcctgaaaaatcgtatcgagtccgttaagacaggactgctcttttcaccagatgtagatgaaaagcttccgaagaaaggcacattcacgtactattgttag

SEQ ID NO: 261664 - DNA, 1506 bp, Artificial Sequence
  derived and/or modified sequence
atgtgggatcaacgactggtgcggcttgccctgttgcaacacttacgggctttttacgggataaaggttaaaggcgtgcgcggtcaatgcgacaggcgacggcatgagaccgctgcaactgagatcggagggaaaatcttcggtgtgcctttcaatgccttacctcattctgccgttcctgagtacgggcatattccctccttccttgtggatgcctgcactagtcttgaagatcatatacacacggaaggtctgttccggaagagcggatcagtgataaggttgaaagcccttaaaaataaggtggaccatggtgaaggatgcctgagtagtgcacctccttgcgacatcgccggtctacttaagcaattcttcagggaactgcccgagccaattttgccggcagatctgcatgaagcactcctgaaggcccagcaactgggaacagaagaaaaaaacaaagcgacgctcctactgtcttgcctccttgccgaccataccgtacacgtgttacgctactttttcaattttctgagaaacgtgtcccttcgctcttcagaaaataagatggactcctcaaacctcgcagtcatcttcgcacctaacctgttgcaaacatctgaaggccatgaaaagatgagttccaacacagaaaaaaagttacggcttcaagcggcagtcgttcagaccctgatcgattatgccagcgacatcggccgagtgcccgactttattctggagaagatccccgcaatgcttggcattgatggcctttgtgctactccgagtctagaaggctttgaagaaggcgaatacgaaacacctggggaatacaagagaaagaggaggcagtccgtgggtgacttcgtttccggggctctcaacaagtttaaacccaacagaacaccctcaatcaccccccaagaggaacgcatagcccagctttcagagtcccccgtgatcctgactcccaacgctaaaaggactttaccggtcgactcaagccacggcttcagtagtaagaaacgcaagtctatcaaacacaactttaatttcgagcttttgccatcaaatctgtttaactccagtagcacccctgtatctgtacatatcgatacctccagcgagggttcctcgcagtcatctctatctcccgtgctcataggcggtaaccacctcattaccgcaggcgttccaagacgttcaaaaaggatcgcagggaagaaagtgtgtcgcgtggagtcagggaaggcgggttgttttagccccaagatatcccataaagagaaggtgaggcgctctctgcggctgaagttcaacctgggaaaaaatggccgagaggtgaacggatgttcaggcgtgaacagatacgaatccgtaggttggaggctggcgaaccagcagagcctcaagaaccggatagagtcagtcaagactggcctcctgttttcaccagacgtggatgagaagttgccgaaaaaaggaaccttcacctattattgttag

SEQ ID NO: 261665 - DNA, 2422 bp, Artificial Sequence
  derived and/or modified sequence
agctgggggcggaagcatgaggctaacggcttggcttcagtgaacgcaccgggatgtgcaggccgggaggtagaggcaggctgatgggggagggaacgagcagcctgtgagacggggtgacggcggctaccagcccgggcgggcaccgggactggaagagttgcctgagcagccggctggtccggcggccaggctagggcgggggcgagcgcccagttgagcctgctggggctggaggagcgagaagggttttcttcacatttcagagcgaaccagacggggacagtaaggtttggaggaagggggatcgttggaagtagcaagaagtggagagaatctggcaatagacgagaaaccgaaagaatcagaaagaagtctatgtgagtagctgaaagcattgggtgaccagaaagaaggtcggtgtaagtgaaggaagagtgaggtgtggctggatcaaagggctaagagaagcgggtctgtgtaagtggatgtgagtgaggatcaaggaaaagccgtggaagtggccgggggtcggggccgcagaagtgccagacggggccggaaagcagccgagcggagttcaaatttgagagcgtttggaaattggaagacttggtggcgaacgagggtcaggacctgcatcctgcctcagagagttatcgacgtatccggaatgtgggatcagaggctggtgaggttggccctgttgcagcatctgcgggccttctatggtattaaggtgaagggtgtccgtgggcagtgcgatcgcaggagacatgaaacagcagccacggaaatagggggtaaaatatttggagtaccttttaatgcactgccccattctgctgtaccagaatatggacacattccaagctttcttgtcgatgcttgcacatctttagaagaccatattcataccgaagggctttttcggaaatcaggatctgtgattcgcctaaaagcactaaagaataaagtggatcatggtgaaggttgcctatcttctgcacctccttgtgatattgcgggacttcttaagcagttttttagggaactgccagagcccattctcccagctgatttgcatgaagcacttttgaaagctcaacagttaggcacagaggaaaagaataaagctacactgttgctctcctgtcttctggctgaccacacagttcatgtattaagatacttctttaactttctcaggaatgtttctcttagatccagtgagaataagatggacagcagcaatcttgcagtaatatttgcaccgaatcttcttcagacaagtgaaggacatgaaaagatgtcttctaacacagaaaagaagctacgattacaggctgcagtagtacagactcttatcgattatgcatcagatattgggcgtgtaccagattttatcctggaaaagataccagccatgttgggtattgatggtctctgtgctactccatcactggaaggctttgaagaaggtgaatatgaaactcctggtgaatataagagaaagagaagacaaagtgtaggagattttgttagtggagcactaaataaatttaaacctaacagaacaccttctattacacctcaagaagaaagaattgcccagctatctgaatcaccagtgattcttacaccaaatgctaagcgtacattgccagtagattcttctcatggtttctcaagtaagaaaaggaagtccatcaagcacaattttaactttgagctgttgccaagtaatctcttcaatagcagttctacaccggtatcagttcacatcgatacaagctcagaagggtcatctcagagttcactctctcctgtactcattggtggaaaccatttgatcactgcaggtgtgccaaggcgaagtaaaagaattgcaggcaaaaaagtttgcagagtggaatcaggaaaagcaggctgcttttctcctaaaatcagccataaagaaaaggttcgaagatctctgcgtttgaaattcaatctagggaaaaatggcagagaagtaaatggatgttctggtgtcaatagatatgaaagtgttggttggcgacttgcaaatcaacaaagtttaaaaaatcgaattgaatctgtaaaaacaggtttgctttttagcccagatgttgatgaaaagttaccaaagaaaggtacatttacatactactgttagagttttacctaaaaatcctgctttagttgcttttttaatggcaaaacatattaattaatttactgttctagagattaaaagttcatgtttgaatagtgaaaatattagaattggcaatgtatttttctatcaacaattgggaaatgcttatacatgtaaatatgaaaatgtttgacattcttatgttaaaaattatttcttgtaacacaaatactttattagaattaaatgcttagtgactta

SEQ ID NO: 261666 - DNA, 1506 bp, Artificial Sequence
  derived and/or modified sequence
atgtgggaccagagactggtgagactggccctgctgcagcacctgagagccttctacggcatcaaggtgaagggcgtgagaggccagtgcgacagaagaagacacgagaccgccgccaccgagatcggcggcaagatcttcggcgtgcccttcaacgccctgccccacagcgccgtgcccgagtacggccacatccccagcttcctggtggacgcctgcaccagcctggaggaccacatccacaccgagggcctgttcagaaagagcggcagcgtgatcagactgaaggccctgaagaacaaggtggaccacggcgagggctgcctgagcagcgcccccccctgcgacatcgccggcctgctgaagcagttcttcagagagctgcccgagcccatcctgcccgccgacctgcacgaggccctgctgaaggcccagcagctgggcaccgaggagaagaacaaggccaccctgctgctgagctgcctgctggccgaccacaccgtgcacgtgctgagatacttcttcaacttcctgagaaacgtgagcctgagaagcagcgagaacaagatggacagcagcaacctggccgtgatcttcgcccccaacctgctgcagaccagcgagggccacgagaagatgagcagcaacaccgagaagaagctgagactgcaggccgccgtggtgcagaccctgatcgactacgccagcgacatcggcagagtgcccgacttcatcctggagaagatccccgccatgctgggcatcgacggcctgtgcgccacccccagcctggagggcttcgaggagggcgagtacgagacccccggcgagtacaagagaaagagaagacagagcgtgggcgacttcgtgagcggcgccctgaacaagttcaagcccaacagaacccccagcatcaccccccaggaggagagaatcgcccagctgagcgagagccccgtgatcctgacccccaacgccaagagaaccctgcccgtggacagcagccacggcttcagcagcaagaagagaaagagcatcaagcacaacttcaacttcgagctgctgcccagcaacctgttcaacagcagcagcacccccgtgagcgtgcacatcgacaccagcagcgagggcagcagccagagcagcctgagccccgtgctgatcggcggcaaccacctgatcaccgccggcgtgcccagaagaagcaagagaatcgccggcaagaaggtgtgcagagtggagagcggcaaggccggctgcttcagccccaagatcagccacaaggagaaggtgagaagaagcctgagactgaagttcaacctgggcaagaacggcagagaggtgaacggctgcagcggcgtgaacagatacgagagcgtgggctggagactggccaaccagcagagcctgaagaacagaatcgagagcgtgaagaccggcctgctgttcagccccgacgtggacgagaagctgcccaagaagggcaccttcacctactactgctag

SEQ ID NO: 261667 - protein, 186 aa, Artificial Sequence
  derived and/or modified sequence
MDSAGQDINLNSPNKGLLSDSMTDVPVDTGVAARTPAVEGLTEAEEEELRAELTKVEEEIVTLRQVLAAKERHCGELKRRLGLSTLGELKQNLSRSWHDVQVSSAYKKTQETLSQAGQKTSAALSTVGSAISRKLGDMRNSATFKSFEDRVGTIKSKVVGDRENGSDNLPSSAGSGDKPLSDPAPF

SEQ ID NO: 261668 - DNA, 561 bp, Artificial Sequence
  derived and/or modified sequence
atggacagcgccggccaggacatcaacctgaacagccccaacaagggcctgctgagcgacagcatgaccgacgtgcccgtggacaccggcgtggccgccagaacccccgccgtggagggcctgaccgaggccgaggaggaggagctgagagccgagctgaccaaggtggaggaggagatcgtgaccctgagacaggtgctggccgccaaggagagacactgcggcgagctgaagagaagactgggcctgagcaccctgggcgagctgaagcagaacctgagcagaagctggcacgacgtgcaggtgagcagcgcctacaagaagacccaggagaccctgagccaggccggccagaagaccagcgccgccctgagcaccgtgggcagcgccatcagcagaaagctgggcgacatgagaaacagcgccaccttcaagagcttcgaggacagagtgggcaccatcaagagcaaggtggtgggcgacagagagaacggcagcgacaacctgcccagcagcgccggcagcggcgacaagcccctgagcgaccccgcccccttctag

SEQ ID NO: 261669 - DNA, 561 bp, Artificial Sequence
  derived and/or modified sequence
atggactccgctggtcaggacataaacctaaattcacctaataagggcctgctgtccgacagcatgacagacgtaccagtggacactggcgttgctgcacgaactccagccgtggaaggactgacagaagctgaggaggaggagctgcgagccgagcttacgaaagtggaggaagagattgtgactcttcgacaagtactggccgcaaaggagcgccactgcggagaattgaaacgcaggttagggctaagcacgctcggagaacttaaacagaacttgtcgaggtcttggcacgatgttcaggtgagtagtgcctataagaaaacccaggagacgctgtcccaggcaggacagaagacttccgccgcgttgtccaccgtggggagtgccattagtaggaagctcggagacatgcgtaacagcgcaactttcaaaagcttcgaggatagagttggcacgataaaaagtaaagttgtcggggaccgcgagaatggatctgacaacctgccaagctcagctgggtccggggataagccattatctgaccctgccccattctag

SEQ ID NO: 261670 - DNA, 561 bp, Artificial Sequence
  derived and/or modified sequence
atggattctgctggccaggacatcaacctgaacagccccaacaagggcctgctgagtgacagcatgacagatgtgcctgtggacacaggagtggccgcccggaccccagctgtggagggcctgacagaggccgaggaggaggagctgcgggcagagctgaccaaggtggaggaggagatcgtgaccctgcggcaggtgctggccgccaaggagcggcactgtggggagctgaagaggcggctgggcctgagcaccctgggggagctgaagcagaacctgagccgctcctggcatgatgtgcaggtgagcagcgcctacaagaagacccaggagaccctgagccaggccggccagaagaccagcgctgccctgagcacagtgggcagcgccatcagcaggaagctgggggacatgagaaattctgccaccttcaagagctttgaggacagagtgggcaccatcaagagcaaggtggtgggggacagagaaaatggaagtgacaacctgcccagcagcgctggcagcggggacaagcccctgagtgaccctgcccccttctag

SEQ ID NO: 261671 - DNA, 561 bp, Artificial Sequence
  derived and/or modified sequence
atggacagcgccggccaggacatcaacctgaacagccccaacaagggcttgctctctgactcaatgacagacgtccctgtcgacaccggagtggcggcaaggactcccgctgtggaagggctaacagaagccgaagaagaggaactgcgtgctgagttgaccaaggtcgaagaggaaatcgtgacgttacgtcaggtactggctgctaaggagcggcactgcggagaattgaagagacgcttagggctgtctactttgggcgagctaaagcagaatctgtccagatcctggcatgatgtacaagtttctagtgcatacaaaaaaacgcaagagacactctcccaggctggacaaaagactagtgcggccctttctactgtgggctccgccatcagccgcaaattgggtgacatgaggaactccgccacctttaaatctttcgaggaccgggtgggcacaataaaaagcaaagtggtcggggaccgggagaatggcagcgataatttgccatcaagtgccggcagcggtgacaaaccgctgtccgatcctgccccattctag

SEQ ID NO: 261672 - DNA, 561 bp, Artificial Sequence
  derived and/or modified sequence
atggactctgccggtcaggacatcaacctcaatagcccaaacaagggacttctgtccgactctatgactgacgttcctgttgatactggagtggctgcccgtacccctgctgtggaagggctgacagaagccgaggaggaggagctgagagccgagttaacaaaggtggaagaggagattgtaaccctccgacaagttctagctgctaaggagcgtcactgtggggagttgaagagaagattaggactgtcaacgctcggcgagctcaagcagaatctgtcccggagctggcacgacgttcaggtcagttccgcctataagaagacccaggaaactctcagccaagctggccagaagacgtcagccgcattaagtactgtcggatccgccattagcaggaagctgggtgacatgcgtaacagcgccacctttaaaagcttcgaggatagggtgggcactattaagagcaaagtcgtcggtgaccgtgagaacggaagtgataatctgccaagtagtgctggttcaggggataagcccttgagcgatcccgctcccttttag

SEQ ID NO: 261673 - DNA, 2237 bp, Artificial Sequence
  derived and/or modified sequence
acgcggcgagcttctcccggcgccgcccgctcggctcccatagcgcccgcgacagcggtccggacgccgcccgaacatggactccgccggccaagatatcaacctgaattctcctaacaaaggtctgctgtctgactccatgacggatgttcctgtcgacacaggtgtggctgcccggactcctgctgttgagggtctgacagaggctgaggaggaggagctcagggctgagcttaccaaggtggaagaggaaattgtcactctgcgccaggtcctggcagccaaggagaggcactgtggagagctcaagaggaggctgggcctctccaccctgggggagctgaaacagaacctgtccaggagctggcatgacgtgcaggtctctagcgcctacaagaagactcaggaaactctttcacaggcaggacagaagacttcagctgccctgtccacagtgggctctgccatcagcaggaagcttggagacatgaggaactctgcgaccttcaagtcgtttgaggaccgagttgggaccataaagtctaaggttgtgggtgacagagagaacggcagtgacaacctcccttcctcagcggggagtggtgacaagcccctgtcggatcccgcacctttctaagcctgtggttgcttcacccgctgcagagcacacgcaacccagcctcagcatcacagccgcagctctgttcagcggagcagccagccagggcggatgagcagagccggccctgaggacagtcctgcccatccacgcggagatgtggctgccgcgtttgcatgaatttgaagaacacaggcttgtacacagatgttttacactcacgtttgtagatgaaacagatcactgtgctgtccttcctaggggtgcaggaagtggacagggcggagggtttgaaagaatattgagccaaagcccaggctccctttgggaatcatgttagcccatcagaatgttgaaggattgaagagttctaagcataaaataagtggcattttctgacttcttcctcctcctccttccctgactcacagaaggaatgcaatcacccagcaagtcctacctgttacgcaattttttatctcaaaatgccgaacgagaaaactgtccattttctgagacccccagaaaggaaactgaccctcagcagctgcctgattgttacgcgaatctagctttaacggaagcaaattcattattttttaaatgcagtggacttttcaaaaagtttaaattaggcaaagcagctttagcctcatagaatattatttctttggactcaagctgaaatacaagccttacattgccttatgctttatttctttctaatttttatatgtatatagatgagggttccttaatggttgtgagcattgtgtggaattttacacctggcctgcgtggcagcctcttccagttgaggtgttttatgtcacgcacactccatcccagtgtacaaaacctgcttctcttctcaaccgtggcagctcccgctggctcctatgccctgccctaaagggctcttgagcctctgggaatgggaggggccaagagaaggaaaaccctgtctttagcaccctttaaaagaactgtgccccccttctcagtgctgcctttgcatgggcctggcccggctcacattcgtcagtgactccaaccctcctgcttgctgtacttgggatgaaacgaccccacaggtcaggtggagggtggggcgtgggcatcagccaggattgccgttacagtctttttctcaggagctacaaagatctcttcctgttactaaatagtcgcaccccagcagcctctctcgcacaccggggccctgcatgtcagatggcgtggtctgcagggggagctctgtgccttagtggctcttggcaggacactgagggcctgcctgtggtgtgcccggctctgccactcccgggaggggaagggctgctcagctcaaggtgtcctgttcggtagagcaagtgtcctctgacagccgtgtccccggacagttcagacacccttggggatggcactccacacacgacagagatgcaggggccagggaagcccagcgctcggtgcccttcgtccagggttaaaatcggcctgtggggtgtggtgagaaggcaggttgtgcgggtgttgaccgatgtatcttttccttaaagttattataataatgggtaatttgtcaataaagcattcctttgggggaaagtccgcc

SEQ ID NO: 261674 - protein, 229 aa, Artificial Sequence
  derived and/or modified sequence
MDSAGQDINLNSPNKGLLSDSMTDVPVDTGVAARTPAVEGLTEAEEEELRAELTKVEEEIVTLRQVLAAKERHCGELKRRLGLSTLGELKQNLSRSWHDVQVSSAYVKTSEKLGEWNEKVTQSDLYKKTQETLSQAGQKTSAALSTVGSAISRKLGDMRAHPFSHSFSSYSIRHSISMPAMRNSATFKSFEDRVGTIKSKVVGDRENGSDNLPSSAGSGDKPLSDPAPF

SEQ ID NO: 261675 - DNA, 690 bp, Artificial Sequence
  derived and/or modified sequence
atggacagcgccggccaggacatcaacctgaacagccccaacaagggcctgctgagcgacagcatgaccgacgtgcccgtggacaccggcgtggccgccagaacccccgccgtggagggcctgaccgaggccgaggaggaggagctgagagccgagctgaccaaggtggaggaggagatcgtgaccctgagacaggtgctggccgccaaggagagacactgcggcgagctgaagagaagactgggcctgagcaccctgggcgagctgaagcagaacctgagcagaagctggcacgacgtgcaggtgagcagcgcctacgtgaagaccagcgagaagctgggcgagtggaacgagaaggtgacccagagcgacctgtacaagaagacccaggagaccctgagccaggccggccagaagaccagcgccgccctgagcaccgtgggcagcgccatcagcagaaagctgggcgacatgagagcccaccccttcagccacagcttcagcagctacagcatcagacacagcatcagcatgcccgccatgagaaacagcgccaccttcaagagcttcgaggacagagtgggcaccatcaagagcaaggtggtgggcgacagagagaacggcagcgacaacctgcccagcagcgccggcagcggcgacaagcccctgagcgaccccgcccccttctag

SEQ ID NO: 261676 - DNA, 690 bp, Artificial Sequence
  derived and/or modified sequence
atggattctgcaggtcaagatatcaatctcaactcccctaacaagggcctgctctcagattcgatgacagatgttccggtggatactggagtggcagcccggacgcccgctgttgaagggttgaccgaagctgaagaagaagagctgcgagccgagctgacaaaggtggaagaggagatcgtgaccctccggcaggtcctcgcggccaaggaacgccattgcggcgagctgaaacgacgcctgggtctatccacattgggagagctgaagcagaatctcagccgatcctggcatgatgtccaggtgagtagtgcctatgtgaagactagcgagaagctcggcgagtggaatgagaaggtcacgcaatctgatctatacaagaagacgcaggagaccttgtcccaggcagggcagaagaccagtgccgcactgagcactgtaggaagtgctatttcccggaagcttggggatatgcgagcccatccattctctcatagtttttcatcctacagtatccggcactccatatccatgccagcaatgagaaattcggcaactttcaagtccttcgaagacagggtcggcacaattaagagtaaggtcgttggcgaccgtgagaatggttccgacaacctgccttcaagcgctggctccggggataaacctctgtccgatcctgcccccttctag

SEQ ID NO: 261677 - DNA, 690 bp, Artificial Sequence
  derived and/or modified sequence
atggattctgctggccaggacatcaacctgaacagccccaacaagggcctgctgagtgacagcatgacagatgtgcctgtggacacaggagtggccgcccggaccccagctgtggagggcctgacagaggccgaggaggaggagctgcgggcagagctgaccaaggtggaggaggagatcgtgaccctgcggcaggtgctggccgccaaggagcggcactgtggggagctgaagaggcggctgggcctgagcaccctgggggagctgaagcagaacctgagccgctcctggcatgatgtgcaggtgagcagcgcctacgtgaagaccagcgagaagctgggggagtggaatgagaaggtgacccagagcgacctgtacaagaagacccaggagaccctgagccaggccggccagaagaccagcgctgccctgagcacagtgggcagcgccatcagcaggaagctgggggacatgagggcccaccccttcagccacagcttcagcagctacagcatccgccacagcatctccatgcctgccatgaggaacagcgccaccttcaagagctttgaagatagagtgggcaccatcaagagcaaggtggtgggggaccgggagaatggaagtgacaacctgcccagcagcgctggcagcggggacaagcccctgagtgaccctgcccccttctag

SEQ ID NO: 261678 - DNA, 690 bp, Artificial Sequence
  derived and/or modified sequence
atggacagcgccggccaggacatcaacctgaacagccccaacaagggattgctttccgattcaatgactgatgtacccgtggacacaggagtggcagctcggacgccggcagtggaaggtttgactgaggccgaagaggaggagctccgggccgaactgactaaggtcgaggaggaaatcgtgacactacggcaggtgttggcagcgaaagagcggcactgcggcgagctgaagcgacgcctgggcttgtcaactttgggagagctaaagcagaatctgtctcgctcttggcacgacgtgcaagtcagttccgcatacgtgaagacatctgagaaactcggtgagtggaatgagaaggtgacccagtccgacctctataagaagacccaggagaccctgagtcaggctggccaaaaaacctccgccgcgttgtcgaccgtcggatcagcgatcagtcggaagctgggtgacatgagagcacaccccttcagccactctttcagtagctatagtattagacatagcatttccatgccagccatgcgcaactctgccacctttaagagtttcgaggacagagtcgggactatcaaatccaaagtcgtcggggatagagaaaatggcagcgacaatttgcccagcagtgccggtagtggagacaagcccctaagtgacccggcacctttttag

SEQ ID NO: 261679 - DNA, 690 bp, Artificial Sequence
  derived and/or modified sequence
atggactcagccggtcaggacatcaacctgaatagcccaaacaagggtcttctcagtgactccatgacagacgttcctgtcgacacaggcgtcgccgcacgtacaccagccgtggaggggctgactgaggccgaggaggaagagctacgagccgagttgacaaaggtcgaggaggaaatcgttaccctccgacaagttctggccgcaaaggagcgccactgtggtgaactgaagagacgcctcgggctgtccacactgggagagctgaaacagaacctgtcccgcagctggcatgacgttcaggtgagttcagcgtacgtaaagacaagcgagaagctgggggagtggaacgagaaagtgacacaatcagacttgtataaaaaaactcaggaaaccctatcccaggctggacaaaaaacctctgctgctctatccaccgtgggcagcgccatttcacgcaaactgggcgacatgcgagctcatcccttcagccattcattctctagttattccatccgccatagtatcagtatgcccgcaatgcgaaacagcgccacattcaaatctttcgaggatcgggtgggaactatcaaaagtaaggtggttggagatcgcgaaaatggctcagataaccttccatcttccgcaggaagcggcgacaagcctttaagcgaccctgctcccttctag

SEQ ID NO: 261680 - DNA, 2362 bp, Artificial Sequence
  derived and/or modified sequence
ggcgagcttctcccggcgccgcccgctcggctcccatagcgcccgcgacagcggtccggacgccgcccgaacatggactccgccggccaagatatcaacctgaattctcctaacaaaggtctgctgtctgactccatgacggatgttcctgtcgacacaggtgtggctgcccggactcctgctgttgagggtctgacagaggctgaggaggaggagctcagggctgagcttaccaaggtggaagaggaaattgtcactctgcgccaggtcctggcagccaaggagaggcactgtggagagctcaagaggaggctgggcctctccaccctgggggagctgaaacagaacctgtccaggagctggcatgacgtgcaggtctctagcgcctatgtgaaaacttctgagaaacttggagagtggaatgagaaagtgacccagtcagacctctacaagaagactcaggaaactctttcacaggcaggacagaagacttcagctgccctgtccacagtgggctctgccatcagcaggaagcttggagacatgagggctcatccattttcacactcctttagcagctactccatccgccactcaataagtatgccagccatgaggaactctgcgaccttcaagtcgtttgaggaccgagttgggaccataaagtctaaggttgtgggtgacagagagaacggcagtgacaacctcccttcctcagcggggagtggtgacaagcccctgtcggatcccgcacctttctaagcctgtggttgcttcacccgctgcagagcacacgcaacccagcctcagcatcacagccgcagctctgttcagcggagcagccagccagggcggatgagcagagccggccctgaggacagtcctgcccatccacgcggagatgtggctgccgcgtttgcatgaatttgaagaacacaggcttgtacacagatgttttacactcacgtttgtagatgaaacagatcactgtgctgtccttcctaggggtgcaggaagtggacagggcggagggtttgaaagaatattgagccaaagcccaggctccctttgggaatcatgttagcccatcagaatgttgaaggattgaagagttctaagcataaaataagtggcattttctgacttcttcctcctcctccttccctgactcacagaaggaatgcaatcacccagcaagtcctacctgttacgcaattttttatctcaaaatgccgaacgagaaaactgtccattttctgagacccccagaaaggaaactgaccctcagcagctgcctgattgttacgcgaatctagctttaacggaagcaaattcattattttttaaatgcagtggacttttcaaaaagtttaaattaggcaaagcagctttagcctcatagaatattatttctttggactcaagctgaaatacaagccttacattgccttatgctttatttctttctaatttttatatgtatatagatgagggttccttaatggttgtgagcattgtgtggaattttacacctggcctgcgtggcagcctcttccagttgaggtgttttatgtcacgcacactccatcccagtgtacaaaacctgcttctcttctcaaccgtggcagctcccgctggctcctatgccctgccctaaagggctcttgagcctctgggaatgggaggggccaagagaaggaaaaccctgtctttagcaccctttaaaagaactgtgccccccttctcagtgctgcctttgcatgggcctggcccggctcacattcgtcagtgactccaaccctcctgcttgctgtacttgggatgaaacgaccccacaggtcaggtggagggtggggcgtgggcatcagccaggattgccgttacagtctttttctcaggagctacaaagatctcttcctgttactaaatagtcgcaccccagcagcctctctcgcacaccggggccctgcatgtcagatggcgtggtctgcagggggagctctgtgccttagtggctcttggcaggacactgagggcctgcctgtggtgtgcccggctctgccactcccgggaggggaagggctgctcagctcaaggtgtcctgttcggtagagcaagtgtcctctgacagccgtgtccccggacagttcagacacccttggggatggcactccacacacgacagagatgcaggggccagggaagcccagcgctcggtgcccttcgtccagggttaaaatcggcctgtggggtgtggtgagaaggcaggttgtgcgggtgttgaccgatgtatcttttccttaaagttattataataatgggtaatttgtcaataaagcattcctttgggggaaagtccgcc

SEQ ID NO: 261681 - protein, 209 aa, Artificial Sequence
  derived and/or modified sequence
MDSAGQDINLNSPNKGLLSDSMTDVPVDTGVAARTPAVEGLTEAEEEELRAELTKVEEEIVTLRQVLAAKERHCGELKRRLGLSTLGELKQNLSRSWHDVQVSSAYKKTQETLSQAGQKTSAALSTVGSAISRKLGDMRAHPFSHSFSSYSIRHSISMPAMRNSATFKSFEDRVGTIKSKVVGDRENGSDNLPSSAGSGDKPLSDPAPF

SEQ ID NO: 261682 - DNA, 630 bp, Artificial Sequence
  derived and/or modified sequence
atggacagcgccggccaggacatcaacctgaacagccccaacaagggcctgctgagcgacagcatgaccgacgtgcccgtggacaccggcgtggccgccagaacccccgccgtggagggcctgaccgaggccgaggaggaggagctgagagccgagctgaccaaggtggaggaggagatcgtgaccctgagacaggtgctggccgccaaggagagacactgcggcgagctgaagagaagactgggcctgagcaccctgggcgagctgaagcagaacctgagcagaagctggcacgacgtgcaggtgagcagcgcctacaagaagacccaggagaccctgagccaggccggccagaagaccagcgccgccctgagcaccgtgggcagcgccatcagcagaaagctgggcgacatgagagcccaccccttcagccacagcttcagcagctacagcatcagacacagcatcagcatgcccgccatgagaaacagcgccaccttcaagagcttcgaggacagagtgggcaccatcaagagcaaggtggtgggcgacagagagaacggcagcgacaacctgcccagcagcgccggcagcggcgacaagcccctgagcgaccccgcccccttctag

SEQ ID NO: 261683 - DNA, 630 bp, Artificial Sequence
  derived and/or modified sequence
atggattccgcaggccaggacattaacctaaactctcccaacaaggggctgctgtcagacagcatgaccgacgtcccagttgataccggcgtggccgctcgcacacccgctgtggagggactgaccgaagccgaagaggaagagttgcgggccgagctgacaaaggtggaggaggagatcgtgaccttaagacaggtcctcgcagcaaaagagcggcactgcggagagctgaagagaagactcggacttagtactctgggtgagcttaaacaaaatctgagtagatcctggcacgacgtgcaagtctcatcagcctacaagaagactcaggaaactttaagtcaggccggccagaagacttctgccgctctgtcaactgtggggtccgcaatctcaaggaagttgggggacatgcgagcccatcctttctcacattcattctcatcctacagtatcaggcattctatatcaatgccagctatgcgaaacagtgctacttttaagtcatttgaagatagggttggcaccataaagtctaaagtggtgggcgaccgcgagaacggttccgacaatctgccaagctccgccggtagtggagataagcctctcagcgaccccgccccattctag

SEQ ID NO: 261684 - DNA, 630 bp, Artificial Sequence
  derived and/or modified sequence
atggattctgctggccaggacatcaacctgaacagccccaacaagggcctgctgagtgacagcatgacagatgtgcctgtggacacaggagtggccgcccggaccccagctgtggagggcctgacagaggccgaggaggaggagctgcgggcagagctgaccaaggtggaggaggagatcgtgaccctgcggcaggtgctggccgccaaggagcggcactgtggggagctgaagaggcggctgggcctgagcaccctgggggagctgaagcagaacctgagccgctcctggcatgatgtgcaggtgagcagcgcctacaagaagacccaggagaccctgagccaggccggccagaagaccagcgctgccctgagcacagtgggcagcgccatcagcaggaagctgggggacatgagggcccaccccttcagccacagcttcagcagctacagcatccgccacagcatctccatgcctgccatgaggaacagcgccaccttcaagagctttgaagatagagtgggcaccatcaagagcaaggtggtgggggaccgggagaatggaagtgacaacctgcccagcagcgctggcagcggggacaagcccctgagtgaccctgcccccttctag

SEQ ID NO: 261685 - DNA, 630 bp, Artificial Sequence
  derived and/or modified sequence
atggacagcgccggccaggacatcaacctgaacagccccaacaagggcctcctgagtgattcaatgactgacgtgccggttgacacgggtgtggctgctcgcactccggctgtggaagggctgaccgaggccgaggaagaggagctgcgcgctgaactgaccaaagtagaggaggagattgtcacgttacgacaggtgcttgccgccaaggagcgccattgtggcgagctgaaacgaagattggggctcagcacgttaggtgaattaaaacagaatttgtcacgctcctggcacgacgtacaagttagtagcgcctataagaaaactcaggagaccttaagccaggcagggcagaagacctccgctgccttgtccaccgtgggttctgctatttcgaggaaactcggcgacatgcgcgcacatccattttctcactccttctcttcttacagtatcagacattctatcagcatgccggccatgcggaactccgccacttttaagtcattcgaggaccgggtagggaccattaagagcaaagtcgtaggtgatcgtgaaaacgggagcgacaatctgccatcatccgctggatcaggagataagcccttgtcagatccagcaccattctag

SEQ ID NO: 261686 - DNA, 630 bp, Artificial Sequence
  derived and/or modified sequence
atggattccgccggacaagacatcaaccttaactcccctaacaagggactgctctccgattcaatgacagacgtccccgtcgataccggagtcgccgctagaacccccgctgtggaaggactgacggaggcagaagaagaagaactcagagcagagctgacaaaggtagaagaggaaatcgtgacactcaggcaggtccttgctgcaaaggagcgccactgcggagagctaaagcgccgtctgggcctatccacactcggtgagcttaagcagaatctttctcgtagctggcacgatgtgcaggtgtcttctgcctataaaaagacccaagagacgctaagtcaggccggacagaagacaagcgccgcactgtccaccgtgggtagcgcaatctctagaaagttgggtgatatgcgtgcacatcctttctcacatagcttctccagttacagcattcggcacagcatctctatgcccgcaatgcgcaacagcgccacttttaagtcgttcgaggaccgtgtgggaacgatcaagagtaaggtagtgggcgatcgagagaacggctccgataacctcccctcgtcggcagggagtggggacaaacctctctctgaccctgccccattctag

SEQ ID NO: 261687 - DNA, 2302 bp, Artificial Sequence
  derived and/or modified sequence
ggcgagcttctcccggcgccgcccgctcggctcccatagcgcccgcgacagcggtccggacgccgcccgaacatggactccgccggccaagatatcaacctgaattctcctaacaaaggtctgctgtctgactccatgacggatgttcctgtcgacacaggtgtggctgcccggactcctgctgttgagggtctgacagaggctgaggaggaggagctcagggctgagcttaccaaggtggaagaggaaattgtcactctgcgccaggtcctggcagccaaggagaggcactgtggagagctcaagaggaggctgggcctctccaccctgggggagctgaaacagaacctgtccaggagctggcatgacgtgcaggtctctagcgcctacaagaagactcaggaaactctttcacaggcaggacagaagacttcagctgccctgtccacagtgggctctgccatcagcaggaagcttggagacatgagggctcatccattttcacactcctttagcagctactccatccgccactcaataagtatgccagccatgaggaactctgcgaccttcaagtcgtttgaggaccgagttgggaccataaagtctaaggttgtgggtgacagagagaacggcagtgacaacctcccttcctcagcggggagtggtgacaagcccctgtcggatcccgcacctttctaagcctgtggttgcttcacccgctgcagagcacacgcaacccagcctcagcatcacagccgcagctctgttcagcggagcagccagccagggcggatgagcagagccggccctgaggacagtcctgcccatccacgcggagatgtggctgccgcgtttgcatgaatttgaagaacacaggcttgtacacagatgttttacactcacgtttgtagatgaaacagatcactgtgctgtccttcctaggggtgcaggaagtggacagggcggagggtttgaaagaatattgagccaaagcccaggctccctttgggaatcatgttagcccatcagaatgttgaaggattgaagagttctaagcataaaataagtggcattttctgacttcttcctcctcctccttccctgactcacagaaggaatgcaatcacccagcaagtcctacctgttacgcaattttttatctcaaaatgccgaacgagaaaactgtccattttctgagacccccagaaaggaaactgaccctcagcagctgcctgattgttacgcgaatctagctttaacggaagcaaattcattattttttaaatgcagtggacttttcaaaaagtttaaattaggcaaagcagctttagcctcatagaatattatttctttggactcaagctgaaatacaagccttacattgccttatgctttatttctttctaatttttatatgtatatagatgagggttccttaatggttgtgagcattgtgtggaattttacacctggcctgcgtggcagcctcttccagttgaggtgttttatgtcacgcacactccatcccagtgtacaaaacctgcttctcttctcaaccgtggcagctcccgctggctcctatgccctgccctaaagggctcttgagcctctgggaatgggaggggccaagagaaggaaaaccctgtctttagcaccctttaaaagaactgtgccccccttctcagtgctgcctttgcatgggcctggcccggctcacattcgtcagtgactccaaccctcctgcttgctgtacttgggatgaaacgaccccacaggtcaggtggagggtggggcgtgggcatcagccaggattgccgttacagtctttttctcaggagctacaaagatctcttcctgttactaaatagtcgcaccccagcagcctctctcgcacaccggggccctgcatgtcagatggcgtggtctgcagggggagctctgtgccttagtggctcttggcaggacactgagggcctgcctgtggtgtgcccggctctgccactcccgggaggggaagggctgctcagctcaaggtgtcctgttcggtagagcaagtgtcctctgacagccgtgtccccggacagttcagacacccttggggatggcactccacacacgacagagatgcaggggccagggaagcccagcgctcggtgcccttcgtccagggttaaaatcggcctgtggggtgtggtgagaaggcaggttgtgcgggtgttgaccgatgtatcttttccttaaagttattataataatgggtaatttgtcaataaagcattcctttgggggaaagtccgcc

SEQ ID NO: 261688 - protein, 220 aa, Artificial Sequence
  derived and/or modified sequence
MDSAGQDINLNSPNKGLLSDSMTDVPVDTGVAARTPAVEGLTEAEEEELRAELTKVEEEIVTLRQVLAAKERHCGELKRRLGLSTLGELKQNLSRSWHDVQVSSAYVKTSEKLGEWNEKVTQSDLYKKTQETLSQAGQKTSAALSTVGSAISRKLGDMSSYSIRHSISMPAMRNSATFKSFEDRVGTIKSKVVGDRENGSDNLPSSAGSGDKPLSDPAPF

SEQ ID NO: 261689 - DNA, 663 bp, Artificial Sequence
  derived and/or modified sequence
atggacagcgccggccaggacatcaacctgaacagccccaacaagggcctgctgagcgacagcatgaccgacgtgcccgtggacaccggcgtggccgccagaacccccgccgtggagggcctgaccgaggccgaggaggaggagctgagagccgagctgaccaaggtggaggaggagatcgtgaccctgagacaggtgctggccgccaaggagagacactgcggcgagctgaagagaagactgggcctgagcaccctgggcgagctgaagcagaacctgagcagaagctggcacgacgtgcaggtgagcagcgcctacgtgaagaccagcgagaagctgggcgagtggaacgagaaggtgacccagagcgacctgtacaagaagacccaggagaccctgagccaggccggccagaagaccagcgccgccctgagcaccgtgggcagcgccatcagcagaaagctgggcgacatgagcagctacagcatcagacacagcatcagcatgcccgccatgagaaacagcgccaccttcaagagcttcgaggacagagtgggcaccatcaagagcaaggtggtgggcgacagagagaacggcagcgacaacctgcccagcagcgccggcagcggcgacaagcccctgagcgaccccgcccccttctag

SEQ ID NO: 261690 - DNA, 663 bp, Artificial Sequence
  derived and/or modified sequence
atggacagtgccggacaagacatcaacctcaacagcccaaataagggattactgtcggacagcatgacagacgtcccagtggacaccggggttgcggccaggacaccggcggtagaaggactgactgaagctgaggaagaagaattgagagccgaactgaccaaggttgaggaggagatagtgaccctcagacaagttctggccgcaaaggaaagacactgcggggagttgaagagacggctgggcctctctactctcggagagctgaagcagaacctatctaggtcctggcatgacgttcaagtgagctcggcgtacgtaaagacatccgagaagctgggggaatggaatgagaaagtcacgcagagtgatctttacaaaaaaacccaagaaactctcagccaagccgggcaaaaaacttctgcagctctgtccacagttggcagcgcaataagtcgcaagctgggagatatgtccagttacagcatacggcattccatttctatgccagctatgcgtaactcagccacattcaaaagttttgaagaccgggtcggaaccatcaaatccaaagtagtcggagatagggaaaacggtagcgataatctaccatcctcagccggctccggcgacaagcctctctcagacccagctcccttctag

SEQ ID NO: 261691 - DNA, 663 bp, Artificial Sequence
  derived and/or modified sequence
atggattctgctggccaggacatcaacctgaacagccccaacaagggcctgctgagtgacagcatgacagatgtgcctgtggacacaggagtggccgcccggaccccagctgtggagggcctgacagaggccgaggaggaggagctgcgggcagagctgaccaaggtggaggaggagatcgtgaccctgcggcaggtgctggccgccaaggagcggcactgtggggagctgaagaggcggctgggcctgagcaccctgggggagctgaagcagaacctgagccgctcctggcatgatgtgcaggtgagcagcgcctacgtgaagaccagcgagaagctgggggagtggaatgagaaggtgacccagagcgacctgtacaagaagacccaggagaccctgagccaggccggccagaagaccagcgctgccctgagcacagtgggcagcgccatcagcaggaagctgggggacatgagcagctacagcatccgccacagcatctccatgcctgccatgagaaattctgccaccttcaagagctttgaggacagagtgggcaccatcaagagcaaggtggtgggggacagagaaaatggaagtgacaacctgcccagcagcgctggcagcggggacaagcccctgagtgaccctgcccccttctag

SEQ ID NO: 261692 - DNA, 663 bp, Artificial Sequence
  derived and/or modified sequence
atggacagcgccggccaggacatcaacctgaacagccccaacaagggactgctctctgattcaatgacagacgttccagtcgacacaggagtggcagccagaacccccgccgtagaaggccttaccgaggcagaggaagaggagctgcgagcagaactgacaaaggttgaagaagagatagttacgctgcggcaggtactggctgcgaaggagaggcactgcggggagctcaagcgtagactgggcttgtcgacacttggtgagcttaagcagaatctatctagaagctggcacgatgttcaggtgagctccgcctatgtgaagacctccgagaaactgggggagtggaacgagaaagttactcagtccgatttgtataaaaaaacgcaggaaactctgtcgcaggctggccagaagacatccgcagctttgtccacagttggcagtgctattagtaggaagctgggcgatatgagttcctatagcattcgacattctatctccatgcctgcaatgcgaaattcagcaacttttaagagcttcgaggaccgcgtgggtaccatcaaaagcaaagtggtgggggaccgggagaacgggtctgataacctgccgagtagcgctggatcaggggacaagcctctgtcagatcccgctccattctag

SEQ ID NO: 261693 - DNA, 663 bp, Artificial Sequence
  derived and/or modified sequence
atggactccgctggtcaggacataaacctcaactctccaaacaagggcctgctttcagacagcatgacagacgttcccgtggacaccggcgtggccgcacgtacgcctgccgtggaaggactaactgaagcagaggaggaagagctgcgtgcagagttgaccaaagtggaggaggagattgtgaccctccggcaggtgctcgcagctaaagagaggcactgcggcgaactcaagaggcggctgggattgtccacattgggtgagctgaaacagaacttgagccgatcctggcacgacgttcaggtgagcagcgcttacgtgaaaactagtgaaaagctgggggagtggaacgagaaagtcacacaaagcgacttgtacaaaaagacccaggagaccttaagccaggccggtcaaaaaacatccgcagccctcagcaccgttgggtctgctatcagtagaaagctgggcgatatgagctcctatagcatcagacattctatcagtatgcccgctatgaggaattcggccacttttaagagctttgaggacagggtgggtaccattaagagcaaggttgtgggggaccgagaaaatgggagcgataatttgccatcttctgccggttccggcgacaagcccctgagcgatcctgcccctttttag

SEQ ID NO: 261694 - DNA, 2339 bp, Artificial Sequence
  derived and/or modified sequence
acgcggcgagcttctcccggcgccgcccgctcggctcccatagcgcccgcgacagcggtccggacgccgcccgaacatggactccgccggccaagatatcaacctgaattctcctaacaaaggtctgctgtctgactccatgacggatgttcctgtcgacacaggtgtggctgcccggactcctgctgttgagggtctgacagaggctgaggaggaggagctcagggctgagcttaccaaggtggaagaggaaattgtcactctgcgccaggtcctggcagccaaggagaggcactgtggagagctcaagaggaggctgggcctctccaccctgggggagctgaaacagaacctgtccaggagctggcatgacgtgcaggtctctagcgcctatgtgaaaacttctgagaaacttggagagtggaatgagaaagtgacccagtcagacctctacaagaagactcaggaaactctttcacaggcaggacagaagacttcagctgccctgtccacagtgggctctgccatcagcaggaagcttggagacatgagcagctactccatccgccactcaataagtatgccagccatgaggaactctgcgaccttcaagtcgtttgaggaccgagttgggaccataaagtctaaggttgtgggtgacagagagaacggcagtgacaacctcccttcctcagcggggagtggtgacaagcccctgtcggatcccgcacctttctaagcctgtggttgcttcacccgctgcagagcacacgcaacccagcctcagcatcacagccgcagctctgttcagcggagcagccagccagggcggatgagcagagccggccctgaggacagtcctgcccatccacgcggagatgtggctgccgcgtttgcatgaatttgaagaacacaggcttgtacacagatgttttacactcacgtttgtagatgaaacagatcactgtgctgtccttcctaggggtgcaggaagtggacagggcggagggtttgaaagaatattgagccaaagcccaggctccctttgggaatcatgttagcccatcagaatgttgaaggattgaagagttctaagcataaaataagtggcattttctgacttcttcctcctcctccttccctgactcacagaaggaatgcaatcacccagcaagtcctacctgttacgcaattttttatctcaaaatgccgaacgagaaaactgtccattttctgagacccccagaaaggaaactgaccctcagcagctgcctgattgttacgcgaatctagctttaacggaagcaaattcattattttttaaatgcagtggacttttcaaaaagtttaaattaggcaaagcagctttagcctcatagaatattatttctttggactcaagctgaaatacaagccttacattgccttatgctttatttctttctaatttttatatgtatatagatgagggttccttaatggttgtgagcattgtgtggaattttacacctggcctgcgtggcagcctcttccagttgaggtgttttatgtcacgcacactccatcccagtgtacaaaacctgcttctcttctcaaccgtggcagctcccgctggctcctatgccctgccctaaagggctcttgagcctctgggaatgggaggggccaagagaaggaaaaccctgtctttagcaccctttaaaagaactgtgccccccttctcagtgctgcctttgcatgggcctggcccggctcacattcgtcagtgactccaaccctcctgcttgctgtacttgggatgaaacgaccccacaggtcaggtggagggtggggcgtgggcatcagccaggattgccgttacagtctttttctcaggagctacaaagatctcttcctgttactaaatagtcgcaccccagcagcctctctcgcacaccggggccctgcatgtcagatggcgtggtctgcagggggagctctgtgccttagtggctcttggcaggacactgagggcctgcctgtggtgtgcccggctctgccactcccgggaggggaagggctgctcagctcaaggtgtcctgttcggtagagcaagtgtcctctgacagccgtgtccccggacagttcagacacccttggggatggcactccacacacgacagagatgcaggggccagggaagcccagcgctcggtgcccttcgtccagggttaaaatcggcctgtggggtgtggtgagaaggcaggttgtgcgggtgttgaccgatgtatcttttccttaaagttattataataatgggtaatttgtcaataaagcattcctttgggggaaagtccgcc

SEQ ID NO: 261695 - protein, 200 aa, Artificial Sequence
  derived and/or modified sequence
MDSAGQDINLNSPNKGLLSDSMTDVPVDTGVAARTPAVEGLTEAEEEELRAELTKVEEEIVTLRQVLAAKERHCGELKRRLGLSTLGELKQNLSRSWHDVQVSSAYKKTQETLSQAGQKTSAALSTVGSAISRKLGDMSSYSIRHSISMPAMRNSATFKSFEDRVGTIKSKVVGDRENGSDNLPSSAGSGDKPLSDPAPF

SEQ ID NO: 261696 - DNA, 603 bp, Artificial Sequence
  derived and/or modified sequence
atggacagcgccggccaggacatcaacctgaacagccccaacaagggcctgctgagcgacagcatgaccgacgtgcccgtggacaccggcgtggccgccagaacccccgccgtggagggcctgaccgaggccgaggaggaggagctgagagccgagctgaccaaggtggaggaggagatcgtgaccctgagacaggtgctggccgccaaggagagacactgcggcgagctgaagagaagactgggcctgagcaccctgggcgagctgaagcagaacctgagcagaagctggcacgacgtgcaggtgagcagcgcctacaagaagacccaggagaccctgagccaggccggccagaagaccagcgccgccctgagcaccgtgggcagcgccatcagcagaaagctgggcgacatgagcagctacagcatcagacacagcatcagcatgcccgccatgagaaacagcgccaccttcaagagcttcgaggacagagtgggcaccatcaagagcaaggtggtgggcgacagagagaacggcagcgacaacctgcccagcagcgccggcagcggcgacaagcccctgagcgaccccgcccccttctag

SEQ ID NO: 261697 - DNA, 603 bp, Artificial Sequence
  derived and/or modified sequence
atggactctgccgggcaggacataaatttaaatagtcctaataaaggcttgctgtctgactccatgacagacgtccccgtggatacaggagtggcggcacgcactcccgcagtcgaggggctaactgaggcagaggaagaagaactgcgagcagagctgactaaggtcgaagaagaaattgtgacgttgcgtcaggtactagccgctaaggaacggcactgcggggaactgaaaaggagactgggtctgtcaacactgggcgagctaaagcagaacctttctcggtcctggcacgacgtccaggtatctagtgcttacaagaaaactcaggaaaccctgagtcaggcgggccaaaagacttcggccgctctgagcactgtgggctccgcaatctcacggaaacttggcgacatgtctagttactcgatacgacactctatttccatgccagcaatgagaaatagtgcaacttttaagtccttcgaagatcgggtgggaaccataaagtccaaagtggtgggcgatagggaaaatggcagcgacaacctgccttcatcagcaggctcaggagacaagcccctttcggacccagcacccttctag

SEQ ID NO: 261698 - DNA, 603 bp, Artificial Sequence
  derived and/or modified sequence
atggattctgctggccaggacatcaacctgaacagccccaacaagggcctgctgagtgacagcatgacagatgtgcctgtggacacaggagtggccgcccggaccccagctgtggagggcctgacagaggccgaggaggaggagctgcgggcagagctgaccaaggtggaggaggagatcgtgaccctgcggcaggtgctggccgccaaggagcggcactgtggggagctgaagaggcggctgggcctgagcaccctgggggagctgaagcagaacctgagccgctcctggcatgatgtgcaggtgagcagcgcctacaagaagacccaggagaccctgagccaggccggccagaagaccagcgctgccctgagcacagtgggcagcgccatcagcaggaagctgggggacatgagcagctacagcatccgccacagcatctccatgcctgccatgagaaattctgccaccttcaagagctttgaggacagagtgggcaccatcaagagcaaggtggtgggggacagagaaaatggaagtgacaacctgcccagcagcgctggcagcggggacaagcccctgagtgaccctgcccccttctag

SEQ ID NO: 261699 - DNA, 603 bp, Artificial Sequence
  derived and/or modified sequence
atggacagcgccggccaggacatcaacctgaacagccccaacaagggcctcttgtccgattccatgacagacgtgccagtggatacgggggtcgctgctcggacccctgccgtagaaggattgactgaagccgaggaagaggagcttagggctgaactgaccaaggtggaagaggaaattgtgaccctcagacaagtgttagcagctaaagaacggcattgtggcgaactgaagaggcgacttggactgtccacgcttggcgagttgaaacagaacttatcccggtcttggcatgacgtgcaggtttctagtgcatataagaagactcaagagaccctcagtcaggctggacaaaaaaccagcgccgccctgtctactgtcggaagcgccatctcccgtaagctcggagacatgagcagctacagcatacggcacagcatctctatgcccgccatgcggaatagcgcaacattcaaatcttttgaggatagagttggcaccataaaaagtaaagtcgttggggaccgagaaaacggctctgacaatctaccatcctcagcgggaagcggtgataaaccattgagcgatcccgcccccttctag

SEQ ID NO: 261700 - DNA, 603 bp, Artificial Sequence
  derived and/or modified sequence
atggactccgccggtcaggacatcaacctaaatagccccaacaagggtctgctgtcggattctatgacggacgtgcccgtggataccggcgtggcggctagaacacctgccgtggaagggcttactgaagctgaggaggaggagcttagagccgaactgacaaaggtggaggaggaaatcgtgacccttcgacaggtgcttgcggcaaaagaaagacattgtggcgagttaaagagacgcctgggcttgagcaccttgggggaactcaaacagaacctaagccgctcttggcatgatgtgcaagtttctagtgcttacaaaaagacccaggagacactgagtcaagctgggcagaagacatccgcagccctttccaccgtggggtccgctatatcccgcaaactgggagatatgtcttcttatagtattcggcattccatctccatgccagcaatgcggaacagtgctacctttaaaagcttcgaggaccgggtgggtactattaagagtaaggtggtcggtgaccgcgagaacggcagtgacaatttgccttcttctgccggatcgggtgataagccactgtcagaccctgcacccttttag

SEQ ID NO: 261701 - DNA, 2275 bp, Artificial Sequence
  derived and/or modified sequence
ggcgagcttctcccggcgccgcccgctcggctcccatagcgcccgcgacagcggtccggacgccgcccgaacatggactccgccggccaagatatcaacctgaattctcctaacaaaggtctgctgtctgactccatgacggatgttcctgtcgacacaggtgtggctgcccggactcctgctgttgagggtctgacagaggctgaggaggaggagctcagggctgagcttaccaaggtggaagaggaaattgtcactctgcgccaggtcctggcagccaaggagaggcactgtggagagctcaagaggaggctgggcctctccaccctgggggagctgaaacagaacctgtccaggagctggcatgacgtgcaggtctctagcgcctacaagaagactcaggaaactctttcacaggcaggacagaagacttcagctgccctgtccacagtgggctctgccatcagcaggaagcttggagacatgagcagctactccatccgccactcaataagtatgccagccatgaggaactctgcgaccttcaagtcgtttgaggaccgagttgggaccataaagtctaaggttgtgggtgacagagagaacggcagtgacaacctcccttcctcagcggggagtggtgacaagcccctgtcggatcccgcacctttctaagcctgtggttgcttcacccgctgcagagcacacgcaacccagcctcagcatcacagccgcagctctgttcagcggagcagccagccagggcggatgagcagagccggccctgaggacagtcctgcccatccacgcggagatgtggctgccgcgtttgcatgaatttgaagaacacaggcttgtacacagatgttttacactcacgtttgtagatgaaacagatcactgtgctgtccttcctaggggtgcaggaagtggacagggcggagggtttgaaagaatattgagccaaagcccaggctccctttgggaatcatgttagcccatcagaatgttgaaggattgaagagttctaagcataaaataagtggcattttctgacttcttcctcctcctccttccctgactcacagaaggaatgcaatcacccagcaagtcctacctgttacgcaattttttatctcaaaatgccgaacgagaaaactgtccattttctgagacccccagaaaggaaactgaccctcagcagctgcctgattgttacgcgaatctagctttaacggaagcaaattcattattttttaaatgcagtggacttttcaaaaagtttaaattaggcaaagcagctttagcctcatagaatattatttctttggactcaagctgaaatacaagccttacattgccttatgctttatttctttctaatttttatatgtatatagatgagggttccttaatggttgtgagcattgtgtggaattttacacctggcctgcgtggcagcctcttccagttgaggtgttttatgtcacgcacactccatcccagtgtacaaaacctgcttctcttctcaaccgtggcagctcccgctggctcctatgccctgccctaaagggctcttgagcctctgggaatgggaggggccaagagaaggaaaaccctgtctttagcaccctttaaaagaactgtgccccccttctcagtgctgcctttgcatgggcctggcccggctcacattcgtcagtgactccaaccctcctgcttgctgtacttgggatgaaacgaccccacaggtcaggtggagggtggggcgtgggcatcagccaggattgccgttacagtctttttctcaggagctacaaagatctcttcctgttactaaatagtcgcaccccagcagcctctctcgcacaccggggccctgcatgtcagatggcgtggtctgcagggggagctctgtgccttagtggctcttggcaggacactgagggcctgcctgtggtgtgcccggctctgccactcccgggaggggaagggctgctcagctcaaggtgtcctgttcggtagagcaagtgtcctctgacagccgtgtccccggacagttcagacacccttggggatggcactccacacacgacagagatgcaggggccagggaagcccagcgctcggtgcccttcgtccagggttaaaatcggcctgtggggtgtggtgagaaggcaggttgtgcgggtgttgaccgatgtatcttttccttaaagttattataataatgggtaatttgtcaataaagcattcctttgggggaaagtccgcc

SEQ ID NO: 261702 - protein, 489 aa, Artificial Sequence
  derived and/or modified sequence
MAVLLLLLRALRRGPGPGPRPLWGPGPAWSPGFPARPGRGRPYMASRPPGDLAEAGGRALQSLQLRLLTPTFEGINGLLLKQHLVQNPVRLWQLLGGTFYFNTSRLKQKNKEKDKSKGKAPEEDEEERRRRERDDQMYRERLRTLLVIAVVMSLLNALSTSGGSISWNDFVHEMLAKGEVQRVQVVPESDVVEVYLHPGAVVFGRPRLALMYRMQVANIDKFEEKLRAAEDELNIEAKDRIPVSYKRTGFFGNALYSVGMTAVGLAILWYVFRLAGMTGREGGFSAFNQLKMARFTIVDGKMGKGVSFKDVAGMHEAKLEVREFVDYLKSPERFLQLGAKVPKGALLLGPPGCGKTLLAKAVATEAQVPFLAMAGPEFVEVIGGLGAARVRSLFKEARARAPCIVYIDEIDAVGKKRSTTMSGFSNTEEEQTLNQLLVEMDGASLDQLPSQGTMRKLRGKTPACSCLTEPTGSRRAMEGHSLCWGCLLH

SEQ ID NO: 261703 - DNA, 1470 bp, Artificial Sequence
  derived and/or modified sequence
atggccgtgctgctgctgctgctgagagccctgagaagaggccccggccccggccccagacccctgtggggccccggccccgcctggagccccggcttccccgccagacccggcagaggcagaccctacatggccagcagaccccccggcgacctggccgaggccggcggcagagccctgcagagcctgcagctgagactgctgacccccaccttcgagggcatcaacggcctgctgctgaagcagcacctggtgcagaaccccgtgagactgtggcagctgctgggcggcaccttctacttcaacaccagcagactgaagcagaagaacaaggagaaggacaagagcaagggcaaggcccccgaggaggacgaggaggagagaagaagaagagagagagacgaccagatgtacagagagagactgagaaccctgctggtgatcgccgtggtgatgagcctgctgaacgccctgagcaccagcggcggcagcatcagctggaacgacttcgtgcacgagatgctggccaagggcgaggtgcagagagtgcaggtggtgcccgagagcgacgtggtggaggtgtacctgcaccccggcgccgtggtgttcggcagacccagactggccctgatgtacagaatgcaggtggccaacatcgacaagttcgaggagaagctgagagccgccgaggacgagctgaacatcgaggccaaggacagaatccccgtgagctacaagagaaccggcttcttcggcaacgccctgtacagcgtgggcatgaccgccgtgggcctggccatcctgtggtacgtgttcagactggccggcatgaccggcagagagggcggcttcagcgccttcaaccagctgaagatggccagattcaccatcgtggacggcaagatgggcaagggcgtgagcttcaaggacgtggccggcatgcacgaggccaagctggaggtgagagagttcgtggactacctgaagagccccgagagattcctgcagctgggcgccaaggtgcccaagggcgccctgctgctgggcccccccggctgcggcaagaccctgctggccaaggccgtggccaccgaggcccaggtgcccttcctggccatggccggccccgagttcgtggaggtgatcggcggcctgggcgccgccagagtgagaagcctgttcaaggaggccagagccagagccccctgcatcgtgtacatcgacgagatcgacgccgtgggcaagaagagaagcaccaccatgagcggcttcagcaacaccgaggaggagcagaccctgaaccagctgctggtggagatggacggcgccagcctggaccagctgcccagccagggcaccatgagaaagctgagaggcaagacccccgcctgcagctgcctgaccgagcccaccggcagcagaagagccatggagggccacagcctgtgctggggctgcctgctgcactag

SEQ ID NO: 261704 - DNA, 1470 bp, Artificial Sequence
  derived and/or modified sequence
atggctgtgctgctgctgctactgagggcactgaggagaggccctgggcctggccctaggccactgtgggggccaggacctgcatggtctcctgggttcccagccagacctggaagggggagaccttatatggcatcacgcccgccgggggacctggctgaggcaggtggccgtgctttacagtcgttgcagcttcgcttactcaccccaacctttgaggggataaacggactgcttctgaaacagcatctggtgcagaacccagttcgcctctggcagctgctcggagggaccttctacttcaacacttcccgcctgaagcagaagaacaaggagaaggataaaagcaaggggaaagctcccgaggaggacgaggaagagcgccgaaggcgcgagcgagacgatcagatgtacagggagaggttacgaactctcttggtgattgcagtcgtaatgtcattactgaacgccttgtccacatccggaggaagcatttcatggaacgattttgttcatgaaatgctggctaaaggagaggttcagcgagtgcaagtggtgcccgaaagcgacgttgtggaagtgtacctgcaccccggagcagttgtgtttggcaggccgcggctcgccctgatgtaccggatgcaggtagcaaacatagacaaattcgaagaaaaactgcgggcggccgaggatgaactcaacattgaagcgaaagatcgtattcccgtgagctacaagcgaacaggcttcttcgggaatgccctctattctgtcgggatgactgccgtggggctcgctatcctgtggtatgtgttccgcctagcaggtatgaccgggagagaaggcggcttctctgccttcaatcagctgaaaatggcgcgatttacaattgtcgacggaaaaatgggtaagggcgtctcctttaaggatgtcgctggaatgcatgaagcaaaactcgaggtgagagaattcgtggactacctcaagtcccccgagcgcttcctccagctgggtgccaaagtccctaagggagcgctgttgcttgggcctcccggctgtggaaaaactctgctggcaaaggcagtggcaaccgaggcccaggtcccctttctcgctatggctggacctgagttcgtggaagtgatcggaggcctcggggccgcccgagttcgcagcctatttaaggaagcaagggctagagccccttgcatcgtttacatcgacgaaatcgatgccgtggggaagaaacggagcaccactatgtccggttttagcaacacagaagaggaacagacactcaaccagctgctggtcgaaatggacggcgcatccttggatcagcttccctcacagggcacgatgagaaagctccgtgggaagactccagcctgttcatgtctaaccgagcctactggatcccgcagggccatggaagggcacagcctgtgctggggatgtcttctccactag

SEQ ID NO: 261705 - DNA, 1470 bp, Artificial Sequence
  derived and/or modified sequence
atggctgtgctgctgctgctgctgcgggccctgcggcggggccctggccctggcccccggcccctgtggggccctggccctgcctggagccctggcttccctgcccggcccggccggggccggccctacatggccagccggcccccaggggacctggccgaggccggcggccgggccctgcagagcctgcagctgcggctgctgacccccacctttgagggcatcaatggcctgctgctgaagcagcacctggtgcagaaccctgtgcggctgtggcagctgctgggcggcaccttctacttcaacaccagccggctgaagcagaagaacaaggagaaggacaagagcaagggcaaggccccagaagaagatgaggaggagaggagaagaagagaaagagatgaccagatgtaccgggagcggctgcggaccctgctggtgattgctgtggtgatgagcctgctgaatgccctgagcaccagcggcggcagcatctcctggaatgactttgtgcatgagatgctggccaagggggaggtgcagagggtgcaggtggtgcctgagagtgatgtggtggaggtgtacctgcaccctggagctgtggtgtttggccggccccggctggccctgatgtacaggatgcaggtggccaacatcgacaagtttgaggagaagctgcgggctgctgaagatgagctgaacatcgaggccaaggaccgcatccctgtgtcctacaagaggacaggcttctttggaaatgccctgtacagcgtgggcatgacagctgtgggcctggccatcctgtggtacgtgttccggctggccggcatgacaggccgggagggcggcttcagcgccttcaaccagctgaagatggcccgcttcaccatcgtggatggcaagatgggcaagggcgtgtccttcaaggatgtggccggcatgcatgaggccaagctggaggtgcgggagtttgtggactacctgaagagccctgagcgcttcctgcagctgggcgccaaggtgcccaagggggccctgctgctgggccccccaggctgcggcaagaccctgctggccaaggctgtggccacagaggcccaggtgcccttcctggccatggccggccctgagtttgtggaggtgattggaggcctgggcgccgcccgggtgcgcagcctcttcaaggaggcccgggcccgggccccctgcatcgtgtacattgatgaaattgatgctgtgggcaagaagaggagcaccaccatgagcggcttcagcaacacagaggaggagcagaccctgaaccagctgctggtggagatggatggagccagcctggaccagctgcccagccagggcaccatgaggaagctgcggggcaagaccccagcctgcagctgcctgacagagcccaccggcagccggcgggccatggagggccacagcctgtgctggggctgcctgctgcactag

SEQ ID NO: 261706 - DNA, 1470 bp, Artificial Sequence
  derived and/or modified sequence
atggccgtgctgctgctgctgctgcgggccctgcggcggggccccggacctgggccgcgacccttatggggtccgggaccggcgtggtctcccggttttcccgcaaggcccggtcgcggacggccgtacatggccagtaggccccccggcgacctggcggaggccggcggacgcgccttacagagccttcaactgcggttgctgaccccgacttttgaaggcatcaatgggctgctgctgaagcagcatttggtgcagaacccggtccgcctttggcaattgctgggcggcaccttctactttaacacctccagactgaagcagaagaataaggaaaaagacaagagcaagggtaaagcacctgaggaggacgaagaagagcggcgccgaagggaaagggacgatcagatgtatagagagcgcctacggaccttactcgttatagctgtagttatgtctctgctgaacgcattaagcactagcggcgggagcatttcctggaatgacttcgttcatgagatgcttgctaagggagaagtccagcgcgtccaagtggtgcccgagtctgacgtcgttgaagtatatttacacccaggagctgtggtatttggcagacccaggttagccctgatgtacaggatgcaggtggcaaatattgataagtttgaggagaaactcagggccgccgaggatgaactgaatatagaagccaaggataggatccctgtgtcttataaacgaactgggttttttgggaacgccctgtactccgttggtatgaccgcagtagggctggccatcctgtggtatgtttttcggttggcgggcatgactggaagagagggtggttttagcgcattcaaccagctcaaaatggcaaggtttactattgtggacggcaagatgggcaaaggggtctcattcaaagatgtggctggaatgcatgaggctaaattggaggtgagggagttcgttgattatttaaagtctccggagaggtttttgcaactgggcgctaaggtgcctaaaggggcactgctcttgggcccgcctggttgcggaaagaccctgctagccaaagctgtggccaccgaggctcaggttcccttcttggccatggccgggcctgaatttgtcgaggtgattggtggcctgggagcagccagagttcgttcgctgttcaaagaggcccgcgctagagctccgtgtatcgtgtacatcgacgaaatagatgcagtgggtaaaaagaggagcaccacaatgtccggtttctccaatacagaggaagaacagacactgaatcagctgctggtggaaatggacggtgctagcctggatcagctgccttctcagggaactatgagaaaactccggggcaaaactccggcgtgcagttgtttaaccgaacctaccgggtcgaggagggcgatggaggggcactcactctgctggggctgcctgcttcactag

SEQ ID NO: 261707 - DNA, 1470 bp, Artificial Sequence
  derived and/or modified sequence
atggctgtcctgctgcttttgcttcgggcactacgaagaggccctggacccggaccaaggccattgtgggggccaggaccagcctggtcccccggattcccggctcgcccagggaggggcaggccttacatggcctcccgaccacccggtgatctcgctgaagctgggggacgcgctctgcagtccttgcagttgagactgctgactccgacttttgaaggcataaatggactgctgttaaaacagcacttagtgcagaatccagtccggttatggcagcttttgggcggaaccttctatttcaacacctccagattgaagcagaagaacaaggagaaggacaagtccaaagggaaggctcctgaagaggacgaagaggagcgcaggagaagagaaagagacgatcaaatgtacagggaaaggctcagaacccttttagtgatcgcggtcgttatgtccctgctcaatgccttaagtacgagcggtggtagcatcagctggaatgacttcgtccacgaaatgctcgccaagggagaggttcaacgagtgcaggtggtccctgaatcggacgtcgtggaggtgtatttgcatcccggtgcggtggtgttcggtcggccacggctggctcttatgtacagaatgcaggtcgcgaatatcgacaaattcgaagagaaactgagggcagccgaggacgaactgaacatcgaggccaaggatagaattcccgtgagttataagcgtaccggcttttttggcaacgctctatatagtgtgggaatgaccgcagtaggtctggccattctctggtacgtattcaggctggccggtatgacggggcgtgagggtggcttcagcgcgtttaaccagctgaaaatggccaggtttactatcgtcgacggcaagatgggaaagggcgtatccttcaaggatgtcgctgggatgcacgaggccaagctggaggtgagagagttcgtagattatcttaaatccccagagaggtttttgcagctgggagctaaagtgcctaaaggtgcactgctgctcggcccaccaggctgtggcaaaacactcctggccaaggcagtcgctaccgaagcccaggtgccgttcttggctatggccggacccgagttcgtggaggttattggtggtctgggggctgcacgcgttcgctcactgtttaaagaggccagagcccgtgctccttgcatcgtttacatcgacgagatcgatgctgtgggcaagaaacgatcgactaccatgtctgggttttcaaataccgaggaggaacagaccctcaaccagctgttggtggagatggatggggcatccctcgaccagctgccctctcagggcacgatgagaaagctccgaggcaagactcccgcttgctcgtgtttgactgaacctacaggcagtcgcagagcaatggaaggccatagtctctgttggggctgccttctgcactag

SEQ ID NO: 261708 - DNA, 2211 bp, Artificial Sequence
  derived and/or modified sequence
ctgggaccacaggcgtgcaccgttgtgcccaggtctaagtgtttcgatttagaaatggtttcctctaggtgggaaccactcctgctcctcactgaagtgacctcagcgaatgaagtgtgggtgacctcgaacagcacagcgttagtctttgtctctgataacgtcagggaagaattggaggaagtgcaggatcttctgtgcaggacgctgcccctccccgtccagctgagctttcctgaggaagctctggatgtcgcccgtgttgctcatgtgtttgtttctcccttttgcttctctgccggctcagaggagaggagacgccgtgagcgggacgaccagatgtaccgagagcggctgcgcaccttgctggtcatcgcggttgtcatgagcctcctgaatgctctcagcaccagcggaggcagcatttcctggaacgactttgtccacgagatgctggccaagggcgaggtgcagcgcgtccaggtggtgcctgagagcgacgtggtggaagtctacctgcaccctggagccgtggtgtttgggcggcctcggctagccttgatgtaccgaatgcaggttgcaaatattgacaagtttgaagagaagcttcgagcagctgaagatgagctgaatatcgaggccaaggacaggatcccagtttcctacaagcgaacaggattctttggaaatgccctgtactctgtggggatgacggcagtgggcctggccatcctgtggtatgttttccgtctggccgggatgactggaagggaaggtggattcagtgcttttaatcagcttaaaatggctcgtttcaccattgtggatgggaagatggggaaaggagtcagcttcaaagacgtggcaggaatgcacgaagccaaactggaagtccgcgagtttgtggattatctgaagagcccagaacgcttcctccagcttggcgccaaggtcccaaagggcgcactgctgctcggcccccccggctgtgggaagacgctgctggccaaggcggtggccacggaggctcaggtgcccttcctggcgatggccggcccagagttcgtggaggtcattggaggcctcggcgctgcccgtgtgcggagcctctttaaggaagcccgagcccgggccccctgcatcgtctacatcgatgagatcgacgcggtgggcaagaagcgctccaccaccatgtccggcttctccaacacggaggaggagcagacgctcaaccagcttctggtagaaatggatggtgcctctcttgaccagctaccctcccaggggaccatgaggaagctcagaggaaagacccccgcctgctcctgtctcacggagcccacagggtcacggagggcaatggagggtcattcgctctgctggggttgccttttgcactgaagatagagaccacctttttgagtgacttgagcccaaaggcaagcgtatatcaaacgatcttctccacataacctctctgtgccatcataagaatagctgcttccgcccccggatttgctcaggcctgggaatccgctgactgaaggcctcttgttgagtgccagctctaaacaagtccctttatgcagagccacagctgtgcatgctcagccctgccgaggtcccaggccaggctttgttgcttccgttcatggaagcgcacaggatagggccgacgctgtgccggtcgtggggaaatctcactggggaagagaaaagcccaagccttgttggttacgtcagccggtccatggcggtgtcctgcggaccccagagcccccgggaagggcgcaagtcaaagagcactggaggcaccgccggcgatggacgtccaggtcccggctcctgtgctggaaagcgttgatggggagcgtcggcgctgaccacacgcgggagctgcggaagcccagcggttcacacaggcctcccttcaacgtagtcatcccctggtggtggaagcaagacgacggcccctgacgtgcagccacacacagaaaaggctgctgtgaacattttatgcttcgactttttttttcttcagagacagggtgtcgttctgtcgcccaggctggagtgcagtgccaccatcatagctcactgcagcctccacctcctaggctcaagcttcctaagtagttgggactcaaggcttgagtcaccatgccaggctctgttttttcagtctgtgaaaaataaagtcatcagcatgtg

SEQ ID NO: 261709 - DNA, 2288 bp, Artificial Sequence
  derived and/or modified sequence
ggccaacatggccgtgctgctgctgctgctccgtgccctccgccggggtccaggcccgggtcctcggccgctgtggggcccaggcccggcctggagtccagggttccccgccaggcccgggagggggcggccgtacatggccagcaggcctccgggggacctcgccgaggctggaggccgagctctgcagagcttacaattgagactgctaacccctacctttgaagggatcaacggattgttgttgaaacaacatttagttcagaatccagtcagactctggcaacttttaggtggtactttctattttaacacctcaaggttgaagcagaagaataaggagaaggataagtcgaaggggaaggcgcctgaagaggacgaagaggagaggagacgccgtgagcgggacgaccagatgtaccgagagcggctgcgcaccttgctggtcatcgcggttgtcatgagcctcctgaatgctctcagcaccagcggaggcagcatttcctggaacgactttgtccacgagatgctggccaagggcgaggtgcagcgcgtccaggtggtgcctgagagcgacgtggtggaagtctacctgcaccctggagccgtggtgtttgggcggcctcggctagccttgatgtaccgaatgcaggttgcaaatattgacaagtttgaagagaagcttcgagcagctgaagatgagctgaatatcgaggccaaggacaggatcccagtttcctacaagcgaacaggattctttggaaatgccctgtactctgtggggatgacggcagtgggcctggccatcctgtggtatgttttccgtctggccgggatgactggaagggaaggtggattcagtgcttttaatcagcttaaaatggctcgtttcaccattgtggatgggaagatggggaaaggagtcagcttcaaagacgtggcaggaatgcacgaagccaaactggaagtccgcgagtttgtggattatctgaagagcccagaacgcttcctccagcttggcgccaaggtcccaaagggcgcactgctgctcggcccccccggctgtgggaagacgctgctggccaaggcggtggccacggaggctcaggtgcccttcctggcgatggccggcccagagttcgtggaggtcattggaggcctcggcgctgcccgtgtgcggagcctctttaaggaagcccgagcccgggccccctgcatcgtctacatcgatgagatcgacgcggtgggcaagaagcgctccaccaccatgtccggcttctccaacacggaggaggagcagacgctcaaccagcttctggtagaaatggatggtgcctctcttgaccagctaccctcccaggggaccatgaggaagctcagaggaaagacccccgcctgctcctgtctcacggagcccacagggtcacggagggcaatggagggtcattcgctctgctggggttgccttttgcactgaagatagagaccacctttttgagtgacttgagcccaaaggcaagcgtatatcaaacgatcttctccacataacctctctgtgccatcataagaatagctgcttccgcccccggatttgctcaggcctgggaatccgctgactgaaggcctcttgttgagtgccagctctaaacaagtccctttatgcagagccacagctgtgcatgctcagccctgccgaggtcccaggccaggctttgttgcttccgttcatggaagcgcacaggatagggccgacgctgtgccggtcgtggggaaatctcactggggaagagaaaagcccaagccttgttggttacgtcagccggtccatggcggtgtcctgcggaccccagagcccccgggaagggcgcaagtcaaagagcactggaggcaccgccggcgatggacgtccaggtcccggctcctgtgctggaaagcgttgatggggagcgtcggcgctgaccacacgcgggagctgcggaagcccagcggttcacacaggcctcccttcaacgtagtcatcccctggtggtggaagcaagacgacggcccctgacgtgcagccacacacagaaaaggctgctgtgaacattttatgcttcgactttttttttcttcagagacagggtgtcgttctgtcgcccaggctggagtgcagtgccaccatcatagctcactgcagcctccacctcctaggctcaagcttcctaagtagttgggactcaaggcttgagtcaccatgccaggctctgttttttcagtctgtgaaaaataaagtcatcagcatgtga

SEQ ID NO: 261710 - protein, 789 aa, Artificial Sequence
  derived and/or modified sequence
MAAAPVAAGSGAGRGRRSAATVAAWGGWGGRPRPGNILLQLRQGQLTGRGLVRAVQFTETFLTERDKQSKWSGIPQLLLKLHTTSHLHSDFVECQNILKEISPLLSMEAMAFVTEERKLTQETTYPNTYIFDLFGGVDLLVEILMRPTISIRGQKLKISDEMSKDCLSILYNTCVCTEGVTKRLAEKNDFVIFLFTLMTSKKTFLQTATLIEDILGVKKEMIRLDEVPNLSSLVSNFDQQQLANFCRILAVTISEMDTGNDDKHTLLAKNAQQKKSLSLGPSAAEINQAALLSIPGFVERLCKLATRKVSESTGTASFLQELEEWYTWLDNALVLDALMRVANEESEHNQGASEENGLPHTSARTQLPQSMKIMHEIMYKLEVLYVLCVLLMGRQRNQVHRMIAEFKLIPGLNNLFDKLIWRKHSASALVLHGHNQNCDCSPDITLKIQFLRLLQSFSDHHENKYLLLNNQELNELSAISLKANIPEVEAVLNTDRSLVCDGKRGLLTRLLQVMKKEPAESSFRFWQARAVESFLRGTTSYADQMFLLKRGLLEHILYCIVDSECKSRDVLQSYFDLLGELMKFNVDAFKRFNKYINTDAKFQVFLKQINSSLVDSNMLVRCVTLSLDRFENQVDMKVAEVLSECRLLAYISQVPTQMSFLFRLINIIHVQTLTQENVSCLNTSLVILMLARRKERLPLYLRLLQRMEHSKKYPGFLLNNFHNLLRFWQQHYLHKDKDSTCLENSSCISFSYWKETVSILLNPDRQSPSALVSYIEEPYMDIDRDFTEE

SEQ ID NO: 261711 - DNA, 2370 bp, Artificial Sequence
  derived and/or modified sequence
atggccgccgcccccgtggccgccggcagcggcgccggcagaggcagaagaagcgccgccaccgtggccgcctggggcggctggggcggcagacccagacccggcaacatcctgctgcagctgagacagggccagctgaccggcagaggcctggtgagagccgtgcagttcaccgagaccttcctgaccgagagagacaagcagagcaagtggagcggcatcccccagctgctgctgaagctgcacaccaccagccacctgcacagcgacttcgtggagtgccagaacatcctgaaggagatcagccccctgctgagcatggaggccatggccttcgtgaccgaggagagaaagctgacccaggagaccacctaccccaacacctacatcttcgacctgttcggcggcgtggacctgctggtggagatcctgatgagacccaccatcagcatcagaggccagaagctgaagatcagcgacgagatgagcaaggactgcctgagcatcctgtacaacacctgcgtgtgcaccgagggcgtgaccaagagactggccgagaagaacgacttcgtgatcttcctgttcaccctgatgaccagcaagaagaccttcctgcagaccgccaccctgatcgaggacatcctgggcgtgaagaaggagatgatcagactggacgaggtgcccaacctgagcagcctggtgagcaacttcgaccagcagcagctggccaacttctgcagaatcctggccgtgaccatcagcgagatggacaccggcaacgacgacaagcacaccctgctggccaagaacgcccagcagaagaagagcctgagcctgggccccagcgccgccgagatcaaccaggccgccctgctgagcatccccggcttcgtggagagactgtgcaagctggccaccagaaaggtgagcgagagcaccggcaccgccagcttcctgcaggagctggaggagtggtacacctggctggacaacgccctggtgctggacgccctgatgagagtggccaacgaggagagcgagcacaaccagggcgccagcgaggagaacggcctgccccacaccagcgccagaacccagctgccccagagcatgaagatcatgcacgagatcatgtacaagctggaggtgctgtacgtgctgtgcgtgctgctgatgggcagacagagaaaccaggtgcacagaatgatcgccgagttcaagctgatccccggcctgaacaacctgttcgacaagctgatctggagaaagcacagcgccagcgccctggtgctgcacggccacaaccagaactgcgactgcagccccgacatcaccctgaagatccagttcctgagactgctgcagagcttcagcgaccaccacgagaacaagtacctgctgctgaacaaccaggagctgaacgagctgagcgccatcagcctgaaggccaacatccccgaggtggaggccgtgctgaacaccgacagaagcctggtgtgcgacggcaagagaggcctgctgaccagactgctgcaggtgatgaagaaggagcccgccgagagcagcttcagattctggcaggccagagccgtggagagcttcctgagaggcaccaccagctacgccgaccagatgttcctgctgaagagaggcctgctggagcacatcctgtactgcatcgtggacagcgagtgcaagagcagagacgtgctgcagagctacttcgacctgctgggcgagctgatgaagttcaacgtggacgccttcaagagattcaacaagtacatcaacaccgacgccaagttccaggtgttcctgaagcagatcaacagcagcctggtggacagcaacatgctggtgagatgcgtgaccctgagcctggacagattcgagaaccaggtggacatgaaggtggccgaggtgctgagcgagtgcagactgctggcctacatcagccaggtgcccacccagatgagcttcctgttcagactgatcaacatcatccacgtgcagaccctgacccaggagaacgtgagctgcctgaacaccagcctggtgatcctgatgctggccagaagaaaggagagactgcccctgtacctgagactgctgcagagaatggagcacagcaagaagtaccccggcttcctgctgaacaacttccacaacctgctgagattctggcagcagcactacctgcacaaggacaaggacagcacctgcctggagaacagcagctgcatcagcttcagctactggaaggagaccgtgagcatcctgctgaaccccgacagacagagccccagcgccctggtgagctacatcgaggagccctacatggacatcgacagagacttcaccgaggagtag

SEQ ID NO: 261712 - DNA, 2370 bp, Artificial Sequence
  derived and/or modified sequence
atggcagcggctcccgtcgcagcagggtctggggccggccgtggccgacggtccgccgccactgtggcggcctgggggggatggggaggccgcccccggccgggaaacatacttttgcaactgaggcagggccagctgacaggccggggcctggttcgggcagttcagtttactgagacattccttactgagcgggacaagcagtcaaagtggtcaggaatcccccagcttctcctgaaattacacaccaccagtcatttacatagcgacttcgttgaatgccaaaatattcttaaagaaatatctccactgctgagcatggaagccatggccttcgtaactgaagaaagaaaattgacccaggagactacctaccctaacacttatatcttcgatctctttggaggagtggacctgctggttgagattttgatgcgtcctactatctccattaggggtcaaaagctaaagatatcagatgagatgtccaaagactgtttgtctatcctctataacacctgtgtctgtacagaaggggtgacaaagcgccttgcagagaagaacgacttcgtgattttcctcttcactttaatgacctccaagaaaacattcttacagaccgctacacttattgaagatattttaggagtaaagaaagagatgataaggctggacgaggtacctaatcttagctctctggtcagtaacttcgaccagcagcagttagccaacttttgtagaatcctagcagtcacaatcagcgagatggatacaggcaatgatgataaacacacattactggcaaagaacgcacagcaaaagaaatcgctcagtttgggcccaagtgcggcggagataaaccaggccgcgcttctctctatccccgggtttgtagaacggctctgtaaactggccacccggaaagtgagcgaatcgacagggacagctagttttctgcaagagctggaagagtggtacacatggctcgataatgcgcttgtcctcgacgcacttatgagggtagctaatgaagaaagcgagcacaatcagggtgcatctgaggagaacggcctgccgcatacaagcgcacgaacccaactaccgcagagtatgaagatcatgcacgaaattatgtataagctggaggtgctctatgtcttgtgcgtcctgttaatgggacggcaacgcaatcaagtgcaccggatgattgctgagttcaaactgattcctggcctcaacaatctgtttgacaaactgatctggcgaaaacactcggcaagcgcgctggtgcttcatgggcataatcagaattgtgactgttctccagatataactctgaaaatccaatttttgcgattgctgcagtctttctcggatcaccacgaaaataagtaccttctgctgaacaatcaggagcttaacgagttgtcagccatcagtctgaaggccaacatccctgaagtagaagccgtcttgaatacagatcgctccctggtttgtgacggaaagcgcggcctgctgacaagattgcttcaagtgatgaagaaagagcccgccgaaagttcttttcggttttggcaagccagagccgttgaaagcttccttcggggcactacttcatatgctgatcagatgttcttgcttaaaagggggttgctggaacatattctatattgcatcgttgattctgaatgtaaaagtcgcgacgtcctccagtcttattttgatttactcggcgaactgatgaagttcaatgtagacgcctttaaacggtttaataagtatatcaatacagacgccaaatttcaggtatttctgaaacagatcaactctagcctggtggacagtaatatgctggtcagatgcgtcaccctctcccttgacaggttcgagaatcaggtagacatgaaggtggctgaggtgctgtcagaatgccgcttactggcctatatttcacaggtaccgacccaaatgagttttcttttcaggctgataaacatcatacacgttcagaccctgactcaagagaacgtaagctgtcttaataccagtctcgtgatcctgatgttggctaggaggaaagaacgattgcccctgtatctccggctcttacagaggatggagcatagcaagaagtatcctgggtttctacttaacaacttccacaacctgcttcgcttctggcagcagcactatttacacaaagataaagactcgacctgccttgaaaactcgtcttgtatatccttcagctattggaaggaaaccgtctccatcctgctgaatcctgatcgccagtctccaagtgctctcgtcagctacattgaggagccatatatggatattgaccgcgacttcactgaagagtag

SEQ ID NO: 261713 - DNA, 2370 bp, Artificial Sequence
  derived and/or modified sequence
atggctgctgcccctgtggccgccggcagcggggccggccggggccgccgctctgctgccaccgtggccgcctggggcggctggggcggccggccccggcccggcaacatcctgctgcagctgcggcagggccagctgaccggccggggcctggtgcgggctgtgcagttcacagagaccttcctgacagagcgggacaagcagagcaagtggagcggcatcccccagctgctgctgaagctgcacaccaccagccacctgcacagcgactttgtggagtgccagaacatcctgaaggagatcagccccctgctgtccatggaggccatggcctttgtgacagaggagaggaagctgacccaggagaccacctaccccaacacctacatctttgacctgtttggaggagtggacctgctggtggagatcctgatgaggcccaccatcagcatccggggccagaagctgaagatcagtgatgagatgagcaaggactgcctgagcatcctgtacaacacctgtgtgtgcacagaaggagtgaccaagaggctggccgagaagaatgactttgtgatcttcctgttcaccctgatgaccagcaagaagaccttcctgcagacagccaccctgattgaggacatcctgggcgtgaagaaggagatgatccggctggatgaggtgcccaacctgagcagcctggtgagcaactttgaccagcagcagctggccaacttctgccgcatcctggccgtgaccatcagcgagatggacacaggaaatgatgacaagcacaccctgctggccaagaatgcccagcagaagaagagcctgagcctgggccccagcgctgctgagatcaaccaggccgccctgctgagcatccctggctttgtggagcggctgtgcaagctggccaccaggaaggtgtctgagagcactggaacagccagcttcctgcaggagctggaggagtggtacacctggctggacaatgccctggtgctggatgccctgatgagggtggccaatgaggagagcgagcacaaccagggcgcctctgaagaaaatggcctgccccacaccagcgcccggacccagctgccccagagcatgaagatcatgcatgagatcatgtacaagctggaggtgctgtatgtgctgtgtgtgctgctgatgggccggcagaggaaccaggtgcacaggatgattgctgagttcaagctgatccctggcctgaacaacctgtttgacaagctgatctggaggaagcacagcgccagcgccctggtgctgcacggccacaaccagaactgtgactgcagcccagacatcaccctgaagatccagttcctgcggctgctgcagagcttcagtgaccaccacgagaacaagtacctgctgctgaacaaccaggagctgaatgagctgagcgccatcagcctgaaggccaacatccctgaggtggaggccgtgctgaacacagacaggagcctggtgtgtgatggcaagaggggcctgctgacccggctgctgcaggtgatgaagaaggagcctgctgagagcagcttccgcttctggcaggcccgggctgtggagagcttcctgcggggcaccaccagctatgctgaccagatgttcctgctgaagaggggcctgctggagcacatcctgtactgcatcgtggacagcgagtgcaagagcagagatgtgctgcagagctactttgacctgctgggggagctgatgaagttcaacgtggatgccttcaagcgcttcaacaagtacatcaacacagatgccaagttccaggtgttcctgaagcagatcaacagcagcctggtggacagcaacatgctggtgcgctgtgtgaccctgagcctggacagatttgagaaccaggtggacatgaaggtggccgaggtgctgtctgagtgccgcctgctggcctacatcagccaggtgcccacccagatgtccttcctgttccgcctcatcaacatcatccacgtgcagaccctgacccaggagaatgtgtcctgcctgaacaccagcctggtgatcctgatgctggcccggaggaaggagcggctgcccctgtacctgcggctgctgcagaggatggagcacagcaagaagtacccaggcttcctgctgaacaacttccacaacctgctgcgcttctggcagcagcactacctgcacaaggacaaggacagcacctgcctggagaacagcagctgcatctccttctcctactggaaggagaccgtgtccatcctgctgaacccagaccggcagagccccagcgccctggtgtcctacatcgaggagccctacatggacatcgaccgggacttcacagaggagtag

SEQ ID NO: 261714 - DNA, 2370 bp, Artificial Sequence
  derived and/or modified sequence
atggccgccgcccccgtggccgccggcagcggcgccggccggggccgcaggagcgccgcaaccgtcgcagcctggggtggatggggaggtcgtcccaggcctggtaatatcctgctgcagttgcgccagggccagttgacggggagagggcttgtgcgtgcagtacagtttaccgagacttttctgaccgaaagagataaacaatcaaagtggtccggtatacctcagctcttgctaaagctccataccacttcgcatctccactcagatttcgtggagtgccagaatatcctcaaggaaatatccccgttactgagcatggaggccatggcattcgtgaccgaagaaagaaaactcacccaagagactacctaccctaacacatacatctttgatctgtttggaggcgtcgacctcctggtcgagattcttatgagacccaccatttctatcagaggccaaaagttaaagatcagtgatgagatgagtaaggactgcctttccattctgtacaacacgtgcgtttgcactgaaggggtaactaaacgactggcagagaagaacgattttgtgattttcttgttcacactgatgacttctaaaaagacgttcctgcagaccgccacactcattgaggacatcctaggcgtgaaaaaggagatgatacgcctcgacgaagttccaaacttatctagccttgtgtccaacttcgaccaacagcagctcgccaatttctgccggatcctggcggtgacaatcagcgagatggataccggtaacgatgacaaacacacactgctggccaaaaatgcgcagcagaagaaaagcctaagcctggggcccagcgccgctgaaataaatcaggctgcactgcttagcatacccggattcgttgaaagactgtgtaagctggctacccggaaggtgtcagaatctactggtacagcctccttcttacaagaattggaagagtggtacacatggctggacaacgctttggttctcgacgccctgatgagggtggccaacgaggaaagcgagcataatcagggcgcttcagaggaaaacgggctcccacatacatctgcccggacccagctaccccaatcaatgaagataatgcatgaaataatgtacaaactagaggtactctacgtcttatgcgtgctactcatgggtcggcagaggaatcaggttcaccggatgattgccgaattcaaacttatccctggtctcaataatctgttcgacaaactcatatggaggaagcactctgcctctgcacttgtactccacgggcacaaccagaactgtgactgttcacctgacatcacactgaaaatccaatttttgcgcctcctccagagcttttccgaccatcacgaaaataaatatctgctgctgaataatcaggagcttaatgagctaagtgctatctcgctcaaggcgaatattccagaagtcgaggctgtgctgaacaccgatcgctcactcgtctgtgacggaaagcggggactgctaacgagactgttacaagtgatgaagaaggagccggctgagtcatccttcagattttggcaggctcgcgcggtggagtctttcttacgtgggaccacttcatatgccgatcagatgttcctgctaaaacgggggttgcttgaacatattttatactgtatcgttgatagtgagtgtaaaagtcgcgacgttttgcaatcttacttcgacctcttgggggagctaatgaagtttaatgtcgatgcctttaagcgcttcaataagtacatcaataccgacgccaaattccaggtgttcctgaagcagatcaattcctcactcgtagatagtaacatgctggtgcggtgcgtgacactgtccctcgacaggttcgaaaaccaggtcgatatgaaggtggcagaagtgctaagcgagtgtcgcctgctggcatatatctcccaagtccctacacagatgagtttcctctttaggctaatcaatatcattcacgtgcagactctaacccaagaaaatgtcagctgcttgaatacctcgcttgtaatcctgatgcttgcccgacgaaaggaacgactgcctctctacctccgtttgctccagagaatggagcactctaagaagtaccccggattcttgctcaacaattttcacaaccttctccggttctggcagcagcactatctccataaggacaaagacagtacatgcctggagaatagttcatgtatctctttttcctattggaaggaaaccgtgtcaatactgctgaacccggatcgacagtctcctagtgctctggtgtcatacattgaggaaccatatatggacattgatcgggatttcacagaagagtag

SEQ ID NO: 261715 - DNA, 2370 bp, Artificial Sequence
  derived and/or modified sequence
atggcagcggcacctgtggcagccggtagtggggctgggcgaggacggaggagcgcagcgaccgttgccgcttggggcggttgggggggacggcctaggccaggtaatattctactgcagttgcgacaaggccaactgacgggcagagggcttgtgagggccgtgcagttcacagaaacctttctgaccgagagagataagcagagcaaatggagcggaattccccagctgctgctgaagctccacaccacttctcacttgcattcggatttcgtggaatgtcagaacattctgaaggaaatttctcctctgctgtctatggaagcgatggccttcgtgacagaagagcgtaaattgacacaggaaaccacataccctaacacgtacatcttcgacctattcggcggagttgatctactcgttgagatcctcatgagaccaaccatttcaatcagagggcagaaacttaagatttcagatgagatgagcaaagattgcttaagcatactctataacacttgtgtgtgtacagaaggcgtaacaaaacgcctggcagagaagaacgatttcgtgatctttttgttcacgctgatgacatccaagaagacctttctccaaaccgctacattgatcgaggatattctcggcgtcaaaaaggagatgattcggcttgacgaggtacctaacttgtcatccttagtgagcaattttgaccaacagcagttagctaacttctgccggatacttgccgtaacaatttctgaaatggatacaggcaacgatgataagcacacactcttggccaaaaacgcacagcaaaagaagagcctctcattggggccatcagcggcagaaattaatcaggcagccctgctgtcaatccctgggttcgtggagaggctatgtaaattagcgacccggaaggttagtgagtcaacgggcaccgcatcattccttcaggaacttgaagaatggtacacatggctggacaatgccttagtgctggacgcccttatgcgcgtggccaatgaggagtcagaacacaatcagggggcttccgaggagaacggtctcccccacacgagcgccaggactcagttaccccagagcatgaaaattatgcacgaaatcatgtacaaattagaggtgctttacgtcttgtgtgttctgctgatgggccgacagcggaaccaagtacatcgtatgattgccgagtttaagctgatccccggtctaaacaacttgtttgataaactgatttggaggaaacatagcgcatcagctctggtccttcatgggcacaaccagaactgcgactgttcccccgacatcaccttaaagatacagttcctgcgtttattgcagtcgtttagtgatcatcatgagaacaaatatctgctgctcaacaaccaagagctcaatgagctctcggcaatctccctcaaagctaatatcccagaggtggaagccgtgctgaacaccgaccggtccctggtatgcgacggcaagagaggcctgttgacgcgacttctccaggtgatgaagaaagagcccgcagaaagctcatttcggttttggcaggcccgtgccgtcgaatccttccttcgaggaaccacaagttatgctgatcagatgttccttctgaaacgcggacttttggagcacatattgtactgtattgtcgattcagagtgcaagtccagggacgtgttacagtcttattttgatttgctgggtgagctgatgaagttcaacgtcgacgcctttaagcgattcaacaaatacatcaacactgatgccaagttccaggtgtttttaaaacagatcaatagcagcctggtcgattctaatatgctggtgagatgtgtgaccctgagcctcgatagatttgagaaccaggtagacatgaaagttgccgaggttttatctgagtgcagactgcttgcttacatctcgcaggtccccacccagatgagcttcctgtttcggttgataaatatcattcacgtgcagacacttacacaggagaacgtaagctgcctgaatacgagccttgtgattctgatgctggctagacggaaggagcgcctgcccctttatctccggctgctccagcggatggagcatagtaagaagtacccaggtttcctgttaaacaacttccacaacttgctcagattttggcagcagcactatctacataaagacaaagacagtacttgcttagagaattcgtcgtgtattagtttctcctattggaaggaaactgtgtcgatactccttaaccctgataggcagtctccatccgcactggtctcctacattgaagaaccttatatggacatcgatcgagattttaccgaggaatag

SEQ ID NO: 261716 - DNA, 3138 bp, Artificial Sequence
  derived and/or modified sequence
ggccgcttgcttcctgtttgtccgacgaggagacatggcggcggcgccggtagcggctgggtctggagccggccgagggagacggtcggcagccacagtggcggcttggggcggatggggcggccggccgcggcctggtaacattctgctgcagctgcggcagggccagctgaccggccggggcctggtccgggcggtgcagttcactgagacttttttgacggagagggacaaacaatccaagtggagtggaattcctcagctgctcctcaagctgcacaccaccagccacctccacagtgactttgttgagtgtcaaaacatcctcaaggaaatttctcctcttctctccatggaggctatggcatttgttactgaagagaggaaacttacccaagaaaccacttatccaaatacttacatttttgacttgtttggaggtgttgatcttcttgtagaaattcttatgaggcctacgatctctatccggggacagaaactgaaaataagtgatgaaatgtccaaggactgcttgagtatcctgtataatacctgtgtctgtacagagggagttacaaagcgtttggcagaaaagaatgactttgtgatcttcctgtttacattgatgacaagtaagaagacattcttacaaacagcaaccctcattgaagatattttgggtgttaaaaaggaaatgatccgactagatgaagtccccaatctgagttccttagtatccaatttcgatcagcagcagctcgctaatttctgccggattctggctgtcaccatttcagagatggatacagggaatgatgacaagcacacgcttcttgccaaaaatgctcaacagaagaagagcttgagtttggggccttctgcagctgaaatcaatcaagcggcccttctcagcattcctggctttgttgagcggctttgcaaactggcgactcgaaaggtgtcagagtcaacgggcacagccagcttccttcaggagttggaagagtggtacacatggctagacaatgctttggtgctagatgccctgatgcgagtggccaatgaggagtcagagcacaatcaaggggcttctgaggagaatggcctgcctcacacgtcagccagaacccagctgccccagtcaatgaagattatgcatgagatcatgtacaaactggaagtgctctatgtcctctgcgtgctgctgatggggcgtcagcgaaaccaggttcacagaatgattgcagagttcaagctgatccctggacttaataatttgtttgacaaactgatttggaggaagcattcagcatctgcccttgtcctccatggtcacaaccagaactgtgactgtagcccggacatcaccttgaagatacagtttttgaggcttcttcagagcttcagtgaccaccacgagaacaagtacttgttactcaacaaccaggagctgaatgaactcagtgccatctctctcaaggccaacatccctgaggtggaagctgtcctcaacaccgacaggagtttggtgtgtgatgggaagaggggcttattaactcgtctgctgcaggtcatgaagaaggagccagcagagtcgtctttcaggttttggcaagctcgggctgtggagagtttcctccgagggaccacctcctatgcagaccagatgttcctgctgaagcgaggcctcttggagcacatcctttactgcattgtggacagcgagtgtaagtcaagggatgtgctccagagttactttgacctcctgggggagctgatgaagttcaacgttgatgcattcaagagattcaataaatatatcaacaccgatgcaaagttccaggtattcctgaagcagatcaacagctccctggtggactccaacatgctggtgcgctgtgtcactctgtccctggaccgatttgaaaaccaggtggatatgaaagttgccgaggtactgtctgaatgccgcctgctcgcctacatatcccaggtgcccacgcagatgtccttcctcttccgcctcatcaacatcatccacgtgcagacgctgacccaggagaacgtcagctgcctcaacaccagcctggtgatcctgatgctggcccgacggaaagagcggctgcccctgtacctgcggctgctgcagcggatggagcacagcaagaagtaccccggcttcctgctcaacaacttccacaacctgctgcgcttctggcagcagcactacctgcacaaggacaaggacagcacctgcctagagaacagctcctgcatcagcttctcatactggaaggagacagtgtccatcctgttgaacccggaccggcagtcaccctctgctctcgttagctacattgaggagccctacatggacatagacagggacttcactgaggagtgaccttgggccaggcctcgggaggctgctgggccagtgtgggtgagcgtgggtacgatgccacacgccctgccctgttcccgttcctccctgctgctctctgcctgccccaggtctttgggtacaggcttggtgggagggaagtcctagaagcccttggtccccctgggtctgagggccctaggtcatggagagcctcagtccccataatgaggacagggtaccatgcccacctttccttcagaaccctggggcccagggccacccagaggtaagaggacatttagcattagctctgtgtgagctcctgccggtttcttggctgtcagtcagtcccagagtggggaggaagatatgggtgacccccaccccccatctgtgagccaagcctcccttgtccctggcctttggacccaggcaaaggcttctgagccctgggcaggggtggtgggtaccagagaatgctgccttcccccaagcctgcccctctgcctcattttcctgtagctcctctggttctgtttgctcattggccgctgtgttcatccaagggggttctcccagaagtgaggggcctttccctccatcccttggggcacggggcagctgtgcctgccctgcctctgcctgaggcagccgctcctgcctgagcctggacatggggcccttccttgtgttgccaatttattaacagcaaataaaccaattaaatggagactattaaataactttatttt

SEQ ID NO: 261717 - protein, 606 aa, Artificial Sequence
  derived and/or modified sequence
MRRSEVLAEESIVCLQKALNHLREIWELIGIPEDQRLQRTEVVKKHIKELLDMMIAEEESLKERLIKSISVCQKELNTLCSELHVEPFQEEGETTILQLEKDLRTQVELMRKQKKERKQELKLLQEQDQELCEILCMPHYDIDSASVPSLEELNQFRQHVTTLRETKASRREEFVSIKRQIILCMEALDHTPDTSFERDVVCEDEDAFCLSLENIATLQKLLRQLEMQKSQNEAVCEGLRTQIRELWDRLQIPEEEREAVATIMSGSKAKVRKALQLEVDRLEELKMQNMKKVIEAIRVELVQYWDQCFYSQEQRQAFAPFCAEDYTESLLQLHDAEIVRLKNYYEVHKELFEGVQKWEETWRLFLEFERKASDPNRFTNRGGNLLKEEKQRAKLQKMLPKLEEELKARIELWEQEHSKAFMVNGQKFMEYVAEQWEMHRLEKERAKQERQLKNKKQTETEMLYGSAPRTPSKRRGLAPNTPGKARKLNTTTMSNATANSSIRPIFGGTVYHSPVSRLPPSGSKPVAASTCSGKKTPRTGRHGANKENLELNGSILSGGYPGSAPLQRNFSINSVASTYSEFARELSKASKSDATSGILNSTNIQS

SEQ ID NO: 261718 - DNA, 1821 bp, Artificial Sequence
  derived and/or modified sequence
atgcggcgaagcgaggtgctcgcggaggagtccatcgtctgcttgcagaaggccttgaatcatttgcgggagatttgggagcttattgggattcccgaagaccagaggctgcagagaacagaagtggtgaagaaacacatcaaagaactcttggatatgatgatagccgaggaagaaagcctgaaggaacgtctgataaagtccatttcagtgtgccagaaagaactcaatacgctttgcagcgagctgcatgtggaaccttttcaagaggaaggggagacaactatcctccagctggagaaagatttgaggacccaagttgagctcatgcggaaacaaaaaaaagagaggaagcaggagctcaagctcttgcaggagcaggatcaggagctctgtgagatcctatgcatgccccattacgatatcgattctgcctccgttccaagcctggaagaattgaatcagttcaggcagcatgtgaccacgctgcgggaaacaaaggctagccgtagggaagagttcgtgagcattaaacggcaaatcatattgtgcatggaggccttagatcacactccagatacaagcttcgagagagacgtggtgtgcgaagacgaggacgcattttgcctgtctcttgaaaacatcgcaaccctgcagaagctcctgcggcagttagaaatgcagaaatctcaaaacgaagccgtgtgcgagggcctgcgcactcagataagagagctctgggaccgactccagataccagaagaggaacgtgaggcagtcgccacaatcatgagcggctcgaaagccaaagtccggaaggcactgcaactcgaggtcgacaggctggaagagctgaaaatgcagaatatgaaaaaagtgatagaggcgatcagagtagagctcgtccaatactgggaccagtgtttttattcacaagaacagcggcaggcatttgcacctttctgtgccgaagattacactgaatccctgctgcagttgcacgatgctgaaatcgtgcgcctgaaaaactactatgaggtccacaaggagctctttgaaggcgtgcagaaatgggaagagacatggagattattcctcgaatttgagcggaaagccagcgatcccaatcggtttacgaaccgcggggggaatctcctgaaggaagagaaacaaagggcaaagctgcaaaagatgctacccaaactcgaggaagagctgaaggccagaattgaactttgggaacaggaacactcaaaagcctttatggtgaatggacaaaagttcatggaatatgtggccgagcaatgggaaatgcaccgactagaaaaggagcgggcgaagcaggagcggcagcttaaaaataaaaaacagacagaaacagagatgctgtacggatccgccccccgaaccccgagcaagaggcgcggccttgcccctaacacgccagggaaggccaggaaattgaatactacaacgatgagcaacgcgaccgccaattccagcatcaggccaatctttgggggtaccgtgtatcactctccggtgtcacgtttgcccccatctggttctaagccagtggcagctagcacgtgcagcggcaagaagacgccgagaacaggacggcacggcgcaaacaaagaaaacctggagctaaacggcagtattctttccggcggatacccaggatccgcacctctgcagcgtaatttctcgataaactctgtcgcctccacatacagtgagtttgctcgcgaactttcaaaggctagcaaaagcgacgcgaccagcggaatcctgaattccacgaacattcaatcctag

SEQ ID NO: 261719 - DNA, 1821 bp, Artificial Sequence
  derived and/or modified sequence
atgagaagaagtgaggtgctggccgaggagagcatcgtgtgcctgcagaaggccctgaaccacctgcgggagatctgggagctgattggcatccctgaggaccagaggctgcagaggacagaggtggtgaagaagcacatcaaggagctgctggacatgatgattgctgaggaggagagcctgaaggagcggctcatcaagagcatctctgtgtgccagaaggagctgaacaccctgtgcagcgagctgcacgtggagcccttccaggaggagggggagaccaccatcctgcagctggagaaggacctgcggacccaggtggagctgatgaggaagcagaagaaggagaggaagcaggagctgaagctgctgcaggagcaggaccaggagctgtgtgagatcctgtgcatgccccactatgacatcgacagcgcctctgtgcccagcctggaggagctgaaccagttccggcagcacgtgaccaccctgcgggagaccaaggccagccggcgggaggagtttgtgtccatcaagaggcagatcatcctgtgcatggaggccctggaccacaccccagacaccagctttgaaagagatgtggtgtgtgaagatgaagatgccttctgcctgagcctggagaacatcgccaccctgcagaagctgctgcggcagctggagatgcagaagagccagaatgaggccgtgtgtgagggcctgcggacccagatccgggagctgtgggaccggctgcagatccctgaggaggagcgggaggccgtggccaccatcatgagcggcagcaaggccaaggtgaggaaggccctgcagctggaggtggaccggctggaggagctgaagatgcagaacatgaagaaggtgattgaggccatccgggtggagctggtgcagtactgggaccagtgcttctacagccaggagcagaggcaggcctttgcccccttctgtgccgaggactacacagagagcctgctgcagctgcatgatgctgagatcgtgcggctgaagaactactatgaggtgcacaaggagctgtttgagggcgtgcagaagtgggaggagacctggaggctcttcctggagtttgagaggaaggccagtgaccccaaccgcttcaccaacagaggaggcaacctgctgaaggaggagaagcagagggccaagctgcagaagatgctgcccaagctggaggaggagctgaaggcccgcatcgagctgtgggagcaggagcacagcaaggccttcatggtgaatggccagaagttcatggagtatgtggccgagcagtgggagatgcaccggctggagaaggagcgggccaagcaggagcggcagctgaagaacaagaagcagacagaaacagagatgctgtatggcagcgcccccaggacccccagcaagaggcggggcctggcccccaacacccctgggaaggccaggaagctgaacaccaccaccatgagcaatgccacagccaacagcagcatccggcccatctttggaggcaccgtgtaccacagccctgtgtcccggctgcccccatctggcagcaagcctgtggccgccagcacctgcagcggcaagaagacccccaggacaggccgccacggggccaacaaggagaacctggagctgaatggcagcatcctgagcggcggctacccaggcagcgcccccctgcagaggaacttcagcatcaacagcgtggccagcacctacagcgagtttgcccgggagctgagcaaggccagcaagagtgatgccaccagcggcatcctgaacagcaccaacatccagagctag

SEQ ID NO: 261720 - DNA, 1821 bp, Artificial Sequence
  derived and/or modified sequence
atgcggcggagcgaggtgctggccgaggagagcatcgtgtgcctgcagaaggccctcaatcacctacgggaaatttgggaactgattgggattcctgaggaccaaagattgcaacggaccgaggtagttaagaagcacataaaagagttgctggatatgatgattgctgaggaagagtccctgaaggaacggcttataaaatcaatcagcgtgtgtcagaaagaacttaacaccctgtgcagtgagttgcacgtcgaacccttccaggaagaaggcgagacaactatcctgcaattagagaaagatctgaggacgcaagtggagcttatgaggaaacaaaagaaagagcgcaaacaggagctgaagctcctgcaagagcaggatcaggagctgtgtgaaattctctgtatgccacactacgacatcgatagcgctagtgtgccatcactggaggaattgaaccagtttcgccagcacgtcactacgctacgtgaaactaaagcctcgaggagagaagagttcgtgagtataaagagacagatcatcttgtgcatggaggcccttgaccacacgccagatactagctttgagagagacgttgtgtgcgaagatgaagacgctttctgtctgtctctggaaaacatcgcaacactgcaaaagctgctgcgacaacttgaaatgcagaaaagtcagaatgaagccgtgtgtgaggggttgcgcacacagattagggagctatgggatcggcttcagatcccagaggaggagagagaagctgtggccaccataatgtccgggagcaaggctaaagttagaaaggctctgcagctcgaagtcgataggcttgaggagttgaagatgcagaatatgaaaaaggtaattgaggcaatccgcgtcgaactcgtacagtactgggatcagtgtttttattctcaagaacagaggcaagccttcgctccattctgtgctgaagactacactgagtcgctgctccaactgcatgacgcagagatagtgcgcctcaagaactactatgaggttcataaggaattattcgagggggtccagaagtgggaggagacttggcgactatttctggaattcgagagaaaggcaagtgatcccaaccggttcaccaaccgcggcggtaatctcttgaaagaagagaagcagcgagccaaactgcagaagatgttgcccaagctggaggaagaattgaaggctagaatcgaactgtgggagcaggagcactcaaaagctttcatggtgaatgggcaaaagtttatggagtatgtagccgagcagtgggagatgcacagactggagaaagagagagcaaaacaggaacgacaattgaagaacaagaaacagacggagaccgagatgctttatggctctgcacccaggaccccatccaagaggcgcggccttgcccccaacacacccggcaaagcgaggaaactgaacactacaacaatgagcaacgcaacggccaacagttcaattcgccccattttcggcggaactgtctaccacagcccagtgtcccgcctgccaccctccggaagtaagcccgtcgcagcctctacatgttctgggaagaagactccacggaccggacgccatggtgcaaacaaggaaaacctggagctgaacggcagtatcctgtctggtggatatcccggtagcgccccactccagcggaatttcagcatcaattcggtggccagtacgtatagtgagttcgcccgagagctgagtaaggcttcaaagagcgatgccacgtccggcattttaaattccaccaacatccagagttag

SEQ ID NO: 261721 - DNA, 1821 bp, Artificial Sequence
  derived and/or modified sequence
atgcggaggtccgaggtgcttgcagaggagtcgatagtctgtctgcaaaaggccctcaaccatctgagagagatttgggagctcatcgggatccctgaggatcagaggcttcaacggaccgaggtcgtcaagaagcacatcaaagagctcttagatatgatgattgctgaggaggaatccttgaaggaaagactcataaagagcattagcgtgtgccagaaggaattgaacaccctatgttccgagctccacgttgaacccttccaggaagaaggcgagaccaccatactgcaacttgaaaaagacctgcgcactcaggttgaactgatgagaaaacagaagaaagagcggaagcaggaactgaaacttcttcaggaacaggaccaagaactctgcgaaatcttgtgtatgccccactatgacatcgactctgcatcagtacctagtctcgaggagttaaaccagtttcggcagcatgtcactaccctccgggagaccaaagcctctaggagagaggaattcgtgtccatcaagcggcagataatcctatgcatggaagccctggaccacactcccgatacctctttcgaacgggatgttgtgtgcgaagacgaggacgcgttttgtctttcgttggaaaatattgcaactctgcagaagctgctgaggcaactggagatgcagaagtctcaaaacgaagctgtctgcgaggggctgaggacccagatcagggaactgtgggatagacttcagatacccgaggaggaacgcgaagcagttgctaccatcatgtccggatctaaagcgaaggtacggaaggccctccaattggaggttgatcgtctggaggaacttaagatgcagaacatgaaaaaggtgatagaagcaataagagtagaattggttcaatactgggatcaatgtttctacagccaagagcagcggcaggcgttcgctccgttctgcgctgaggattacacggagtcccttctgcagctacacgatgccgagatcgtgaggcttaaaaactactatgaagtgcacaaggagctgttcgaaggggtgcagaaatgggaagagacgtggcgactgtttctcgagtttgagaggaaagcctcagatcctaataggtttacgaacagaggaggcaacctcctgaaggaagagaaacagagagctaaactccagaagatgctccctaaactggaagaggaactgaaggcaaggatcgagctatgggaacaggagcactccaaggcatttatggtaaacggccagaagttcatggagtatgtcgcagaacagtgggaaatgcaccggcttgagaaggaacgggctaaacaagagcgacaactaaagaataaaaagcaaactgaaactgagatgttatatggttccgctcctcgcaccccatcgaagaggcggggtttagccccaaacacgcccggaaaggctcggaaattaaacacaaccacgatgagtaatgcaactgccaacagttctatcaggcccatttttggcggaactgtgtaccacagtcctgtgagtcggctaccacccagcggctccaagcctgtggcagccagcacgtgctccgggaagaaaactcctcgcaccggacgccatggagctaataaagaaaacctggaattgaatgggagtatcttgtccggtggttatcctggctctgcccctctgcagcgaaacttcagcattaattctgtggcatccacttactctgagttcgcgagagaacttagcaaagccagtaagtcagatgccacatccggcattctaaactccactaacatccagagctag

SEQ ID NO: 261722 - DNA, 4087 bp, Artificial Sequence
  derived and/or modified sequence
tgccagtattattattttacctacaaaatgagcaaagatgtttagaagtacaatagaattcagccctgctgagggtaacaaaaggagggtacttttccggtgaggctttgtgcagaaggcaaattaataaagggagcattcagtaattacacctctaggaatcagccgtacgaaaatgcaggatgcatttataaatacatacatacacaaagatttatgtatgaagatattcagcccagccttatcttttaaattatcatctaaatatcaatagcagaatgggcgagatatctacacaccaggattcatgccaccatgccaccatgaatcactgggaaaaaacggtgatatataagcatttagggatgtaacatgttcatcgaggaaaggaggctacaaaagtaatgtctattttgagttttaaatttttcatgtaacgatttagaaactcatctaatttgataacgtgacttaggcaaatcattcaaatctttttgcgtttcctctgcaatggcgattgtggaggttaaatgggataactggcgttgaaacgttccaggcccatgagcaggactcaatgttccttcccttcccctttagtgtatggcttcttacatctggggaagagtcccaccaaagatcgattccaagcttcgcttcttggatgagcgagggaaactaggcgctaacttacctattcacccccgcgcccgttcccggcagccgggactcagggaagccaggtagccgcggtgctctcaactccctccccgcccgcgcacttcgaatccaaactgcgcggggcgaggcggggcggcgctccgatgaggtagctggcttgggagaggagtcccttgaggctgccgccaagccagggaagcgggaggcgcaggccacgcccggccactcacagacagtgacgtcatcccccgccgccactccggcgcttcccaggccctgctcgcgagtccccaccccgattgcgcacccgcgacttcagcccgaggggcggggattttcttggagcgacgggacgcgacgccaatcgcgacgaggcttcgccccgtggcgcggtttgaaattttgcggggctcaacggctcgcggagcggctacgcggagtgacatcgccggtgtttgcgggtggttgttgctctcggggccgtgtggagtaggtctggacctggactcacggctgcttggagcgtccgccatgaggagaagtgaggtgctggcggaggagtccatagtatgtctgcagaaagccctaaatcaccttcgggaaatatgggagctaattgggattccagaggaccagcggttacaaagaactgaggtggtaaagaagcatatcaaggaactcctggatatgatgattgctgaagaggaaagcctgaaggaaagactcatcaaaagcatatccgtctgtcagaaagagctgaacactctgtgcagcgagttacatgttgagccatttcaggaagaaggagagacgaccatcttgcaactagaaaaagatttgcgcacccaagtggaattgatgcgaaaacagaaaaaggagagaaaacaggaactgaagctacttcaagagcaagatcaagaactgtgcgaaattctttgtatgccccactatgatattgacagtgcctcagtgcccagcttagaagagctgaaccagttcaggcaacatgtgacaactttgagggaaacaaaggcttctaggcgtgaggagtttgtcagtataaagagacagatcatactgtgtatggaagcattagaccacaccccagacacaagctttgaaagagatgtggtgtgtgaagacgaagatgccttttgtttgtctttggagaatattgcaacactacaaaagttgctacggcagctggaaatgcagaaatcacaaaatgaagcagtgtgtgaggggctgcgtactcaaatccgagagctctgggacaggttgcaaatacctgaagaagaaagagaagctgtggccaccattatgtctgggtcaaaggccaaggtccggaaagcgctgcaattagaagtggatcggttggaagaactgaaaatgcaaaacatgaagaaagtgattgaggcaattcgagtggagctggttcagtactgggaccagtgcttttatagccaggagcagagacaagcttttgcccctttctgtgctgaggactacacagaaagtctgctccagctccacgatgctgagattgtgcggttaaaaaactactatgaagttcacaaggaactctttgaaggtgtccagaagtgggaagaaacctggaggcttttcttagagtttgagagaaaagcttcagatccaaatcgatttacaaaccgaggaggaaatcttctaaaagaagaaaaacaacgagccaagctccagaaaatgctgcccaagctggaagaagagttgaaggcacgaattgaattgtgggaacaggaacattcaaaggcatttatggtgaatgggcagaaattcatggagtatgtggcagaacaatgggagatgcatcgattggagaaagagagagccaagcaggaaagacaactgaagaacaaaaaacagacagagacagagatgctgtatggcagcgctcctcgaacacctagcaagcggcgaggactggctcccaatacaccgggcaaagcacgtaagctgaacactaccaccatgtccaatgctacggccaatagtagcattcggcctatctttggagggacagtctaccactcccccgtgtctcgacttcctccttctggcagcaagccagtcgctgcttccacctgttcagggaagaaaacaccccgtactggcaggcatggagccaacaaggagaacctggagctcaacggcagcatcctgagtggtgggtaccctggctcggcccccctccagcgcaacttcagcattaattctgttgccagcacctattctgagtttgcgcgagaactttcaaaggcttccaaatctgatgctacttctggaatcctcaattcaaccaacatccagtcctgagaagccctgatcagtcaaccagctgtggcttcctgtgcctagactggacctaattatatgggggtgactttagtttttcttcagcttaggcgtgcttgaaaccttggccaggttccatgaccatgggcctaacttaaagatgtgaatgagtgttacagttgaaagcccatcataggtttagtggtcctaggagacttggttttgacttatatacatgaaaagtttatggcaagaagtgcaaattttagcatatggggcctgacttctctaccacataattctacttgctgaagcatgatcaaagcttgttttatttcaccactgtaggaaaatgattgactatgcccatccctgggggtaattttggcatgtatacctgtaactagtaattaacatcttttttgtttaggcatgttcaattaatgctgtagctatcatagctttgctcttacctgaagccttgtccccaccacacaggacagccttcctcctgaagagaatgtctttgtgtgtccgaagttgagatggcctgccctactgccaaagaggtgacaggaaggctgggagcagctttgttaaattgtgttcagttctgttacacagtgcattgccctttgttgggggtatgcatgtatgaacacacatgcttgtcggaacgctttctcggcgtttgtcccttggctctcatctcccccattcctgtgcctactttgcctgagttcttctacccccgcagttgccagccacattgggagtctgtttgttccaatgggttgagctgtctttgtcgtggagatctggaactttgcacatgtcactactggggaggtgttcctgctctagcttccacgatgaggcgccctctttacctatcctctcaatcactactcttcttgaagcactattatttattcttccgctgtctgcctgcagcagtactactgtcaacatagtgtaaatggttctcaaaagcttaccagtgtggacttggtgttagccacgctgtttactcatacagtacgtgtcctgtttttaaaatatacaattattctta

SEQ ID NO: 261723 - DNA, 1821 bp, Artificial Sequence
  derived and/or modified sequence
atgagaagaagcgaggtgctggccgaggagagcatcgtgtgcctgcagaaggccctgaaccacctgagagagatctgggagctgatcggcatccccgaggaccagagactgcagagaaccgaggtggtgaagaagcacatcaaggagctgctggacatgatgatcgccgaggaggagagcctgaaggagagactgatcaagagcatcagcgtgtgccagaaggagctgaacaccctgtgcagcgagctgcacgtggagcccttccaggaggagggcgagaccaccatcctgcagctggagaaggacctgagaacccaggtggagctgatgagaaagcagaagaaggagagaaagcaggagctgaagctgctgcaggagcaggaccaggagctgtgcgagatcctgtgcatgccccactacgacatcgacagcgccagcgtgcccagcctggaggagctgaaccagttcagacagcacgtgaccaccctgagagagaccaaggccagcagaagagaggagttcgtgagcatcaagagacagatcatcctgtgcatggaggccctggaccacacccccgacaccagcttcgagagagacgtggtgtgcgaggacgaggacgccttctgcctgagcctggagaacatcgccaccctgcagaagctgctgagacagctggagatgcagaagagccagaacgaggccgtgtgcgagggcctgagaacccagatcagagagctgtgggacagactgcagatccccgaggaggagagagaggccgtggccaccatcatgagcggcagcaaggccaaggtgagaaaggccctgcagctggaggtggacagactggaggagctgaagatgcagaacatgaagaaggtgatcgaggccatcagagtggagctggtgcagtactgggaccagtgcttctacagccaggagcagagacaggccttcgcccccttctgcgccgaggactacaccgagagcctgctgcagctgcacgacgccgagatcgtgagactgaagaactactacgaggtgcacaaggagctgttcgagggcgtgcagaagtgggaggagacctggagactgttcctggagttcgagagaaaggccagcgaccccaacagattcaccaacagaggcggcaacctgctgaaggaggagaagcagagagccaagctgcagaagatgctgcccaagctggaggaggagctgaaggccagaatcgagctgtgggagcaggagcacagcaaggccttcatggtgaacggccagaagttcatggagtacgtggccgagcagtgggagatgcacagactggagaaggagagagccaagcaggagagacagctgaagaacaagaagcagaccgagaccgagatgctgtacggcagcgcccccagaacccccagcaagagaagaggcctggcccccaacacccccggcaaggccagaaagctgaacaccaccaccatgagcaacgccaccgccaacagcagcatcagacccatcttcggcggcaccgtgtaccacagccccgtgagcagactgccccccagcggcagcaagcccgtggccgccagcacctgcagcggcaagaagacccccagaaccggcagacacggcgccaacaaggagaacctggagctgaacggcagcatcctgagcggcggctaccccggcagcgcccccctgcagagaaacttcagcatcaacagcgtggccagcacctacagcgagttcgccagagagctgagcaaggccagcaagagcgacgccaccagcggcatcctgaacagcaccaacatccagagctag

SEQ ID NO: 261724 - protein, 487 aa, Artificial Sequence
  derived and/or modified sequence
MVINLCLPQFRPRIHCNKISADGYEVENLISEDLTKRSHGFRTEYFIKPPVYVTVSFPFNVEICRINIDLTAGGGQNVTGLEMYTSASSSRVSWNTPQCRTLGPAEPSVPDKEAFTLVGKVLLKNQSQVVFSHRGFKARPPFGAMEATLPSPAVVAQELWNKGALSLSHVAHLRICITHVTGGGIPCIKRLEVWGQPAKTCSQEVIDSILLVTSENLPQDVALQAPALPMESDCDPGDQPESQQAPSSLQKLAEIIQDVPEEFLDPITLEIMPCPMLLPSGKVIDQSTLEKCNRSEATWGRVPSDPFTGVAFTPHSQPLPHPSLKARIDHFLLQHSIPGCHLLGRAQTALAVIPSSIVLPSQKRKIEQAEHVPDSNFGVNASCFSATSPLVLPTTSEHTAKKMKATNEPSLTHMDCSTEQPGSILGPECASCKRVFSPYFKKEPVYQLPCGHLLCRPCLGEKQRSLPMTCTACQRPVASQDVLRVHF

SEQ ID NO: 261725 - DNA, 1464 bp, Artificial Sequence
  derived and/or modified sequence
atggttatcaacttgtgccttccacaattccggcctagaatccattgcaataagatcagcgctgatggctatgaagtcgagaacctaatttccgaggacctgactaaaaggtcccacggcttccgcactgagtattttatcaaacccccggtctatgttactgtatcttttcctttcaatgttgaaatctgtaggattaacatagatctgaccgcaggcggcgggcagaacgttactggactggaaatgtatactagcgcctcaagcagcagagtgtcatggaatactccacagtgcagaaccctgggcccggctgagccttcagttccggacaaggaggcattcaccctggttggtaaagtgctcctgaagaatcagtcacaagtcgtgttcagccacagggggtttaaagcccgccccccattcggcgcaatggaggccaccttgccttcccctgctgtggtcgcacaggaattatggaacaagggggccctcagcctttcacacgtggcacatctgaggatttgtatcactcacgtaactgggggaggcatcccctgcataaagagactggaagtttggggccagccggcaaaaacctgtagccaggaggtgattgattcaatccttttagttacctcagaaaacctgcctcaggacgtggccttgcaggctcctgcactgccaatggagtcggactgtgatcccggtgatcagcctgagagtcaacaggcaccatcatcgctgcagaaactggccgagataatccaggacgttccagaagagttcctggaccctatcaccctggagatcatgccttgtccaatgctgcttccctccggaaaagtgattgaccagtccaccctcgagaaatgcaatcgctcagaggcaacatggggtcgtgtcccaagtgatccatttactggtgtggcattcacaccacattcccaacctcttccacacccgtccctgaaagcgcggatagaccactttctgctgcaacacagtatccccggctgtcacctgctcggccgggctcagactgcactggcggtgattccgtccagcattgtcctgccgtctcagaaaaggaagattgagcaggctgaacacgtgcctgactcgaatttcggcgtcaatgctagttgcttttctgcgacctctccactagtgctccctaccacatccgaacacacagcgaagaaaatgaaagcaacaaacgagccatcactgacacacatggattgcagtaccgaacaacccggcagcatcctcggacccgagtgtgcaagttgtaaaagggtgtttagcccttatttcaagaaagagcccgtataccagctcccatgcggccacctcttgtgtcgtccctgcctgggtgaaaagcagcgtagcctgcctatgacctgtaccgcatgccaacggcccgtggcgagccaggacgtgctgagagtccatttctag

SEQ ID NO: 261726 - DNA, 267 bp, Artificial Sequence
  derived and/or modified sequence
atggtaattaacctctgcttgccccagttccggcctcggatccattgtaacaagatttcagcagacgggtacgaagtggaaaacctgatttcagaagatttaacgaagcgttcacacgggttccgcacagagtactttatcaagcctcctgtctatgtaaccgtctcctttcctttcaacgtcgagatttgccggatcaatattgatctgactgctggcgggggccaaaacgtgaccggactagaaatgtacacaagcgcctcctag

SEQ ID NO: 261727 - DNA, 1464 bp, Artificial Sequence
  derived and/or modified sequence
atggtgatcaacctgtgcctgccccagttccggccccgcatccactgcaacaagatctctgcagatggctatgaggtggagaacctgatcagcgaggacctgaccaagaggagccacggcttcagaacagagtacttcatcaagccccctgtgtatgtgacagtgtccttccccttcaacgtggagatctgccgcatcaacatcgacctgacagctgggggcggccagaatgtgacaggcctggagatgtacaccagcgccagcagcagccgggtgtcctggaacaccccccagtgcaggaccctgggccctgctgagcccagcgtgcctgacaaggaggccttcaccctggtgggcaaggtgctgctgaagaaccagagccaggtggtgttcagccaccggggcttcaaggcccggcccccatttggagccatggaggccaccctgcccagccctgctgtggtggcccaggagctgtggaacaagggggccctgagcctgagccacgtggcccacctgcgcatctgcatcacccacgtgactggaggcggcatcccctgcatcaagaggctggaggtgtggggccagcctgccaagacctgcagccaggaggtgattgacagcatcctgctggtgaccagcgagaacctgccccaggatgtggccctgcaggccccagccctgcccatggagagtgactgtgaccccggggaccagcctgagagccagcaggcccccagcagcctgcagaagctggccgagatcatccaggatgtgcctgaggagttcctggaccccatcaccctggagatcatgccctgccccatgctgctgcccagcggcaaggtgattgaccagagcaccctggagaagtgcaacagaagtgaggccacctggggccgggtgcccagcgaccccttcaccggggtggccttcaccccccacagccagcccctgccccaccccagcctgaaggccagaattgaccacttcctgctgcagcacagcatccctggctgccacctgctgggccgggcccagacagccctggccgtcatccccagcagcatcgtgctgcccagccagaagaggaagattgagcaggccgagcacgtgcctgacagcaactttggagtgaatgccagctgcttcagcgccaccagccccctggtgctgcccaccaccagcgagcacacagccaagaagatgaaggccaccaatgagcccagcctgacccacatggactgcagcacagagcagcccggcagcatcctgggcccagaatgtgccagctgcaagagggtcttcagcccctacttcaagaaggagcctgtgtaccagctgccctgtggccacctgctgtgccggccctgcctgggggagaagcagaggagcctgcccatgacctgcacagcctgccagaggcctgtggccagccaggatgtgctgcgggtgcacttctag

SEQ ID NO: 261728 - DNA, 267 bp, Artificial Sequence
  derived and/or modified sequence
atggtgatcaacctgtgcctgccccagttccggccccgcatccactgcaacaagatctctgcagatggctatgaggtggagaacctgatcagcgaggacctgaccaagaggagccacggcttcagaacagagtacttcatcaagccccctgtgtatgtgacagtgtccttccccttcaacgtggagatctgccgcatcaacatcgacctgacagctgggggcggccagaatgtgacaggcctggagatgtacaccagcgccagctag

SEQ ID NO: 261729 - DNA, 1464 bp, Artificial Sequence
  derived and/or modified sequence
atggtgatcaacctgtgcctgccccagttccggccccggatccactgcaacaaaatttccgctgacgggtatgaggtcgagaatctcatctctgaagatctcactaagagaagtcatgggttccggaccgaatactttatcaagccccccgtgtacgtcacggtgtcattccctttcaatgtcgagatctgcaggatcaatatagacctgaccgccgggggaggccagaatgtgacaggcctcgaaatgtacacgtctgccagcagttccagagtctcatggaacacccctcagtgcagaacactgggcccagccgagccttccgttcctgataaagaagctttcacactggtcgggaaggtactgctcaagaatcaaagccaagtcgtattctcacaccgcgggttcaaggcaagacccccattcggggccatggaggccacgctgccttcccccgccgtggtggcccaggagctctggaacaagggtgcgctgagcctgtcacacgtcgctcacctgaggatctgcatcacccatgtcactggcggaggcataccctgcatcaaacgattagaggtctggggacagcctgctaagacctgcagccaagaagtcatcgactccatactgttggtcacgagcgagaacctcccccaggatgtagccttacaagcaccagctcttccaatggagtctgactgcgaccctggtgaccagcccgaatctcagcaggctcctagctctctccagaagttagctgagatcattcaagacgtccccgaggagttcttagacccaattaccctggagatcatgccttgtccaatgctcctgccaagcggtaaagtaatcgatcagtctaccctggagaagtgtaatcgaagcgaggctacgtggggacgtgtgccaagtgaccccttcacaggagtggcattcaccccgcatagccagcccctccctcatcccagcctgaaagcccgaattgaccattttctcctgcagcacagcattcctggctgccacttgctggggagagcccagacagcgctagccgtgattcctagctccatcgtgcttccttcacagaagcgaaagattgagcaggcagaacacgttcccgacagtaatttcggagtgaacgcttcatgcttctccgccacttctcctttggtgctgcctacaacctccgagcacacagcgaagaagatgaaagccacaaatgagccttccctgactcatatggactgctccacagagcagcctgggtctatattaggcccagagtgtgcttcttgtaaaagagttttttctccctacttcaaaaaggaaccggtgtaccagctgccctgcggtcatctgctctgcagaccctgcctcggagaaaagcaaaggagtttgccaatgacttgtacagcatgtcagagaccagttgcttctcaggacgtcttacgcgtgcacttctag

SEQ ID NO: 261730 - DNA, 267 bp, Artificial Sequence
  derived and/or modified sequence
atggtgatcaacctgtgcctgccccagttccggccccggatccactgtaacaaaatctcggccgatggctacgaggtggagaatctgatctcagaagacttgacaaaaagatctcacggattccgcactgagtacttcataaagcctccggtctacgtgaccgtgtcattccctttcaacgtagaaatatgccggattaacattgacctgaccgcaggagggggccaaaacgttactggcctcgaaatgtacacctctgcgtcatag

SEQ ID NO: 261731 - DNA, 1464 bp, Artificial Sequence
  derived and/or modified sequence
atggttatcaacttatgcctgccacaatttaggcccaggatccactgcaacaaaatctcagccgacggttatgaagtggagaaccttattagcgaagatctgacaaagcggtctcatgggttcaggaccgagtatttcatcaaaccccctgtttacgttacggtaagctttccctttaatgtggagatttgccgcattaacattgaccttaccgccggaggagggcaaaacgtgaccggacttgaaatgtacacatccgcctcttctagtagggttagctggaatactccccagtgtcgaacccttgggcctgcagagcctagtgtcccagataaggaagcttttacactcgtcgggaaagtgcttctcaaaaaccaaagccaggtggtgttctcccataggggattcaaggctcggccacccttcggagccatggaagccaccttgccctcccccgcagtggtggcccaggaactttggaataagggagcactgtcactatcacacgttgcccacttgagaatctgtatcacgcacgtgactggtggcggaatcccgtgtatcaagagactggaagtttggggtcagcctgcgaaaacctgttctcaggaagtaatcgacagcatcttgctggtaacaagtgagaaccttccccaagatgtcgccctgcaggcgccagctctcccaatggaatctgactgcgatcctggcgaccagcctgagtcgcagcaagctcctagcagcctccaaaagttggcggagatcatccaggatgtgccagaagaatttcttgacccaatcacactggagatcatgccctgtcctatgctcctgccctctggaaaagttattgaccagagcaccttggaaaaatgcaacagatccgaagccacatggggacgagtcccttctgacccttttactggagtcgcttttactccacactctcagccattaccacatccttccctgaaggcccgtatcgaccacttcctgttacagcacagcattccgggttgtcacctactcggaagggctcagacagcactcgctgttatacctagcagtatcgttctaccgtctcagaaaaggaagattgaacaagccgagcacgtgcctgattctaatttcggtgtgaacgcctcatgcttttctgctacatctcctctcgtgctgcctacaacaagtgaacatacggccaagaagatgaaagccaccaatgaaccatctctgacacacatggattgttcaaccgaacagcccggaagcatactggggcctgaatgcgccagttgtaaaagagtgtttagcccttatttcaagaaagagccagtctatcagcttccatgtggccatcttctgtgcaggccctgcctcggcgaaaaacagcgatcgctgccaatgacctgtaccgcttgccaacgcccagtggcttctcaggacgtgctccgcgtgcacttttag

SEQ ID NO: 261732 - DNA, 267 bp, Artificial Sequence
  derived and/or modified sequence
atggtcatcaacctgtgcctgcctcaatttcggccaagaatccactgtaacaaaatcagtgccgatggatatgaggtggagaatctgatatcagaggacctaactaagcggagccatgggtttcgcacagaatatttcataaagcctcctgtatacgtgacagtgtcctttccgttcaacgtggaaatatgtcgcatcaatatcgaccttaccgcaggcggtgggcagaatgtcaccggcctggagatgtatacttctgcctcatag

SEQ ID NO: 261733 - DNA, 4469 bp, Artificial Sequence
  derived and/or modified sequence
ttttgtatttttagtagagacgggggtttcaccacgttagccaggctggtctcgaactcctgaactcaggtgatccgcccgccttggcctcccaaagtactgggattacaggcgtgagccaccgcgccgggactaagctgcttaatgacttccagagcgatccatccaggaaggtgttttccctctgcaggtcctagactccccctgcctcctcaacaacgtcctccagtggaaaatgtccttgggaaacgctgacagagtcttttgagcctcggccgcatccgtcactcgcgcagcaggcggaagtagcgggcagttggccggaagtggggctgtgaggctcggagtcgccggaggagccagtatctgtgtcgccgccgcccgcggcgtccccggtttggtgttgcggcgcccaccttcgggaggatcaggctgcttctgatgcttggaagatatcctctcagccacaaagatggtaataaatctttgcctcccacagttcagaccaagaattcactgcaacaagatatcagctgatggttacgaagtagaaaatctcatctctgaagatctcacaaagagaagtcatggtttcaggacagagtatttcattaagccaccagtctatgtgacagtttcatttccctttaatgtggaaatctgtaggatcaacatagacctcacagctgggggaggtcagaacgtcactggcctggaaatgtacacatctgcctcatctagcagagtgtcttggaatacgccccagtgccggaccctgggcccagctgagccatctgtcccagacaaggaggcgttcaccttggtaggcaaagtcttactgaaaaaccagagccaagtggtgtttagccacaggggcttcaaggccaggcccccttttggcgcgatggaagccacactcccctcccctgctgttgtggcccaggagctctggaataaaggggctctttcccttagccacgtggcccacttaaggatctgtatcacccatgtgacaggcggcggtatcccttgtatcaagcggttggaagtgtggggtcagccggccaagacctgctcccaggaagtgatagacagcatcctgctggtcacctcagagaacctgcctcaggatgtggctctgcaggctccagccttgcccatggaaagtgactgtgaccctggggaccagcctgagagccagcaggctccctccagcctgcagaagctggccgagatcattcaggatgtgcctgaggagttcctggatcccatcaccctggagatcatgccttgtcccatgctgctgccctcaggcaaggtcatcgaccagagcacactggagaagtgtaaccgcagtgaagccacatggggccgagtgcccagtgaccctttcacgggggtagcttttactccgcactctcagcccctgcctcacccctccctcaaggcccggattgaccatttcctgctccagcactccatccctggctgccacctgcttgggagagcacagacggcattggcagtgatcccttcttccattgttctgccctctcagaaaaggaagatagagcaggctgaacatgtcccagacagtaactttggtgtaaatgcttcctgtttttctgccacaagccctttggtcttacccactacctcagagcacactgctaagaaaatgaaagccaccaatgagcccagcctgacacatatggactgctcgacagagcagcctgggagcatcctgggccccgaatgtgcctcctgcaaaagagtattttctccctacttcaaaaaggagccggtgtaccagctgccctgcggccacctcctgtgccgaccctgcctgggtgagaagcaacgctccctgcccatgacgtgcacagcctgccagcggccggttgctagccaagacgtgctgcgggtccacttctgagtgactgacctccactggaggagacccattgctgggaggagctgagggggaacaggagcagggccacagcacccctgaggtctggccaggccccaggcacagagctgcctgctccctcccggggctcttcttcatcacctcacggtatagcacattgcttctgcgctggtggcaatagggcaacaaagccataggccagagggcggggggatgtccctgcctccctgccaccccccctgcctgagcccaggacccactggagccagccccaccctaggcaggaagacccctgctgagggcccccccgtgcagtccgcatacccccctgtccagcagggcactgtgggtggctcaccctagattgtggcccagatctcaggagtctctgccttcagggtcatccaaaagtggaccttgggagcagtgggggtgtctgtggagtgcatgactcagccccccgactcgcagccttaataaagcgatggttgacgtctgctgtgggtttcctcctggtggagtgcctgtctgtgtcacacactcctgtcgcccacctgcacccacacaagtggagctcacagggtagctgtgtgcagtcactgcagcttgccaggctgtcattcctgtcgatgacctgaaaggacacaaactggaattttcaggtctgtcccctgcatggggactcagaacccaggtttgcaggtgggcatacgtggtgggagggtggagggctccctctggccagtgccagctgtgctcagctggcttcagaaactgctccctgagggggagcgcagcgtttcctcatgcagttggtttcaggaaaaatacttgtttataggctgcatccttttttcagcccaacatttagctttatggagtgccaaagggaaaatatatccatatccctacaacttggtactctatcagattccagccactagaagaacctcagtgagaaaacacacccgcctttccctgttcccttctaagcacgtttgggaaggaacagcctaaagatgctttgtaaagctgtattttacccttgagcttagccgcgggtccctgtgaaccggcacattcctttcctttaggccgtccagagctctagtccacacccaatactttagagatctgggtttggggttagttgcttttttttttttttttttaattgagacagggttggtctctgttgcccaagcttgagggcagtggtgcaatcataactcattgcagcctcgaactcctgggcttaagggatccttctacctcagcctcccaggtagcaggaactataggcatgtgccaccatgcccagctaatttttttattttttgtagagacaaggtcttgctatgttgtccagactggtctcaaactcctgggctcaagcgatcctcccaaagtgcttggattgcaggcatgagccacttcgcctagccaagcctgcatttttttgagttcctacatcatttgtccacaaagatggcttcagagaggtggtcacatgctttgctctgcttcctcttggcactgaccttgatgcagccttcacatgagatttgagggtccgcatggatggcctgtgccgccctcgctggcgaggctcctgtgtgcccctggctttctgggtctgtgcctctccagaatcttgtcttaccctccggtgtgcttgtgttcttagaaaagccccagcatggccgggcatggtggctcatgcctattatcccagcactttgggaggccaaggtgggtggatcacttgaggtcaagagttcgagaccagcctggccaacatggcaaaaccccatctctactaaaaatacaaaaattagctgggcatggtggtgtgtgcctgtaatgccagctactcaggaggctgaggcatgagaatcgcttgaaccggggaggcagaggttgcagtgagccgagatctcaccactgtactccagcctgggcgacggagtgagactccctctcaaaaaaagaaaaaagccccagcatgtagcaaaagcatttcttggtgagtgtgggggctggtgattcccaccttcaccctgtcatggtctcagggaacagcctgcttcccaccagcagcttgacacccacagtgtgctctggctgctgggagcccatctctcggagaaaccctgtccacccaaccccgagagccctagcgtgcagtcagcgtcagcacggcgctcccagatgagggccggactgcctccccttaagcagctgtgttggaggtactgcccagaccgctgcaggtccctggggatctgcatttctaacaggctcctgcccccaagactgctctggtggaaaatccagcctgggagcccctggagtggcaggccctgtcctgggtacaggtggagccacccccaggagttgcgtgtgtttttcttaattgaaagacttcccccaaaaggaagtggtcttttcactacccttgccagaaacatgctaggcaccactgggctctgtttctgtcccctagaaaatgggaataaaatttcttttgctgtca

SEQ ID NO: 261734 - DNA, 524 bp, Artificial Sequence
  derived and/or modified sequence
ccggaagtggggctgtgaggctcggagtcgccggaggagccagtatctgtgtcgccgccgcccgcggcgtccccggtttggtgttgcggcgcccaccttcgggaggatcagttagcatcgctccttcctctgcctggcccccctcctctaacttctagactctagtttaaaatgaagctattcggctctgctcagaccggtatgtggaagggagaaaggctgcttctgatgcttggaagatatcctctcagccacaaagatggtaataaatctttgcctcccacagttcagaccaagaattcactgcaacaagatatcagctgatggttacgaagtagaaaatctcatctctgaagatctcacaaagagaagtcatggtttcaggacagagtatttcattaagccaccagtctatgtgacagtttcatttccctttaatgtggaaatctgtaggatcaacatagacctcacagctgggggaggtcagaacgtcactggcctggaaatgtacacatctgcctcat

SEQ ID NO: 261735 - DNA, 1464 bp, Artificial Sequence
  derived and/or modified sequence
atggtgatcaacctgtgcctgccccagttcagacccagaatccactgcaacaagatcagcgccgacggctacgaggtggagaacctgatcagcgaggacctgaccaagagaagccacggcttcagaaccgagtacttcatcaagccccccgtgtacgtgaccgtgagcttccccttcaacgtggagatctgcagaatcaacatcgacctgaccgccggcggcggccagaacgtgaccggcctggagatgtacaccagcgccagcagcagcagagtgagctggaacaccccccagtgcagaaccctgggccccgccgagcccagcgtgcccgacaaggaggccttcaccctggtgggcaaggtgctgctgaagaaccagagccaggtggtgttcagccacagaggcttcaaggccagaccccccttcggcgccatggaggccaccctgcccagccccgccgtggtggcccaggagctgtggaacaagggcgccctgagcctgagccacgtggcccacctgagaatctgcatcacccacgtgaccggcggcggcatcccctgcatcaagagactggaggtgtggggccagcccgccaagacctgcagccaggaggtgatcgacagcatcctgctggtgaccagcgagaacctgccccaggacgtggccctgcaggcccccgccctgcccatggagagcgactgcgaccccggcgaccagcccgagagccagcaggcccccagcagcctgcagaagctggccgagatcatccaggacgtgcccgaggagttcctggaccccatcaccctggagatcatgccctgccccatgctgctgcccagcggcaaggtgatcgaccagagcaccctggagaagtgcaacagaagcgaggccacctggggcagagtgcccagcgaccccttcaccggcgtggccttcaccccccacagccagcccctgccccaccccagcctgaaggccagaatcgaccacttcctgctgcagcacagcatccccggctgccacctgctgggcagagcccagaccgccctggccgtgatccccagcagcatcgtgctgcccagccagaagagaaagatcgagcaggccgagcacgtgcccgacagcaacttcggcgtgaacgccagctgcttcagcgccaccagccccctggtgctgcccaccaccagcgagcacaccgccaagaagatgaaggccaccaacgagcccagcctgacccacatggactgcagcaccgagcagcccggcagcatcctgggccccgagtgcgccagctgcaagagagtgttcagcccctacttcaagaaggagcccgtgtaccagctgccctgcggccacctgctgtgcagaccctgcctgggcgagaagcagagaagcctgcccatgacctgcaccgcctgccagagacccgtggccagccaggacgtgctgagagtgcacttctag

SEQ ID NO: 261736 - DNA, 267 bp, Artificial Sequence
  derived and/or modified sequence
atggtgatcaacctgtgcctgccccagttcagacccagaatccactgcaacaagatcagcgccgacggctacgaggtggagaacctgatcagcgaggacctgaccaagagaagccacggcttcagaaccgagtacttcatcaagccccccgtgtacgtgaccgtgagcttccccttcaacgtggagatctgcagaatcaacatcgacctgaccgccggcggcggccagaacgtgaccggcctggagatgtacaccagcgccagctag

SEQ ID NO: 261737 - protein, 517 aa, Artificial Sequence
  derived and/or modified sequence
MGRRALLLLLLSFLAPWATIALRPALRALGSLHLPTNPTSLPAVAKNYSVLYFQQKALAAGQLHICIIQLNHYKTPLVDHFGFNTVKTFNQRYLVADKYWKKNGGSILFYTGNEGDIIWFCNNTGFMWDVAEELKAMLVFAEHRYYGESLPFGDNSFKDSRHLNFLTSEQALADFAELIKHLKRTIPGAENQPVIAIGGSYGGMLAAWFRMKYPHMVVGALAASAPIWQFEDLVPCGVFMKIVTTDFRKSGPHCSESIHRSWDAINRLSNTGSGLQWLTGALHLCSPLTSQDIQHLKDWISETWVNLAMVDYPYASNFLQPLPAWPIKVVCQYLKNPNVSDSLLLQNIFQALNVYYNYSGQVKCLNISETATSSLGTLGWSYQACTEVVMPFCTNGVDDMFEPHSWNLKELSDDCFQQWGVRPRPSWITTMYGGKNISSHTNIVFSNGELDPWSGGGVTKDITDTLVAVTISEGAHHLDLRTKNALDPMSVLLARSLEVRHMKNWIRDFYDSAGKQH

SEQ ID NO: 261738 - protein, 391 aa, Artificial Sequence
  derived and/or modified sequence
MWDVAEELKAMLVFAEHRYYGESLPFGDNSFKDSRHLNFLTSEQALADFAELIKHLKRTIPGAENQPVIAIGGSYGGMLAAWFRMKYPHMVVGALAASAPIWQFEDLVPCGVFMKIVTTDFRKSGPHCSESIHRSWDAINRLSNTGSGLQWLTGALHLCSPLTSQDIQHLKDWISETWVNLAMVDYPYASNFLQPLPAWPIKVVCQYLKNPNVSDSLLLQNIFQALNVYYNYSGQVKCLNISETATSSLGTLGWSYQACTEVVMPFCTNGVDDMFEPHSWNLKELSDDCFQQWGVRPRPSWITTMYGGKNISSHTNIVFSNGELDPWSGGGVTKDITDTLVAVTISEGAHHLDLRTKNALDPMSVLLARSLEVRHMKNWIRDFYDSAGKQH

SEQ ID NO: 261739 - DNA, 1554 bp, Artificial Sequence
  derived and/or modified sequence
atgggaaggcgggccctgctgctgttgctgctgtccttcctcgccccatgggccacaatcgccctcagacctgcacttcgcgccttgggatctctccatctccccactaatcccactagcttgcctgcggtggccaaaaactactcagttttgtattttcagcagaaagctctcgccgccggccagttgcacatttgcatcatccagttgaatcattacaagacacctctggtggatcacttcggatttaatacagtgaagacattcaaccagagatatttagtggcggacaagtactggaagaagaatggaggatcaatcctgttttacaccgggaatgaaggtgatatcatttggttttgcaataataccggctttatgtgggatgtggccgaggaactcaaagcgatgctcgtgttcgccgagcaccgctactatggcgagagtctgccctttggggacaatagctttaaggactccaggcatctcaattttctgacgtccgagcaagctcttgctgacttcgcggaactcataaagcatctcaaaaggaccatccccggcgctgaaaaccaacctgtcatcgccatcggtggttcctacggtggcatgttggctgcttggttcagaatgaagtacccccatatggtggttggcgccctggcggcctccgctcctatctggcaatttgaagacctagtgccatgcggcgtgtttatgaagatagtgacgacggactttcgcaaatcagggccacattgttccgagtctattcaccgaagttgggatgcaataaataggctatctaacactggatccggactgcaatggctgacaggcgccctgcatctgtgcagtcctctgacttcacaggacatccagcacctaaaagattggattagcgagacttgggtcaacctcgccatggtagattacccctacgcctctaattttttgcaacctctacctgcttggcccattaaagtggtttgtcaatacctcaagaaccccaatgtgtctgattcactgctgctccaaaatattttccaggctctcaacgtttattacaactattcaggccaggtgaaatgcctcaatatctccgagacagccacctcatccctgggaacccttggatggtcctatcaggcatgcactgaagtggtcatgccgttctgtaccaatggcgtcgatgacatgtttgagccccactcatggaaccttaaggagctcagtgatgactgttttcagcaatggggggttaggccacgcccctcatggatcaccaccatgtacggcggaaagaacatctcatcacatacgaacatcgtgttttcaaatggggagctcgatccctggtctggaggcggggtcaccaaagacatcactgacactctggtggcagtgacaatttctgaaggcgcccaccatttagatctgcgcacaaagaatgccttggatcccatgtctgtcctcctggcacggagcctggaggtgcgccacatgaaaaactggatccgtgatttttatgactcggcaggtaaacagcattag

SEQ ID NO: 261740 - DNA, 1554 bp, Artificial Sequence
  derived and/or modified sequence
atgggcagaagagccctgctgctgctgctgctgtccttcctggccccctgggccaccatcgccctgcggcctgccctgcgggccctgggcagcctgcacctgcccaccaaccccaccagcctgcctgctgtggccaagaactacagcgtgctgtacttccagcagaaggccctggccgccggccagctgcacatctgcatcatccagctgaaccactacaagacccccctggtggaccacttcggcttcaacacagtgaagaccttcaaccagcgctacctggtggccgacaagtactggaagaagaatggaggcagcatcctcttctacacaggaaatgaaggagacatcatctggttctgcaacaacacaggcttcatgtgggatgtggccgaggagctgaaggccatgctggtgtttgctgagcaccgctactacggggagagcctgccctttggagacaacagcttcaaggacagccgccacctgaacttcctgaccagcgagcaggccctggccgactttgctgagctgatcaagcacctgaagaggaccatccctggagctgagaaccagcctgtgattgccatcggcggcagctatggaggcatgctggccgcctggttcaggatgaagtacccccacatggtggtgggcgccctggccgccagcgcccccatctggcagtttgaggacctggtgccctgtggggtcttcatgaagatcgtgaccacagacttcaggaagagcggcccccactgcagcgagagcatccaccgctcctgggatgccatcaaccggctgagcaacacaggcagcggcctgcagtggctgactggagccctgcacctgtgcagccccctgaccagccaggacatccagcacctgaaggactggatcagcgagacctgggtgaacctggccatggtggactacccctatgccagcaacttcctgcagcccctgcctgcctggcccatcaaggtggtgtgccagtacctgaagaaccccaacgtgtctgacagcctgctgctgcagaacatcttccaggccctgaatgtgtactacaactacagcggccaggtgaagtgcctgaacatcagcgagacagccaccagcagcctgggcaccctgggctggagctaccaggcctgcacagaggtggtgatgcccttctgcaccaatggagtggatgacatgtttgagccccacagctggaacctgaaggagctgagtgatgactgcttccagcagtggggcgtgcggccccggcccagctggatcaccaccatgtatggaggcaagaacatcagcagccacaccaacatcgtgttcagcaatggagagctggacccctggagcggcggcggcgtgaccaaggacatcacagacaccctggtggccgtgaccatcagcgagggcgcccaccacctggacctgcggaccaagaatgccctggaccccatgtctgtgctgctggcccggagcctggaggtgcgccacatgaagaactggatccgggacttctatgacagcgctgggaagcagcactag

SEQ ID NO: 261741 - DNA, 1554 bp, Artificial Sequence
  derived and/or modified sequence
atgggccggcgggccctgctgctgctgctgctgagcttcctggccccctgggcaacgattgcattgcgtcccgccttgagggcattaggttctctacatctgcctactaatcccaccagcctgccggctgttgccaaaaattattctgtgctgtactttcagcagaaagcactggctgcgggacagctgcatatttgtattattcagctgaaccactacaaaacaccactcgtcgatcatttcgggttcaatacagttaaaacgtttaaccaacgttatttggtggccgataagtactggaaaaaaaacggaggttctatcctgttttacactggaaacgagggagatatcatttggttttgtaacaacaccggctttatgtgggatgtcgccgaggaattgaaggctatgctagttttcgctgagcacaggtactatggagagtccttgccgttcggggataactcgttcaaagactcgcgtcacctcaattttctgacttccgagcaggctctggccgacttcgcagagctcattaaacatcttaagagaacaatcccaggagccgagaatcagccagtgattgccattggcggttcatatggcggaatgctcgctgcttggttcaggatgaagtacccccatatggtcgtcggagcactggcagcttctgcaccaatatggcaattcgaggatctggttccctgtggcgtgttcatgaaaattgtgaccaccgactttcgaaaaagtggaccacattgcagtgagtctattcaccgaagttgggatgcaatcaaccgactgtctaatactggctcaggactccagtggttgacgggggcacttcacctgtgcagccccctcaccagccaagatatacagcacctgaaagattggatctctgagacttgggtgaaccttgcaatggtcgactacccttatgcctcaaacttcctccagcctctccccgcttggcctattaaagtggtctgtcagtacctgaaaaacccgaacgtgtccgactctctgctgctgcagaacatatttcaggcactgaacgtttactacaactattcaggacaagttaaatgcctgaacatttctgagactgccacctcctccctgggaacactgggctggagctaccaagcctgtaccgaggtcgtcatgccgttctgtactaacggcgtcgacgacatgttcgagcctcattcttggaatctgaaagaactttccgacgactgctttcagcagtggggagtgcggcctcgaccgagttggatcaccaccatgtatggagggaagaatatctcaagtcacacaaacatcgtttttagcaatggggaactggacccatggtctggagggggcgttaccaaggacatcaccgatacattagtggcagtgacgatcagcgaaggagcccaccatctcgacctgcgcaccaagaacgctcttgatcctatgagcgtcttactagcacgatcactagaagtccgacacatgaaaaactggatccgcgacttttacgattcagccggtaaacagcattag

SEQ ID NO: 261742 - DNA, 1554 bp, Artificial Sequence
  derived and/or modified sequence
atgggtaggagagcactgcttttgctgctgctgagcttcctcgccccatgggctaccatcgccctaaggcccgctctcagagcgctgggctcgttgcacctgcctacaaacccaactagccttcctgctgttgcgaagaattatagcgtgctgtacttccagcagaaagccctagccgctggccagctgcatatctgtattatccaattgaaccattataaaactccccttgtagatcatttcggctttaacaccgtgaagaccttcaatcagcgttacctagtggctgacaagtattggaagaaaaatggtggatccattcttttctataccggtaatgagggggatattatttggttttgcaacaatacaggattcatgtgggacgtagcggaagagctgaaggcaatgctggtcttcgctgaacaccggtattacggagaaagtttaccatttggcgataactcttttaaggatagccgccacctgaacttcctaacatccgaacaggctctagctgatttcgctgagttgattaaacacctgaagcgaaccatcccaggcgcagagaatcagccagtaatcgctattggaggatcatacggcggtatgctggctgcctggttccgaatgaaatatcctcacatggtggtgggcgcactggcggctagtgcgccaatatggcagtttgaagacctcgtgccctgcggtgtgttcatgaaaatcgtaaccactgacttcaggaagagcggcccacactgtagcgagagcatccacagaagctgggatgccataaacagactctctaataccgggagtggcttgcagtggctcacaggggctttacacttatgttctccactcacttcacaggatattcagcatctgaaggattggatttctgagacttgggtcaacctagctatggtggactatccttacgctagtaacttcctccagccactaccagcctggccaatcaaagttgtgtgtcagtatctcaaaaaccccaacgtgagtgactccctcctgttacaaaacatatttcaggcattaaatgtgtactataactactcagggcaggtgaagtgcctgaatatctcggagacagctacaagttcactggggacactgggttggtcgtatcaggcttgtacagaagtggtcatgcccttctgtaccaacggggtcgacgatatgttcgagcctcacagctggaaccttaaggaactgtcagacgattgcttccagcagtggggggtgcgacctcgaccatcatggatcactaccatgtacggaggaaaaaacatctcttcgcacaccaacattgtgttttcaaatggcgagctggatccttggagtggaggaggcgtgactaaggacataaccgatacgctcgtggctgtgaccatcagcgaaggggctcaccaccttgacctccgaactaaaaacgctctggatccaatgtcggtgctactcgcacgcagcctggaggttcgccacatgaagaattggattcgggacttttatgactctgctggaaagcagcactag

SEQ ID NO: 261743 - DNA, 2120 bp, Artificial Sequence
  derived and/or modified sequence
acccgcactgcagtctccagcctgagccatgggccgccgagccctcctgctcctgcttctgtcttttctggcgccctgggccaccatagccctccggccggccttaagggccctcggcagcctacacttgccaaccaaccccacatccctcccggctgtagccaagaactattcggttctctacttccaacagaaggcccttgctgctgggcagttgcacatatgtattatccaactaaatcattacaagactcctctggttgatcattttggatttaatactgtgaaaacttttaatcagcggtacctagtagctgataaatactggaagaaaaatggtggatcaatacttttctacactggtaatgaaggggacattatctggttttgtaataacacggggttcatgtgggatgtggctgaggaactgaaagctatgttggtgtttgctgaacatcgatactatggagagtctctcccctttggtgacaactcattcaaggattccagacacttgaatttcctgacatcagaacaagctctggctgattttgcagagttaatcaaacacttgaaaagaacaatcccaggagctgaaaatcaacctgtcattgccataggaggctcctatggtggcatgcttgccgcctggtttaggatgaaatatcctcatatggtagttggagctcttgcagcttctgcccctatctggcagtttgaggatttagtaccttgtggtgtatttatgaagatcgtaactacagattttaggaaaagcggtccacattgttcagagagcatccacaggtcctgggatgccattaatcgactctcaaatactggcagtggtttgcagtggcttactggagcccttcacttatgcagcccattaacttctcaggacatccaacatttgaaagactggatctctgaaacctgggtgaatctggcaatggtggactatccttatgcctctaactttttacagcctttgcctgcttggcctatcaaggtagtgtgccagtatttgaaaaatcccaatgtatctgattcactgctgctgcagaatattttccaagctctgaatgtatattacaattattcgggccaggtgaaatgcctgaatatttcagagacagcaactagcagtctgggaacactgggttggagctatcaggcctgcacagaagtagtcatgcccttttgtactaatggtgtcgatgacatgtttgaacctcactcatggaacttaaaggaactttctgatgactgttttcaacagtggggtgtgagaccaaggccctcctggatcactactatgtatggaggcaaaaacattagttcacacacaaacattgttttcagcaatggtgaactagacccctggtcaggaggtggagtaactaaggatatcacagacactctggttgcagtcaccatctcagagggggcccaccacttagatctccgcaccaagaatgccttggatcctatgtctgtgctgttagcccgctccttggaagttagacatatgaagaattggatcagagatttctatgacagtgcgggaaagcagcactgagaaacttttgattgttttcaatttcttcttttatgttcacaccaccacattcccattcactttgattttctacatgtaattaccttcttttgtttatcattagatttgatggggccaaagttgagatagaatagagggtgatgacggtaagagcaagtgtcccatgaatgtgatttcctgggttctcactgtctttgcaccacgtctaggaagaatcttcttgatagctctcccacaccatcagtggccctcataactggagtagagttcctggttgcttttcataagagggagagttactttctttgtatctctgcaagcagagatttctctttggttttgaggttgaagtgtctttggcccatttgtaagtccccatccctaccctacacaaagtaaaagcagaagatagataaaaaatgatgtaattgcagctggtaggatgtctggtgccaatccaggaagtgagagccatttcttttgtaccggatttaatgactttgaactgtgctgtaaataaataatacagctggacctt

SEQ ID NO: 261744 - DNA, 1554 bp, Artificial Sequence
  derived and/or modified sequence
atgggcagaagagccctgctgctgctgctgctgagcttcctggccccctgggccaccatcgccctgagacccgccctgagagccctgggcagcctgcacctgcccaccaaccccaccagcctgcccgccgtggccaagaactacagcgtgctgtacttccagcagaaggccctggccgccggccagctgcacatctgcatcatccagctgaaccactacaagacccccctggtggaccacttcggcttcaacaccgtgaagaccttcaaccagagatacctggtggccgacaagtactggaagaagaacggcggcagcatcctgttctacaccggcaacgagggcgacatcatctggttctgcaacaacaccggcttcatgtgggacgtggccgaggagctgaaggccatgctggtgttcgccgagcacagatactacggcgagagcctgcccttcggcgacaacagcttcaaggacagcagacacctgaacttcctgaccagcgagcaggccctggccgacttcgccgagctgatcaagcacctgaagagaaccatccccggcgccgagaaccagcccgtgatcgccatcggcggcagctacggcggcatgctggccgcctggttcagaatgaagtacccccacatggtggtgggcgccctggccgccagcgcccccatctggcagttcgaggacctggtgccctgcggcgtgttcatgaagatcgtgaccaccgacttcagaaagagcggcccccactgcagcgagagcatccacagaagctgggacgccatcaacagactgagcaacaccggcagcggcctgcagtggctgaccggcgccctgcacctgtgcagccccctgaccagccaggacatccagcacctgaaggactggatcagcgagacctgggtgaacctggccatggtggactacccctacgccagcaacttcctgcagcccctgcccgcctggcccatcaaggtggtgtgccagtacctgaagaaccccaacgtgagcgacagcctgctgctgcagaacatcttccaggccctgaacgtgtactacaactacagcggccaggtgaagtgcctgaacatcagcgagaccgccaccagcagcctgggcaccctgggctggagctaccaggcctgcaccgaggtggtgatgcccttctgcaccaacggcgtggacgacatgttcgagccccacagctggaacctgaaggagctgagcgacgactgcttccagcagtggggcgtgagacccagacccagctggatcaccaccatgtacggcggcaagaacatcagcagccacaccaacatcgtgttcagcaacggcgagctggacccctggagcggcggcggcgtgaccaaggacatcaccgacaccctggtggccgtgaccatcagcgagggcgcccaccacctggacctgagaaccaagaacgccctggaccccatgagcgtgctgctggccagaagcctggaggtgagacacatgaagaactggatcagagacttctacgacagcgccggcaagcagcactag

SEQ ID NO: 261745 - protein, 2590 aa, Artificial Sequence
  derived and/or modified sequence
MNLLRRSGKRRRSESGSDSFSGSGGDSSASPQFLSGSVLSPPPGLGRCLKAAAAGECKPTVPDYERDKLLLANWGLPKAVLEKYHSFGVKKMFEWQAECLLLGQVLEGKNLVYSAPTSAGKTLVAELLILKRVLEMRKKALFILPFVSVAKEKKYYLQSLFQEVGIKVDGYMGSTSPSRHFSSLDIAVCTIERANGLINRLIEENKMDLLGMVVVDELHMLGDSHRGYLLELLLTKICYITRKSASCQADLASSLSNAVQIVGMSATLPNLELVASWLNAELYHTDFRPVPLLESVKVGNSIYDSSMKLVREFEPMLQVKGDEDHVVSLCYETICDNHSVLLFCPSKKWCEKLADIIAREFYNLHHQAEGLVKPSECPPVILEQKELLEVMDQLRRLPSGLDSVLQKTVPWGVAFHHAGLTFEERDIIEGAFRQGLIRVLAATSTLSSGVNLPARRVIIRTPIFGGRPLDILTYKQMVGRAGRKGVDTVGESILICKNSEKSKGIALLQGSLKPVRSCLQRREGEEVTGSMIRAILEIIVGGVASTSQDMHTYAACTFLAASMKEGKQGIQRNQESVQLGAIEACVMWLLENEFIQSTEASDGTEGKVYHPTHLGSATLSSSLSPADTLDIFADLQRAMKGFVLENDLHILYLVTPMFEDWTTIDWYRFFCLWEKLPTSMKRVAELVGVEEGFLARCVKGKVVARTERQHRQMAIHKRFFTSLVLLDLISEVPLREINQKYGCNRGQIQSLQQSAAVYAGMITVFSNRLGWHNMELLLSQFQKRLTFGIQRELCDLVRVSLLNAQRARVLYASGFHTVADLARANIVEVEVILKNAVPFKSARKAVDEEEEAVEERRNMRTIWVTGRKGLTEREAAALIVEEARMILQQDLVEMGVQWNPCALLHSSTCSLTHSESEVKEHTFISQTKSSYKKLTSKNKSNTIFSDSYIKHSPNIVQDLNKSREHTSSFNCNFQNGNQEHQTCSIFRARKRASLDINKEKPGASQNEGKTSDKKVVQTFSQKTKKAPLNFNSEKMSRSFRSWKRRKHLKRSRDSSPLKDSGACRIHLQGQTLSNPSLCEDPFTLDEKKTEFRNSGPFAKNVSLSGKEKDNKTSFPLQIKQNCSWNITLTNDNFVEHIVTGSQSKNVTCQATSVVSEKGRGVAVEAEKINEVLIQNGSKNQNVYMKHHDIHPINQYLRKQSHEQTSTITKQKNIIERQMPCEAVSSYINRDSNVTINCERIKLNTEENKPSHFQALGDDISRTVIPSEVLPSAGAFSKSEGQHENFLNISRLQEKTGTYTTNKTKNNHVSDLGLVLCDFEDSFYLDTQSEKIIQQMATENAKLGAKDTNLAAGIMQKSLVQQNSMNSFQKECHIPFPAEQHPLGATKIDHLDLKTVGTMKQSSDSHGVDILTPESPIFHSPILLEENGLFLKKNEVSVTDSQLNSFLQGYQTQETVKPVILLIPQKRTPTGVEGECLPVPETSLNMSDSLLFDSFSDDYLVKEQLPDMQMKEPLPSEVTSNHFSDSLCLQEDLIKKSNVNENQDTHQQLTCSNDESIIFSEMDSVQMVEALDNVDIFPVQEKNHTVVSPRALELSDPVLDEHHQGDQDGGDQDERAEKSKLTGTRQNHSFIWSGASFDLSPGLQRILDKVSSPLENEKLKSMTINFSSLNRKNTELNEEQEVISNLETKQVQGISFSSNNEVKSKIEMLENNANHDETSSLLPRKESNIVDDNGLIPPTPIPTSASKLTFPGILETPVNPWKTNNVLQPGESYLFGSPSDIKNHDLSPGSRNGFKDNSPISDTSFSLQLSQDGLQLTPASSSSESLSIIDVASDQNLFQTFIKEWRCKKRFSISLACEKIRSLTSSKTATIGSRFKQASSPQEIPIRDDGFPIKGCDDTLVVGLAVCWGGRDAYYFSLQKEQKHSEISASLVPPSLDPSLTLKDRMWYLQSCLRKESDKECSVVIYDFIQSYKILLLSCGISLEQSYEDPKVACWLLDPDSQEPTLHSIVTSFLPHELPLLEGMETSQGIQSLGLNAGSEHSGRYRASVESILIFNSMNQLNSLLQKENLQDVFRKVEMPSQYCLALLELNGIGFSTAECESQKHIMQAKLDAIETQAYQLAGHSFSFTSSDDIAEVLFLELKLPPNREMKNQGSKKTLGSTRRGIDNGRKLRLGRQFSTSKDVLNKLKALHPLPGLILEWRRITNAITKVVFPLQREKCLNPFLGMERIYPVSQSHTATGRITFTEPNIQNVPRDFEIKMPTLVGESPPSQAVGKGLLPMGRGKYKKGFSVNPRCQAQMEERAADRGMPFSISMRHAFVPFPGGSILAADYSQLELRILAHLSHDRRLIQVLNTGADVFRSIAAEWKMIEPESVGDDLRQQAKQICYGIIYGMGAKSLGEQMGIKENDAACYIDSFKSRYTGINQFMTETVKNCKRDGFVQTILGRRRYLPGIKDNNPYRKAHAERQAINTIVQGSAADIVKIATVNIQKQLETFHSTFKSHGHREGMLQSDQTGLSRKRKLQGMFCPIRGGFFILQLHDELLYEVAEEDVVQVAQIVKNEMESAVKLSVKLKVKVKIGASWGELKDFDV

SEQ ID NO: 261746 - protein, 2726 aa, Artificial Sequence
  derived and/or modified sequence
MNGHRFTFRTRSLLPLQKGQHRCITKLLAHNDPWGIFRAPSSRRSYSVSGVCQPAIPNSSLHIPHNACWLKWKLCSEIALPYHHILGERRKLCSIRRFEFEDWREDVRSCCQARVLPRGRTLGLWLALIGREEFAMNLLRRSGKRRRSESGSDSFSGSGGDSSASPQFLSGSVLSPPPGLGRCLKAAAAGECKPTVPDYERDKLLLANWGLPKAVLEKYHSFGVKKMFEWQAECLLLGQVLEGKNLVYSAPTSAGKTLVAELLILKRVLEMRKKALFILPFVSVAKEKKYYLQSLFQEVGIKVDGYMGSTSPSRHFSSLDIAVCTIERANGLINRLIEENKMDLLGMVVVDELHMLGDSHRGYLLELLLTKICYITRKSASCQADLASSLSNAVQIVGMSATLPNLELVASWLNAELYHTDFRPVPLLESVKVGNSIYDSSMKLVREFEPMLQVKGDEDHVVSLCYETICDNHSVLLFCPSKKWCEKLADIIAREFYNLHHQAEGEGLVKPSECPPVILEQKELLEVMDQLRRLPSGLDSVLQKTVPWGVAFHHAGLTFEERDIIEGAFRQGLIRVLAATSTLSSGVNLPARRVIIRTPIFGGRPLDILTYKQMVGRAGRKGVDTVESILICKNSEKSKGIALLQGSLKPVRSCLQRREGEEVTGSMIRAILEIIVGGVASTSQDMHTYAACTFLAASMKEGKQGIQRNQESVQLGAIEACVMWLLENEFIQSTEASDGTEGKVYHPTHLGSATLSSSLSPADTLDIFADLQRAMKGFVLENDLHILYLVTPMFEDWTTIDWYRFFCLWEKLPTSMKRVAELVGVEEGFLARCVKGKVVARTERQHRQMAIHKRFFTSLVLLDLISEVPLREINQKYGCNRGQIQSLQQSAAVYAGMITVFSNRLGWHNMELLLSQFQKRLTFGIQRELCDLVRVSLLNAQRARVLYASGFHTVADLARANIVEVEVILKNAVPFKSARKAVDEEEEAVEERRNMRTIWVTGRKGLTEREAAALIVEEARMILQQDLVEMGVQWNPCALLHSSTCSLTHSESEVKEHTFISQTKSSYKKLTSKNKSNTIFSDSYIKHSPNIVQDLNKSREHTSSFNCNFQNGNQEHQTCSIFRARKRASLDINKEKPGASQNEGKTSDKKVVQTFSQKTKKAPLNFNSEKMSRSFRSWKRRKHLKRSRDSSPLKDSGACRIHLQGQTLSNPSLCEDPFTLDEKKTEFRNSGPFAKNVSLSGKEKDNKTSFPLQIKQNCSWNITLTNDNFVEHIVTGSQSKNVTCQATSVVSEKGRGVAVEAEKINEVLIQNGSKNQNVYMKHHDIHPINQYLRKQSHEQTSTITKQKNIIERQMPCEAVSSYINRDSNVTINCERIKLNTEENKPSHFQALGDDISRTVIPSEVLPSAGAFSKSEGQHENFLNISRLQEKTGTYTTNKTKNNHVSDLGLVLCDFEDSFYLDTQSEKIIQQMATENAKLGAKDTNLAAGIMQKSLVQQNSMNSFQKECHIPFPAEQHPLGATKIDHLDLKTVGTMKQSSDSHGVDILTPESPIFHSPILLEENGLFLKKNEVSVTDSQLNSFLQGYQTQETVKPVILLIPQKRTPTGVEGECLPVPETSLNMSDSLLFDSFSDDYLVKEQLPDMQMKEPLPSEVTSNHFSDSLCLQEDLIKKSNVNENQDTHQQLTCSNDESIIFSEMDSVQMVEALDNVDIFPVQEKNHTVVSPRALELSDPVLDEHHQGDQDGGDQDERAEKSKLTGTRQNHSFIWSGASFDLSPGLQRILDKVSSPLENEKLKSMTINFSSLNRKNTELNEEQEVISNLETKQVQGISFSSNNEVKSKIEMLENNANHDETSSLLPRKESNIVDDNGLIPPTPIPTSASKLTFPGILETPVNPWKTNNVLQPGESYLFGSPSDIKNHDLSPGSRNGFKDNSPISDTSFSLQLSQDGLQLTPASSSSESLSIIDVASDQNLFQTFIKEWRCKKRFSISLACEKIRSLTSSKTATIGSRFKQASSPQEIPIRDDGFPIKGCDDTLVVGLAVCWGGRDAYYFSLQKEQKHSEISASLVPPSLDPSLTLKDRMWYLQSCLRKESDKECSVVIYDFIQSYKILLLSCGISLEQSYEDPKVACWLLDPDSQEPTLHSIVTSFLPHELPLLEGMETSQGIQSLGLNAGSEHSGRYRASVESILIFNSMNQLNSLLQKENLQDVFRKVEMPSQYCLALLELNGIGFSTAECESQKHIMQAKLDAIETQAYQLAGHSFSFTSSDDIAEVLFLELKLPPNREMKNQGSKKTLGSTRRGIDNGRKLRLGRQFSTSKDVLNKLKALHPLPGLILEWRRITNAITKVVFPLQREKCLNPFLGMERIYPVSQSHTATGRITFTEPNIQNVPRDFEIKMPTLVGESPPSQAVGKGLLPMGRGKYKKGFSVNPRCQAQMEERAADRGMPFSISMRHAFVPFPGGSILAADYSQLELRILAHLSHDRRLIQVLNTGADVFRSIAAEWKMIEPESVGDDLRQQAKQICYGIIYGMGAKSLGEQMGIKENDAACYIDSFKSRYTGINQFMTETVKNCKRDGFVQTILGRRRYLPGIKDNNPYRKAHAERQAINTIVQGSAADIVKIATVNIQKQLETFHSTFKSHGHREGMLQSDQTGLSRKRKLQGMFCPIRGGFFILQLHDELLYEVAEEDVVQVAQIVKNEMESAVKLSVKLKVKVKIGASWGELKDFDV

SEQ ID NO: 261747 - protein, 2213 aa, Artificial Sequence
  derived and/or modified sequence
MPTSNSQKELLEVMDQLRRLPSGLDSVLQKTVPWGVAFHHAGLTFEERDIIEGAFRQGLIRVLAATSTLSSGVNLPARRVIIRTPIFGGRPLDILTYKQMVGRAGRKGVDTVGESILICKNSEKSKGIALLQGSLKPVRSCLQRREGEEVTGSMIRAILEIIVGGVASTSQDMHTYAACTFLAASMKEGKQGIQRNQESVQLGAIEACVMWLLENEFIQSTEASDGTEGKVYHPTHLGSATLSSSLSPADTLDIFADLQRAMKGFVLENDLHILYLVTPMFEDWTTIDWYRFFCLWEKLPTSMKRVAELVGVEEGFLARCVKGKVVARTERQHRQMAIHKRFFTSLVLLDLISEVPLREINQKYGCNRGQIQSLQQSAAVYAGMITVFSNRLGWHNMELLLSQFQKRLTFGIQRELCDLVRVSLLNAQRARVLYASGFHTVADLARANIVEVEVILKNAVPFKSARKAVDEEEEAVEERRNMRTIWVTGRKGLTEREAAALIVEEARMILQQDLVEMGVQWNPCALLHSSTCSLTHSESEVKEHTFISQTKSSYKKLTSKNKSNTIFSDSYIKHSPNIVQDLNKSREHTSSFNCNFQNGNQEHQTCSIFRARKRASLDINKEKPGASQNEGKTSDKKVVQTFSQKTKKAPLNFNSEKMSRSFRSWKRRKHLKRSRDSSPLKDSGACRIHLQGQTLSNPSLCEDPFTLDEKKTEFRNSGPFAKNVSLSGKEKDNKTSFPLQIKQNCSWNITLTNDNFVEHIVTGSQSKNVTCQATSVVSEKGRGVAVEAEKINEVLIQNGSKNQNVYMKHHDIHPINQYLRKQSHEQTSTITKQKNIIERQMPCEAVSSYINRDSNVTINCERIKLNTEENKPSHFQALGDDISRTVIPSEVLPSAGAFSKSEGQHENFLNISRLQEKTGTYTTNKTKNNHVSDLGLVLCDFEDSFYLDTQSEKIIQQMATENAKLGAKDTNLAAGIMQKSLVQQNSMNSFQKECHIPFPAEQHPLGATKIDHLDLKTVGTMKQSSDSHGVDILTPESPIFHSPILLEENGLFLKKNEVSVTDSQLNSFLQGYQTQETVKPVILLIPQKRTPTGVEGECLPVPETSLNMSDSLLFDSFSDDYLVKEQLPDMQMKEPLPSEVTSNHFSDSLCLQEDLIKKSNVNENQDTHQQLTCSNDESIIFSEMDSVQMVEALDNVDIFPVQEKNHTVVSPRALELSDPVLDEHHQGDQDGGDQDERAEKSKLTGTRQNHSFIWSGASFDLSPGLQRILDKVSSPLENEKLKSMTINFSSLNRKNTELNEEQEVISNLETKQVQGISFSSNNEVKSKIEMLENNANHDETSSLLPRKESNIVDDNGLIPPTPIPTSASKLTFPGILETPVNPWKTNNVLQPGESYLFGSPSDIKNHDLSPGSRNGFKDNSPISDTSFSLQLSQDGLQLTPASSSSESLSIIDVASDQNLFQTFIKEWRCKKRFSISLACEKIRSLTSSKTATIGSRFKQASSPQEIPIRDDGFPIKGCDDTLVVGLAVCWGGRDAYYFSLQKEQKHSEISASLVPPSLDPSLTLKDRMWYLQSCLRKESDKECSVVIYDFIQSYKILLLSCGISLEQSYEDPKVACWLLDPDSQEPTLHSIVTSFLPHELPLLEGMETSQGIQSLGLNAGSEHSGRYRASVESILIFNSMNQLNSLLQKENLQDVFRKVEMPSQYCLALLELNGIGFSTAECESQKHIMQAKLDAIETQAYQLAGHSFSFTSSDDIAEVLFLELKLPPNREMKNQGSKKTLGSTRRGIDNGRKLRLGRQFSTSKDVLNKLKALHPLPGLILEWRRITNAITKVVFPLQREKCLNPFLGMERIYPVSQSHTATGRITFTEPNIQNVPRDFEIKMPTLVGESPPSQAVGKGLLPMGRGKYKKGFSVNPRCQAQMEERAADRGMPFSISMRHAFVPFPGGSILAADYSQLELRILAHLSHDRRLIQVLNTGADVFRSIAAEWKMIEPESVGDDLRQQAKQICYGIIYGMGAKSLGEQMGIKENDAACYIDSFKSRYTGINQFMTETVKNCKRDGFVQTILGRRRYLPGIKDNNPYRKAHAERQAINTIVQGSAADIVKIATVNIQKQLETFHSTFKSHGHREGMLQSDQTGLSRKRKLQGMFCPIRGGFFILQLHDELLYEVAEEDVVQVAQIVKNEMESAVKLSVKLKVKVKIGASWGELKDFDV

SEQ ID NO: 261748 - DNA, 7773 bp, Artificial Sequence
  derived and/or modified sequence
atgaacctcctccggcggtccggaaagagaaggcggagcgaaagcggatcggactcattcagcggaagcgggggcgactcttccgcttctccccagttcctgtccggaagtgtgctgtctcctcccccaggactcggccgttgtctgaaagctgctgccgctggagaatgtaagccaactgtgcctgactatgagcgcgataagctcctgttggccaattggggtctccctaaggcggtccttgaaaagtatcatagctttggtgtgaaaaagatgtttgagtggcaagcagaatgcctgctgctgggccaggtcctcgaagggaagaacttggtgtactctgcacccacttctgcgggtaaaactttagtggcagaattgctgatactgaaacgtgtgctagaaatgcggaagaaagccttgttcatcctcccgtttgtgtctgtggcgaaagaaaaaaaatactacctccagtcgctcttccaggaagtcgggataaaagttgacggctatatggggtcaaccagcccctctcgtcacttctcctcgttggacattgccgtgtgcaccattgagcgcgcgaatggtttgatcaacaggctaattgaggagaacaagatggatcttctgggcatggtcgtggtcgacgagctacacatgctgggtgactcccaccgaggctatctcctggagctcctactcacaaagatctgttacatcacaagaaaaagcgcaagttgtcaagcagatctggcaagcagcctgtccaacgctgttcagatcgttggcatgtccgccacattacctaacttggagctggttgcttcgtggctgaatgctgaactttaccacaccgattttaggcccgtaccactcttagaaagcgtaaaagttggcaattcaatctacgacagcagcatgaagcttgtccgcgaattcgaacccatgcttcaggttaaaggcgatgaggaccatgtcgtctcactctgttacgagacgatctgcgacaaccactcagtgttactattctgcccctcaaagaaatggtgtgagaagctggctgacatcatcgcgcgagaattctacaacctgcatcaccaggctgagggactggtcaagccgagcgaatgccctccagtgatcttggagcagaaagagttgttagaggtaatggatcagctgcggcgcttgccaagcgggcttgactctgtgttgcagaaaaccgtcccgtggggcgttgcctttcatcacgccgggctcacttttgaggagagggacatcattgagggagcttttcggcagggcctaatccgggttctagctgccacaagtaccctcagttcaggcgtcaacctgcctgccaggagggttatcatccgcactcccatcttcggcggacgtccattggatatcctcacctacaagcagatggtcggaagggctggtaggaaaggagttgacaccgttggtgagagtatcctgatttgcaagaattccgagaaatctaagggcattgcactgttgcagggcagtctgaaaccggttcgctcgtgtctgcagagacgagaaggggaggaggtgaccggatctatgatcagggccattttggagataattgtgggcggggttgccagtaccagccaggacatgcacacttacgctgcctgcacgttcctcgcagcctctatgaaagagggaaaacagggtatccaacggaatcaagaatcagtacaactcggcgccattgaagcatgtgtgatgtggctcctcgagaacgaattcattcagagcactgaggcaagtgatggcaccgaaggtaaggtttaccaccctactcacctggggagcgccaccctgtcatcgagtctgtcaccggccgacacccttgatatcttcgccgatttgcagagggccatgaagggtttcgttctggagaacgaccttcatatactgtacctcgtgacccctatgttcgaggattggaccacgatcgactggtatcgttttttctgcctgtgggagaagctgccgacctcgatgaaaagagtggctgagttggtaggggtggaggaggggttcctggcccggtgtgtaaagggtaaggtggtggcaagaacagagcggcagcatcgccaaatggctatccataagaggttcttcacatctctggtgttgctggatctgattagcgaagtcccacttcgcgagattaatcagaaatatgggtgcaaccgggggcaaattcagagtcttcagcagagtgccgcagtgtacgctggaatgattaccgtcttttcaaacagactgggatggcataacatggagctcctgctgtcacagtttcagaagcgattgacttttggcatccagagggaactgtgtgatcttgtgcgcgtctcccttcttaatgcccagcgggcccgggtcctttatgcctccggtttccacactgtcgcggatctggccagggctaacatcgttgaagtcgaagttatcttgaagaatgccgtgccatttaaaagcgctaggaaagcggtggacgaagaggaagaggctgttgaggagagacggaacatgaggactatttgggtgaccgggagaaaaggtctcactgaaagagaggccgcagctctgattgtggaggaagctagaatgatcttgcagcaggacctggtagaaatgggggtgcaatggaacccatgcgctctcttgcactccagcacatgtagcttgactcattctgaaagcgaggtgaaagagcatactttcattagccagacaaagagcagctataagaagttgacctcaaagaataaatccaacaccatcttttctgacagctatatcaagcactctccaaacattgtgcaggatttgaataagagtcgggagcacacaagctctttcaattgcaattttcaaaatggtaaccaggagcatcagacttgctcaatctttagggcgcgaaagagggcctctctggacatcaataaagaaaagcccggcgcatctcagaacgagggaaagacaagcgacaagaaggtggtgcaaacgttcagccagaaaactaagaaggcaccgttaaactttaattctgagaaaatgtcgaggtcctttagaagttggaagaggagaaaacatctgaagagatcacgcgattcatcacctctgaaagattcaggcgcttgcagaatccacttacagggacaaacactgagcaatccatcgctgtgcgaggacccgttcacccttgatgaaaagaaaacggaatttcgcaactcgggtccattcgcgaagaacgtaagcttatctggtaaggagaaagataacaaaacaagttttccactccagataaaacagaattgctcgtggaacattaccctcaccaacgacaacttcgtggagcacattgtgaccgggtctcagtctaaaaatgtgacatgtcaggccacctccgttgtgagtgagaaaggacgcggagtcgcagttgaagcagaaaagattaacgaggtattgattcagaatgggtctaaaaaccagaacgtgtatatgaagcaccacgacatccatcccatcaatcagtacctgagaaaacaatcccacgaacagaccagtacaatcacaaagcagaaaaatatcattgaaaggcaaatgccatgcgaagcggtctctagctacatcaaccgcgacagcaacgtgactattaactgcgagagaatcaaattgaacaccgaagaaaataagccttcacattttcaagctctgggtgacgatatatctaggaccgtgatcccttccgaagtgctccccagcgccggcgctttctccaagtcagagggccaacacgagaattttcttaatatttcgcgattacaggagaagacgggcacttacaccactaataaaacgaagaacaaccacgttagcgatctcgggctcgttctttgtgattttgaggattcattttatttggacacccagtccgaaaaaatcatccagcaaatggctacagagaacgccaaactcggagctaaagataccaatttggcagctggtatcatgcagaaatcactcgttcaacagaactcaatgaatagtttccaaaaagagtgtcacatcccttttcccgccgaacaacacccattgggagccacaaagattgaccatctagatctcaagacagtgggcaccatgaagcagagctctgattcccacggtgtcgacatcctcacccctgaatctcctatcttccacagtccaattctgctggaggaaaacgggcttttcctgaaaaaaaatgaggtgagcgtgacggactcccagctgaactccttcctccagggatatcaaactcaagaaaccgtgaagccagtcattcttctgattccccaaaaaagaaccccaacaggagtcgaaggggaatgcctccctgtgcctgagacaagcctgaatatgtccgactcattgttgtttgacagctttagtgatgattatttagtgaaagagcaactgcccgatatgcagatgaaggagcccctccctagcgaggtcacctccaaccatttttccgactccctgtgcctccaagaagatctcattaaaaagtcaaacgtcaatgaaaaccaggatacccatcagcaattaacttgttccaatgacgagagtattattttctccgagatggactctgtccagatggtggaagccctggacaatgtggatatctttccagtgcaggagaaaaaccacacagtcgtgagcccacgagccttagaactgtctgatcccgtccttgacgaacaccaccagggagaccaggacgggggggatcaagacgagcgtgccgagaagtccaagttgacaggaacccgccaaaatcacagctttatctggtccggcgccagtttcgatttaagccctggcctgcagcgcatactcgataaggtatcatctcctcttgaaaatgagaagttgaaaagcatgactattaatttctccagccttaaccggaaaaatacggaactgaacgaggagcaggaagtgatctccaatttggaaaccaagcaggtccagggtatttccttttcaagcaacaatgaagtcaaatccaaaatcgagatgttggagaacaatgccaatcacgatgaaactagctctctgctgccccggaaagaatccaacattgtggacgacaacggtcttatcccacccacccctatccccacatcagcctcaaaattaacctttcctggcattctggagactccagttaatccatggaagaccaataatgtgttgcagccgggcgagagctatttgttcgggagccccagtgacatcaagaaccatgatttatcaccggggtcaaggaatggctttaaggacaactccccaatctctgatacaagcttctcactccagttgagccaagatggactacaattaactcccgccagcagctcatcggaaagcctcagtatcattgacgtagcgagcgaccaaaacctgtttcagaccttcatcaaagagtggcgctgtaagaagcggtttagcatcagtttagcatgcgaaaagattcgaagcctaacgagtagcaaaacggcgactatagggtccagatttaagcaggcctcctctccacaggagataccaatacgtgacgacggctttcccattaagggatgcgatgacaccttagtcgttggtttagcagtctgttgggggggccgcgacgcctactacttttctctacagaaggaacagaagcactccgaaatcagtgcttccctggttcctccatccttagatccgtccctgaccttgaaagacaggatgtggtatctgcaaagctgccttagaaaggagagtgataaagagtgctctgtggtgatttacgacttcattcagagctacaagatactactcctctcttgcgggatctccctcgagcagagctatgaagatccgaaagtggcctgttggttgctagatcctgattctcaggaaccaacactccactctatcgtcacctcattccttccgcatgagctgcccctattggaaggcatggagacctcacagggcatccagagcttgggcctcaacgcaggatctgagcactccggtcgctacagagccagtgtagagagcattctgatcttcaacagtatgaaccaattaaattctctgctccagaaagagaatctgcaggatgtttttcgcaaggtggaaatgccttctcagtattgcttggcgctgcttgagctgaatggcatcgggttctctactgcggaatgtgaaagccaaaagcatataatgcaggccaagttggatgcaatcgagacccaggcctatcagctggctggccacagctttagctttacatcttcagatgacatcgcggaagtgctcttcctcgagcttaagctgccacctaaccgggaaatgaagaaccaaggtagtaagaagaccttggggagtacgcggcggggaatcgataacggcaggaaactgcgccttggaaggcagttttccacctccaaagacgtgcttaacaagttgaaggccctgcaccctctgccaggcctcattctggaatggaggaggatcactaatgcaataacgaaggtggtcttccctctgcaaagagagaaatgcttgaacccgtttctcggcatggagcggatctatcccgtctctcagagtcatacagcaacaggtcggattacgttcacagagcctaatattcagaacgtgccacgtgacttcgagataaaaatgcccaccctcgtgggagagagcccaccgtctcaggctgtgggtaagggactgctccccatgggcagaggcaagtacaaaaaaggatttagcgtcaatcccaggtgccaggctcagatggaagagcgggccgccgacaggggaatgcctttctcgattagcatgagacacgcatttgtgccttttccggggggctcgatactcgcagcggactactcccagctcgaactccgcatactcgcccacctgagtcatgaccgccggctcatccaagtgttgaacacaggtgcggacgtttttcggtcaatcgcagctgaatggaagatgatcgagccggaatcagttggcgatgacctgcgacagcaggctaagcaaatctgctatggcattatttacgggatgggggccaaatcattgggcgaacagatgggaatcaaggaaaatgacgcggcttgctatatcgacagcttcaaatccaggtataccgggattaatcagtttatgactgagacggtaaaaaactgcaaacgcgacggatttgtgcagactatcctcgggcgcagacggtacttgcccggcatcaaggacaacaacccgtatcggaaagcccatgccgagcggcaagcgatcaacaccatagtccaaggaagcgctgcagatatagtgaaaattgctacagtgaatattcaaaaacagttggagacctttcatagtactttcaagagtcacgggcacagggagggcatgctgcaatcagaccagactggcctgagcaggaagcgcaagctgcagggaatgttctgtccaatacgaggaggattcttcattcttcagttgcacgacgagctgctgtacgaggtggcggaggaagatgtggtgcaggtggcgcagatcgtgaagaatgagatggagtccgctgtgaagctgtctgtcaagctcaaagtgaaggtgaaaattggggcaagttggggcgagctcaaggactttgatgtttag

SEQ ID NO: 261749 - DNA, 8181 bp, Artificial Sequence
  derived and/or modified sequence
atgaatggccaccgttttacatttagaacccggagcctgctgcctttgcagaaaggacagcaccgctgtatcaccaaattgttggctcacaacgatccctggggaatctttcgggccccgagcagcagaagatcttacagtgtctccggagtgtgccagcctgccatccccaacagctctcttcacatccctcataacgcttgctggctgaagtggaaactgtgctcagaaatagccctgccttaccaccacatcctgggagagcgccgtaaactgtgcagcattaggaggttcgagttcgaagattggagagaggacgtccggagctgttgccaggctagggtgctaccccgcggacgaacactgggcctgtggttagccctgattgggcgagaggagttcgcaatgaatttgctgaggaggtctggtaagcgcagacgctccgagtctggaagtgactctttctccggcagcggtggcgactcaagtgccagcccgcagttcctaagcggtagcgtcttaagcccaccaccgggactcggccgatgcttgaaggccgccgcagcgggtgagtgcaagcccacagtgcccgattatgaaagagacaagctgttactggccaactggggcctgccaaaagcagttcttgaaaaataccactcctttggagtgaaaaaaatgtttgaatggcaggctgagtgtctcctgctcggtcaggtgctggaaggcaagaatcttgtttactcagccccaacaagcgccgggaaaaccttggttgccgagctgctcatcttgaagagggtcctcgagatgcgcaagaaagcccttttcatccttccctttgtttccgtggccaaagaaaaaaaatattacctgcaatcccttttccaggaggtggggatcaaggtggacgggtacatggggtctacctctcctagtaggcatttctccagtctcgacatcgccgtttgtacgattgaacgcgcaaacgggctcattaatcggcttattgaagagaataagatggacctccttggcatggtagtcgtcgatgaactccacatgctgggcgattcccacagaggttacctgctagagttactcctcactaagatctgctacataactagaaagagtgcctcctgccaggcagatctggccagctcactgagcaatgccgttcagattgtgggtatgagcgcaactctgcctaatctggaacttgtggcctcttggctgaatgctgagttgtatcacacggactttaggcccgtcccccttctcgagtcagttaaggtgggcaatagcatttatgactcttcaatgaaactcgtgcgtgagtttgaaccaatgctgcaagtgaagggcgacgaagaccatgtcgtgtcactttgttacgagactatctgcgataatcattctgtcttactattttgtcctagtaaaaagtggtgtgaaaaactggccgacataatcgcacgtgaattctacaatctacaccaccaggccgaaggcgagggcctcgttaagccttcggagtgtcccccggtgattctcgagcagaaagagcttctggaggtcatggaccagttaaggaggctcccttctgggttagactctgtgctccagaaaaccgtgccttggggggtggccttccaccatgcaggacttacctttgaagagcgggatataattgagggcgcgtttcggcaggggctcattagggtcctggcagccacctccaccctgtccagtggagtgaacctgccagcaaggagagtgatcattcggacacccatctttggaggccgccccctggacattttgacatataaacagatggtgggccgggctggcagaaagggggtggacacagtagagtctattctcatttgtaagaattccgaaaaaagtaagggcatcgcccttttgcagggaagccttaagcctgtaaggtcttgcctccagagacgcgagggcgaagaagtaaccggatcgatgattagggctattctcgagattattgtaggaggcgtagcaagcacctcgcaggatatgcacacctacgctgcctgtacctttttggcggcctcgatgaaagaaggaaagcaggggattcagcgaaatcaggaaagcgttcagctcggggccattgaggcttgcgtgatgtggctgctggaaaacgagttcatccagtcaaccgaggcctccgacggaactgaggggaaagtataccatcctactcatctgggctccgctaccctgagttccagtctgagcccagcagatactttagacattttcgcagacctccagagggccatgaaaggctttgtgctcgaaaatgaccttcacattttgtaccttgtcactccaatgtttgaagactggaccactattgactggtaccggtttttctgtctctgggagaagctgcctacctccatgaagagagttgctgagttggttggggtcgaggaaggatttctcgctcggtgcgtgaagggaaaggttgtcgcgcgcaccgagagacagcaccgccagatggccattcataagcggttctttactagtttggtcctgttggaccttattagtgaagtcccccttcgtgaaatcaatcagaaatacggctgcaaccgtggacagatacaatcccttcagcagagcgcggccgtgtatgcgggaatgattactgtctttagtaatcggttaggctggcataacatggaactcctgctgtcccagtttcaaaaaagacttacgtttggaattcagcgcgagctttgcgaccttgtgagagtcagcctgttgaatgcccagcgtgcccgcgtcctgtacgcctccggctttcacaccgtggctgacctggcccgggcgaatatagtggaagtggaagtgattcttaaaaacgctgttcctttcaaaagtgctaggaaggctgtcgacgaggaagaggaagcagttgaagagcggcgcaacatgagaacaatctgggttacaggaaggaagggactgactgagcgcgaggctgctgccctgatcgtggaggaggcgagaatgatcttgcagcaagatctagtggagatgggagtccagtggaatccatgcgcactacttcactcaagtacctgttcccttacccattctgagtcagaggttaaggaacatacattcattagccagactaagtcttcctacaaaaaactgactagtaagaacaagagcaacactatcttttctgatagttacatcaaacacagccctaatattgtgcaggacctgaataaaagccgagagcacacatcttctttcaattgcaactttcagaatggtaaccaggagcatcagacatgctcgatcttcagggctcggaagagggctagcttggacattaataaggaaaagcctggcgcctctcagaatgagggaaaaaccagcgataagaaggttgttcaaacgtttagccagaagactaagaaggctccgctgaacttcaactccgagaagatgtccaggagttttcgttcatggaagcggcgtaaacacctaaagcgctcgcgcgacagcagtcccttgaaggacagtggggcgtgcagaattcacttacagggacagaccctcagtaacccttctctttgcgaagaccctttcaccctggacgagaagaagacagagtttaggaacagcggtccattcgctaagaacgtgtcactgtccggcaaagaaaaagacaacaaaacttcgttccctttacagattaagcagaattgttcgtggaacatcaccctaacaaacgataatttcgttgaacacattgtgactggatctcagagtaaaaatgtcacttgtcaggccacatccgtcgtcagtgaaaaggggagaggcgtcgcagtggaggccgagaagatcaatgaagtgctaatccagaatgggtcaaagaaccagaacgtatacatgaagcaccacgatatacaccccatcaaccagtatctgcgcaagcagtctcatgaacagacaagcacaatcaccaagcagaaaaacatcatagagagacagatgccgtgcgaagctgtcagctcctatatcaatagagattctaatgtaacaatcaactgtgaacgtatcaaactgaatacagaagagaacaagccgtcccactttcaagccttgggagacgacatctctcgaactgtgatcccctctgaggtcttaccgtcagcaggagccttctcaaaatcagagggacaacacgagaactttctgaatatcagtcgtttacaggagaaaactggaacatacacaactaataagaccaagaataaccacgtttcagaccttggactcgtcctgtgtgacttcgaggacagcttctacttagatactcaatctgaaaaaatcatacagcagatggcaactgaaaatgccaaacttggcgcaaaagacacaaatctagccgcagggatcatgcagaagagtctggtccaacagaattccatgaactcattccagaaggaatgccatattccattcccggcagagcagcatcctctcggagcaactaaaattgaccacctggacctaaagactgtcggtaccatgaaacaatcctcagactctcatggagttgacatcctgactccagagagccccatcttccacagtcctatacttctggaggaaaacggactgttcctcaagaagaatgaggtgtctgtgactgatagtcagctcaattcgtttctccaggggtaccagacccaggagacggtgaagcctgtgatactcctgatccctcagaagagaacacccaccggcgtggagggagaatgtctgccggtgcccgagaccagcctcaatatgagtgatagcttactgtttgattcattttccgacgactatctggtcaaggaacaacttcctgacatgcaaatgaaagaacccctgcccagcgaagtcacaagtaaccatttctccgactccctgtgtctccaggaggatctgatcaaaaaatctaacgtcaacgaaaatcaggacactcaccaacagctgacttgctccaatgatgagagcataatcttctctgaaatggatagtgtgcaaatggtggaagccttggacaatgttgatatatttccagtccaagaaaaaaaccacaccgttgtcagtcctagggctttagagctcagcgatccagtgctggacgagcaccatcaaggcgaccaagacggcggagaccaggatgaacgtgccgagaaaagtaagctgaccggcacccgtcagaaccacagctttatctggtcaggagcgagttttgatctcagccccggactacagaggatcttagataaagtcagctcacctctggagaacgagaaactgaagtcgatgacaataaattttagttcactgaaccggaaaaataccgaactcaatgaggaacaggaagttatctctaacttggaaaccaaacaggtccaggggatttcattttctagcaataatgaagtaaaatcgaagattgaaatgcttgaaaacaacgccaatcatgatgagacatcttctctgcttcctagaaaggagagcaatatagttgatgacaacgggctgatcccccccacaccaattcctacttccgcgagcaagctgacatttcccggaatcttggaaacccccgtcaacccgtggaagacaaacaatgtgctgcagccaggcgaaagctacctctttggcagcccctcagatattaagaaccacgacctgtcccccggcagcaggaatgggttcaaagacaattcgcctatttcagacaccagcttctcattgcagctctcccaggacggtctgcagttgacccctgctagcagcagcagtgagtccctgagcatcattgacgtagcctcagaccaaaatctgttccagacctttattaaagagtggagatgcaagaagcggtttagcattagtttggcgtgtgaaaagatacgctccttaaccagcagcaagactgccaccattgggagtcgatttaagcaggcatctagcccccaagaaatccctattagagatgatggctttcccataaaaggctgcgatgacactcttgtagttggactggccgtgtgctggggaggccgcgatgcctattacttttcactgcagaaggaacagaagcatagcgagatttcagcgagcctggttcctccttctctcgacccctctttgacgctaaaggataggatgtggtatctgcaatcttgcctccgtaaggagtctgacaaggaatgcagcgttgtgatctatgactttatccagtcctacaaaatcctcctgctgagttgtgggatttctttagagcagtcctacgaggacccaaaggtggcctgctggcttctggatccagattcccaagagcccaccttgcatagcattgtcactagtttcctgccacatgaactgccactgcttgaagggatggagaccagccagggaattcagtccctgggcctcaacgccggatctgaacatagcggaaggtacagggcctccgtggagagtatactgatctttaactctatgaaccagctgaactccctgctccagaaggagaatctgcaggacgtatttcgaaaggttgaaatgcctagccaatattgtctcgcactcttggagttgaacggcatcgggttcagcaccgccgaatgcgaatcacagaaacacatcatgcaggccaagctggacgcaattgagactcaggcctaccaactcgcaggtcactctttcagttttacatcctctgatgatatcgcagaagtgctgttccttgaactcaagctcccacctaaccgggagatgaaaaaccaggggagcaagaagacgctgggctcaaccagacgcggtatcgacaacggtaggaagctgagactgggaagacagttcagcacatcaaaggatgtgctcaataagctgaaagcacttcatcccttgcctgggttgattttggagtggcgccgcattaccaacgcgataaccaaagtcgtgttccctctccagcgggagaagtgtctgaatccattcttgggaatggagaggatttacccagtgtcccaatcacacacagccactgggagaatcacatttaccgagccaaatatccagaacgtgcctcgcgactttgaaattaagatgcccaccctcgtcggtgagtcgcccccaagccaggcagtgggaaaggggttgctgccaatggggcgcggcaaatacaaaaaaggtttttcagttaatcccaggtgtcaggcacagatggaggaacgtgctgcagaccgtggaatgcctttcagcatttcgatgaggcatgccttcgtcccatttcctggcggcagtattttagcagccgattattctcagttggaactacggatccttgcacacctatcccacgatcgacggctgatacaagtacttaacacaggagcagacgtgttccggtctatagccgccgaatggaagatgattgaacctgagtctgtcggcgacgaccttagacagcaggccaagcagatctgctacggaattatctatggcatgggagctaagtcactgggagaacagatgggcataaaagagaatgacgcggcctgctatattgatagctttaagagtcgatacaccggaattaatcagttcatgactgaaaccgtcaagaactgcaagcgcgacgggtttgttcagacaatcctcggaaggcgccgctacttgccaggcattaaggataacaatccttaccgcaaggcccacgccgagagacaggcgatcaacactatcgtccaggggtccgcagccgatattgtcaaaatcgccaccgtgaatattcagaagcaacttgagaccttccactcgacgtttaagtctcatggacaccgcgaggggatgttacagtccgatcaaaccgggttgagtcgcaaacgaaagttacagggcatgttctgtcctatccgtggcgggttctttatcttgcagttgcacgatgagcttctctacgaggtagcagaagaggacgtggttcaggtggcacagatcgttaaaaacgagatggaaagcgcggtaaaactaagcgtcaagctaaaggtgaaggtgaaaattggggcgtcatggggggagctcaaggattttgatgtatag

SEQ ID NO: 261750 - DNA, 6642 bp, Artificial Sequence
  derived and/or modified sequence
atgcccacaagtaattcccagaaagagcttcttgaggtgatggaccagctgagacggttgccatccggactcgattcagtgctgcaaaagaccgttccgtggggcgttgcttttcaccatgccggactgacattcgaagaaagggatatcattgagggagccttccgccaaggactgattagagtcctggccgccacatctaccctaagcagcggggttaacttgcctgcccgacgcgtcataattaggacccccattttcgggggcaggcccttggatatcctcacctataagcaaatggttggtagagcagggaggaagggtgtggataccgtgggagagtctattctgatatgtaagaacagtgagaaatctaagggcattgctctcctgcaggggtcgctcaaacctgtccggtcatgcctgcagcgacgcgagggggaagaagtaactgggtccatgattagagccattctggaaatcatcgtgggtggtgtcgctagtaccagtcaggatatgcacacatacgccgcgtgtacattcctggcagcctctatgaaagaaggcaaacaaggtatccagaggaaccaagaaagcgtgcagcttggggcgattgaagcctgcgtgatgtggctgctagaaaatgaatttatccaatctacggaagcctcagacggtacagaaggcaaagtttaccatcctacccatcttggttcggcgaccctatcttcttcgctgagtcccgcagacacattagacatatttgcagatctgcaacgggctatgaaaggattcgtgttggaaaacgatttgcatatactctacctagtgactccgatgtttgaggactggaccacaatcgattggtacaggtttttttgcttgtgggaaaaacttcccacatccatgaagagagtcgccgaactggtcggtgtggaggagggattcctggctcggtgtgttaagggcaaggtggtcgcgaggacagaaaggcagcatcggcagatggccatccataaacgctttttcacttcactggtgctcttggatttaattagtgaagtccccctgagagagataaatcagaagtacggatgcaataggggacagattcagagcttgcaacaaagcgccgctgtgtacgcgggcatgatcaccgtgttcagcaacagactggggtggcacaacatggagctgctgctcagccaatttcagaagcgtctgaccttcgggatccagagggagttatgcgatttggttcgagtgtcacttctgaacgcacaacgtgcgagggttttgtatgcctctggattccacaccgtggccgatttagctcgggcaaacatcgtggaggtcgaggtgatcttgaaaaatgcagtgccttttaagtctgcacgcaaggcggtggacgaggaggaggaggctgtggaagagaggaggaacatgaggacaatttgggtcaccggccggaagggactcacggaacgagaagccgcggctctgatagttgaggaggccagaatgatcttgcagcaggacctagtcgaaatgggggtacaatggaatccatgcgcactgcttcactcgtctacctgttccttaacacacagtgaaagcgaagtgaaggagcacaccttcatttcccagaccaagtcatcatataagaagctgacatccaaaaacaagtccaacacgatcttctccgactcatacattaagcatagccctaatatcgtgcaggatttgaacaagtccagggagcacacctccagtttcaattgcaattttcaaaacggaaatcaggaacatcagacctgtagtatcttcagggcccgcaagagggcaagcctggacattaataaagaaaagcctggggcaagtcagaatgaggggaaaacctctgacaaaaaggtcgtccagacgttttcacagaagacaaaaaaggcaccgctgaactttaattcggagaaaatgagtcggagcttccggtcctggaagagaaggaaacacctgaagcgatcacgggatagttccccgctcaaggattctggtgcatgcaggattcacctgcagggacaaaccctgagcaatccaagcctgtgcgaagatcctttcacactggatgaaaagaaaaccgaattccgaaactcaggcccatttgctaaaaatgtttcgctttctggtaaagaaaaggataataaaaccagtttccctctgcagattaaacagaactgctcatggaacattacactcaccaacgacaacttcgtggagcacatcgtgaccggctctcaatcaaagaatgtaacatgccaggctaccagcgtggtgagcgagaagggccgcggggtagccgtggaggctgagaaaattaacgaagtcctgatccagaacggatccaagaaccagaacgtttatatgaaacaccatgatattcaccctatcaaccaatatctccgcaaacagagtcatgagcagacaagtacgatcacaaaacagaaaaatattatcgagagacagatgccatgtgaggccgtcagcagctacattaatagagactctaatgtcaccatcaactgcgagaggattaagctgaataccgaagagaataaaccaagtcatttccaggcattgggagacgacatttctcggaccgtgataccaagcgaggtccttccgagtgccggtgcattcagtaaatccgagggccagcatgagaatttcctgaacatttcaaggctccaggagaaaacaggaacctatacaacaaacaagacgaagaataatcacgtgagcgatctaggcctggtgctgtgtgactttgaggattctttctatctggatacgcagtccgaaaagatcatccaacagatggcaacagagaatgcaaaactcggagccaaagatacaaaccttgccgccggtatcatgcagaagtcccttgttcagcaaaacagcatgaattcatttcagaaagagtgtcacattccgtttcctgctgagcagcatcctctgggcgcaactaagatagaccacctcgatctgaagactgtgggtaccatgaaacagtcaagcgacagtcacggcgtggatattctcacgcccgagtctcccatttttcatagccctatccttctcgaagagaatggtctcttcctgaaaaagaatgaagtttcagtcacagatagccaactcaatagcttcttgcagggctatcaaactcaggaaacagtgaaacccgtgatactgttaatccctcagaaacggacaccgacaggggtggagggagaatgtcttcccgtaccagagaccagcttgaacatgtcagacagcttactgttcgactccttctcggacgattatttagtaaaggaacagctgcccgatatgcagatgaaggagccgctgcctagcgaagtcactagcaatcacttcagcgattccctgtgcctccaggaggatctcatcaaaaagagcaacgtgaatgagaatcaggatacccaccagcagttaacttgctccaacgacgagtcaatcatcttctccgagatggacagcgtgcagatggtggaggccttggacaatgtcgatatcttcccggtgcaggagaagaatcacacagtggtctccccaagagcgctagagctctctgacccggtgctggatgagcatcaccaaggcgaccaggacgggggcgaccaagatgaacgggccgagaaatctaagctcaccggcacaagacagaaccattcattcatctggagtggggcttcttttgacctatctcccggtctccagcgaatactcgacaaagtatccagcccattggagaacgaaaaattgaagagcatgaccatcaacttctcttcactcaaccgcaagaacacggagctgaatgaggagcaggaggttatctcaaacctcgaaacaaaacaggtgcaaggcatttcattctcctctaataatgaagtgaagagtaagatagagatgttggaaaataacgcaaatcacgacgagacctcttcactgctccccagaaaggagtccaacattgtggatgataacggcttaatcccgccgacgccgattccaacgtcggcgagcaagctaacctttcccggcatcctcgaaactcccgttaatccatggaaaactaacaacgtactgcagccgggcgagtcgtacctatttggatccccgagtgatatcaaaaatcacgatctgtcaccagggtccaggaacgggttcaaagacaatagccctatttccgatacgagcttctcgcttcagctgagccaggatgggctgcagttgacccctgcttcttcttctagcgagagtctgagcataatcgacgtagccagtgaccaaaacttatttcaaacattcattaaggagtggcgatgtaagaagagattctctatatccttagcatgcgagaagattcgctccctcaccagcagcaaaaccgctaccattggatctcgctttaagcaggcctcttccccacaggagatacctattcgggatgatggattcccaattaaaggctgcgacgacactctcgttgtggggctcgccgtgtgttggggcgggcgagacgcttactactttagtcttcagaaagagcagaaacatagcgagatttctgcatccctggtccctccatccttggacccgtcattgacacttaaagatcgtatgtggtacctccagagttgtcttcgaaaagaatcagataaagagtgtagtgtcgtgatctatgacttcattcaatcctataagatcctcctgctttcctgcggaattagcttggagcaatcctacgaggaccctaaagtagcatgttggctcttagatccagattctcaggaacccaccctgcactctatcgtcacatctttcctccctcacgaactgccactcctggagggaatggaaaccagccagggaatccaatcattgggccttaacgctggatcggagcattctggcaggtaccgtgcttcagtagagtcaatcttgatattcaactcgatgaatcaactcaactctcttctgcaaaaggaaaacctgcaggacgtatttcgtaaagtcgaaatgccctcccagtactgtttggccctcctggagttgaacggcattggtttcagtacagccgagtgcgaaagccagaaacatatcatgcaggccaagctcgacgccattgagacccaggcttatcagttggctggacattcatttagcttcacaagctcggacgacatcgcagaggtgctcttccttgaactgaagctacctccaaatcgcgagatgaagaaccaggggtcaaaaaaaacattgggcagcacccgccgtggtatcgataacggtcggaagctaagacttggccgccagttcagtacatcaaaggacgtgctcaacaaactcaaggccctacaccctcttcccgggctgatactagaatggagacgaatcaccaacgcgattaccaaagtcgtgttcccattgcagcgagagaagtgccttaatccgtttttggggatggagcgcatctaccccgtttctcaatcccacaccgccactggtagaatcacttttactgagcctaacatccagaacgtccctagggacttcgagattaagatgcccacacttgtgggcgagagcccaccttcccaggccgtcggcaaaggattgttgccgatgggaagaggcaagtacaaaaagggattcagtgtaaaccccaggtgccaggctcagatggaagaacgcgccgctgaccgaggaatgcccttctcgatcagtatgaggcacgccttcgtccctttcccgggcggcagtatacttgctgcggactattctcagctggagttacgcattctagctcacctctcacatgataggaggttgatacaggtactcaatactggcgctgatgtgtttcgaagtatcgctgcggagtggaaaatgattgaacccgagtctgttggggatgatctgagacaacaggctaaacagatctgttacgggataatctatgggatgggcgccaaaagcctcggtgaacagatgggcataaaagagaacgatgctgcatgttacatagactcgttcaaaagccggtatactggaatcaaccagtttatgactgaaaccgtcaagaactgtaagagagatggattcgtacagaccattttgggtcggcgcaggtatctgcctgggatcaaagataataacccctacagaaaagcccacgccgagagacaagcaataaacactattgttcaaggttccgccgcagatatcgtcaaaattgctaccgttaacatacagaaacagcttgaaacatttcactcaaccttcaaaagccatggccatagagagggaatgctccagtctgaccagaccggcttgtccaggaagaggaagcttcagggcatgttctgcccaattagaggaggcttcttcatcttgcagttgcacgatgagctcctctatgaggttgctgaggaggacgtggtccaggtagctcagatcgtgaagaatgagatggagagtgctgtgaagctgtctgttaaactcaaggtgaaagtgaagatcggagcttcatggggggagttgaaagactttgacgtgtag

SEQ ID NO: 261751 - DNA, 7773 bp, Artificial Sequence
  derived and/or modified sequence
atgaacctgctgcggcgcagcggcaagagaagaagaagtgaaagtggcagtgacagcttcagcggcagcggcggggacagcagcgccagcccccagttcctgagcggctctgtgctgagccccccacctggcctgggccgctgcctgaaggctgctgctgctggggagtgcaagcccaccgtgcctgactatgaaagagacaagctgctgctggccaactggggcctgcccaaggctgtgctggagaagtaccacagctttggagtgaagaagatgtttgagtggcaggccgagtgcctgctgctgggccaggtgctggagggcaagaacctggtgtacagcgcccccaccagcgctgggaagaccctggtggccgagctgctgatcctgaagagggtgctggagatgaggaagaaggccctcttcatcctgccctttgtgtctgtggccaaggagaagaagtactacctgcagagcctcttccaggaggtgggcatcaaggtggatggctacatgggcagcaccagccccagccgccacttcagcagcctggacattgctgtgtgcaccatcgagcgggccaacggcctcatcaacagactcatcgaggagaacaagatggacctgctgggcatggtggtggtggatgagctgcacatgctgggggacagccaccggggctacctgctggagctgctgctgaccaagatctgctacatcaccaggaagagcgccagctgccaggccgacctggccagcagcctgagcaatgctgtgcagatcgtgggcatgtctgccaccctgcccaacctggagctggtggcctcctggctgaatgctgagctgtaccacacagacttccggcctgtgcccctgctggagagcgtgaaggtgggcaacagcatctatgacagctccatgaagctggtgcgggagtttgagcccatgctgcaggtgaagggagatgaagatcatgtggtgtccctgtgctatgagaccatctgtgacaaccacagcgtgctgctcttctgccccagcaagaagtggtgtgagaagctggccgacatcatcgcccgggagttctacaacctgcaccaccaggccgagggcctggtgaagcccagcgagtgcccccctgtgatcctggagcagaaggagctgctggaggtgatggaccagctgcggcggctgcccagcggcctggacagcgtgctgcagaagacagtgccctggggcgtggccttccaccacgccggcctgacctttgaggagcgggacatcatcgagggcgccttccggcagggcctcatccgggtgctggccgccaccagcaccctgagcagcggcgtgaacctgcctgcccggcgggtcatcatccgcacccccatctttggaggccggcccctggacatcctgacctacaagcagatggtgggccgggccggcaggaagggcgtggacacagtgggggagagcatcctgatctgcaagaacagcgagaagagcaaaggaattgccctgctgcagggcagcctgaagcctgtgcgcagctgcctgcagaggcgggagggggaggaggtgacaggctccatgatccgggccatcctggagatcatcgtgggcggcgtggccagcaccagccaggacatgcacacctacgccgcctgcaccttcctggccgcctccatgaaggagggcaagcagggcatccagaggaaccaggagagcgtgcagctgggcgccatcgaggcctgtgtgatgtggctgctggagaatgagttcatccagagcacagaggccagtgatggaacagagggcaaggtgtaccaccccacccacctgggcagcgccaccctgagcagcagcctgagccctgctgacaccctggacatctttgctgacctgcagagggccatgaagggctttgtgctggagaatgacctgcacatcctgtacctggtgacccccatgtttgaggactggaccaccatcgactggtaccgcttcttctgcctgtgggagaagctgcccacctccatgaagagggtggccgagctggtgggcgtggaggagggcttcctggcccgctgtgtgaagggcaaggtggtggccaggacagagcggcagcaccggcagatggccatccacaagcgcttcttcaccagcctggtgctgctggacctgatcagcgaggtgcccctgcgggagatcaaccagaagtatggctgcaacagaggccagatccagagcctgcagcagagcgctgctgtgtatgccggcatgatcaccgtcttcagcaaccggctgggctggcacaacatggagctgctgctgagccagttccagaagaggctgaccttcggcatccagcgggagctgtgtgacctggtgcgggtgtccctgctgaatgcccagagggcccgggtgctgtatgccagcggcttccacacagtggccgacctggcccgggccaacatcgtggaggtggaggtgatcctgaagaatgctgtgcccttcaagagcgccaggaaggctgtggatgaggaggaggaggccgtggaggagaggaggaacatgaggaccatctgggtgactggaaggaagggcctgacagagcgggaggccgccgccctgattgtggaggaggccaggatgatcctgcagcaggacctggtggagatgggcgtgcagtggaacccctgtgccctgctgcacagcagcacctgcagcctgacccacagcgagagcgaggtgaaggagcacaccttcatcagccagaccaagagcagctacaagaagctgaccagcaagaacaagagcaacaccatcttcagtgacagctacatcaagcacagccccaacatcgtgcaggacctgaacaagagccgggagcacaccagcagcttcaactgcaacttccagaatggaaaccaggagcaccagacctgcagcatcttccgggccaggaagagggccagcctggacatcaacaaggagaagccaggggccagccagaatgaaggcaagaccagtgacaagaaggtggtgcagaccttcagccagaagaccaagaaggcccccctgaacttcaacagcgagaagatgagccgctccttccgctcctggaagaggaggaagcacctgaagaggagccgggacagcagccccctgaaggacagcggggcctgccgcatccacctgcagggccagaccctgagcaaccccagcctgtgtgaggaccccttcaccctggatgagaagaagacagagttcaggaacagcggcccctttgccaagaatgtgtccctgagcggcaaggagaaggacaacaagaccagcttccccctgcagatcaagcagaactgctcctggaacatcaccctgaccaatgacaactttgtggagcacatcgtgacaggcagccagagcaagaatgtgacctgccaggccacctctgtggtgtctgagaagggccggggcgtggccgtggaggccgagaagatcaatgaggtgctgatccagaatggcagcaagaaccagaatgtgtacatgaagcaccacgacatccaccccatcaaccagtacctgaggaagcagagccatgagcagaccagcaccatcaccaagcagaagaacatcatcgagcggcagatgccctgtgaggccgtgtcctcctacatcaacagagacagcaatgtgaccatcaactgtgagcgcatcaagctgaacacagaggagaacaagcccagccacttccaggccctgggagatgacatcagcaggacagtcatccccagcgaggtgctgcccagcgctggggccttcagcaagtctgagggccagcacgagaacttcctgaacatcagccggctgcaggagaagacaggcacctacaccaccaacaagaccaagaacaaccacgtgtctgacctgggcctggtgctgtgtgactttgaagattccttctacctggacacccagagcgagaagatcatccagcagatggccacagaaaatgccaagctgggcgccaaggacaccaacctggccgccggcatcatgcagaagagcctggtgcagcagaacagcatgaacagcttccagaaggagtgccacatccccttccctgctgagcagcaccccctgggcgccaccaagattgaccacctggacctgaagacagtgggcaccatgaagcagagcagtgacagccatggagtggacatcctgaccccagagagccccatcttccacagccccatcctgctggaggagaatggcctcttcctgaagaagaatgaggtgtctgtgacagacagccagctgaacagcttcctgcagggctaccagacccaggagaccgtgaagcctgtgatcctgctgatcccccagaagaggacccccactggagtggagggggagtgcctgcctgtgcctgagaccagcctgaacatgtctgacagcctgctgtttgacagcttcagtgatgactacctggtgaaggagcagctgcctgacatgcagatgaaggagcccctgcccagcgaggtgaccagcaaccacttcagtgacagcctgtgcctgcaggaggacctgatcaagaagagcaatgtgaatgaaaaccaggacacccaccagcagctgacctgcagcaatgatgagagcatcatcttcagcgagatggattctgtgcagatggtggaggccctggacaacgtggacatcttccctgtgcaggagaagaaccacacagtggtgagcccccgggccctggagctgagtgaccctgtgctggatgagcaccaccagggcgaccaggatggaggagaccaggatgaaagagctgagaagagcaagctgaccggcacccggcagaaccacagcttcatctggagcggggccagctttgacctgagccctggcctgcagaggatcctggacaaggtgagcagccccctggagaatgagaagctgaagtccatgaccatcaacttcagcagcctgaacaggaagaacacagagctgaatgaggagcaggaggtgatcagcaacctggagaccaagcaggtgcagggcatctccttcagcagcaacaatgaggtgaagagcaagattgagatgctggagaacaatgccaaccatgatgagaccagcagcctgctgcccaggaaggagagcaacatcgtggatgacaatggcctcatcccccccacccccatccccaccagcgccagcaagctgaccttccctggcatcctggagacccctgtgaacccctggaagaccaacaacgtgctgcagcccggggagagctacctgtttggcagccccagcgacatcaagaaccacgacctgagccctggcagcagaaatggcttcaaggacaacagccccatcagtgacaccagcttcagcctgcagctgagccaggacggcctgcagctgaccccagccagcagcagcagcgagagcctgagcatcattgatgtggccagtgaccagaacctcttccagaccttcatcaaggagtggcgctgcaagaagcgcttcagcatcagcctggcctgtgagaagatccgcagcctgaccagcagcaagacagccaccatcggcagccgcttcaagcaggccagcagcccccaggagatccccatcagagatgatggcttccccatcaagggctgtgatgacaccctggtggtgggcctggccgtgtgctggggcggcagagatgcctactacttcagcctgcagaaggagcagaagcacagcgagatcagcgccagcctggtgccccccagcctggaccccagcctgaccctgaaggacaggatgtggtacctgcagagctgcctgaggaaggagagtgacaaggaatgttctgtggtgatctatgacttcatccagagctacaagatcctgctgctgagctgtggcatcagcctggagcagagctatgaggaccccaaggtggcctgctggctgctggaccctgacagccaggagcccaccctgcacagcatcgtgaccagcttcctgccccatgagctgcccctgctggagggcatggagaccagccagggcatccagagcctgggcctgaatgccggcagcgagcacagcggccgctaccgggcctctgtggagagcatcctgatcttcaacagcatgaaccagctgaacagcctgctgcagaaggagaacctgcaggatgtgttcaggaaggtggagatgcccagccagtactgcctggccctgctggagctgaatggcatcggcttcagcacagcagaatgtgagagccagaagcacatcatgcaggccaagctggatgccatcgagacccaggcctaccagctggccggccacagcttctccttcaccagcagtgatgacattgctgaggtgctcttcctggagctgaagctgccccccaaccgggagatgaagaaccagggcagcaagaagaccctgggcagcacccggcggggcatcgacaatggaaggaagctgcggctgggccggcagttcagcaccagcaaggatgtgctgaacaagctgaaggccctgcaccccctgcccggcctcatcctggagtggaggcgcatcaccaatgccatcaccaaggtggtgttccccctgcagcgggagaagtgcctgaaccccttcctgggcatggagcgcatctaccctgtgtcccagagccacacagccaccggccgcatcaccttcacagagcccaacatccagaatgtgccccgggactttgagatcaagatgcccaccctggtgggggagagcccccccagccaggccgtgggcaagggcctgctgcccatgggccggggcaagtacaagaagggcttctctgtgaacccccgctgccaggcccagatggaggagagagctgctgaccggggcatgcccttcagcatctccatgagacatgcctttgtgcccttccctgggggcagcatcctggccgctgactacagccagctggagctgcgcatcctggcccacctgagccatgaccggcggctcatccaggtgctgaacacaggagcagatgtgttccgcagcattgctgctgagtggaagatgattgagcctgagagcgtgggagatgacctgcggcagcaggccaagcagatctgctacggcatcatctacggcatgggcgccaagagcctgggggagcagatgggcatcaaggaaaatgatgctgcctgctacatcgacagcttcaagagccgctacacaggcatcaaccagttcatgacagagaccgtgaagaactgcaagagagatggctttgtgcagaccatcctgggcagaagacgctacctgcccggcatcaaggacaacaacccctacaggaaggcccacgccgagcggcaggccatcaacaccatcgtgcagggcagcgctgctgacatcgtgaagatcgccaccgtgaacatccagaagcagctggagaccttccacagcaccttcaagagccacggccaccgggagggcatgctgcagagcgaccagacaggcctgagcaggaagaggaagctgcagggcatgttctgccccatccggggcggcttcttcatcctgcagctgcatgatgagctgctgtatgaggtggccgaggaggatgtggtgcaggtggcccagatcgtgaagaatgagatggagagcgctgtgaagctgtctgtgaagctgaaggtgaaggtgaagatcggggcctcctggggcgagctgaaggactttgatgtgtag

SEQ ID NO: 261752 - DNA, 8181 bp, Artificial Sequence
  derived and/or modified sequence
atgaatggccaccgcttcaccttccgcaccaggagcctgctgcccctgcagaagggccagcaccgctgcatcaccaagctgctggcccacaatgacccctggggcatcttccgggcccccagcagcagaagaagctacagcgtgtctggagtgtgccagcctgccatccccaacagcagcctgcacatcccccacaatgcctgctggctgaagtggaagctgtgcagcgagatcgccctgccctaccaccacatcctgggggagaggaggaagctgtgcagcatccgccgctttgaatttgaggactggagagaagatgtgcgcagctgctgccaggcccgggtgctgccccggggccgcaccctgggcctgtggctggccctgattggccgggaggagtttgccatgaacctgctgcggcgcagcggcaagagaagaagaagtgagagcggcagtgacagcttcagcggcagcggcggggacagcagcgccagcccccagttcctgagcggctctgtgctgagccccccacctggcctgggccgctgcctgaaggctgctgctgctggggagtgcaagcccaccgtgcctgactatgagcgggacaagctgctgctggccaactggggcctgcccaaggctgtgctggagaagtaccacagctttggagtgaagaagatgtttgagtggcaggctgaatgtctgctgctgggccaggtgctggagggcaagaacctggtgtacagcgcccccaccagcgctgggaagaccctggtggccgagctgctgatcctgaagagggtgctggagatgaggaagaaggccctcttcatcctgccctttgtgtctgtggccaaggagaagaagtactacctgcagagcctcttccaggaggtgggcatcaaggtggatggctacatgggcagcaccagccccagccgccacttcagcagcctggacattgctgtgtgcaccatcgagcgggccaacggcctcatcaaccggctgattgaggagaacaagatggacctgctgggcatggtggtggtggatgagctgcacatgctgggggacagccaccggggctacctgctggagctgctgctgaccaagatctgctacatcaccaggaagagcgccagctgccaggccgacctggccagcagcctgagcaatgctgtgcagatcgtgggcatgtctgccaccctgcccaacctggagctggtggcctcctggctgaatgctgagctgtaccacacagacttccggcctgtgcccctgctggagagcgtgaaggtgggcaacagcatctatgacagctccatgaagctggtgcgggagtttgagcccatgctgcaggtgaagggagatgaggaccacgtggtgtccctgtgctatgagaccatctgtgacaaccacagcgtgctgctcttctgccccagcaagaagtggtgtgagaagctggccgacatcatcgcccgggagttctacaacctgcaccaccaggccgagggggagggcctggtgaagcccagtgaatgtcctcctgtgatcctggagcagaaggagctgctggaggtgatggaccagctgcggcggctgcccagcggcctggacagcgtgctgcagaagacagtgccctggggcgtggccttccaccacgccggcctgacctttgaggagcgggacatcattgaaggagccttccggcagggcctcatccgggtgctggccgccaccagcaccctgagcagtggagtgaacctgcctgcccggcgggtcatcatccgcacccccatctttggaggccggcccctggacatcctgacctacaagcagatggtgggccgggccggcaggaaaggagtggacacagtggagagcatcctgatctgcaagaacagcgagaagagcaaaggaattgccctgctgcagggcagcctgaagcctgtgcgcagctgcctgcagaggcgggagggggaggaggtgacaggctccatgatccgggccatcctggagatcatcgtgggcggcgtggccagcaccagccaggacatgcacacctacgccgcctgcaccttcctggccgcctccatgaaggagggcaagcagggcatccagaggaaccaggagagcgtgcagctgggcgccatcgaggcctgtgtgatgtggctgctggagaatgagttcatccagagcacagaggccagtgatggaacagagggcaaggtgtaccaccccacccacctgggcagcgccaccctgagcagcagcctgagccctgctgacaccctggacatctttgctgacctgcagagggccatgaagggctttgtgctggagaatgacctgcacatcctgtacctggtgacccccatgtttgaggactggaccaccatcgactggtaccgcttcttctgcctgtgggagaagctgcccacctccatgaagagggtggccgagctggtgggcgtggaggagggcttcctggcccgctgtgtgaagggcaaggtggtggccaggacagagcggcagcaccggcagatggccatccacaagcgcttcttcaccagcctggtgctgctggacctgatcagcgaggtgcccctgcgggagatcaaccagaagtatggctgcaacagaggccagatccagagcctgcagcagagcgctgctgtgtatgccggcatgatcaccgtcttcagcaaccggctgggctggcacaacatggagctgctgctgagccagttccagaagaggctgaccttcggcatccagcgggagctgtgtgacctggtgcgggtgtccctgctgaatgcccagagggcccgggtgctgtatgccagcggcttccacacagtggccgacctggcccgggccaacatcgtggaggtggaggtgatcctgaagaatgctgtgcccttcaagagcgccaggaaggctgtggatgaggaggaggaggccgtggaggagaggaggaacatgaggaccatctgggtgactggaaggaagggcctgacagagcgggaggccgccgccctgattgtggaggaggccaggatgatcctgcagcaggacctggtggagatgggcgtgcagtggaacccctgtgccctgctgcacagcagcacctgcagcctgacccacagcgagagcgaggtgaaggagcacaccttcatcagccagaccaagagcagctacaagaagctgaccagcaagaacaagagcaacaccatcttcagtgacagctacatcaagcacagccccaacatcgtgcaggacctgaacaagagccgggagcacaccagcagcttcaactgcaacttccagaatggaaaccaggagcaccagacctgcagcatcttccgggccaggaagagggccagcctggacatcaacaaggagaagccaggggccagccagaatgaaggcaagaccagtgacaagaaggtggtgcagaccttcagccagaagaccaagaaggcccccctgaacttcaacagcgagaagatgagccgctccttccgctcctggaagaggaggaagcacctgaagaggagccgggacagcagccccctgaaggacagcggggcctgccgcatccacctgcagggccagaccctgagcaaccccagcctgtgtgaggaccccttcaccctggatgagaagaagacagagttcaggaacagcggcccctttgccaagaatgtgtccctgagcggcaaggagaaggacaacaagaccagcttccccctgcagatcaagcagaactgctcctggaacatcaccctgaccaatgacaactttgtggagcacatcgtgacaggcagccagagcaagaatgtgacctgccaggccacctctgtggtgtctgagaagggccggggcgtggccgtggaggccgagaagatcaatgaggtgctgatccagaatggcagcaagaaccagaatgtgtacatgaagcaccacgacatccaccccatcaaccagtacctgaggaagcagagccatgagcagaccagcaccatcaccaagcagaagaacatcatcgagcggcagatgccctgtgaggccgtgtcctcctacatcaacagagacagcaatgtgaccatcaactgtgagcgcatcaagctgaacacagaggagaacaagcccagccacttccaggccctgggagatgacatcagcaggacagtcatccccagcgaggtgctgcccagcgctggggccttcagcaagtctgagggccagcacgagaacttcctgaacatcagccggctgcaggagaagacaggcacctacaccaccaacaagaccaagaacaaccacgtgtctgacctgggcctggtgctgtgtgactttgaagattccttctacctggacacccagagcgagaagatcatccagcagatggccacagaaaatgccaagctgggcgccaaggacaccaacctggccgccggcatcatgcagaagagcctggtgcagcagaacagcatgaacagcttccagaaggagtgccacatccccttccctgctgagcagcaccccctgggcgccaccaagattgaccacctggacctgaagacagtgggcaccatgaagcagagcagtgacagccatggagtggacatcctgaccccagagagccccatcttccacagccccatcctgctggaggagaatggcctcttcctgaagaagaatgaggtgtctgtgacagacagccagctgaacagcttcctgcagggctaccagacccaggagaccgtgaagcctgtgatcctgctgatcccccagaagaggacccccactggagtggagggggagtgcctgcctgtgcctgagaccagcctgaacatgtctgacagcctgctgtttgacagcttcagtgatgactacctggtgaaggagcagctgcctgacatgcagatgaaggagcccctgcccagcgaggtgaccagcaaccacttcagtgacagcctgtgcctgcaggaggacctgatcaagaagagcaatgtgaatgaaaaccaggacacccaccagcagctgacctgcagcaatgatgagagcatcatcttcagcgagatggattctgtgcagatggtggaggccctggacaacgtggacatcttccctgtgcaggagaagaaccacacagtggtgagcccccgggccctggagctgagtgaccctgtgctggatgagcaccaccagggcgaccaggatggaggagaccaggatgaaagagctgagaagagcaagctgaccggcacccggcagaaccacagcttcatctggagcggggccagctttgacctgagccctggcctgcagaggatcctggacaaggtgagcagccccctggagaatgagaagctgaagtccatgaccatcaacttcagcagcctgaacaggaagaacacagagctgaatgaggagcaggaggtgatcagcaacctggagaccaagcaggtgcagggcatctccttcagcagcaacaatgaggtgaagagcaagattgagatgctggagaacaatgccaaccatgatgagaccagcagcctgctgcccaggaaggagagcaacatcgtggatgacaatggcctcatcccccccacccccatccccaccagcgccagcaagctgaccttccctggcatcctggagacccctgtgaacccctggaagaccaacaacgtgctgcagcccggggagagctacctgtttggcagccccagcgacatcaagaaccacgacctgagccctggcagcagaaatggcttcaaggacaacagccccatcagtgacaccagcttcagcctgcagctgagccaggacggcctgcagctgaccccagccagcagcagcagcgagagcctgagcatcattgatgtggccagtgaccagaacctcttccagaccttcatcaaggagtggcgctgcaagaagcgcttcagcatcagcctggcctgtgagaagatccgcagcctgaccagcagcaagacagccaccatcggcagccgcttcaagcaggccagcagcccccaggagatccccatcagagatgatggcttccccatcaagggctgtgatgacaccctggtggtgggcctggccgtgtgctggggcggcagagatgcctactacttcagcctgcagaaggagcagaagcacagcgagatcagcgccagcctggtgccccccagcctggaccccagcctgaccctgaaggacaggatgtggtacctgcagagctgcctgaggaaggagagtgacaaggaatgttctgtggtgatctatgacttcatccagagctacaagatcctgctgctgagctgtggcatcagcctggagcagagctatgaggaccccaaggtggcctgctggctgctggaccctgacagccaggagcccaccctgcacagcatcgtgaccagcttcctgccccatgagctgcccctgctggagggcatggagaccagccagggcatccagagcctgggcctgaatgccggcagcgagcacagcggccgctaccgggcctctgtggagagcatcctgatcttcaacagcatgaaccagctgaacagcctgctgcagaaggagaacctgcaggatgtgttcaggaaggtggagatgcccagccagtactgcctggccctgctggagctgaatggcatcggcttcagcacagcagaatgtgagagccagaagcacatcatgcaggccaagctggatgccatcgagacccaggcctaccagctggccggccacagcttctccttcaccagcagtgatgacattgctgaggtgctcttcctggagctgaagctgccccccaaccgggagatgaagaaccagggcagcaagaagaccctgggcagcacccggcggggcatcgacaatggaaggaagctgcggctgggccggcagttcagcaccagcaaggatgtgctgaacaagctgaaggccctgcaccccctgcccggcctcatcctggagtggaggcgcatcaccaatgccatcaccaaggtggtgttccccctgcagcgggagaagtgcctgaaccccttcctgggcatggagcgcatctaccctgtgtcccagagccacacagccaccggccgcatcaccttcacagagcccaacatccagaatgtgccccgggactttgagatcaagatgcccaccctggtgggggagagcccccccagccaggccgtgggcaagggcctgctgcccatgggccggggcaagtacaagaagggcttctctgtgaacccccgctgccaggcccagatggaggagagagctgctgaccggggcatgcccttcagcatctccatgagacatgcctttgtgcccttccctgggggcagcatcctggccgctgactacagccagctggagctgcgcatcctggcccacctgagccatgaccggcggctcatccaggtgctgaacacaggagcagatgtgttccgcagcattgctgctgagtggaagatgattgagcctgagagcgtgggagatgacctgcggcagcaggccaagcagatctgctacggcatcatctacggcatgggcgccaagagcctgggggagcagatgggcatcaaggaaaatgatgctgcctgctacatcgacagcttcaagagccgctacacaggcatcaaccagttcatgacagagaccgtgaagaactgcaagagagatggctttgtgcagaccatcctgggcagaagacgctacctgcccggcatcaaggacaacaacccctacaggaaggcccacgccgagcggcaggccatcaacaccatcgtgcagggcagcgctgctgacatcgtgaagatcgccaccgtgaacatccagaagcagctggagaccttccacagcaccttcaagagccacggccaccgggagggcatgctgcagagcgaccagacaggcctgagcaggaagaggaagctgcagggcatgttctgccccatccggggcggcttcttcatcctgcagctgcatgatgagctgctgtatgaggtggccgaggaggatgtggtgcaggtggcccagatcgtgaagaatgagatggagagcgctgtgaagctgtctgtgaagctgaaggtgaaggtgaagatcggggcctcctggggcgagctgaaggactttgatgtgtag

SEQ ID NO: 261753 - DNA, 6642 bp, Artificial Sequence
  derived and/or modified sequence
atgcccaccagcaacagccagaaggagctgctggaggtgatggaccagctgcggcggctgcccagcggcctggacagcgtgctgcagaagacagtgccctggggcgtggccttccaccacgccggcctgacctttgaggagcgggacatcattgaaggagccttccggcagggcctcatccgggtgctggccgccaccagcaccctgagcagtggagtgaacctgcctgcccggcgggtcatcatccgcacccccatctttggaggccggcccctggacatcctgacctacaagcagatggtgggccgggccggcaggaaaggagtggacacagtgggggagagcatcctgatctgcaagaacagcgagaagagcaagggcatcgccctgctgcagggcagcctgaagcctgtgcgcagctgcctgcagaggcgggagggggaggaggtgacaggctccatgatccgggccatcctggagatcatcgtgggcggcgtggccagcaccagccaggacatgcacacctatgctgcctgcaccttcctggccgcctccatgaaggagggcaagcagggcatccagaggaaccaggagagcgtgcagctgggcgccatcgaggcctgtgtgatgtggctgctggagaatgagttcatccagagcacagaggccagtgatggaacagagggcaaggtgtaccaccccacccacctgggcagcgccaccctgagcagcagcctgagccctgctgacaccctggacatctttgctgacctgcagagggccatgaagggctttgtgctggagaatgacctgcacatcctgtacctggtgacccccatgtttgaggactggaccaccatcgactggtaccgcttcttctgcctgtgggagaagctgcccacctccatgaagagggtggccgagctggtgggcgtggaggagggcttcctggcccgctgtgtgaagggcaaggtggtggccaggacagagcggcagcaccggcagatggccatccacaagcgcttcttcaccagcctggtgctgctggacctgatcagcgaggtgcccctgcgggagatcaaccagaagtatggctgcaacagaggccagatccagagcctgcagcagagcgctgctgtgtatgccggcatgatcaccgtcttcagcaaccggctgggctggcacaacatggagctgctgctgagccagttccagaagaggctgaccttcggcatccagcgggagctgtgtgacctggtgcgggtgtccctgctgaatgcccagagggcccgggtgctgtatgccagcggcttccacacagtggccgacctggcccgggccaacatcgtggaggtggaggtgatcctgaagaatgctgtgcccttcaagagcgccaggaaggctgtggatgaggaggaggaggccgtggaggagaggaggaacatgaggaccatctgggtgacaggcaggaagggcctgacagagcgggaggccgccgccctgattgtggaggaggccaggatgatcctgcagcaggacctggtggagatgggcgtgcagtggaacccctgtgccctgctgcacagcagcacctgcagcctgacccacagcgagagcgaggtgaaggagcacaccttcatcagccagaccaagagcagctacaagaagctgaccagcaagaacaagagcaacaccatcttcagtgacagctacatcaagcacagccccaacatcgtgcaggacctgaacaagagccgggagcacaccagcagcttcaactgcaacttccagaatggaaaccaggagcaccagacctgcagcatcttccgggccaggaagagggccagcctggacatcaacaaggagaagccaggggccagccagaatgaaggcaagaccagtgacaagaaggtggtgcagaccttcagccagaagaccaagaaggcccccctgaacttcaacagcgagaagatgagccgctccttccgctcctggaagaggaggaagcacctgaagaggagccgggacagcagccccctgaaggacagcggggcctgccgcatccacctgcagggccagaccctgagcaaccccagcctgtgtgaggaccccttcaccctggatgagaagaagacagagttcagaaattctggcccctttgccaagaatgtgtccctgagcggcaaggagaaggacaacaagaccagcttccccctgcagatcaagcagaactgctcctggaacatcaccctgaccaatgacaactttgtggagcacatcgtgacaggcagccagagcaagaatgtgacctgccaggccacctctgtggtgtctgagaagggccggggcgtggccgtggaggccgagaagatcaatgaggtgctgatccagaatggcagcaagaaccagaatgtgtacatgaagcaccacgacatccaccccatcaaccagtacctgaggaagcagagccatgagcagaccagcaccatcaccaagcagaagaacatcatcgagcggcagatgccctgtgaggccgtgagcagctacatcaacagagacagcaatgtgaccatcaactgtgagcgcatcaagctgaacacagaggagaacaagcccagccacttccaggccctgggagatgacatcagcaggacagtcatccccagcgaggtgctgcccagcgctggggccttcagcaagtctgagggccagcacgagaacttcctgaacatcagccggctgcaggagaagacaggcacctacaccaccaacaagaccaagaacaaccacgtgtctgacctgggcctggtgctgtgtgactttgaggacagcttctacctggacacccagagcgagaagatcatccagcagatggccacagaaaatgccaagctgggcgccaaggacaccaacctggccgccggcatcatgcagaagagcctggtgcagcagaacagcatgaacagcttccagaaggagtgccacatccccttccctgctgagcagcaccccctgggcgccaccaagattgaccacctggacctgaagacagtgggcaccatgaagcagagcagtgacagccacggcgtggacatcctgaccccagagagccccatcttccacagccccatcctgctggaggagaatggcctcttcctgaagaagaatgaggtgtctgtgacagacagccagctgaacagcttcctgcagggctaccagacccaggagaccgtgaagcctgtgatcctgctgatcccccagaagaggacccccaccggggtggagggagaatgtctgcctgtgcctgagaccagcctgaacatgtctgacagcctgctgtttgacagcttcagtgatgactacctggtgaaggagcagctgcctgacatgcagatgaaggagcccctgcccagcgaggtgaccagcaaccacttcagtgacagcctgtgcctgcaggaggacctgatcaagaagagcaatgtgaatgaaaaccaggacacccaccagcagctgacctgcagcaatgatgagagcatcatcttcagcgagatggacagcgtgcagatggtggaggccctggacaacgtggacatcttccctgtgcaggagaagaaccacacagtggtgagcccccgggccctggagctgagtgaccctgtgctggatgagcaccaccagggcgaccaggacggcggggaccaggatgagcgggcagagaagagcaagctgaccggcacccggcagaaccacagcttcatctggagcggggccagctttgacctgagccctggcctgcagaggatcctggacaaggtgagcagccccctggagaatgagaagctgaagtccatgaccatcaacttcagcagcctgaacaggaagaacacagagctgaatgaggagcaggaggtgatcagcaacctggagaccaagcaggtgcagggcatctccttcagcagcaacaatgaggtgaagagcaagattgagatgctggagaacaatgccaaccatgatgagaccagcagcctgctgcccaggaaggagagcaacatcgtggatgacaatggcctcatcccccccacccccatccccaccagcgccagcaagctgaccttccctggcatcctggagacccctgtgaacccctggaagaccaacaacgtgctgcagcctggagagagctacctgtttggcagccccagcgacatcaagaaccacgacctgagccctggcagcagaaatggcttcaaggacaacagccccatcagtgacaccagcttcagcctgcagctgagccaggacggcctgcagctgaccccagccagcagcagcagcgagagcctgagcatcattgatgtggccagtgaccagaacctcttccagaccttcatcaaggagtggcgctgcaagaagcgcttcagcatcagcctggcctgtgagaagatccgcagcctgaccagcagcaagacagccaccatcggcagccgcttcaagcaggccagcagcccccaggagatccccatcagagatgatggcttccccatcaagggctgtgatgacaccctggtggtgggcctggccgtgtgctggggcggcagagatgcctactacttcagcctgcagaaggagcagaagcacagcgagatcagcgccagcctggtgccccccagcctggaccccagcctgaccctgaaggacaggatgtggtacctgcagagctgcctgaggaaggagagtgacaaggagtgcagcgtggtgatctatgacttcatccagagctacaagatcctgctgctgagctgtggcatcagcctggagcagagctatgaggaccccaaggtggcctgctggctgctggaccctgacagccaggagcccaccctgcacagcatcgtgaccagcttcctgccccatgagctgcccctgctggagggcatggagaccagccagggcatccagagcctgggcctgaatgccggcagcgagcacagcggccgctaccgggcctctgtggagagcatcctgatcttcaacagcatgaaccagctgaacagcctgctgcagaaggagaacctgcaggatgtgttcaggaaggtggagatgcccagccagtactgcctggccctgctggagctgaatggaattggcttcagcacagcagaatgtgagagccagaagcacatcatgcaggccaagctggatgccatcgagacccaggcctaccagctggccggccacagcttctccttcaccagcagtgatgacattgctgaggtgctcttcctggagctgaagctgccccccaaccgggagatgaagaaccagggcagcaagaagaccctgggcagcacccggcggggcatcgacaatggaaggaagctgcggctgggccggcagttcagcaccagcaaggatgtgctgaacaagctgaaggccctgcaccccctgcccggcctcatcctggagtggaggcgcatcaccaatgccatcaccaaggtggtgttccccctgcagcgggagaagtgcctgaaccccttcctgggcatggagcgcatctaccctgtgtcccagagccacacagccaccggccgcatcaccttcacagagcccaacatccagaatgtgccccgggactttgagatcaagatgcccaccctggtgggggagagcccccccagccaggccgtgggcaagggcctgctgcccatgggccggggcaagtacaagaagggcttctctgtgaacccccgctgccaggcccagatggaggagagagctgctgaccggggcatgcccttcagcatctccatgagacatgcctttgtgcccttccctgggggcagcatcctggccgctgactacagccagctggagctgcgcatcctggcccacctgagccatgacagaagactcatccaggtgctgaacacaggagcagatgtgttccgcagcattgctgctgagtggaagatgattgagcctgagagcgtgggagatgacctgcggcagcaggccaagcagatctgctacggcatcatctacggcatgggcgccaagagcctgggggagcagatgggcatcaaggaaaatgatgctgcctgctacatcgacagcttcaagagccgctacacaggcatcaaccagttcatgacagaaacagtgaagaactgcaagagagatggctttgtgcagaccatcctgggcagaagacgctacctgcccggcatcaaggacaacaacccctacaggaaggcccatgctgagcggcaggccatcaacaccatcgtgcagggcagcgctgctgacatcgtgaagatcgccaccgtgaacatccagaagcagctggagaccttccacagcaccttcaagagccacggccaccgggagggcatgctgcagagcgaccagacaggcctgagcaggaagaggaagctgcagggcatgttctgccccatccggggcggcttcttcatcctgcagctgcatgatgagctgctgtatgaggtggccgaggaggatgtggtgcaggtggcccagatcgtgaagaatgagatggagagcgctgtgaagctgtctgtgaagctgaaggtgaaggtgaagattggagcctcctggggcgagctgaaggactttgatgtgtag

SEQ ID NO: 261754 - DNA, 7773 bp, Artificial Sequence
  derived and/or modified sequence
atgaacctgctgcggcggagcggcaagcggcggcggagcgagagcggctctgactctttctccgggtctggtggagattcgtcagcttcccctcagtttctgtctggaagcgtactgagtcccccccctggactggggcgttgcctaaaagctgccgccgccggggagtgtaaaccgaccgttcccgactacgagcgggacaaacttctgttggcgaactggggccttcctaaagcagtcctggagaagtaccacagctttggcgtgaaaaagatgttcgagtggcaggccgagtgcttgttgttgggccaagtgctcgagggcaagaacctggtttattcggcaccaacaagcgccggcaaaacacttgtggccgagttactcattctgaagagagtgctcgaaatgagaaagaaggcacttttcattctcccctttgttagtgtcgcaaaggagaagaaatactatctgcagagcctctttcaagaagttgggattaaagtggacggatacatgggtagtactagcccgtcccggcatttttcctcactcgacattgccgtgtgtaccatcgaacgagctaatggtctcatcaaccgcctgatcgaagaaaacaaaatggatttacttggcatggtggtggtagatgaattacacatgctcggggattctcatcgaggctacctcttggaattgctgctgacaaaaatttgctatattacgcgtaagtcagcttcttgccaagcagacctggcatccagcctgtctaatgcggtacagattgtcggaatgtctgcaacgctgcccaatctggagttggtggcaagttggctgaacgccgaattatatcacactgatttcagaccagtgcccttgcttgaatccgtgaaggttggcaattcaatctatgattcctccatgaaactcgtcagagagtttgagcccatgctgcaggtgaaaggggatgaagatcatgtggtgagcctgtgctacgaaaccatttgcgataaccattcggttcttctgttttgcccatctaaaaagtggtgcgaaaaactggccgatatcattgcacgtgagttctataaccttcaccaccaagcagaaggcctggtaaagccttccgagtgcccccctgtgattttagagcagaaagagctactggaggtcatggatcagctcaggaggctgccatccggcctggattcggtcctacagaaaacggtcccatggggtgtcgccttccaccacgccggcctcacgtttgaggagcgggacatcattgaaggcgctttccggcaagggttgatccgtgtgctcgctgcaactagtacgttgagctcgggggtgaatctcccagctaggagggttattatccgtacaccaatcttcgggggcagaccacttgacattctgacctataaacagatggtaggtagagcaggcaggaaaggcgttgacaccgtcggggagtccattctgatttgtaagaacagcgagaagtccaagggcattgccctgttgcaagggtccctgaaacccgtccgcagttgccttcagcgtcgggaaggggaggaggtcactggctctatgatccgcgcaatcctcgagataatcgttgggggcgtggcttcaactagccaggacatgcatacctacgctgcatgcacttttctggccgcttctatgaaagagggcaagcagggtattcaaaggaatcaagaatctgtccaattgggagccattgaggcgtgcgtcatgtggctgctcgagaacgaattcatccaaagcactgaggccagcgatggtacggaggggaaagtttaccaccccacccacctcggcagcgccacactgtcgagcagtctgtcccctgccgacacccttgacatattcgccgatctccagcgggccatgaaggggtttgtgctagaaaacgatttgcacatcctttacttggtgacgcccatgtttgaggactggaccacaattgactggtatcgttttttttgcctgtgggagaagctgccgacatccatgaagcgcgttgcggaactcgtcggcgttgaagagggcttccttgcgagatgcgtcaagggcaaagttgtcgcccggaccgagcggcagcatcgacagatggccatccacaaacgtttctttacgtctcttgtgctcttagacctgattagcgaggtccctctgagggagattaaccagaagtatggttgtaaccgaggccagatccagtctctgcagcagtcagcagcggtctacgccggaatgatcaccgtgttctccaaccgccttggctggcataacatggagctgctactgtcccagtttcagaaaaggcttacatttgggattcagagagaactgtgtgacctggtgagagtgtccctcctgaacgcccagcgagcccgcgtgctgtatgcgtccgggttccatacagtggccgaccttgcaagagctaatatagtggaggttgaggtgatcctgaaaaatgccgtgccctttaagtcagcccgcaaggcagtcgatgaagaagaggaggctgtggaggagcggagaaatatgaggactatttgggttaccggccggaaaggactgacggagcgagaagcggcagctcttatagtggaggaggcaagaatgattctgcagcaggatctcgttgagatgggcgtgcagtggaacccctgcgctctcctgcatagctcgacgtgctctttaacccactctgagtctgaggtcaaggagcacacgttcattagtcagaccaaatcatcttataaaaaacttaccagtaagaacaagagtaacacaattttttctgatagttacataaaacattcacctaatatcgtccaagacttaaataagtctcgcgagcatacttcctctttcaactgtaactttcagaatgggaaccaagaacatcagacctgctctatcttccgggcacgtaaacgcgcctccctggacatcaacaaggagaaacccggggcctcacagaatgagggcaagacttcagataagaaagtcgtgcagaccttcagccagaagactaaaaaggcccccctcaacttcaactctgagaagatgtctaggtccttccggagctggaagaggcggaaacacctgaaaagatcacgcgactcgtcgccgttaaaagattccggcgcctgccgtatccacctccagggtcagactctgagcaatccatccctctgcgaagatccgttcactctggacgagaaaaaaacagagttcagaaacagcggaccattcgctaagaacgtctccctcagtgggaaggagaaggataacaaaaccagtttcccactccaaatcaaacagaattgctcttggaacataactctcacgaatgataacttcgtcgagcatatcgtcactggaagccagtccaagaacgtgacctgccaggccacatcagtggtgtctgaaaagggacggggcgtggccgtggaggctgagaagattaatgaggtgctgatccagaatggatcaaagaatcagaacgtctacatgaagcaccacgatatccatccaattaatcaatacctgcgcaaacagtcccacgagcagacatccacaatcactaagcaaaagaacattattgaacggcaaatgccttgtgaggctgtctcttcttacatcaatagagattcgaatgtcaccattaattgcgagcgtataaagctcaatacagaagaaaacaagccgtctcactttcaggctcttggggacgacattagtcgcaccgtgatccccagcgaggtgttaccctccgcaggtgctttttctaagtcagagggccagcacgagaattttctgaacataagtcgccttcaggaaaagacaggaacttacactactaacaagacaaaaaataaccatgtttctgacctgggattagtgctgtgcgattttgaagatagtttttacctggacacccagagtgaaaagatcattcagcaaatggcgactgagaatgccaagctgggtgctaaggacaccaatttagccgctggtataatgcaaaaatccctggtccagcagaacagcatgaattcttttcaaaaggagtgtcatataccctttcctgcagaacaacaccctttgggcgcgacaaagattgaccacttggatctgaaaaccgtcggtacaatgaagcagagctctgacagtcatggagtggatatcctaacccccgagtcacccatctttcattcccccattctgctagaggaaaacggtctcttcttgaaaaagaacgaggtcagtgtcacagattcacagcttaattccttcctgcagggctaccaaacccaggaaacggtgaaacccgtgattctcttgatccctcaaaaaaggacgcctaccggagtggaaggagagtgcttgcccgtgcccgaaacaagtctgaacatgagcgacagtcttctgtttgattctttctctgacgactacctcgtgaaagagcagctgcccgatatgcagatgaaagaaccactcccaagtgaagtcacgtccaatcacttcagcgactccctgtgtctccaggaagatcttatcaagaaaagcaacgttaacgagaatcaggacacacatcaacagctgacttgtagcaatgacgaatccatcattttctccgagatggattccgttcagatggtcgaggccctggataatgtagacatcttcccggtgcaggagaaaaaccacaccgttgtcagtcctcgtgctttggagctgagcgatccagtgctggatgaacaccaccagggcgaccaggatggaggggatcaggatgagagggcggaaaaaagtaagctcacggggacaaggcagaatcacagttttatttggtctggtgccagctttgaccttagtccaggccttcagagaattctcgacaaagtgagtagcccactggagaatgaaaaacttaagtctatgaccattaacttttccagcttaaacagaaagaatactgagctaaatgaggagcaggaagtgatatctaatctggaaaccaagcaggtccaagggattagctttagcagcaataacgaggtgaagtcaaagatcgagatgctcgaaaataatgcgaatcacgatgagacctcaagcttactcccgcggaaagaatcaaatattgtggacgacaacggactgattccgccaacccctatcccaacatccgcctctaagctgacctttcctggaatcctcgaaacaccagttaacccatggaaaacaaataacgttctccagcccggcgaatcatacttgtttggttctcccagcgacataaaaaaccacgacctcagtcccggaagtcgaaacggattcaaagataactccccgatcagcgatacatcctttagcttgcagctaagccaggacgggttgcaactcacccctgcctcctcgtcaagtgagagtctaagcatcattgatgtggccagcgaccagaatctcttccagacatttattaaagaatggcgctgcaagaagcggttctctatctcattggcctgtgaaaaaatccgcagccttacctcatcaaaaacggctaccatcggcagccggttcaaacaagcctctagtccacaggaaatccccatccgtgatgacgggttcccaattaaagggtgcgatgacactctcgtggtgggcctggccgtgtgctggggcggtagggacgcttactacttttctctgcagaaagagcagaaacattctgaaatttcagcttcccttgtaccaccaagcctagacccctccttaacactgaaagataggatgtggtacttgcagtcctgcctccggaaggagtcagacaaagagtgcagcgtggtgatatatgatttcatacagagctacaaaatacttctcctgagttgtggaataagcctggaacagtcatatgaagatccaaaagtcgcctgttggcttctggatcctgactcacaggaaccaacgctgcacagcatcgtgacgtctttcctaccgcacgaattgcccctgctcgagggaatggaaacatcccaggggattcagtcactcggactcaatgccggcagcgagcactccgggagatatcgagcatccgtagaatccatactcatctttaacagtatgaaccaactgaactccttgctacaaaaggaaaacttacaagatgtctttagaaaggttgaaatgccctcacagtactgtcttgctttattagaactcaatggaatcgggttcagcacggcagaatgtgagtcacagaaacatatcatgcaggccaaactggacgcaattgaaacccaagcatatcagttggccggccatagcttctctttcacctcttctgacgacattgctgaggtgctctttctagaactcaaactgccccccaacagggagatgaagaaccaggggtctaaaaagaccctggggagcacgaggagagggattgacaacggtaggaagctgaggctggggcgccagttctcaacaagtaaggatgttttaaataagttaaaagcattacatcccctgccgggtctgattctcgagtggcgaagaatcaccaacgccataacaaaagtcgtgttccctctccagcgcgaaaaatgcctgaatccctttctgggaatggagcgcatttatcctgtgtcacagagtcacaccgctacagggcgaatcacattcaccgaacctaatattcagaacgtgcctagggactttgagatcaaaatgcccaccctggtaggcgaatcccctcctagccaagctgtgggcaaagggctcctgccaatgggcaggggaaaatacaaaaagggattttcggttaaccccagatgccaggcgcagatggaggagagggcagctgatcgtgggatgccctttagcatcagcatgaggcacgccttcgtcccattcccaggcggaagtattctggcagccgattattcccaacttgaattgcggatcctagcacacctatcacatgaccgacggcttattcaggtgctcaatacaggcgctgatgttttccgtagcatcgctgctgagtggaagatgatagagcccgagagtgtgggtgatgacctccgacagcaggccaagcagatttgttatggaattatctacggcatgggtgccaagtctcttggagagcagatgggcataaaggagaatgacgcagcctgctatatcgacagttttaagtctcgctacacgggcattaaccaatttatgaccgagacagtgaaaaactgcaaaagggatggcttcgtgcagactatcctgggccgccggaggtatttaccaggaattaaggacaataacccctacagaaaggcccatgccgagcgtcaggccatcaacacaattgtacaagggtctgctgccgatattgtgaaaatcgctacagtcaacatccaaaagcagctggagacattccactcaaccttcaaatcgcatgggcacagggagggcatgctacagtccgaccagacggggttgagtagaaagcgcaagttacaaggaatgttttgccccatccgtggcggcttcttcattttacagctgcacgacgagctgctttatgaggtggctgaggaagatgtggtccaggtggcccagatagttaagaacgaaatggaaagtgccgttaaactgagcgtgaagttgaaggtcaaagttaagatcggcgcttcgtggggggaactcaaggatttcgatgtatag

SEQ ID NO: 261755 - DNA, 8181 bp, Artificial Sequence
  derived and/or modified sequence
atgaacggccaccggttcaccttccggacccggagcctgctgcccctgcagaaaggacagcatcggtgtatcacaaagctgctggcacataacgacccttgggggatctttagggcaccctcatccaggcggagctatagcgtcagcggcgtctgccagcccgctattcctaattcttcactgcacatcccccataacgcttgctggctcaaatggaagctgtgtagcgagatcgccctgccttatcaccatattctcggagagcgaaggaagctgtgcagtatccggcggttcgagtttgaagattggagggaagatgtcagaagttgctgtcaggcccgagtccttccgcggggcaggacattgggactttggctagcgctgatcggtcgggaggaatttgccatgaacctgctgaggcgctccggcaaacggcggagaagtgagagcgggtctgactcttttagcggctccggaggggattccagcgcttcacctcaatttttgagcggcagcgtcctctccccaccaccgggtctgggcaggtgccttaaagcggcggctgcaggtgaatgcaagcccaccgtccccgattatgaacgcgataagctactgctcgccaactggggtctgcctaaagctgtgcttgaaaaatatcattctttcggtgttaaaaagatgttcgagtggcaggctgagtgcctgctgctgggccaagttctcgagggaaaaaatttggtctactcggctcctacctccgcagggaagacgctcgtagccgagttacttatcttgaaacgggtgctggagatgcgcaaaaaggctttgttcatcctccccttcgtcagtgtagccaaagagaagaaatattatttgcaaagcttgtttcaggaagtggggataaaggtagatggttatatggggtctacctcaccaagtaggcacttttccagccttgacattgccgtgtgtacaattgagcgggccaacggactcatcaataggctcattgaagagaataagatggatctcctgggcatggtcgttgtagatgagctccatatgctgggagacagtcaccggggatatttactcgagctgttacttaccaagatttgttatattacgaggaagtcagcctcttgccaggccgacctcgcttcttcgttatctaatgctgtacaaatagtgggtatgtctgcgacactaccaaacctggaattagtggcttcatggctgaacgcagagctgtatcacactgatttcaggcccgtgccattgctggaaagcgttaaagtcggcaactctatttacgacagctccatgaaactggtacgcgagttcgagcctatgctacaggtcaagggtgatgaagaccatgttgtatccctctgttacgagacaatctgtgacaaccatagcgtactcctcttctgcccctctaaaaaatggtgcgagaagctggccgatattatcgcccgcgaattctataatctccaccatcaggccgagggcgaagggctcgtgaagccctccgagtgtccaccagttattctagagcagaaggagcttctggaagtgatggatcagcttagaagattgccatcaggccttgattccgtcctgcagaaaactgtgccctggggcgtcgccttccaccacgccggactcacattcgaggaaagagatattattgaaggcgctttccggcagggactcatacgcgtactggccgctacaagtaccctatccagtggggtgaatctgccagcgcgccgcgtgatcatccggactcctatttttggcggcaggccattagacatcctgacctataagcagatggtaggccgggctggcaggaaaggcgtcgacacagtggaaagcatcctgatttgcaaaaatagcgaaaaatccaagggcattgccctattacaggggtcgctgaaaccagtacggtcatgcctgcagcgcagggagggcgaggaagtgacaggaagcatgatccgtgctatcctcgagattatagtgggtggagtggcgtccactagccaggacatgcacacttacgccgcatgcacattccttgcagcttcaatgaaggaaggtaaacaaggtattcagaggaatcaggaatcagtccagctgggtgctatagaggcctgtgtgatgtggttgctggagaacgaattcattcaaagcacggaagcatctgacggcacagaaggtaaagtgtatcaccctactcatctgggcagtgcaacactgtcttcctcccttagtccagcggatacccttgatatctttgcagatttgcagagagccatgaagggtttcgtcctggagaacgatctccatatcctgtatctggtaacccccatgttcgaggactggaccaccattgactggtacagattcttctgtctgtgggagaagttacccacttcaatgaaaagagtcgcggagctggtgggtgtagaggagggcttccttgccagatgtgtcaaaggaaaggttgtggcccgcacagaaagacagcacagacaaatggcaatccacaaaagatttttcactagcctcgtgctgctcgatttgatatcagaggtgcccctcagggagataaaccagaagtatggttgtaatcgcggacagattcagagtctgcagcaatccgccgcggtgtacgccggcatgattaccgtgttttccaataggctgggctggcataacatggaattgctccttagtcagttccaaaaacgcctcaccttcggaattcagagggaactgtgtgacctcgtgcgtgtctctttgctgaacgcgcaacgcgccagggtcttatatgcgagtgggttccatactgtggctgatctggcccgggcaaatattgtggaggtagaagttatactgaaaaacgctgtgccatttaagtcggcacggaaagccgtggatgaggaagaagaagctgtggaggagagacgtaacatgcgaacgatttgggtgaccggacgaaagggcctaactgaacgggaagccgctgccctgattgtggaggaggctagaatgattctgcagcaggaccttgttgagatgggtgtccagtggaatccctgcgcccttctgcacagctccacttgttctctgacccattcagagagtgaggtcaaagagcacacgttcatcagccagaccaaatcatcttataagaaactcaccagcaagaataaaagcaataccattttctctgacagctacattaagcatagcccaaacatcgtgcaggatctaaataaaagtcgggagcacacttcgtcatttaattgtaattttcagaatggcaaccaggagcaccaaacctgtagcatctttcgtgcccgtaaacgggcaagcctagacattaacaaagagaagccaggagcatcacagaatgagggcaagacgtctgacaagaaagtcgtccagactttctctcagaaaacaaagaaagcgcctctgaacttcaatagtgagaagatgtcaagatcttttaggtcgtggaagaggcgtaaacacttgaagaggtcaagagacagctctcctctgaaggacagtggcgcctgccggatccacctgcagggacagacacttagcaaccctagtctgtgtgaggacccttttacactggacgaaaagaagaccgagttccgcaattcgggaccgtttgcaaagaatgtttctttgtctggaaaggagaaagataataagaccagctttccactgcagatcaaacagaattgtagctggaacatcaccctcaccaacgataatttcgtcgaacacattgtcacgggatctcagagcaagaacgtgacctgtcaggccacatcagtggtgtccgagaagggaagaggcgtcgctgtggaagccgaaaagatcaacgaagtgctaatccagaatggttcaaaaaaccagaacgtttatatgaagcaccatgatatccaccctatcaaccagtaccttcgcaagcaatcccacgagcaaaccagcacaataaccaaacagaagaatatcatcgagagacagatgccatgcgaggcggtctcttcatacataaatagggattctaatgtaacaatcaactgcgaacggattaagcttaataccgaggaaaacaagccatcacacttccaagccttgggagacgacatatccagaactgtgattccatcggaagttctgccaagcgcaggcgcgttttcaaagagtgaggggcagcatgagaacttcctcaacatttcccgtttacaggagaaaactggaacatacactacaaacaaaaccaaaaataatcacgtgagtgatcttggtctcgtactgtgtgactttgaggattccttctacctggacacgcagtccgagaagattatacagcaaatggctactgaaaatgccaagctcggagctaaggacactaacttggccgctggaatcatgcagaagagcctggtacagcagaattcaatgaatagttttcagaaggagtgccacatcccattccctgcagaacaacacccgctcggagccacgaaaatcgaccacttggacctcaagaccgttggaaccatgaaacaatcaagtgattcgcatggggtagacatacttacccccgaatctccaatcttccattcaccgatcctgttggaggaaaacggactctttctgaagaagaacgaagtcagcgtcactgattcacagctcaattcgtttctgcaagggtatcaaacccaagagacggtcaagcctgtaatcctactgatccctcagaaaagaacaccaacaggagttgagggggaatgcctgccagtcccggaaacgtccttgaacatgtctgatagtttgctgttcgactccttctctgatgactacttagtcaaagagcagttaccagatatgcagatgaaggagcccctgccaagtgaggtgacctccaatcacttttccgacagtttatgtctacaggaggacctgataaagaagtccaatgtcaacgaaaatcaggatacccaccagcagttaacttgttctaacgacgagtctatcatcttctccgagatggatagtgttcagatggtggaagcccttgataatgtggatatcttccccgtgcaagagaagaaccatactgtcgtctcgccaagggctcttgagctatccgaccccgtccttgatgaacaccaccagggggatcaagacgggggggatcaagacgaaagagctgagaaatctaagctgaccggcacgcgtcagaaccattccttcatctggtccggtgcttcttttgacttgtctcctgggcttcagaggatcctggacaaggtgtcctcccccttagaaaacgaaaagctgaagagtatgaccatcaacttctcctccctcaatcgcaaaaacaccgagctgaacgaagagcaagaagttatctcgaatcttgagacgaagcaggtgcaggggatttcattcagcagtaacaatgaggtaaagagcaagatcgagatgttggagaacaacgccaatcatgacgaaacctccagtctactccctagaaaggaatcaaatatagtggatgataacggactgattccgcctactcctatccctacaagcgccagtaagctcacttttcccggaatactagaaactccggtaaacccttggaagaccaacaatgtgttacagcccggagagtcatatctgtttggaagtccttcagacattaagaaccacgatctgagtcccggaagtcggaacggctttaaagataatagtccgataagcgacacaagtttctcactgcaactatctcaagacggcttacagcttacaccagcatccagctcttccgaaagcctaagtattatcgacgtagcttccgatcagaacctgttccagaccttcatcaaggaatggaggtgcaagaagaggttttctattagcctggcatgcgagaagatcagatcactcacttctagcaagactgcaactatcggtagccggtttaagcaggcgagctctccccaggaaatacccatccgtgacgacggcttcccaatcaaggggtgtgacgacacactggtggtgggactggcagtctgctggggaggaagagacgcctactacttcagtctgcagaaagagcagaaacacagtgagatctccgcatcgctggttcctcccagcctcgacccatctttaaccttgaaggaccgcatgtggtatctacaaagctgtttaagaaaggaatctgacaaggaatgtagcgtcgtaatttacgactttatacaatcctacaaaattctcctgctctcctgtggtatatctctggaacagtcctacgaggatcccaaggttgcttgctggctgctggaccccgactctcaggagcccacgctgcacagcatcgtgacatcttttcttccacatgaactgccactcttagaggggatggagacttcccagggcatacaatcactgggccttaatgccgggtcagagcattccgggaggtatcgagcctcggtggagagcatcctgatcttcaattccatgaatcagctgaactcactcttacagaaagaaaatctccaagatgtgtttcgcaaagtagagatgcccagccagtactgtctcgccctgctcgaacttaacggtatcggcttttcaaccgcggagtgcgagtcccagaagcatatcatgcaggcaaagctggatgctattgagacgcaggcataccagcttgcggggcactctttctctttcacatcctcagatgacattgccgaggtgcttttcctggaattaaaactgcccccgaaccgggaaatgaagaatcagggcagcaagaagacgctgggctcaactcgccgcggtattgacaacggccgcaaattaagactgggccggcagttcagcacctctaaggatgtgctgaacaaactgaaagctttacaccctctgccagggctgattctcgaatggcggcggataacaaatgctatcactaaggtggtatttcctctgcagcgggaaaaatgccttaaccctttcctcggaatggaaagaatatatccagtgagccaatctcacaccgctactggccggattaccttcaccgaacccaacatccagaatgtcccaagggatttcgagattaagatgcctacactggtaggagagtcacccccctcacaggccgtggggaaaggccttctccccatgggcaggggtaaatacaagaaagggttttccgtgaaccctagatgtcaggcccaaatggaggagcgcgccgccgatcgaggaatgcctttctcaattagcatgagacatgcctttgtcccctttcccggtgggagcatattggccgcggattatagccagttagaactgcggatcctcgcacacctcagccatgaccgccgcctcattcaggtactgaacactggggccgacgtcttccgatcaatcgccgctgagtggaaaatgatcgaaccggaaagcgtaggtgatgatctgagacagcaggcaaaacagatatgttacgggattatttatgggatgggggctaagtctctgggagagcagatggggattaaagagaacgacgccgcatgttacatcgactcattcaaatcaaggtataccggcattaaccagttcatgacagaaactgtaaagaattgcaaacgagacggctttgtgcagacaatactcgggagacgaaggtacctgcctggaattaaagacaacaatccgtacaggaaagcacatgccgagcgccaggcgatcaacacaatagtgcaaggctctgccgcagacatagtcaagattgctaccgtgaatatacagaaacagcttgaaacctttcattctacttttaaaagtcacggtcatagggagggcatgctgcagagtgatcagaccgggctgtctaggaaaagaaagctccaggggatgttttgccctatacggggagggtttttcatcctgcagctgcacgatgaactcctgtacgaggttgccgaggaggacgtagtacaggtcgctcagatcgtgaaaaacgaaatggaatccgctgtaaagttatctgtaaagctgaaagtgaaagtcaagataggcgcgtcttggggcgagcttaaggatttcgacgtgtag

SEQ ID NO: 261756 - DNA, 6642 bp, Artificial Sequence
  derived and/or modified sequence
atgcccaccagcaacagccagaaggagctgctggaggtgatggaccaacttcgccggttaccctcgggcctggactccgtgctgcagaagaccgtgccatggggggtggctttccatcatgccggtctgaccttcgaggaaagggacatcattgaaggtgcctttcgccagggcttgatcagagtattggccgcgacaagcacactgtcctctggggttaacctgcctgctcggcgggtgattatcagaactcctatcttcggcggcaggccactggacatccttacatataagcagatggtcgggcgcgcgggacgcaagggggtcgatacggtgggcgagagtattttgatatgcaagaattctgagaagtccaaagggatcgccctgctgcaagggagcctgaagcctgtgaggagttgtctgcagaggagagaaggcgaagaggtgaccgggtctatgatccgcgccatactggaaattatcgtgggtggggtggccagtaccagtcaggacatgcacacctacgccgcatgtaccttcctggcggctagcatgaaagagggaaagcaaggcatccaaaggaatcaggaatccgtccaactgggggcgatcgaggcgtgtgttatgtggcttctggagaacgaattcattcagagcacagaggcctctgatggtactgagggaaaagtatatcatccgactcacttgggatccgctacactgtcttcctctctgtctccagctgacacccttgatatctttgcagatctccaacgcgcgatgaaggggtttgttctggaaaacgatctacatatcctttacctggtcacacccatgttcgaggactggactaccatcgactggtatcgatttttctgcctgtgggagaaacttccaacctccatgaagagagttgctgagcttgtaggtgtcgaggagggctttttagccaggtgtgtaaagggcaaggttgtggcccgtacagaaagacaacacaggcagatggctatccacaagcgcttctttacctctctcgtgctgctggacctaatctccgaagtgccactgagggaaataaaccagaagtacgggtgtaatagagggcaaattcagagcctccaacagagcgctgccgtctatgctggaatgataacagttttttccaatcgcctcggatggcacaacatggaactgcttctgtctcagttccagaaaagacttaccttcgggattcagcgggagctctgcgatctcgtcagagtaagtttactgaacgcccaacgtgcccgcgttctgtacgccagcggattccatacagtggccgacttggcgcgcgcgaacattgtggaagtggaggtgattctgaaaaacgctgtgccctttaagagcgcccgaaaggctgtcgacgaggaagaggaagccgtggaggagcgtagaaacatgagaacgatctgggtgaccgggcggaagggtctgaccgagcgggaggcggctgccttgattgttgaagaggctcgcatgattctgcagcaggatctagtggaaatgggggtccaatggaacccttgcgcccttctgcactcatctacctgttcgttaacccattccgagagtgaagtaaaagagcacaccttcatcagtcaaacaaagagcagttacaagaagttaacatctaaaaacaaatctaacactatcttttccgactcttatatcaaacactcaccaaatatagtccaggacttaaacaagtctcgtgaacatacgtcttctttcaactgtaattttcagaacgggaatcaggagcaccagacttgttcaatttttcgagctcgcaaacgggcatccctggacattaataaagagaagcctggagcatcccaaaatgagggaaagactagcgataaaaaagtcgtacagacattctcccagaagaccaaaaaagcccccctgaatttcaactctgagaagatgtcgcgatcatttcggtcatggaaacgacgaaagcacctaaagaggagtcgggactccagcccactgaaagatagcggtgcctgtcgcattcacctgcagggccagaccttaagtaatcctagcctgtgtgaggatccattcaccctcgatgaaaaaaaaacggagtttcgcaacagtgggcctttcgccaaaaatgtcagcctgtcggggaaggagaaggataacaaaaccagtttcccactgcagatcaagcaaaactgttcatggaatattacattgacaaatgacaactttgtagagcatatcgtgacagggtcacagagtaagaacgtaacatgccaagcaactagcgtcgtaagtgagaagggaagaggggtggcggtggaggccgagaagattaatgaagtcttaattcagaacggctccaagaatcaaaatgtttacatgaagcaccatgatatacatccaattaatcagtatctgagaaagcagtcacatgaacaaacctctacaattactaaacaaaagaatatcatcgagcgtcagatgccatgcgaagcagtcagcagctacattaaccgagattctaatgtaacgatcaattgtgagcgcatcaagctcaacactgaggagaataagccttcacactttcaagccttaggcgatgatatctctcgtacggtcatccccagtgaggtgcttcctagcgcaggggcattctcaaagtcggaggggcagcatgagaacttcctgaatataagtcggctgcaggaaaaaaccgggacttacacgactaacaagactaagaacaatcacgtctccgatttaggactcgtgctgtgcgacttcgaggacagcttttatctggatacccagtctgagaagattattcagcagatggctaccgaaaatgctaaactgggagctaaagacacaaatcttgcggccggtataatgcagaaatcactcgttcagcaaaacagcatgaactctttccagaaggagtgtcacataccctttccagccgagcaacacccacttggcgctacaaaaattgatcacctagacctgaaaaccgtgggcaccatgaagcaatcttcagatagtcatggggttgacattctgacacctgagtctcccatcttccatagcccgatcctgctagaagaaaatggtctcttcctgaaaaagaacgaggttagcgtgactgatagccagctcaactctttcttgcagggatatcaaacccaggaaacagtgaaaccagtgatcctcctgatccctcagaaacggaccccaacaggcgtggaaggggaatgtctgcctgtgcctgaaacttcactaaacatgtctgacagtctgctcttcgattcgtttagcgatgattacctggtgaaggaacagctgccagacatgcagatgaaggaacccctcccatcagaggtgaccagcaaccattttagtgactccctgtgtcttcaggaagatctcatcaaaaaatccaacgtcaacgagaaccaagacacccaccagcagctgacgtgcagcaatgacgaaagcattatttttagcgagatggattccgtgcagatggtggaggcgctggataacgttgacattttcccagtacaagagaagaaccatactgtagtgtctcctcgagcgctggaactgtcagaccctgtgttagatgaacatcaccaaggtgatcaggatggcggagatcaggacgagagggcagaaaagtccaagttgactggcactaggcagaaccacagctttatttggagcggcgcttccttcgatttgagcccaggtctgcagcggattctggacaaggtgtcttctcctctcgagaatgagaagttgaaatccatgaccatcaacttttcttccctcaatagaaagaatacagagctgaacgaggaacaggaagtcattagtaacctggagactaagcaagtccaggggatcagctttagcagcaacaacgaagtgaaaagcaagatcgagatgttagagaataacgcaaatcatgacgagacaagcagcttactgcctcgcaaagaaagtaatatcgtagacgataacggtttgatccccccaacccctattccgaccagcgccagtaaactgactttcccagggatcctggagacgcccgtcaacccatggaaaacaaataacgtgctgcagcctggagagagctatctgtttggcagcccgtctgacatcaagaatcacgatctttcacccggcagccggaacgggtttaaagacaacagtcctataagtgacacctctttcagcttgcagttatctcaggatggcctccagctcactcccgcaagtagctcttccgaatccctctccattattgatgtcgccagcgaccagaacctgtttcagacattcatcaaggagtggaggtgcaagaagcggttttccatatctttagcatgcgagaaaattcgctctctcacatcatcaaagacagccacaatcggctcgcgtttcaagcaggccagcagcccacaggaaatccctatcagggatgacggctttccaataaagggatgcgacgacacactcgtggtgggtctggcagtatgctggggtgggcgggacgcctactatttctcgctgcagaaagagcagaaacacagtgaaatcagcgcttccttagttcctccctctctggacccttcactcactctgaaggatcgaatgtggtatctgcagagctgcctacggaaagagtccgacaaagagtgctccgtggttatttacgactttatccagagctacaaaatcctgctgcttagttgcgggatttcactggaacagtcctatgaggatcccaaagttgcttgctggctcctggacccggatagtcaggagccaaccctgcactccatcgtaacttcgttcctgcctcacgaactgccactgctcgagggtatggagactagtcagggaatacagtcactggggcttaatgcggggagcgagcacagcggccgatacagggcttcagtggagtctattctcattttcaacagcatgaaccagcttaacagtctgctgcagaaagagaatctacaggatgtgtttagaaaggtggaaatgccttcgcagtattgcttagcattgttagagctcaatggtatcggtttcagcactgcagagtgcgagagccagaagcatattatgcaggctaagttagacgctatcgaaacacaggcttaccagctggctggacactcctttagctttacgtcgtccgacgatatcgccgaagtcctgttcctggagctcaagctcccacccaatagggagatgaagaatcagggctccaagaaaactctcggttccacccgcagagggattgataacggccgaaaattacggttaggtcgtcagttcagcacttctaaggatgtcctcaataaactgaaggccctccaccccctccccgggcttatcctcgaatggcgcaggattactaatgcaatcacaaaagtggtgttccccttgcagagagagaagtgcctgaatccgttcctgggaatggagagaatctaccccgtcagccaaagccatactgccaccggaaggatcacctttaccgagcccaacatacaaaatgtgccgcgcgacttcgagataaaaatgcctaccctcgttggcgaatctcctccaagccaggccgttggcaagggactgcttcctatgggccgcggtaaatacaagaaggggttttcagtgaaccctcggtgtcaggcacaaatggaagaacgggctgccgacagagggatgccgtttagcatctctatgaggcacgcttttgtgccattcccgggtggtagcattctggccgcggactacagccaactcgagttgcggatactggctcacctctctcacgacaggcggcttattcaggtgctcaacaccggggctgatgtgttcagatcgatcgcagcagagtggaaaatgattgagcctgaatctgtgggcgatgacctgcgccaacaggccaagcagatctgctatggcatcatttatggcatgggcgccaagtcccttggggaacagatgggaattaaggaaaatgacgccgcttgttacattgacagttttaagagtcgatacacaggaattaaccagttcatgactgagaccgtgaagaattgcaaacgagatggtttcgttcagaccatcttgggaagaaggaggtacctgcctggcattaaggacaacaatccataccggaaggctcatgctgaacgacaggccattaatactattgtgcaggggtccgcagcagatatcgtcaagatcgcaaccgtgaacatccaaaagcagctggagacctttcacagcacattcaaaagccatggacatcgggaaggcatgctacagtctgatcagacaggactcagtaggaagagaaaactgcaagggatgttctgtccaattcgtggcggcttctttattctgcagctgcatgacgagctgttgtacgaggtggccgaagaagacgtcgtgcaggtagcccaaatcgtgaagaatgaaatggagagcgcagtgaaactctctgtgaagctcaaggtcaaagtgaaaatcggagcctcgtggggtgaactgaaggattttgacgtgtag

SEQ ID NO: 261757 - DNA, 8775 bp, Artificial Sequence
  derived and/or modified sequence
gggcgggccgggaggtttgagtttgaagactggcgggaagatgtccgcagctgttgccaggccagggttctcccgagagggaggacgctgggactgtggcttgccctgatcggccgagaagagtttgccatgaatcttctgcgtcggagtgggaaacggcggcgttcagaatcaggctcagattcgttctcgggaagcggcggtgacagcagtgccagcccccagttcctctccgggtccgtgctgagcccgccgcccggccttggtcgctgcctgaaggccgcagctgcaggagaatgcaagcctacagttcctgactacgaaagagacaagctactattggcaaactggggacttcctaaagcagttctggaaaaataccacagttttggtgtaaaaaagatgtttgaatggcaggcagagtgccttttgcttggacaagtcctggaaggaaagaatttagtttattcagctcctacaagtgctgggaagactcttgtggcagaattacttattttgaagcgggttttggaaatgcggaagaaagctttgtttattcttccctttgtttctgtggctaaagagaagaaatactacctccagagtctgtttcaggaagtaggaataaaagtagacggttatatgggcagcacctctccatcaaggcatttctcttcattggatattgcagtctgcacaattgagagagccaatggtctgatcaatcgcctcatagaggaaaataagatggatctgttaggaatggtggttgtggatgaattacatatgctgggagactctcaccgagggtatctgctggaacttttgctgaccaagatttgctatattactcggaaatcagcatcttgtcaggcagatctagccagttctctgtctaatgctgtgcaaatcgttggcatgagtgctacccttcctaatttggagcttgtggcttcctggttgaatgctgaactctaccataccgactttcgccctgtaccgcttttggagtcagtaaaagttggaaattccatatatgactcttcaatgaaacttgtgagggaatttgagcccatgctacaagtgaagggagatgaggaccatgttgttagtttatgttatgagacgatttgtgataaccattcagtattacttttttgtccatcaaagaaatggtgtgagaagctggcagatatcattgctcgagagttttataatctacatcatcaagctgagggattggtgaaaccctctgaatgcccaccagtaattctggaacaaaaagaactcctggaagtgatggatcagttaagacgtttgccttcaggactggactctgtattacagaaaactgtaccatggggagtagcatttcatcatgcaggtcttacttttgaggagagggatatcattgaaggagcctttcgtcaaggtctcattcgggtcttggcggcaacttctactctttcttctggggtgaatttacctgcacgtcgtgtgattattcgaacccctatttttggtggtcgacctctagatattcttacttataagcagatggttggccgtgctggcaggaaaggagtggacacagtaggcgagagtatcttaatttgtaagaactctgagaaatcaaaaggcatagctctccttcagggttctctaaagcctgttcgcagctgtctgcaaagacgagaaggagaagaagtaactggcagcatgatacgagctattctggagataatagttggtggagtggcaagtacatcacaagatatgcatacttatgctgcctgcacatttttggctgcaagtatgaaagaagggaagcaaggaattcagagaaatcaagagtctgttcagcttggagcgattgaggcctgtgtgatgtggctactagaaaatgaattcatccagagtacagaagccagtgatggaacagaaggaaaggtgtatcatccaacacatcttggttcggccactctttcttcttcactttctccagctgatactttagatatttttgctgacctgcaaagagcaatgaagggctttgttttagagaatgatcttcatattctctatctggttacacctatgtttgaggattggactactattgattggtatcgatttttctgtttatgggagaagttgccaacttcaatgaaaagggtggcagagctagtgggagttgaagaggggttcttggcccgttgtgtgaaaggaaaagtagtagccagaactgagagacagcatcgacaaatggccatccataaaaggtttttcaccagtcttgtgctattagatttaatcagtgaagttcccttaagggaaataaatcagaaatatggatgcaatcgtgggcagattcaatctttgcaacagtcagctgctgtttatgcagggatgattacagtattttccaaccgtctgggctggcacaacatggaactactactttcccaatttcagaagcgtcttacgtttggcatccagagggagctgtgtgacctggttcgggtatccttactaaatgctcagagagccagggttctctatgcttctggctttcatactgtggcagaccttgctagagcaaatattgtggaggtggaggtgattctgaaaaatgctgtgcctttcaaaagtgcccggaaggcagtggatgaggaagaggaagcagttgaagaacgtcgcaatatgcgaactatctgggtgactggcagaaaaggtttaactgaaagggaagcagcagcccttatagtggaagaagccagaatgattctgcagcaggacttagttgaaatgggagtgcaatggaatccatgtgccctgttacattctagtacatgctcattgactcatagtgagtccgaagtaaaggaacacacatttatatcccaaactaagagttcttataaaaaattaacatcaaagaacaaaagtaacacaatatttagtgattcttatattaagcattcaccaaatatagtgcaagacttaaataaaagtagagagcatacaagttcctttaattgtaatttccagaatgggaatcaagaacatcagacatgttccattttcagagcaagaaaacgggcctctttagatataaataaagagaagccaggagcctctcagaatgaggggaaaacaagtgataagaaagttgttcagactttttcacagaaaacaaaaaaggcacctttgaatttcaattcagaaaagatgagcagaagttttcgatcttggaaacgtagaaagcatctaaagcgatctagggacagcagccccctgaaagactctggagcgtgtagaatccatttacaaggacagactctgtctaatcctagtctttgtgaagacccgtttaccttagatgagaagaaaacggaatttagaaattcagggccatttgctaaaaatgtatctttgagtggtaaggaaaaagataataaaacatcattcccattacaaataaagcaaaattgttcatggaacataacactaactaatgataattttgtggagcatattgtcacaggatctcagagtaaaaatgtgacttgtcaggccactagtgtggttagtgaaaagggcagaggagtagctgttgaggcagaaaaaataaatgaagtgctgatacaaaatggttcaaaaaaccagaatgtttatatgaaacaccatgacatccatccaattaaccagtacctgcgaaagcaatctcatgaacagacaagcactattaccaaacagaaaaatataatagagagacaaatgccctgtgaagcagtcagtagttacataaatagagactcaaatgttactatcaattgtgaaaggataaagcttaatacagaggaaaataaaccaagtcattttcaggcattaggagatgatataagcagaactgtgatacccagtgaagtacttccatcagctggagcatttagcaaatcagaaggccagcatgagaattttctaaatatttctagactacaagaaaaaacaggtacttatacaacaaacaaaactaaaaataatcatgtttctgacttaggtttagtcctctgtgattttgaagatagtttctatctggatactcagtcagagaaaataatacaacagatggcaactgaaaatgccaaactaggagcaaaggacaccaacctggcagcagggataatgcagaagagcttagtccaacagaactcaatgaactcttttcagaaggagtgtcacattccttttcctgctgaacagcaccctctaggagcgactaagatagatcatttggaccttaagactgtaggtactatgaaacaaagcagtgattcacatggggttgatatcctgactccagaaagcccgattttccattctccaatactattggaggaaaatggtctttttttaaaaaagaatgaagtttctgttactgattcacaattaaatagttttcttcaaggttatcaaacacaagaaactgtgaaaccagttatacttctgattcctcaaaagagaactcccactggtgtagaaggagaatgtcttccagttcctgaaacaagtttgaatatgagtgatagtttactatttgatagcttcagtgatgactatctagtaaaagaacaattacctgatatgcaaatgaaagaaccccttccttcagaagtaacatcaaaccattttagtgattctctgtgtctacaagaagacctaattaaaaaatcaaatgtaaatgagaatcaagatacccaccagcagttgacttgttccaatgatgaatctattatattttcagaaatggattctgttcagatggttgaagctttggacaatgtggatatatttcctgtccaagagaagaatcatactgtagtatctcctagagcattagaactaagtgatccagtacttgatgagcaccaccaaggtgatcaagatggaggagatcaagatgaaagggctgaaaaatcaaaattaactgggaccaggcaaaatcattcattcatatggtcaggggcatcatttgatctaagtccaggactgcaaaggattttagataaagtatccagtcctctagaaaatgaaaagctaaaatcaatgactataaacttttccagtttgaatagaaaaaatacagagttaaatgaagaacaagaagttatttcaaacttggagacaaaacaagtgcagggaatttcattttcttctaataatgaagtaaaaagcaagattgagatgctagaaaacaatgccaatcatgatgaaacctcatccctcttacctcgtaaagaaagtaatatagttgatgataatggtctcattcctcctacacccattccaacatctgcttctaagctgacatttccagggattcttgaaacacctgtaaacccttggaaaactaataatgttttacaacctggtgaaagttatttatttggctcaccttcagatattaaaaaccacgatttaagtccagggagtagaaatgggttcaaagacaacagccctattagtgacacaagcttttcacttcagttatcacaggatggattacagttaactccagcctcaagcagttcagaaagtttgtccataattgatgtagcaagtgaccaaaatcttttccaaacattcattaaggagtggcggtgcaaaaagcgattttccatctcactggcttgtgaaaagattagaagtttgacatcttctaaaactgctactattggcagtaggtttaagcaagctagctcacctcaggaaattcctattagagatgatggatttcccattaaaggttgtgatgacaccttggtggttggactggcagtatgctggggtggaagggatgcctattatttttcactgcagaaggaacaaaagcattctgaaattagtgccagtttggttccaccttctttagatccaagcctgactttgaaagacaggatgtggtaccttcaatcttgcttgcgaaaggaatctgataaagaatgttctgttgtcatctatgacttcatccagagctataaaattcttcttctttcttgtggcatctccttggagcaaagttatgaagatcctaaggtggcatgctggttactagatccagattctcaggagccgactcttcatagcatagttaccagttttcttcctcatgagcttccactcctagaagggatggagaccagccaagggattcaaagcctggggctaaatgctggcagtgagcattctgggcgatacagagcatctgtggagtccattctcatcttcaactctatgaatcagctcaactctttgttgcagaaggaaaaccttcaagatgttttccgtaaggtggaaatgccctctcagtactgcttggccttgctagaactaaatggaattggctttagtactgcagaatgtgaaagtcagaaacatataatgcaagccaagctggatgcaattgagacccaggcctatcaactagctggccacagtttttctttcaccagttcagatgacatcgctgaggttttatttttggaattgaagttgcccccaaatagagagatgaaaaaccaaggcagcaagaaaactctgggttctaccagaagagggattgacaatggacgcaagctaaggctgggaagacagttcagcactagtaaggacgttttaaataaattaaaggcattacatcctttaccaggcttgatattagaatggagaagaatcactaatgctattaccaaagtggtctttccccttcagcgggaaaagtgtcttaatccttttcttggaatggaaagaatctatcctgtatcacagtcgcacactgctacaggacgaataacctttacagaaccaaatattcagaatgtgccaagagattttgaaatcaaaatgccaacactagtaggagaaagcccaccttctcaagctgtaggcaaaggcctacttcccatgggcagaggaaaatataagaagggtttcagcgtgaatcctagatgccaggcacagatggaggagagagctgcagacagaggaatgccattttcaattagcatgcgacatgcctttgtgcctttcccaggtggttcaatactggctgctgactactctcagcttgaactgaggatcttggctcatttatcccatgatcgtcgtctcattcaagtgttaaacactggagctgatgttttcaggagcattgcagcagagtggaagatgattgagccagagtctgttggggatgatctgaggcagcaggcaaaacagatttgctatgggatcatttatggaatgggagctaaatctttgggagagcagatgggcattaaagaaaatgatgctgcatgctatattgactccttcaaatccagatacacagggattaatcaattcatgacagagacagtgaagaattgtaaaagagacggatttgttcagaccattttgggaaggcgtagatatttgccaggaatcaaagacaacaacccttatcgtaaagctcacgctgagcgtcaagctatcaacacaatagtccaaggatcagcagctgatattgtcaaaatagccacagttaacattcagaagcaattagagaccttccactcaaccttcaaatcccatggtcatcgagagggtatgctccaaagtgaccaaacaggattgtcacgaaagagaaaactgcaagggatgttctgcccaatcagaggaggcttcttcatccttcaactccatgatgaactcctatatgaagtggcagaagaagatgttgttcaggtagctcagattgtcaagaatgaaatggaaagtgctgtaaaactgtctgtgaaattgaaagtgaaagtgaaaataggcgccagctggggagagctaaaggactttgatgtgtaactgtgctgttgatgaagtcctcccagggaagcctgtgcagatgcagtcacctggaaagaacagagattaccctttcacctacctcagcaaaacaaactttcaagtcttgatagacttagcctagtaattttatagtgagagtttcaaactatatatcagtgtctatagcatcaaaaacttctgggggcgtgggggaagtagaataccaagtataatagttacattcactttcaaagagcatctatgaatttgccttttgtaacttactgtggctttaaacatattcagaacagatgcttgaaatatgcacttagcactttggttccacatctgtctgggtaaaccatgaagaaaatgaagctgctgcctcaatcgacccagacagcagccataggcagataaagatttggtttcaccctggtggtggtaggcatcgtgtgtgactttttttcctctaatatcaattttacagtacggaaatagtattttaaaatagtattggctaataaattatgaattctataaagtagtaagacttggtatggttggagtgtaggaatgaatattcatgaaatgtttcttattgcttttccttccctaattcatacaatgaatgtatttggaatacttacatattataaaataaactatacctcttcaagaggtatcctgttctgtaagatcagatgtttttattgcaggtcaatataatactgccagagacagaaaatacccccttatcagtcccttagtgcctctttctgtttgtggcatggtgagaaaacccatgctgaaaagattgtactttgtgatcccaatcagagggatggagctaatctttttgctgttgaaataaaatgaatttatgagaaa

SEQ ID NO: 261758 - DNA, 9049 bp, Artificial Sequence
  derived and/or modified sequence
atgaatggtcaccgttttacgttcagaactcgttcgcttctacctttacaaaagggacaacacagatgcattactaagctcttggctcataacgatccctggggtatattcagagccccttcctcgcggcgttcatatagtgtctcaggggtctgtcagccagcaatccccaattcctcattacatattcctcacaatgcatgctggctaaaatggaaattgtgttcagaaatagccctgccctaccatcatatactaggagaaaggaggaaattatgctctattaggaggtttgagtttgaagactggcgggaagatgtccgcagctgttgccaggccagggttctcccgagagggaggacgctgggactgtggcttgccctgatcggccgagaagagtttgccatgaatcttctgcgtcggagtgggaaacggcggcgttcagaatcaggctcagattcgttctcgggaagcggcggtgacagcagtgccagcccccagttcctctccgggtccgtgctgagcccgccgcccggccttggtcgctgcctgaaggccgcagctgcaggagaatgcaagcctacagttcctgactacgaaagagacaagctactattggcaaactggggacttcctaaagcagttctggaaaaataccacagttttggtgtaaaaaagatgtttgaatggcaggcagagtgccttttgcttggacaagtcctggaaggaaagaatttagtttattcagctcctacaagtgctgggaagactcttgtggcagaattacttattttgaagcgggttttggaaatgcggaagaaagctttgtttattcttccctttgtttctgtggctaaagagaagaaatactacctccagagtctgtttcaggaagtaggaataaaagtagacggttatatgggcagcacctctccatcaaggcatttctcttcattggatattgcagtctgcacaattgagagagccaatggtctgatcaatcgcctcatagaggaaaataagatggatctgttaggaatggtggttgtggatgaattacatatgctgggagactctcaccgagggtatctgctggaacttttgctgaccaagatttgctatattactcggaaatcagcatcttgtcaggcagatctagccagttctctgtctaatgctgtgcaaatcgttggcatgagtgctacccttcctaatttggagcttgtggcttcctggttgaatgctgaactctaccataccgactttcgccctgtaccgcttttggagtcagtaaaagttggaaattccatatatgactcttcaatgaaacttgtgagggaatttgagcccatgctacaagtgaagggagatgaggaccatgttgttagtttatgttatgagacgatttgtgataaccattcagtattacttttttgtccatcaaagaaatggtgtgagaagctggcagatatcattgctcgagagttttataatctacatcatcaagctgagggtgagggattggtgaaaccctctgaatgcccaccagtaattctggaacaaaaagaactcctggaagtgatggatcagttaagacgtttgccttcaggactggactctgtattacagaaaactgtaccatggggagtagcatttcatcatgcaggtcttacttttgaggagagggatatcattgaaggagcctttcgtcaaggtctcattcgggtcttggcggcaacttctactctttcttctggggtgaatttacctgcacgtcgtgtgattattcgaacccctatttttggtggtcgacctctagatattcttacttataagcagatggttggccgtgctggcaggaaaggagtggacacagtagagagtatcttaatttgtaagaactctgagaaatcaaaaggcatagctctccttcagggttctctaaagcctgttcgcagctgtctgcaaagacgagaaggagaagaagtaactggcagcatgatacgagctattctggagataatagttggtggagtggcaagtacatcacaagatatgcatacttatgctgcctgcacatttttggctgcaagtatgaaagaagggaagcaaggaattcagagaaatcaagagtctgttcagcttggagcgattgaggcctgtgtgatgtggctactagaaaatgaattcatccagagtacagaagccagtgatggaacagaaggaaaggtgtatcatccaacacatcttggttcggccactctttcttcttcactttctccagctgatactttagatatttttgctgacctgcaaagagcaatgaagggctttgttttagagaatgatcttcatattctctatctggttacacctatgtttgaggattggactactattgattggtatcgatttttctgtttatgggagaagttgccaacttcaatgaaaagggtggcagagctagtgggagttgaagaggggttcttggcccgttgtgtgaaaggaaaagtagtagccagaactgagagacagcatcgacaaatggccatccataaaaggtttttcaccagtcttgtgctattagatttaatcagtgaagttcccttaagggaaataaatcagaaatatggatgcaatcgtgggcagattcaatctttgcaacagtcagctgctgtttatgcagggatgattacagtattttccaaccgtctgggctggcacaacatggaactactactttcccaatttcagaagcgtcttacgtttggcatccagagggagctgtgtgacctggttcgggtatccttactaaatgctcagagagccagggttctctatgcttctggctttcatactgtggcagaccttgctagagcaaatattgtggaggtggaggtgattctgaaaaatgctgtgcctttcaaaagtgcccggaaggcagtggatgaggaagaggaagcagttgaagaacgtcgcaatatgcgaactatctgggtgactggcagaaaaggtttaactgaaagggaagcagcagcccttatagtggaagaagccagaatgattctgcagcaggacttagttgaaatgggagtgcaatggaatccatgtgccctgttacattctagtacatgctcattgactcatagtgagtccgaagtaaaggaacacacatttatatcccaaactaagagttcttataaaaaattaacatcaaagaacaaaagtaacacaatatttagtgattcttatattaagcattcaccaaatatagtgcaagacttaaataaaagtagagagcatacaagttcctttaattgtaatttccagaatgggaatcaagaacatcagacatgttccattttcagagcaagaaaacgggcctctttagatataaataaagagaagccaggagcctctcagaatgaggggaaaacaagtgataagaaagttgttcagactttttcacagaaaacaaaaaaggcacctttgaatttcaattcagaaaagatgagcagaagttttcgatcttggaaacgtagaaagcatctaaagcgatctagggacagcagccccctgaaagactctggagcgtgtagaatccatttacaaggacagactctgtctaatcctagtctttgtgaagacccgtttaccttagatgagaagaaaacggaatttagaaattcagggccatttgctaaaaatgtatctttgagtggtaaggaaaaagataataaaacatcattcccattacaaataaagcaaaattgttcatggaacataacactaactaatgataattttgtggagcatattgtcacaggatctcagagtaaaaatgtgacttgtcaggccactagtgtggttagtgaaaagggcagaggagtagctgttgaggcagaaaaaataaatgaagtgctgatacaaaatggttcaaaaaaccagaatgtttatatgaaacaccatgacatccatccaattaaccagtacctgcgaaagcaatctcatgaacagacaagcactattaccaaacagaaaaatataatagagagacaaatgccctgtgaagcagtcagtagttacataaatagagactcaaatgttactatcaattgtgaaaggataaagcttaatacagaggaaaataaaccaagtcattttcaggcattaggagatgatataagcagaactgtgatacccagtgaagtacttccatcagctggagcatttagcaaatcagaaggccagcatgagaattttctaaatatttctagactacaagaaaaaacaggtacttatacaacaaacaaaactaaaaataatcatgtttctgacttaggtttagtcctctgtgattttgaagatagtttctatctggatactcagtcagagaaaataatacaacagatggcaactgaaaatgccaaactaggagcaaaggacaccaacctggcagcagggataatgcagaagagcttagtccaacagaactcaatgaactcttttcagaaggagtgtcacattccttttcctgctgaacagcaccctctaggagcgactaagatagatcatttggaccttaagactgtaggtactatgaaacaaagcagtgattcacatggggttgatatcctgactccagaaagcccgattttccattctccaatactattggaggaaaatggtctttttttaaaaaagaatgaagtttctgttactgattcacaattaaatagttttcttcaaggttatcaaacacaagaaactgtgaaaccagttatacttctgattcctcaaaagagaactcccactggtgtagaaggagaatgtcttccagttcctgaaacaagtttgaatatgagtgatagtttactatttgatagcttcagtgatgactatctagtaaaagaacaattacctgatatgcaaatgaaagaaccccttccttcagaagtaacatcaaaccattttagtgattctctgtgtctacaagaagacctaattaaaaaatcaaatgtaaatgagaatcaagatacccaccagcagttgacttgttccaatgatgaatctattatattttcagaaatggattctgttcagatggttgaagctttggacaatgtggatatatttcctgtccaagagaagaatcatactgtagtatctcctagagcattagaactaagtgatccagtacttgatgagcaccaccaaggtgatcaagatggaggagatcaagatgaaagggctgaaaaatcaaaattaactgggaccaggcaaaatcattcattcatatggtcaggggcatcatttgatctaagtccaggactgcaaaggattttagataaagtatccagtcctctagaaaatgaaaagctaaaatcaatgactataaacttttccagtttgaatagaaaaaatacagagttaaatgaagaacaagaagttatttcaaacttggagacaaaacaagtgcagggaatttcattttcttctaataatgaagtaaaaagcaagattgagatgctagaaaacaatgccaatcatgatgaaacctcatccctcttacctcgtaaagaaagtaatatagttgatgataatggtctcattcctcctacacccattccaacatctgcttctaagctgacatttccagggattcttgaaacacctgtaaacccttggaaaactaataatgttttacaacctggtgaaagttatttatttggctcaccttcagatattaaaaaccacgatttaagtccagggagtagaaatgggttcaaagacaacagccctattagtgacacaagcttttcacttcagttatcacaggatggattacagttaactccagcctcaagcagttcagaaagtttgtccataattgatgtagcaagtgaccaaaatcttttccaaacattcattaaggagtggcggtgcaaaaagcgattttccatctcactggcttgtgaaaagattagaagtttgacatcttctaaaactgctactattggcagtaggtttaagcaagctagctcacctcaggaaattcctattagagatgatggatttcccattaaaggttgtgatgacaccttggtggttggactggcagtatgctggggtggaagggatgcctattatttttcactgcagaaggaacaaaagcattctgaaattagtgccagtttggttccaccttctttagatccaagcctgactttgaaagacaggatgtggtaccttcaatcttgcttgcgaaaggaatctgataaagaatgttctgttgtcatctatgacttcatccagagctataaaattcttcttctttcttgtggcatctccttggagcaaagttatgaagatcctaaggtggcatgctggttactagatccagattctcaggagccgactcttcatagcatagttaccagttttcttcctcatgagcttccactcctagaagggatggagaccagccaagggattcaaagcctggggctaaatgctggcagtgagcattctgggcgatacagagcatctgtggagtccattctcatcttcaactctatgaatcagctcaactctttgttgcagaaggaaaaccttcaagatgttttccgtaaggtggaaatgccctctcagtactgcttggccttgctagaactaaatggaattggctttagtactgcagaatgtgaaagtcagaaacatataatgcaagccaagctggatgcaattgagacccaggcctatcaactagctggccacagtttttctttcaccagttcagatgacatcgctgaggttttatttttggaattgaagttgcccccaaatagagagatgaaaaaccaaggcagcaagaaaactctgggttctaccagaagagggattgacaatggacgcaagctaaggctgggaagacagttcagcactagtaaggacgttttaaataaattaaaggcattacatcctttaccaggcttgatattagaatggagaagaatcactaatgctattaccaaagtggtctttccccttcagcgggaaaagtgtcttaatccttttcttggaatggaaagaatctatcctgtatcacagtcgcacactgctacaggacgaataacctttacagaaccaaatattcagaatgtgccaagagattttgaaatcaaaatgccaacactagtaggagaaagcccaccttctcaagctgtaggcaaaggcctacttcccatgggcagaggaaaatataagaagggtttcagcgtgaatcctagatgccaggcacagatggaggagagagctgcagacagaggaatgccattttcaattagcatgcgacatgcctttgtgcctttcccaggtggttcaatactggctgctgactactctcagcttgaactgaggatcttggctcatttatcccatgatcgtcgtctcattcaagtgttaaacactggagctgatgttttcaggagcattgcagcagagtggaagatgattgagccagagtctgttggggatgatctgaggcagcaggcaaaacagatttgctatgggatcatttatggaatgggagctaaatctttgggagagcagatgggcattaaagaaaatgatgctgcatgctatattgactccttcaaatccagatacacagggattaatcaattcatgacagagacagtgaagaattgtaaaagagacggatttgttcagaccattttgggaaggcgtagatatttgccaggaatcaaagacaacaacccttatcgtaaagctcacgctgagcgtcaagctatcaacacaatagtccaaggatcagcagctgatattgtcaaaatagccacagttaacattcagaagcaattagagaccttccactcaaccttcaaatcccatggtcatcgagagggtatgctccaaagtgaccaaacaggattgtcacgaaagagaaaactgcaagggatgttctgcccaatcagaggaggcttcttcatccttcaactccatgatgaactcctatatgaagtggcagaagaagatgttgttcaggtagctcagattgtcaagaatgaaatggaaagtgctgtaaaactgtctgtgaaattgaaagtgaaagtgaaaataggcgccagctggggagagctaaaggactttgatgtgtaactgtgctgttgatgaagtcctcccagggaagcctgtgcagatgcagtcacctggaaagaacagagattaccctttcacctacctcagcaaaacaaactttcaagtcttgatagacttagcctagtaattttatagtgagagtttcaaactatatatcagtgtctatagcatcaaaaacttctgggggcgtgggggaagtagaataccaagtataatagttacattcactttcaaagagcatctatgaatttgccttttgtaacttactgtggctttaaacatattcagaacagatgcttgaaatatgcacttagcactttggttccacatctgtctgggtaaaccatgaagaaaatgaagctgctgcctcaatcgacccagacagcagccataggcagataaagatttggtttcaccctggtggtggtaggcatcgtgtgtgactttttttcctctaatatcaattttacagtacggaaatagtattttaaaatagtattggctaataaattatgaattctataaagtagtaagacttggtatggttggagtgtaggaatgaatattcatgaaatgtttcttattgcttttccttccctaattcatacaatgaatgtatttggaatacttacatattataaaataaactatacctcttcaagaggtatcctgttctgtaagatcagatgtttttattgcaggtcaatataatactgccagagacagaaaatacccccttatcagtcccttagtgcctctttctgtttgtggcatggtgagaaaacccatgctgaaaagattgtactttgtgatcccaatcagagggatggagctaatctttttgctgttgaaataaaatgaatttatg

SEQ ID NO: 261759 - DNA, 7519 bp, Artificial Sequence
  derived and/or modified sequence
atgcccaccagtaattctcaaaaagaactcctggaagtgatggatcagttaagacgtttgccttcaggactggactctgtattacagaaaactgtaccatggggagtagcatttcatcatgcaggtcttacttttgaggagagggatatcattgaaggagcctttcgtcaaggtctcattcgggtcttggcggcaacttctactctttcttctggggtgaatttacctgcacgtcgtgtgattattcgaacccctatttttggtggtcgacctctagatattcttacttataagcagatggttggccgtgctggcaggaaaggagtggacacagtaggcgagagtatcttaatttgtaagaactctgagaaatcaaaaggcatagctctccttcagggttctctaaagcctgttcgcagctgtctgcaaagacgagaaggagaagaagtaactggcagcatgatacgagctattctggagataatagttggtggagtggcaagtacatcacaagatatgcatacttatgctgcctgcacatttttggctgcaagtatgaaagaagggaagcaaggaattcagagaaatcaagagtctgttcagcttggagcgattgaggcctgtgtgatgtggctactagaaaatgaattcatccagagtacagaagccagtgatggaacagaaggaaaggtgtatcatccaacacatcttggttcggccactctttcttcttcactttctccagctgatactttagatatttttgctgacctgcaaagagcaatgaagggctttgttttagagaatgatcttcatattctctatctggttacacctatgtttgaggattggactactattgattggtatcgatttttctgtttatgggagaagttgccaacttcaatgaaaagggtggcagagctagtgggagttgaagaggggttcttggcccgttgtgtgaaaggaaaagtagtagccagaactgagagacagcatcgacaaatggccatccataaaaggtttttcaccagtcttgtgctattagatttaatcagtgaagttcccttaagggaaataaatcagaaatatggatgcaatcgtgggcagattcaatctttgcaacagtcagctgctgtttatgcagggatgattacagtattttccaaccgtctgggctggcacaacatggaactactactttcccaatttcagaagcgtcttacgtttggcatccagagggagctgtgtgacctggttcgggtatccttactaaatgctcagagagccagggttctctatgcttctggctttcatactgtggcagaccttgctagagcaaatattgtggaggtggaggtgattctgaaaaatgctgtgcctttcaaaagtgcccggaaggcagtggatgaggaagaggaagcagttgaagaacgtcgcaatatgcgaactatctgggtgactggcagaaaaggtttaactgaaagggaagcagcagcccttatagtggaagaagccagaatgattctgcagcaggacttagttgaaatgggagtgcaatggaatccatgtgccctgttacattctagtacatgctcattgactcatagtgagtccgaagtaaaggaacacacatttatatcccaaactaagagttcttataaaaaattaacatcaaagaacaaaagtaacacaatatttagtgattcttatattaagcattcaccaaatatagtgcaagacttaaataaaagtagagagcatacaagttcctttaattgtaatttccagaatgggaatcaagaacatcagacatgttccattttcagagcaagaaaacgggcctctttagatataaataaagagaagccaggagcctctcagaatgaggggaaaacaagtgataagaaagttgttcagactttttcacagaaaacaaaaaaggcacctttgaatttcaattcagaaaagatgagcagaagttttcgatcttggaaacgtagaaagcatctaaagcgatctagggacagcagccccctgaaagactctggagcgtgtagaatccatttacaaggacagactctgtctaatcctagtctttgtgaagacccgtttaccttagatgagaagaaaacggaatttagaaattcagggccatttgctaaaaatgtatctttgagtggtaaggaaaaagataataaaacatcattcccattacaaataaagcaaaattgttcatggaacataacactaactaatgataattttgtggagcatattgtcacaggatctcagagtaaaaatgtgacttgtcaggccactagtgtggttagtgaaaagggcagaggagtagctgttgaggcagaaaaaataaatgaagtgctgatacaaaatggttcaaaaaaccagaatgtttatatgaaacaccatgacatccatccaattaaccagtacctgcgaaagcaatctcatgaacagacaagcactattaccaaacagaaaaatataatagagagacaaatgccctgtgaagcagtcagtagttacataaatagagactcaaatgttactatcaattgtgaaaggataaagcttaatacagaggaaaataaaccaagtcattttcaggcattaggagatgatataagcagaactgtgatacccagtgaagtacttccatcagctggagcatttagcaaatcagaaggccagcatgagaattttctaaatatttctagactacaagaaaaaacaggtacttatacaacaaacaaaactaaaaataatcatgtttctgacttaggtttagtcctctgtgattttgaagatagtttctatctggatactcagtcagagaaaataatacaacagatggcaactgaaaatgccaaactaggagcaaaggacaccaacctggcagcagggataatgcagaagagcttagtccaacagaactcaatgaactcttttcagaaggagtgtcacattccttttcctgctgaacagcaccctctaggagcgactaagatagatcatttggaccttaagactgtaggtactatgaaacaaagcagtgattcacatggggttgatatcctgactccagaaagcccgattttccattctccaatactattggaggaaaatggtctttttttaaaaaagaatgaagtttctgttactgattcacaattaaatagttttcttcaaggttatcaaacacaagaaactgtgaaaccagttatacttctgattcctcaaaagagaactcccactggtgtagaaggagaatgtcttccagttcctgaaacaagtttgaatatgagtgatagtttactatttgatagcttcagtgatgactatctagtaaaagaacaattacctgatatgcaaatgaaagaaccccttccttcagaagtaacatcaaaccattttagtgattctctgtgtctacaagaagacctaattaaaaaatcaaatgtaaatgagaatcaagatacccaccagcagttgacttgttccaatgatgaatctattatattttcagaaatggattctgttcagatggttgaagctttggacaatgtggatatatttcctgtccaagagaagaatcatactgtagtatctcctagagcattagaactaagtgatccagtacttgatgagcaccaccaaggtgatcaagatggaggagatcaagatgaaagggctgaaaaatcaaaattaactgggaccaggcaaaatcattcattcatatggtcaggggcatcatttgatctaagtccaggactgcaaaggattttagataaagtatccagtcctctagaaaatgaaaagctaaaatcaatgactataaacttttccagtttgaatagaaaaaatacagagttaaatgaagaacaagaagttatttcaaacttggagacaaaacaagtgcagggaatttcattttcttctaataatgaagtaaaaagcaagattgagatgctagaaaacaatgccaatcatgatgaaacctcatccctcttacctcgtaaagaaagtaatatagttgatgataatggtctcattcctcctacacccattccaacatctgcttctaagctgacatttccagggattcttgaaacacctgtaaacccttggaaaactaataatgttttacaacctggtgaaagttatttatttggctcaccttcagatattaaaaaccacgatttaagtccagggagtagaaatgggttcaaagacaacagccctattagtgacacaagcttttcacttcagttatcacaggatggattacagttaactccagcctcaagcagttcagaaagtttgtccataattgatgtagcaagtgaccaaaatcttttccaaacattcattaaggagtggcggtgcaaaaagcgattttccatctcactggcttgtgaaaagattagaagtttgacatcttctaaaactgctactattggcagtaggtttaagcaagctagctcacctcaggaaattcctattagagatgatggatttcccattaaaggttgtgatgacaccttggtggttggactggcagtatgctggggtggaagggatgcctattatttttcactgcagaaggaacaaaagcattctgaaattagtgccagtttggttccaccttctttagatccaagcctgactttgaaagacaggatgtggtaccttcaatcttgcttgcgaaaggaatctgataaagaatgttctgttgtcatctatgacttcatccagagctataaaattcttcttctttcttgtggcatctccttggagcaaagttatgaagatcctaaggtggcatgctggttactagatccagattctcaggagccgactcttcatagcatagttaccagttttcttcctcatgagcttccactcctagaagggatggagaccagccaagggattcaaagcctggggctaaatgctggcagtgagcattctgggcgatacagagcatctgtggagtccattctcatcttcaactctatgaatcagctcaactctttgttgcagaaggaaaaccttcaagatgttttccgtaaggtggaaatgccctctcagtactgcttggccttgctagaactaaatggaattggctttagtactgcagaatgtgaaagtcagaaacatataatgcaagccaagctggatgcaattgagacccaggcctatcaactagctggccacagtttttctttcaccagttcagatgacatcgctgaggttttatttttggaattgaagttgcccccaaatagagagatgaaaaaccaaggcagcaagaaaactctgggttctaccagaagagggattgacaatggacgcaagctaaggctgggaagacagttcagcactagtaaggacgttttaaataaattaaaggcattacatcctttaccaggcttgatattagaatggagaagaatcactaatgctattaccaaagtggtctttccccttcagcgggaaaagtgtcttaatccttttcttggaatggaaagaatctatcctgtatcacagtcgcacactgctacaggacgaataacctttacagaaccaaatattcagaatgtgccaagagattttgaaatcaaaatgccaacactagtaggagaaagcccaccttctcaagctgtaggcaaaggcctacttcccatgggcagaggaaaatataagaagggtttcagcgtgaatcctagatgccaggcacagatggaggagagagctgcagacagaggaatgccattttcaattagcatgcgacatgcctttgtgcctttcccaggtggttcaatactggctgctgactactctcagcttgaactgaggatcttggctcatttatcccatgatcgtcgtctcattcaagtgttaaacactggagctgatgttttcaggagcattgcagcagagtggaagatgattgagccagagtctgttggggatgatctgaggcagcaggcaaaacagatttgctatgggatcatttatggaatgggagctaaatctttgggagagcagatgggcattaaagaaaatgatgctgcatgctatattgactccttcaaatccagatacacagggattaatcaattcatgacagagacagtgaagaattgtaaaagagacggatttgttcagaccattttgggaaggcgtagatatttgccaggaatcaaagacaacaacccttatcgtaaagctcacgctgagcgtcaagctatcaacacaatagtccaaggatcagcagctgatattgtcaaaatagccacagttaacattcagaagcaattagagaccttccactcaaccttcaaatcccatggtcatcgagagggtatgctccaaagtgaccaaacaggattgtcacgaaagagaaaactgcaagggatgttctgcccaatcagaggaggcttcttcatccttcaactccatgatgaactcctatatgaagtggcagaagaagatgttgttcaggtagctcagattgtcaagaatgaaatggaaagtgctgtaaaactgtctgtgaaattgaaagtgaaagtgaaaataggcgccagctggggagagctaaaggactttgatgtgtaactgtgctgttgatgaagtcctcccagggaagcctgtgcagatgcagtcacctggaaagaacagagattaccctttcacctacctcagcaaaacaaactttcaagtcttgatagacttagcctagtaattttatagtgagagtttcaaactatatatcagtgtctatagcatcaaaaacttctgggggcgtgggggaagtagaataccaagtataatagttacattcactttcaaagagcatctatgaatttgccttttgtaacttactgtggctttaaacatattcagaacagatgcttgaaatatgcacttagcactttggttccacatctgtctgggtaaaccatgaagaaaatgaagctgctgcctcaatcgacccagacagcagccataggcagataaagatttggtttcaccctggtggtggtaggcatcgtgtgtgactttttttcctctaatatcaattttacagtacggaaatagtattttaaaatagtattggctaataaattatgaattctataaagtagtaagacttggtatggttggagtgtaggaatgaatattcatgaaatgtttcttattgcttttccttccctaattcatacaatgaatgtatttggaatacttacatattataaaataaactatacctcttcaagaggtatcctgttctgtaagatcagatgtttttattgcaggtcaatataatactgccagagacagaaaatacccccttatcagtcccttagtgcctctttctgtttgtggcatggtgagaaaacccatgctgaaaagattgtactttgtgatcccaatcagagggatggagctaatctttttgctgttgaaataaaatgaatttatgagaaacttt

SEQ ID NO: 261760 - DNA, 7773 bp, Artificial Sequence
  derived and/or modified sequence
atgaacctgctgcgccgttctggaaaacgcagacgctctgagagcggttctgatagcttctccgggtccgggggtgacagctcggcttccccccagtttctgagcggttctgttttgtccccgcctccagggctcggcaggtgcctgaaggctgccgctgcaggtgagtgtaagccaaccgttccagactatgagagggataagctgctgctcgccaactggggacttccaaaagcggtgcttgagaagtatcactcctttggtgtgaaaaagatgtttgaatggcaggccgaatgcctgctgttaggccaagttctggaggggaaaaaccttgtctactctgcccctacaagcgcgggaaaaactctcgtggcggagctgctaattctcaagcgcgtactggaaatgcgtaaaaaggctctgtttattctgccattcgtttccgtcgccaaagaaaaaaagtactacttacagtcattatttcaggaagtgggaataaaagtcgacggctatatgggtagtacttctccctcgcgccacttttcaagtttggatattgcggtctgcaccatcgagagggccaatgggctgattaaccgtttaatcgaagagaataagatggatctactcggtatggtcgtggtagacgagctgcatatgctgggcgattcccatcggggttacctcctagaactgctactgaccaagatctgctacattacaagaaagagcgcatcctgccaagccgatctggcttcatcactcagcaatgccgtgcagatcgtcggcatgagcgctactctacccaatctagagttggtcgccagctggctgaacgccgagttgtaccatacagactttcgtcctgtgcctttgctggaaagtgtgaaggtcggcaatagcatctacgacagtagtatgaagttggtcagggagttcgagcctatgcttcaggtgaaaggagacgaagaccatgttgtatccctatgctacgagacaatatgtgataaccattcggtgcttctgttctgtcccagtaagaagtggtgcgaaaaactggccgatattattgccagggaattttataacctgcaccatcaagctgagggcctagttaagccttctgagtgcccccctgtgatcctggagcaaaaggaactgctggaggtaatggaccagctccgcagattgccatctggcctggattctgtcctccagaaaactgtgccctggggggtggcttttcaccatgctgggctgaccttcgaggaacgggatatcatcgagggcgctttcaggcagggcctgattcgggttctggctgcaacgtcaacacttagctcaggtgtgaatcttccagcacggagagtgattatccggaccccaatcttcgggggaaggccactggatattctcacgtacaaacagatggtggggcgtgctgggagaaagggggtggatacagtcggcgagagcattcttatatgcaagaatagtgagaagtctaagggcattgctttactgcaaggtagtttgaagcctgtgagatcttgcttacagagacgggagggcgaagaagttacagggagtatgatcagagctatcttggagatcatagttgggggtgtagcctctacgagccaggatatgcatacctatgcagcctgtacgttcctggccgcttccatgaaagagggcaaacagggcattcagaggaaccaggaatcggtgcaactcggggctatagaggcctgtgtgatgtggttactggagaatgagttcattcagtccacagaggccagtgacggtactgaaggcaaagtgtaccaccccacccatctggggtcagctaccctctcgtcttcgctgtcacccgctgataccctcgatatctttgctgacttgcagagggccatgaaaggtttcgtgctcgagaatgatctacatatcctttatctggtgactcctatgttcgaggattggactaccattgattggtatcggttcttttgcctgtgggagaagctgcctactagtatgaagagggtggctgaactcgttggagtggaggaagggtttctggcccgatgcgtgaagggtaaagtcgtggccagaaccgaacgccagcacagacagatggctattcataaacggttctttactagcctcgtcctgcttgacctcatttcagaagtgcccttaagagagatcaatcagaagtacggttgcaataggggtcagatccaaagccttcagcaaagcgcagctgtatacgcgggaatgatcaccgtgttttctaaccgactcggctggcataatatggaattgctgttgagccagttccaaaagcgcttgacctttggcatccagagagagctgtgcgatctggtgcgcgtatccctcttgaatgctcagcgggctagggtgctgtatgccagcggattccacaccgtagcggatctggcgagagccaatattgtggaggtcgaggtgattctgaagaacgcggtgcctttcaagtcagccagaaaagctgtagatgaagaggaggaagccgttgaggagaggcgcaatatgcgtacgatctgggtaacaggaaggaaggggctcaccgaacgggaagccgcagctcttatcgtggaagaggccaggatgatcttgcagcaggatctcgtggagatgggcgttcagtggaatccttgtgccttgctacacagctctacctgcagtctgacacactctgagtcagaggtgaaagaacacacctttattagccagacgaagtcatcatataagaaactaacctcaaagaataagtccaatacaattttctccgacagttacatcaaacattcacccaatattgtgcaagatctaaataaaagccgcgaacacactagcagcttcaattgtaacttccagaatggtaatcaggagcaccagacgtgttcaatttttagggccagaaagcgtgcgtcgttagacatcaataaggagaagccaggagccagtcagaacgagggaaagacgtctgacaagaaagtggtgcaaaccttctcacagaagaccaagaaagctcccttaaactttaacagcgagaagatgtcccgatcgttccgctcatggaagaggaggaaacatctgaaacgatccagggacagtagccccctgaaggactccggcgcttgcaggatccacctgcagggccaaacgctgtccaatccctctctctgtgaggacccctttacacttgacgagaaaaagaccgaatttcggaacagtggaccctttgcaaagaacgtgagcctcagcggcaaggaaaaggataacaaaaccagctttccgcttcagattaagcagaactgcagttggaacatcaccctaacgaatgacaattttgtagaacatatcgttacgggaagccagagcaagaacgtaacctgccaggccacgtcggtggtgtctgagaagggcagaggggtggctgtggaggcagagaaaattaatgaggtgttgatccagaacggcagtaagaaccagaacgtgtatatgaaacaccacgacatccaccccattaatcaatacctcagaaaacagtctcacgagcaaaccagtaccattacaaagcaaaaaaatattatcgagcgtcagatgccctgcgaagctgtttcatcctacatcaaccgagacagcaatgttacaatcaattgtgaaaggatcaagctcaatactgaggaaaataagccctcccacttccaggccctgggagatgacattagcagaaccgtgatcccatccgaagttctcccttcggctggagctttctccaagtctgagggacagcacgaaaattttctgaatattagccgtctccaggagaaaaccggcacatacacaacgaataagacaaaaaacaaccacgtcagtgacctgggcttggtgttgtgtgactttgaagacagcttctatctggatacacaaagcgaaaagattattcagcaaatggccacagagaatgcaaaactgggggcaaaggacactaatttggccgcaggaatcatgcagaagagtcttgtgcagcagaatagtatgaatagctttcagaaagaatgccatataccattccccgcagagcaacacccactgggagccaccaaaatcgatcatctggatcttaaaaccgttggcactatgaagcagagctctgacagtcacggcgtggacattctaactcccgaatcccctatattccatagcccgatattactagaagaaaacggcctgttcttgaagaaaaacgaggtctccgtcactgattcccagctgaactccttcctgcagggatatcaaacccaggagacagtcaaacccgttatattgctcattccacagaaaagaactcctactggggtagagggtgagtgtctacctgtgcccgagacgtctcttaacatgagcgactccctgctttttgattctttttccgacgactatcttgttaaggaacagctcccggatatgcaaatgaaagaacccctgccttccgaagttacgtccaaccatttctctgatagcttatgtctgcaggaagacctcatcaagaagtcaaatgtaaacgaaaaccaagatactcaccagcagctgacgtgcagcaatgacgagagtatcattttttccgaaatggactccgtgcagatggttgaggctcttgacaacgtggatatcttcccagtgcaggaaaaaaatcacactgtggtttctcctcgcgctctggagcttagcgatccagtgttagacgaacatcaccaaggagaccaggatggcggtgaccaagacgaacgggcagagaaatcaaaacttactggcaccagacagaaccattcatttatttggagcggagctagtttcgacctgtctcccggattacagcgcattctggacaaagtcagtagccctctggaaaacgagaagctgaagtctatgaccattaatttttccagcctgaaccgtaagaatacggagctcaacgaagaacaagaagtcatctccaacctggaaaccaaacaggtgcagggaatatcgttcagctccaacaacgaggtaaaatccaaaattgagatgctcgagaataacgccaaccacgacgaaacaagctccctgctgcctagaaaggaatcaaacatcgtggacgataatggactaatcccacccaccccaatacccacttctgcaagtaaactgacattccccggaattctggagacacccgtgaacccatggaagacaaacaacgttctgcagccaggggagagctacttatttgggtccccttcagatattaaaaaccatgaccttagccccggttcgcgtaacggattcaaggacaatagccctatctcagacacaagtttttcactccagctttcccaggacgggctgcaactgacccctgcgtcatcatcaagtgagagtcttagcattatcgacgtggcctcagatcagaacttgtttcaaaccttcatcaaagagtggcggtgtaaaaaacgcttcagcatcagccttgcctgcgaaaaaattaggtcattaacaagttcaaagacagctacaatcggtagtagattcaagcaggctagctctcctcaagaaattcctattcgcgacgatggcttcccaataaagggctgtgacgacacactggtcgtcggactagccgtgtgttggggtggtagagatgcgtactacttctcgctgcaaaaggagcagaaacatagtgaaatcagcgcctcattagtgcccccatctttggaccctagtctaactctcaaagatcggatgtggtacttacaatcatgtttaagaaaggaaagcgataaggagtgtagtgtggtcatttacgattttattcagagctacaaaatccttctgctgtcttgtgggatatccctggagcagtcttacgaagatcctaaggtggcttgttggctgctcgatcccgattcccaggaaccaaccctgcactccattgtgaccagcttcttgccccacgagctgcctctgctggaaggaatggagactagccagggtatccagagcttgggactgaacgcgggatccgagcacagtggtagatatcgggctagcgtggagagcattctgatattcaactccatgaatcagctgaacagtctcctgcaaaaggaaaatctgcaggacgtgtttagaaaagtggagatgccctcacagtattgcctggctcttcttgagctgaacggcattggtttctccactgctgaatgcgagagtcagaaacacattatgcaagctaagctcgatgcgattgaaacacaagcctaccagcttgctggccacagctttagtttcactagctcggatgacatcgctgaggttctatttttggagttgaagctgcctccgaatcgagagatgaaaaaccaggggagtaagaagaccttgggctcaacaagaagaggtatcgataacggcagaaagctaaggctcggaagacagttttccactagtaaggatgtcctaaacaaactgaaagccctgcaccccttgcccggtctgattctggaatggcgaagaatcacaaatgctattaccaaagttgtattccctctacagcgagaaaagtgcctgaatccctttctgggcatggaacgcatttacccagtctctcagagtcacactgctaccggcagaatcacctttaccgagccaaatattcagaacgtaccacgcgatttcgaaatcaagatgcctaccttggtcggagagtctcccccatcacaagcagtggggaaaggcctccttccaatgggcagaggcaagtacaagaaggggttttccgttaaccccaggtgccaagcccaaatggaagagagagccgctgacagaggaatgccattttccatctcaatgaggcacgccttcgtaccattcccgggtgggtctatcctggctgctgattatagtcagttggagttaagaatcttggctcacctgtcgcacgatcggaggctcatacaagtattgaacacaggagccgacgtgttcagatccatagcagctgaatggaaaatgatcgagcccgagagcgtcggagacgatctgcggcagcaggcaaaacagatttgttatggaatcatctatgggatgggggctaagagcctgggcgagcaaatggggatcaaggaaaacgatgcagcctgctacatagatagtttcaagagtaggtatacgggcatcaatcagttcatgactgagactgtgaaaaactgtaaacgggatgggttcgtgcagacaatattaggcagacgcagatacctcccagggatcaaggacaacaatccctaccgtaaagcacatgccgagcggcaggcaatcaatacaatcgtgcagggctccgcggcagatattgtgaagatagctacagtaaatatccaaaaacagctggagactttccactcaacttttaagagccacggtcaccgtgagggaatgctgcagtcggatcagacagggcttagtcgtaagcgtaaactgcagggcatgttttgcccaatccgtggcggtttctttatcctgcagctgcacgatgaacttctctacgaggttgcggaagaagatgtggtgcaggtagctcagatcgtgaagaatgagatggagtctgccgtgaaactgagtgtcaaacttaaggtcaaagtgaagatcggtgctagctggggggaactgaaagactttgacgtgtaa

SEQ ID NO: 261761 - DNA, 8180 bp, Artificial Sequence
  derived and/or modified sequence
atgaacgggcaccgttttacatttcggacacgtagcctgctccctctgcagaagggacaacaccgatgtatcacaaagcttttggctcataatgatccatggggaatctttagggcacctagttccagaagatcttatagtgtttctggagtatgccagccagcgataccaaatagtagcctccatatccctcataatgcttgttggctaaaatggaagctttgttccgaaatagctcttccctaccatcacattctgggggagagacgaaagttgtgttccatcaggcggtttgaattcgaggactggcgagaagatgttagatcctgctgccaggctcgtgttctcccccgagggaggaccttgggtctgtggctggccctgatcggccgagaagaatttgctatgaacttgttgcgtagaagcggcaagcggaggaggtccgagtctggcagcgatagcttcagcgggtccggcggagactcctcggcctcgccccagtttctttccggcagcgttctttccccacccccaggcctcggtagatgtctcaaggcagcagccgctggggaatgcaagcccacagtcccagactacgaaagggataaacttctcttagctaattgggggctgcccaaagcggtgttggaaaagtaccattctttcggagtgaagaagatgttcgagtggcaggccgagtgtctactgctggggcaagtgctggagggaaagaacctcgtgtactctgccccaacaagcgccggtaaaacactggtagctgaattgctcatcctgaagcgcgtgctggaaatgcgaaaaaaggccctctttattttaccattcgtatccgtagccaaggagaagaagtactatctgcagtccctgttccaggaggtcgggatcaaggtggacggctacatgggttcgacttccccatcccggcatttctcttctctagatatcgccgtttgtaccatcgaacgcgctaacggcctgatcaaccggctgatcgaagagaacaagatggatctgttgggcatggtggttgtggacgagcttcacatgctgggcgattctcaccggggatacttgctcgaactcctcctgaccaaaatctgttacatcacaagaaaatccgcatcttgtcaagcagacctcgccagtagtctctctaatgctgtacagattgtcggcatgagcgctaccctgcctaacctcgagctggtcgcgtcctggcttaacgccgagttatatcacaccgactttcgccctgtaccactgctcgaaagtgtaaaagtgggcaatagtatctacgactcatccatgaagctggttagggagttcgagccgatgctgcaggtcaagggtgacgaggaccacgttgtttccttgtgttatgagaccatctgcgataatcactcagtattgcttttctgcccttccaagaaatggtgtgaaaagttagccgacattattgccagagaattttataatctgcatcatcaggcagaaggcgagggcctggtgaaaccttctgaatgccctcctgtcattcttgagcagaaggagcttctggaagttatggatcagctgagacgacttcctagcggactggatagcgtgctccaaaaaacagtcccttggggggtggccttccaccacgccggattgacctttgaggagcgggatatcattgagggcgctttcaggcagggactgatacgcgtactggcggctacttcaaccctaagtagtggggtgaatcttcccgcaagacgcgttatcatccgaacgcccattttcggcggacggccactcgacattctgacatacaaacagatggtaggcagggccggacgaaagggagtcgacaccgtggaatcaattctgatctgtaaaaattcagaaaaatccaaaggtatagccctgctccagggatcgctgaagcctgttcggagttgcttgcagcggagggaaggagaggaggtgaccggcagcatgatcagggccattctggaaatcatcgtcggtggcgtggcatccacatcccaggacatgcacacttacgctgcttgcacgtttcttgccgcttcaatgaaggaaggcaaacagggtatacagaggaaccaggagtccgtccagctgggggctatcgaagcttgtgtgatgtggttgctggagaatgaatttattcagtccactgaggccagcgatggaactgagggcaaggtgtaccacccaactcacttggggtcagccactctatcaagctctctttctcccgctgacaccttggatatctttgccgatctgcagcgtgcgatgaaaggcttcgttttggaaaacgacctgcacatcctgtaccttgtcacacccatgtttgaagactggaccactatcgattggtatcgcttcttctgcctgtgggaaaaacttcccaccagcatgaaaagagtagcagagctcgtcggggtggaggagggattcctcgccaggtgtgtgaagggaaaggttgtggctcgtaccgaacgacagcaccggcagatggctatccacaagcggttctttacgtctctggtcctgctggatctgattagcgaggtgccattgagggagatcaaccagaagtatgggtgtaatcggggtcaaatccaatcactgcagcaatctgcagcagtatacgctggcatgatcacagtcttctccaataggttagggtggcacaacatggagcttctcctatctcagttccagaagcgtctgacctttggtatccagagagagctatgcgacctggtgagggtgtctctcctgaatgcgcaacgcgctagggtgctgtacgctagtggctttcacacagtggccgatctggcccgtgccaacatcgtcgaggttgaagtgatcctcaaaaacgccgtgcctttcaagagcgcccgaaaggcagttgatgaagaagaagaggcggtagaggagagacgcaatatgcgcactatctgggtgaccggccgaaagggactgacagaacgggaggccgcagccctgatagtggaggaggcgcgaatgatcctgcagcaggatctggtggagatgggggttcagtggaacccatgcgcattgctgcacagtagtacatgtagccttacccactctgaatcagaggttaaagaacacacctttatttcacaaactaagtcatcctacaagaaactgacttccaaaaacaagtcaaatacaatttttagcgattcttacatcaagcactctcccaacatagtgcaagacctgaataagagccgcgagcacacatcgagttttaattgcaatttccagaatggtaaccaggaacaccagacttgctctatctttagggccagaaagagggcctctctggatatcaacaaagagaaacctggcgcaagtcagaacgaggggaagactagcgataaaaaagttgttcagactttcagccagaagacgaaaaaggcacccctgaatttcaacagcgagaagatgtcaagaagcttccgctcgtggaaacgtagaaagcatctgaagagatcccgcgactccagccccctcaaagactccggtgcctgtcggatccacctgcaggggcagacgctttctaatccctcgctgtgtgaagatccgtttacactcgacgagaagaaaacagagttcaggaatagcgggcctttcgccaagaacgtctccctgtccggaaaggaaaaggacaacaagacgtcttttccgctgcagatcaagcagaactgttcctggaatatcaccttgaccaatgacaacttcgttgagcacatcgtcaccggatcccagtcaaagaatgtcacttgtcaagcgacatccgtggtgtcagagaaaggacgaggcgtagccgttgaggcagagaaaattaacgaagtcttaattcagaacggctcaaagaatcagaacgtgtatatgaagcatcacgatattcacccaataaatcagtacttacgaaagcagtcccatgagcaaacaagcactatcacaaagcagaaaaatattatcgagaggcagatgccttgtgaggctgtgtcctcatacattaatcgcgattccaacgtcacaatcaactgtgagcgcattaaacttaacacggaggaaaacaagccctctcacttccaggcactcggggatgatatctccagaacagtgattccgtctgaagtgcttcccagcgccggagcctttagtaaatcagagggccaacacgagaactttctaaatatcagtagactccaggagaagacaggtacttatactacaaacaaaactaagaataatcatgtctctgatcttggtcttgtcctctgtgatttcgaggactccttctaccttgacacccaatctgaaaaaatcatacaacaaatggctaccgagaacgccaagctcggcgcaaaggatacgaacctggcagccggtatcatgcagaagtccttggtccagcagaacagtatgaacagttttcagaaggaatgtcatatcccgtttcctgcagagcagcatcctttaggggctaccaagattgaccacctggacctcaaaacagttgggactatgaagcagtcttctgacagtcatggcgtcgatatcttgactcctgagtcgcctatcttccattctcccatcctcctggaggagaacgggctttttctcaagaaaaacgaagtaagcgtaactgactcccagctgaactccttcctgcagggctaccagactcaggaaacagttaagccggttatactcctcatcccccaaaagagaacccctactggcgtggaaggcgaatgcctgcccgtgcctgagacctcccttaatatgagtgacagcctgctattcgacagcttttccgacgactatctggtcaaggagcagctgcctgatatgcaaatgaaagaacctcttccatccgaagtgaccagcaatcatttttccgactcactgtgccttcaggaagacctcatcaagaaaagcaacgtgaatgaaaaccaggatacacatcagcaacttacatgcagtaacgatgaatctatcatcttcagcgaaatggatagtgttcaaatggtcgaggctctggataacgtcgacatatttcctgtgcaggaaaaaaaccacaccgtcgtctccccccgtgctctggaacttagtgaccccgtgctcgatgagcaccaccagggcgaccaggacgggggagaccaggacgaaagagccgagaagtcaaagctgacagggacacggcaaaaccatagctttatctggtcaggagcgtccttcgatctctcacccggacttcagcgcattcttgataaagtatcaagtcccctggagaatgaaaaattgaagagcatgaccatcaacttttcttctcttaatcgaaaaaacaccgagctgaacgaagagcaggaggtcattagtaatttggaaaccaagcaggtgcaaggcatttcattttcaagcaataatgaagtgaaatccaaaatcgagatgttagagaacaatgcaaaccatgatgagacatcctcgctgcttcctcgaaaagagtccaatatcgtagacgacaacggactaatcccacccactcctattccgacatctgccagcaagctcacattcccaggaatcctggaaacgcctgtgaacccatggaagactaataacgtgctgcagcctggcgagtcctatctgttcgggtctccgagtgacatcaaaaaccacgatctctcacctggatcacggaatggatttaaggacaactctcccatctcagatacatcttttagcctccagctgagccaggacgggctgcagttgaccccagcgtcatcatcctcagagagcttgtcgattatagacgtggcctccgaccagaatctgtttcagactttcatcaaggaatggcggtgcaagaagcggttctctatatcccttgcttgtgagaagatacgttcattgacatccagcaaaactgctactatcggctccaggttcaagcaagcgtcgtctcctcaggaaattcccattagggacgacggatttcccattaagggatgtgacgacaccctcgtcgtagggcttgctgtttgctggggcggacgggatgcatactatttttccctacaaaaggaacaaaagcattccgagatttctgcctcgttggtgcccccttctttagacccgagcctaaccctaaaggatcggatgtggtaccttcagtcctgcctgcgcaaagagtccgacaaagagtgtagtgtggtgatttatgatttcatccagagctataagatcctgctgctgtcttgcggcattagcctggagcaatcttacgaagaccctaaggttgcctgttggctgttggaccccgattcacaggaaccaaccctgcactcaatcgtaacctccttcctgccacacgaacttcctctgctggagggtatggagacctcacagggcattcagagcctggggctgaatgcaggcagcgagcattcaggacgatacagagcctctgtggagtctatcctgatctttaactctatgaaccagctgaattccctgctccaaaaggaaaatttacaggacgtatttcgcaaagtggaaatgccaagccagtactgcctcgcgttgcttgagctgaatggtattggtttcagcaccgcagagtgtgagagccagaaacacattatgcaggctaagttggacgccattgagacccaggcctaccagttggccggacactccttctcattcacttcttctgatgacatagcagaggtcttgtttcttgagctgaaattacccccaaaccgggaaatgaagaaccaagggtctaaaaaaacccttggctccactagacggggaattgataatggtagaaaattacggctggggcgacagttctccaccagtaaagacgtgctgaacaagcttaaggctctgcatccattgccaggactgatcctggagtggaggcgcataaccaacgccatcacaaaagtggttttccctctgcagcgagaaaagtgtctcaacccttttctggggatggagaggatttaccctgtctcacagtcgcacaccgctacaggcagaattactttcaccgaacctaatattcagaacgtccctcgtgacttcgaaatcaaaatgccgactctggtcggcgagtctccacctagtcaagccgtggggaaaggtctgctacccatgggcagagggaagtacaagaaggggttctccgtgaatccaaggtgtcaggctcagatggaagagcgagccgcagatcgcggaatgcctttctctatctcaatgcggcacgccttcgtgcctttcccagggggatctattctggccgcagactactcgcagctggagctgcgcatcctcgcccacctatcccacgacagaaggcttatccaggtactgaataccggcgctgacgtgttccgcagcattgccgctgaatggaaaatgatcgagcccgagtctgtcggcgatgacctgcggcagcaggcgaagcaaatctgttacggaataatttatggcatgggcgctaagtctctgggcgagcagatgggaataaaagagaatgacgcagcctgttacatcgacagtttcaagtctagatacactggcatcaaccaatttatgaccgaaaccgtcaaaaactgcaagcgggacggatttgtgcagacaatcttgggcaggagacgttatttgcccggaatcaaggacaataatccatatcgcaaggcgcatgccgaaagacaagccatcaataccatcgttcagggttccgccgcagacatagtgaaaattgcaaccgtgaatatccaaaagcagctggaaacattccacagcacgttcaagagccacggtcacagagaaggaatgctccaatctgaccagactggcctgagccgtaagcgtaaactgcaaggcatgttctgccctatacgtgggggattcttcattcttcagttgcacgacgagctcctctacgaggtcgcggaggaggacgtagtgcaagtggctcagatcgtcaagaacgaaatggaaagcgccgtcaaactgtcggtcaaactgaaagtgaaggtaaaaatcggcgcatcatggggggagctgaaggatttcgatgtgta

SEQ ID NO: 261762 - DNA, 6641 bp, Artificial Sequence
  derived and/or modified sequence
atgccaacttccaatagtcagaaggagctgctagaggtgatggatcagctgagacgcctgccaagtggcctggatagtgtgttacaaaagacagtaccatggggcgtggcattccaccacgcaggattaactttcgaagaaagggacatcatcgaaggcgcatttcgccagggcttaatacgggtgctcgcagctactagcactttgtcaagcggcgtcaatctgcccgctagaagggtcattattagaaccccgatcttcggagggcgaccactggacattctgacttataaacaaatggtaggtagggccggtagaaagggtgtcgataccgtgggcgagtcaatcctgatatgcaaaaacagcgagaaaagcaagggcatcgctctactgcagggaagtttgaaacccgtaaggagttgcttacagcgtcgagagggcgaggaggtgaccggcagtatgattagagcgatcctcgagattatcgtgggcggagtggctagcacttcacaggacatgcacacatacgccgcatgcacttttttagcagcctctatgaaagaaggaaagcagggaatccaacgcaaccaggagtctgtgcagcttggtgccatagaagcatgcgtcatgtggctgctggagaacgagtttatacaatcaacagaggctagcgatggcactgaggggaaggtgtaccaccccacacatctgggcagcgcaaccctcagctcttccctcagccccgctgacacgctcgacatcttcgcggacctgcagcgtgccatgaaagggtttgtgctggagaacgaccttcacattctttacctagtgacgccaatgtttgaggactggactaccatagattggtatcgcttcttttgtctgtgggagaagctgccgacaagtatgaaacgcgtcgccgaactggttggggtcgaagaagggttcctggcacgctgtgtgaagggtaaagtggtcgctcgaaccgagcggcagcatcgacaaatggcaatacacaagcgctttttcacaagtctggtgctgctggatctgattagcgaagtgccgttacgggagatcaaccagaagtacgggtgtaacagaggccagatccaatctttgcagcagtccgcggcagtgtacgccggtatgatcaccgttttctccaacaggctgggctggcacaatatggaactcctgctgagccagttccagaagcggctcacttttggaattcagagagagttatgcgacctggtgcgggtctcattattgaatgctcagcgggcacgtgtcttatacgcatccggattccatacggttgctgatctggcccgtgcaaacattgtcgaagtggaagtgatcttgaaaaacgccgtgcccttcaagtcagcacgcaaagcagtagacgaggaagaggaggctgttgaagagcgcagaaatatgcgtaccatttgggtaacagggagaaagggcctcaccgagagggaggctgcagccttgatcgtcgaagaagcaaggatgatcctgcagcaggatctggtagaaatgggagtacaatggaatccctgtgctctcctccacagtagcacatgttctctgacccactccgagagcgaagtgaaagaacacactttcatttcccagacaaagagcagctataagaaacttacgagcaagaataagtctaacactatattctcggactcctatatcaagcatagcccgaacatcgtgcaggatctaaacaagagtcgggaacataccagcagctttaactgcaactttcaaaacggcaaccaagaacatcagacgtgcagcatctttagagcccgaaagagggctagccttgacatcaacaaggagaagcctggcgctagccagaacgagggtaagacgtccgataaaaaagtggtccagacattcagtcaaaaaacaaagaaagctcctttgaactttaatagcgagaagatgtcaaggagttttcggtcttggaaaagacggaagcatctcaaaaggtctcgcgactcttctcccctcaaagatagcggagcgtgccgcattcatctgcagggccagaccctgtccaatcccagcctctgtgaagatcctttcacactggacgaaaaaaaaacagaatttcgcaatagcgggccatttgctaagaatgtgagcttgtccggcaaggagaaggacaataaaactagttttcctctgcagataaaacagaattgtagctggaatataacgttgaccaacgacaatttcgttgagcatattgtgacgggctcgcaatccaagaatgtgacatgccaggcaaccagtgtcgtgtcagagaagggacgaggagtcgcagttgaggccgagaagatcaatgaggtgctgatccagaatggttcaaagaatcagaacgtgtatatgaagcatcacgatatacatcccattaatcaatacctgcgcaagcagtctcatgagcagacttccaccatcacaaaacaaaagaacataatcgaacgtcaaatgccctgtgaggcggtctcttcatacattaatcgggattccaatgtgaccatcaactgtgagcggattaagttgaatacggaagaaaacaagccctcacatttccaagcgctgggcgacgatatctctagaactgtgatcccttctgaggtacttccttccgccggagctttctctaaaagtgaaggccagcatgaaaactttctgaacattagtagactacaggaaaagacgggtacttatacaaccaataagacgaagaataaccatgtcagtgacctcggcctagtcctgtgcgacttcgaagattcgttctacctggacactcaatctgaaaagatcattcagcagatggcaacagagaatgctaaactgggagctaaagacaccaacctggccgctggtattatgcagaagagcctcgtgcagcagaattcaatgaattcgtttcaaaaagagtgtcacattcctttcccagcggagcagcacccattgggggctacgaagatcgaccacctcgacttgaaaacagtgggcacaatgaagcagtcttctgactcacacggtgtggatattttgacacccgaaagcccaatttttcattctcctatattgctggaagaaaacggcctcttcctcaaaaaaaacgaagtgagcgtaacagactcacagctgaacagctttctgcagggctaccagacacaggaaaccgttaagcctgtgattctgttgatcccccagaaacggactcccactggcgtagagggggaatgtcttccagtaccggaaaccagtctgaatatgagtgactctctgctcttcgacagcttctctgatgattacctcgttaaggagcagctgcccgatatgcaaatgaaagagcctctaccctctgaagttacttccaaccatttcagtgattccctgtgcttacaggaagatttgatcaaaaaatccaatgtgaacgaaaatcaggacacccaccagcagctaacctgcagtaatgatgaatcgatcatatttagtgaaatggattcagtgcagatggtagaagccctggataatgtggatatatttcccgtccaggaaaagaaccatacagtcgtttccccgagagcactcgagctctccgatcccgtcctcgatgagcaccaccaaggggaccaggacgggggagaccaggacgaaagggcagaaaagtcgaagctgaccggtaccaggcagaaccactccttcatatggtcaggggcttcttttgatctgtcccccggtcttcagcgaatcctggacaaagtgagttcccccttggagaatgaaaagctgaaaagtatgaccattaacttttcatcactcaatcgaaagaatactgaacttaacgaggagcaggaagtgatcagcaacttggagactaaacaggtacaggggatcagtttcagttcaaacaacgaggtaaaatcaaaaattgagatgctggaaaacaacgccaatcacgatgaaacaagctctctgttgcccagaaaggagagtaatatcgtcgacgataatgggcttataccacctaccccaattcccacctctgcctccaaactcacattccccggtattctggaaaccccggtgaacccctggaagaccaacaacgtcttgcagccgggtgagagttacctgttcgggagcccgtccgatatcaagaaccacgatctgtctcctggtagcaggaatggctttaaggacaactcaccgatctcagatacaagcttctccctgcagctgagccaggatggactgcagctgactcccgcttcctcttcttctgaaagcctttcgattatagacgtggccagtgaccaaaacttatttcagacattcattaaagaatggcgatgcaaaaagcgcttctctatttccctggcctgtgagaaaatcagatccctgacgtcaagcaaaacagccactatcggcagccggttcaagcaggcctcttcacctcaagagatcccaatcagggatgacgggttcccaatcaagggctgtgacgacactctagtggttgggcttgcggtgtgttgggggggacgggatgcctattactttagcctgcagaaggagcagaaacattctgaaatttccgcatctctcgtccccccttccctcgaccctagcttgaccctgaaagacaggatgtggtatttgcaaagttgtctcagaaaggagagcgacaaggagtgctccgttgtgatctacgatttcatccagagctacaagatattactgctatcttgcggtatttcattggagcagtcttacgaagaccctaaggtcgcatgttggctcttggatccagacagccaagagcccactctgcactcaattgtaacaagttttctaccacacgaactccctctgttggagggcatggaaaccagtcaagggattcaatctctgggactaaacgccggatctgagcactccggacgctaccgggcatctgttgagtccatcttgattttcaactccatgaaccaactgaacagcctgcttcaaaaagagaatctgcaagacgtgtttcgcaaggtggaaatgccttcgcagtattgtctggcactactcgagctgaacggtataggattttccacagctgaatgcgagagccagaaacatatcatgcaagctaagcttgatgctatagagactcaagcctaccagcttgcgggacacagcttctcattcacgagctccgacgatatcgcagaagtcctgttcctggagttaaagctgcctccaaacagagagatgaagaaccagggaagcaagaaaaccttaggttcgacaaggagagggattgataacgggaggaagctaaggctcggaagacagttttccacctctaaggatgtccttaacaaactcaaagctctgcatccccttccaggactgatactggagtggaggaggataactaacgctataacaaaggtggtgtttccgcttcaaagggaaaagtgccttaatcctttcctcggcatggaaagaatttatccagtgtctcagtcccacacagcaactggaagaattacgtttacagagcccaacatccagaatgtcccaagagatttcgagataaagatgcctaccctcgtaggtgaaagtccccctagtcaggccgtggggaagggactgctgcccatggggcgtggcaagtacaaaaagggatttagcgtcaaccccagatgccaggctcagatggaagaacgggcagccgacaggggcatgccgttttctattagtatgagacatgcttttgtgccgttcccagggggatccatactagccgctgattatagtcaacttgaacttagaatcctggcacacctcagtcacgacagacgccttatccaggtgctcaatacaggggcagacgtgtttcgcagtatcgccgcagaatggaagatgattgaacccgagagcgtcggggatgatctgcgccagcaggcaaagcagatttgttatggaatcatttacggcatgggggcaaaatcgttgggtgagcagatgggtattaaggagaacgacgccgcatgctatatcgactcattcaaatctaggtacactgggatcaatcaattcatgaccgagactgtgaagaactgcaaacgggacggcttcgtccagaccattttgggtcgaagacgctatctccccggtataaaagacaataatccataccgcaaagctcatgccgagcggcaagccattaacaccatagttcaaggatccgccgcagatattgtcaagatagcgaccgtgaacatccagaaacaactcgagacctttcatagcacctttaaatctcatggccaccgcgagggaatgctgcagtctgatcaaacaggactctcacgaaagcggaagcttcagggcatgttttgccctattcgcggtggcttctttatactccagctgcacgacgagctgttgtatgaggtggccgaagaggacgttgttcaggtggcccagattgtgaagaacgaaatggaatccgccgtgaaactcagtgtcaagctgaaggtgaaggttaaaattggggcatcttggggcgagcttaaggacttcgatgtgta

SEQ ID NO: 261763 - DNA, 7773 bp, Artificial Sequence
  derived and/or modified sequence
atgaacctgctgagaagaagcggcaagagaagaagaagcgagagcggcagcgacagcttcagcggcagcggcggcgacagcagcgccagcccccagttcctgagcggcagcgtgctgagccccccccccggcctgggcagatgcctgaaggccgccgccgccggcgagtgcaagcccaccgtgcccgactacgagagagacaagctgctgctggccaactggggcctgcccaaggccgtgctggagaagtaccacagcttcggcgtgaagaagatgttcgagtggcaggccgagtgcctgctgctgggccaggtgctggagggcaagaacctggtgtacagcgcccccaccagcgccggcaagaccctggtggccgagctgctgatcctgaagagagtgctggagatgagaaagaaggccctgttcatcctgcccttcgtgagcgtggccaaggagaagaagtactacctgcagagcctgttccaggaggtgggcatcaaggtggacggctacatgggcagcaccagccccagcagacacttcagcagcctggacatcgccgtgtgcaccatcgagagagccaacggcctgatcaacagactgatcgaggagaacaagatggacctgctgggcatggtggtggtggacgagctgcacatgctgggcgacagccacagaggctacctgctggagctgctgctgaccaagatctgctacatcaccagaaagagcgccagctgccaggccgacctggccagcagcctgagcaacgccgtgcagatcgtgggcatgagcgccaccctgcccaacctggagctggtggccagctggctgaacgccgagctgtaccacaccgacttcagacccgtgcccctgctggagagcgtgaaggtgggcaacagcatctacgacagcagcatgaagctggtgagagagttcgagcccatgctgcaggtgaagggcgacgaggaccacgtggtgagcctgtgctacgagaccatctgcgacaaccacagcgtgctgctgttctgccccagcaagaagtggtgcgagaagctggccgacatcatcgccagagagttctacaacctgcaccaccaggccgagggcctggtgaagcccagcgagtgcccccccgtgatcctggagcagaaggagctgctggaggtgatggaccagctgagaagactgcccagcggcctggacagcgtgctgcagaagaccgtgccctggggcgtggccttccaccacgccggcctgaccttcgaggagagagacatcatcgagggcgccttcagacagggcctgatcagagtgctggccgccaccagcaccctgagcagcggcgtgaacctgcccgccagaagagtgatcatcagaacccccatcttcggcggcagacccctggacatcctgacctacaagcagatggtgggcagagccggcagaaagggcgtggacaccgtgggcgagagcatcctgatctgcaagaacagcgagaagagcaagggcatcgccctgctgcagggcagcctgaagcccgtgagaagctgcctgcagagaagagagggcgaggaggtgaccggcagcatgatcagagccatcctggagatcatcgtgggcggcgtggccagcaccagccaggacatgcacacctacgccgcctgcaccttcctggccgccagcatgaaggagggcaagcagggcatccagagaaaccaggagagcgtgcagctgggcgccatcgaggcctgcgtgatgtggctgctggagaacgagttcatccagagcaccgaggccagcgacggcaccgagggcaaggtgtaccaccccacccacctgggcagcgccaccctgagcagcagcctgagccccgccgacaccctggacatcttcgccgacctgcagagagccatgaagggcttcgtgctggagaacgacctgcacatcctgtacctggtgacccccatgttcgaggactggaccaccatcgactggtacagattcttctgcctgtgggagaagctgcccaccagcatgaagagagtggccgagctggtgggcgtggaggagggcttcctggccagatgcgtgaagggcaaggtggtggccagaaccgagagacagcacagacagatggccatccacaagagattcttcaccagcctggtgctgctggacctgatcagcgaggtgcccctgagagagatcaaccagaagtacggctgcaacagaggccagatccagagcctgcagcagagcgccgccgtgtacgccggcatgatcaccgtgttcagcaacagactgggctggcacaacatggagctgctgctgagccagttccagaagagactgaccttcggcatccagagagagctgtgcgacctggtgagagtgagcctgctgaacgcccagagagccagagtgctgtacgccagcggcttccacaccgtggccgacctggccagagccaacatcgtggaggtggaggtgatcctgaagaacgccgtgcccttcaagagcgccagaaaggccgtggacgaggaggaggaggccgtggaggagagaagaaacatgagaaccatctgggtgaccggcagaaagggcctgaccgagagagaggccgccgccctgatcgtggaggaggccagaatgatcctgcagcaggacctggtggagatgggcgtgcagtggaacccctgcgccctgctgcacagcagcacctgcagcctgacccacagcgagagcgaggtgaaggagcacaccttcatcagccagaccaagagcagctacaagaagctgaccagcaagaacaagagcaacaccatcttcagcgacagctacatcaagcacagccccaacatcgtgcaggacctgaacaagagcagagagcacaccagcagcttcaactgcaacttccagaacggcaaccaggagcaccagacctgcagcatcttcagagccagaaagagagccagcctggacatcaacaaggagaagcccggcgccagccagaacgagggcaagaccagcgacaagaaggtggtgcagaccttcagccagaagaccaagaaggcccccctgaacttcaacagcgagaagatgagcagaagcttcagaagctggaagagaagaaagcacctgaagagaagcagagacagcagccccctgaaggacagcggcgcctgcagaatccacctgcagggccagaccctgagcaaccccagcctgtgcgaggaccccttcaccctggacgagaagaagaccgagttcagaaacagcggccccttcgccaagaacgtgagcctgagcggcaaggagaaggacaacaagaccagcttccccctgcagatcaagcagaactgcagctggaacatcaccctgaccaacgacaacttcgtggagcacatcgtgaccggcagccagagcaagaacgtgacctgccaggccaccagcgtggtgagcgagaagggcagaggcgtggccgtggaggccgagaagatcaacgaggtgctgatccagaacggcagcaagaaccagaacgtgtacatgaagcaccacgacatccaccccatcaaccagtacctgagaaagcagagccacgagcagaccagcaccatcaccaagcagaagaacatcatcgagagacagatgccctgcgaggccgtgagcagctacatcaacagagacagcaacgtgaccatcaactgcgagagaatcaagctgaacaccgaggagaacaagcccagccacttccaggccctgggcgacgacatcagcagaaccgtgatccccagcgaggtgctgcccagcgccggcgccttcagcaagagcgagggccagcacgagaacttcctgaacatcagcagactgcaggagaagaccggcacctacaccaccaacaagaccaagaacaaccacgtgagcgacctgggcctggtgctgtgcgacttcgaggacagcttctacctggacacccagagcgagaagatcatccagcagatggccaccgagaacgccaagctgggcgccaaggacaccaacctggccgccggcatcatgcagaagagcctggtgcagcagaacagcatgaacagcttccagaaggagtgccacatccccttccccgccgagcagcaccccctgggcgccaccaagatcgaccacctggacctgaagaccgtgggcaccatgaagcagagcagcgacagccacggcgtggacatcctgacccccgagagccccatcttccacagccccatcctgctggaggagaacggcctgttcctgaagaagaacgaggtgagcgtgaccgacagccagctgaacagcttcctgcagggctaccagacccaggagaccgtgaagcccgtgatcctgctgatcccccagaagagaacccccaccggcgtggagggcgagtgcctgcccgtgcccgagaccagcctgaacatgagcgacagcctgctgttcgacagcttcagcgacgactacctggtgaaggagcagctgcccgacatgcagatgaaggagcccctgcccagcgaggtgaccagcaaccacttcagcgacagcctgtgcctgcaggaggacctgatcaagaagagcaacgtgaacgagaaccaggacacccaccagcagctgacctgcagcaacgacgagagcatcatcttcagcgagatggacagcgtgcagatggtggaggccctggacaacgtggacatcttccccgtgcaggagaagaaccacaccgtggtgagccccagagccctggagctgagcgaccccgtgctggacgagcaccaccagggcgaccaggacggcggcgaccaggacgagagagccgagaagagcaagctgaccggcaccagacagaaccacagcttcatctggagcggcgccagcttcgacctgagccccggcctgcagagaatcctggacaaggtgagcagccccctggagaacgagaagctgaagagcatgaccatcaacttcagcagcctgaacagaaagaacaccgagctgaacgaggagcaggaggtgatcagcaacctggagaccaagcaggtgcagggcatcagcttcagcagcaacaacgaggtgaagagcaagatcgagatgctggagaacaacgccaaccacgacgagaccagcagcctgctgcccagaaaggagagcaacatcgtggacgacaacggcctgatcccccccacccccatccccaccagcgccagcaagctgaccttccccggcatcctggagacccccgtgaacccctggaagaccaacaacgtgctgcagcccggcgagagctacctgttcggcagccccagcgacatcaagaaccacgacctgagccccggcagcagaaacggcttcaaggacaacagccccatcagcgacaccagcttcagcctgcagctgagccaggacggcctgcagctgacccccgccagcagcagcagcgagagcctgagcatcatcgacgtggccagcgaccagaacctgttccagaccttcatcaaggagtggagatgcaagaagagattcagcatcagcctggcctgcgagaagatcagaagcctgaccagcagcaagaccgccaccatcggcagcagattcaagcaggccagcagcccccaggagatccccatcagagacgacggcttccccatcaagggctgcgacgacaccctggtggtgggcctggccgtgtgctggggcggcagagacgcctactacttcagcctgcagaaggagcagaagcacagcgagatcagcgccagcctggtgccccccagcctggaccccagcctgaccctgaaggacagaatgtggtacctgcagagctgcctgagaaaggagagcgacaaggagtgcagcgtggtgatctacgacttcatccagagctacaagatcctgctgctgagctgcggcatcagcctggagcagagctacgaggaccccaaggtggcctgctggctgctggaccccgacagccaggagcccaccctgcacagcatcgtgaccagcttcctgccccacgagctgcccctgctggagggcatggagaccagccagggcatccagagcctgggcctgaacgccggcagcgagcacagcggcagatacagagccagcgtggagagcatcctgatcttcaacagcatgaaccagctgaacagcctgctgcagaaggagaacctgcaggacgtgttcagaaaggtggagatgcccagccagtactgcctggccctgctggagctgaacggcatcggcttcagcaccgccgagtgcgagagccagaagcacatcatgcaggccaagctggacgccatcgagacccaggcctaccagctggccggccacagcttcagcttcaccagcagcgacgacatcgccgaggtgctgttcctggagctgaagctgccccccaacagagagatgaagaaccagggcagcaagaagaccctgggcagcaccagaagaggcatcgacaacggcagaaagctgagactgggcagacagttcagcaccagcaaggacgtgctgaacaagctgaaggccctgcaccccctgcccggcctgatcctggagtggagaagaatcaccaacgccatcaccaaggtggtgttccccctgcagagagagaagtgcctgaaccccttcctgggcatggagagaatctaccccgtgagccagagccacaccgccaccggcagaatcaccttcaccgagcccaacatccagaacgtgcccagagacttcgagatcaagatgcccaccctggtgggcgagagcccccccagccaggccgtgggcaagggcctgctgcccatgggcagaggcaagtacaagaagggcttcagcgtgaaccccagatgccaggcccagatggaggagagagccgccgacagaggcatgcccttcagcatcagcatgagacacgccttcgtgcccttccccggcggcagcatcctggccgccgactacagccagctggagctgagaatcctggcccacctgagccacgacagaagactgatccaggtgctgaacaccggcgccgacgtgttcagaagcatcgccgccgagtggaagatgatcgagcccgagagcgtgggcgacgacctgagacagcaggccaagcagatctgctacggcatcatctacggcatgggcgccaagagcctgggcgagcagatgggcatcaaggagaacgacgccgcctgctacatcgacagcttcaagagcagatacaccggcatcaaccagttcatgaccgagaccgtgaagaactgcaagagagacggcttcgtgcagaccatcctgggcagaagaagatacctgcccggcatcaaggacaacaacccctacagaaaggcccacgccgagagacaggccatcaacaccatcgtgcagggcagcgccgccgacatcgtgaagatcgccaccgtgaacatccagaagcagctggagaccttccacagcaccttcaagagccacggccacagagagggcatgctgcagagcgaccagaccggcctgagcagaaagagaaagctgcagggcatgttctgccccatcagaggcggcttcttcatcctgcagctgcacgacgagctgctgtacgaggtggccgaggaggacgtggtgcaggtggcccagatcgtgaagaacgagatggagagcgccgtgaagctgagcgtgaagctgaaggtgaaggtgaagatcggcgccagctggggcgagctgaaggacttcgacgtgtag

SEQ ID NO: 261764 - DNA, 8181 bp, Artificial Sequence
  derived and/or modified sequence
atgaacggccacagattcaccttcagaaccagaagcctgctgcccctgcagaagggccagcacagatgcatcaccaagctgctggcccacaacgacccctggggcatcttcagagcccccagcagcagaagaagctacagcgtgagcggcgtgtgccagcccgccatccccaacagcagcctgcacatcccccacaacgcctgctggctgaagtggaagctgtgcagcgagatcgccctgccctaccaccacatcctgggcgagagaagaaagctgtgcagcatcagaagattcgagttcgaggactggagagaggacgtgagaagctgctgccaggccagagtgctgcccagaggcagaaccctgggcctgtggctggccctgatcggcagagaggagttcgccatgaacctgctgagaagaagcggcaagagaagaagaagcgagagcggcagcgacagcttcagcggcagcggcggcgacagcagcgccagcccccagttcctgagcggcagcgtgctgagccccccccccggcctgggcagatgcctgaaggccgccgccgccggcgagtgcaagcccaccgtgcccgactacgagagagacaagctgctgctggccaactggggcctgcccaaggccgtgctggagaagtaccacagcttcggcgtgaagaagatgttcgagtggcaggccgagtgcctgctgctgggccaggtgctggagggcaagaacctggtgtacagcgcccccaccagcgccggcaagaccctggtggccgagctgctgatcctgaagagagtgctggagatgagaaagaaggccctgttcatcctgcccttcgtgagcgtggccaaggagaagaagtactacctgcagagcctgttccaggaggtgggcatcaaggtggacggctacatgggcagcaccagccccagcagacacttcagcagcctggacatcgccgtgtgcaccatcgagagagccaacggcctgatcaacagactgatcgaggagaacaagatggacctgctgggcatggtggtggtggacgagctgcacatgctgggcgacagccacagaggctacctgctggagctgctgctgaccaagatctgctacatcaccagaaagagcgccagctgccaggccgacctggccagcagcctgagcaacgccgtgcagatcgtgggcatgagcgccaccctgcccaacctggagctggtggccagctggctgaacgccgagctgtaccacaccgacttcagacccgtgcccctgctggagagcgtgaaggtgggcaacagcatctacgacagcagcatgaagctggtgagagagttcgagcccatgctgcaggtgaagggcgacgaggaccacgtggtgagcctgtgctacgagaccatctgcgacaaccacagcgtgctgctgttctgccccagcaagaagtggtgcgagaagctggccgacatcatcgccagagagttctacaacctgcaccaccaggccgagggcgagggcctggtgaagcccagcgagtgcccccccgtgatcctggagcagaaggagctgctggaggtgatggaccagctgagaagactgcccagcggcctggacagcgtgctgcagaagaccgtgccctggggcgtggccttccaccacgccggcctgaccttcgaggagagagacatcatcgagggcgccttcagacagggcctgatcagagtgctggccgccaccagcaccctgagcagcggcgtgaacctgcccgccagaagagtgatcatcagaacccccatcttcggcggcagacccctggacatcctgacctacaagcagatggtgggcagagccggcagaaagggcgtggacaccgtggagagcatcctgatctgcaagaacagcgagaagagcaagggcatcgccctgctgcagggcagcctgaagcccgtgagaagctgcctgcagagaagagagggcgaggaggtgaccggcagcatgatcagagccatcctggagatcatcgtgggcggcgtggccagcaccagccaggacatgcacacctacgccgcctgcaccttcctggccgccagcatgaaggagggcaagcagggcatccagagaaaccaggagagcgtgcagctgggcgccatcgaggcctgcgtgatgtggctgctggagaacgagttcatccagagcaccgaggccagcgacggcaccgagggcaaggtgtaccaccccacccacctgggcagcgccaccctgagcagcagcctgagccccgccgacaccctggacatcttcgccgacctgcagagagccatgaagggcttcgtgctggagaacgacctgcacatcctgtacctggtgacccccatgttcgaggactggaccaccatcgactggtacagattcttctgcctgtgggagaagctgcccaccagcatgaagagagtggccgagctggtgggcgtggaggagggcttcctggccagatgcgtgaagggcaaggtggtggccagaaccgagagacagcacagacagatggccatccacaagagattcttcaccagcctggtgctgctggacctgatcagcgaggtgcccctgagagagatcaaccagaagtacggctgcaacagaggccagatccagagcctgcagcagagcgccgccgtgtacgccggcatgatcaccgtgttcagcaacagactgggctggcacaacatggagctgctgctgagccagttccagaagagactgaccttcggcatccagagagagctgtgcgacctggtgagagtgagcctgctgaacgcccagagagccagagtgctgtacgccagcggcttccacaccgtggccgacctggccagagccaacatcgtggaggtggaggtgatcctgaagaacgccgtgcccttcaagagcgccagaaaggccgtggacgaggaggaggaggccgtggaggagagaagaaacatgagaaccatctgggtgaccggcagaaagggcctgaccgagagagaggccgccgccctgatcgtggaggaggccagaatgatcctgcagcaggacctggtggagatgggcgtgcagtggaacccctgcgccctgctgcacagcagcacctgcagcctgacccacagcgagagcgaggtgaaggagcacaccttcatcagccagaccaagagcagctacaagaagctgaccagcaagaacaagagcaacaccatcttcagcgacagctacatcaagcacagccccaacatcgtgcaggacctgaacaagagcagagagcacaccagcagcttcaactgcaacttccagaacggcaaccaggagcaccagacctgcagcatcttcagagccagaaagagagccagcctggacatcaacaaggagaagcccggcgccagccagaacgagggcaagaccagcgacaagaaggtggtgcagaccttcagccagaagaccaagaaggcccccctgaacttcaacagcgagaagatgagcagaagcttcagaagctggaagagaagaaagcacctgaagagaagcagagacagcagccccctgaaggacagcggcgcctgcagaatccacctgcagggccagaccctgagcaaccccagcctgtgcgaggaccccttcaccctggacgagaagaagaccgagttcagaaacagcggccccttcgccaagaacgtgagcctgagcggcaaggagaaggacaacaagaccagcttccccctgcagatcaagcagaactgcagctggaacatcaccctgaccaacgacaacttcgtggagcacatcgtgaccggcagccagagcaagaacgtgacctgccaggccaccagcgtggtgagcgagaagggcagaggcgtggccgtggaggccgagaagatcaacgaggtgctgatccagaacggcagcaagaaccagaacgtgtacatgaagcaccacgacatccaccccatcaaccagtacctgagaaagcagagccacgagcagaccagcaccatcaccaagcagaagaacatcatcgagagacagatgccctgcgaggccgtgagcagctacatcaacagagacagcaacgtgaccatcaactgcgagagaatcaagctgaacaccgaggagaacaagcccagccacttccaggccctgggcgacgacatcagcagaaccgtgatccccagcgaggtgctgcccagcgccggcgccttcagcaagagcgagggccagcacgagaacttcctgaacatcagcagactgcaggagaagaccggcacctacaccaccaacaagaccaagaacaaccacgtgagcgacctgggcctggtgctgtgcgacttcgaggacagcttctacctggacacccagagcgagaagatcatccagcagatggccaccgagaacgccaagctgggcgccaaggacaccaacctggccgccggcatcatgcagaagagcctggtgcagcagaacagcatgaacagcttccagaaggagtgccacatccccttccccgccgagcagcaccccctgggcgccaccaagatcgaccacctggacctgaagaccgtgggcaccatgaagcagagcagcgacagccacggcgtggacatcctgacccccgagagccccatcttccacagccccatcctgctggaggagaacggcctgttcctgaagaagaacgaggtgagcgtgaccgacagccagctgaacagcttcctgcagggctaccagacccaggagaccgtgaagcccgtgatcctgctgatcccccagaagagaacccccaccggcgtggagggcgagtgcctgcccgtgcccgagaccagcctgaacatgagcgacagcctgctgttcgacagcttcagcgacgactacctggtgaaggagcagctgcccgacatgcagatgaaggagcccctgcccagcgaggtgaccagcaaccacttcagcgacagcctgtgcctgcaggaggacctgatcaagaagagcaacgtgaacgagaaccaggacacccaccagcagctgacctgcagcaacgacgagagcatcatcttcagcgagatggacagcgtgcagatggtggaggccctggacaacgtggacatcttccccgtgcaggagaagaaccacaccgtggtgagccccagagccctggagctgagcgaccccgtgctggacgagcaccaccagggcgaccaggacggcggcgaccaggacgagagagccgagaagagcaagctgaccggcaccagacagaaccacagcttcatctggagcggcgccagcttcgacctgagccccggcctgcagagaatcctggacaaggtgagcagccccctggagaacgagaagctgaagagcatgaccatcaacttcagcagcctgaacagaaagaacaccgagctgaacgaggagcaggaggtgatcagcaacctggagaccaagcaggtgcagggcatcagcttcagcagcaacaacgaggtgaagagcaagatcgagatgctggagaacaacgccaaccacgacgagaccagcagcctgctgcccagaaaggagagcaacatcgtggacgacaacggcctgatcccccccacccccatccccaccagcgccagcaagctgaccttccccggcatcctggagacccccgtgaacccctggaagaccaacaacgtgctgcagcccggcgagagctacctgttcggcagccccagcgacatcaagaaccacgacctgagccccggcagcagaaacggcttcaaggacaacagccccatcagcgacaccagcttcagcctgcagctgagccaggacggcctgcagctgacccccgccagcagcagcagcgagagcctgagcatcatcgacgtggccagcgaccagaacctgttccagaccttcatcaaggagtggagatgcaagaagagattcagcatcagcctggcctgcgagaagatcagaagcctgaccagcagcaagaccgccaccatcggcagcagattcaagcaggccagcagcccccaggagatccccatcagagacgacggcttccccatcaagggctgcgacgacaccctggtggtgggcctggccgtgtgctggggcggcagagacgcctactacttcagcctgcagaaggagcagaagcacagcgagatcagcgccagcctggtgccccccagcctggaccccagcctgaccctgaaggacagaatgtggtacctgcagagctgcctgagaaaggagagcgacaaggagtgcagcgtggtgatctacgacttcatccagagctacaagatcctgctgctgagctgcggcatcagcctggagcagagctacgaggaccccaaggtggcctgctggctgctggaccccgacagccaggagcccaccctgcacagcatcgtgaccagcttcctgccccacgagctgcccctgctggagggcatggagaccagccagggcatccagagcctgggcctgaacgccggcagcgagcacagcggcagatacagagccagcgtggagagcatcctgatcttcaacagcatgaaccagctgaacagcctgctgcagaaggagaacctgcaggacgtgttcagaaaggtggagatgcccagccagtactgcctggccctgctggagctgaacggcatcggcttcagcaccgccgagtgcgagagccagaagcacatcatgcaggccaagctggacgccatcgagacccaggcctaccagctggccggccacagcttcagcttcaccagcagcgacgacatcgccgaggtgctgttcctggagctgaagctgccccccaacagagagatgaagaaccagggcagcaagaagaccctgggcagcaccagaagaggcatcgacaacggcagaaagctgagactgggcagacagttcagcaccagcaaggacgtgctgaacaagctgaaggccctgcaccccctgcccggcctgatcctggagtggagaagaatcaccaacgccatcaccaaggtggtgttccccctgcagagagagaagtgcctgaaccccttcctgggcatggagagaatctaccccgtgagccagagccacaccgccaccggcagaatcaccttcaccgagcccaacatccagaacgtgcccagagacttcgagatcaagatgcccaccctggtgggcgagagcccccccagccaggccgtgggcaagggcctgctgcccatgggcagaggcaagtacaagaagggcttcagcgtgaaccccagatgccaggcccagatggaggagagagccgccgacagaggcatgcccttcagcatcagcatgagacacgccttcgtgcccttccccggcggcagcatcctggccgccgactacagccagctggagctgagaatcctggcccacctgagccacgacagaagactgatccaggtgctgaacaccggcgccgacgtgttcagaagcatcgccgccgagtggaagatgatcgagcccgagagcgtgggcgacgacctgagacagcaggccaagcagatctgctacggcatcatctacggcatgggcgccaagagcctgggcgagcagatgggcatcaaggagaacgacgccgcctgctacatcgacagcttcaagagcagatacaccggcatcaaccagttcatgaccgagaccgtgaagaactgcaagagagacggcttcgtgcagaccatcctgggcagaagaagatacctgcccggcatcaaggacaacaacccctacagaaaggcccacgccgagagacaggccatcaacaccatcgtgcagggcagcgccgccgacatcgtgaagatcgccaccgtgaacatccagaagcagctggagaccttccacagcaccttcaagagccacggccacagagagggcatgctgcagagcgaccagaccggcctgagcagaaagagaaagctgcagggcatgttctgccccatcagaggcggcttcttcatcctgcagctgcacgacgagctgctgtacgaggtggccgaggaggacgtggtgcaggtggcccagatcgtgaagaacgagatggagagcgccgtgaagctgagcgtgaagctgaaggtgaaggtgaagatcggcgccagctggggcgagctgaaggacttcgacgtgtag

SEQ ID NO: 261765 - DNA, 6642 bp, Artificial Sequence
  derived and/or modified sequence
atgcccaccagcaacagccagaaggagctgctggaggtgatggaccagctgagaagactgcccagcggcctggacagcgtgctgcagaagaccgtgccctggggcgtggccttccaccacgccggcctgaccttcgaggagagagacatcatcgagggcgccttcagacagggcctgatcagagtgctggccgccaccagcaccctgagcagcggcgtgaacctgcccgccagaagagtgatcatcagaacccccatcttcggcggcagacccctggacatcctgacctacaagcagatggtgggcagagccggcagaaagggcgtggacaccgtgggcgagagcatcctgatctgcaagaacagcgagaagagcaagggcatcgccctgctgcagggcagcctgaagcccgtgagaagctgcctgcagagaagagagggcgaggaggtgaccggcagcatgatcagagccatcctggagatcatcgtgggcggcgtggccagcaccagccaggacatgcacacctacgccgcctgcaccttcctggccgccagcatgaaggagggcaagcagggcatccagagaaaccaggagagcgtgcagctgggcgccatcgaggcctgcgtgatgtggctgctggagaacgagttcatccagagcaccgaggccagcgacggcaccgagggcaaggtgtaccaccccacccacctgggcagcgccaccctgagcagcagcctgagccccgccgacaccctggacatcttcgccgacctgcagagagccatgaagggcttcgtgctggagaacgacctgcacatcctgtacctggtgacccccatgttcgaggactggaccaccatcgactggtacagattcttctgcctgtgggagaagctgcccaccagcatgaagagagtggccgagctggtgggcgtggaggagggcttcctggccagatgcgtgaagggcaaggtggtggccagaaccgagagacagcacagacagatggccatccacaagagattcttcaccagcctggtgctgctggacctgatcagcgaggtgcccctgagagagatcaaccagaagtacggctgcaacagaggccagatccagagcctgcagcagagcgccgccgtgtacgccggcatgatcaccgtgttcagcaacagactgggctggcacaacatggagctgctgctgagccagttccagaagagactgaccttcggcatccagagagagctgtgcgacctggtgagagtgagcctgctgaacgcccagagagccagagtgctgtacgccagcggcttccacaccgtggccgacctggccagagccaacatcgtggaggtggaggtgatcctgaagaacgccgtgcccttcaagagcgccagaaaggccgtggacgaggaggaggaggccgtggaggagagaagaaacatgagaaccatctgggtgaccggcagaaagggcctgaccgagagagaggccgccgccctgatcgtggaggaggccagaatgatcctgcagcaggacctggtggagatgggcgtgcagtggaacccctgcgccctgctgcacagcagcacctgcagcctgacccacagcgagagcgaggtgaaggagcacaccttcatcagccagaccaagagcagctacaagaagctgaccagcaagaacaagagcaacaccatcttcagcgacagctacatcaagcacagccccaacatcgtgcaggacctgaacaagagcagagagcacaccagcagcttcaactgcaacttccagaacggcaaccaggagcaccagacctgcagcatcttcagagccagaaagagagccagcctggacatcaacaaggagaagcccggcgccagccagaacgagggcaagaccagcgacaagaaggtggtgcagaccttcagccagaagaccaagaaggcccccctgaacttcaacagcgagaagatgagcagaagcttcagaagctggaagagaagaaagcacctgaagagaagcagagacagcagccccctgaaggacagcggcgcctgcagaatccacctgcagggccagaccctgagcaaccccagcctgtgcgaggaccccttcaccctggacgagaagaagaccgagttcagaaacagcggccccttcgccaagaacgtgagcctgagcggcaaggagaaggacaacaagaccagcttccccctgcagatcaagcagaactgcagctggaacatcaccctgaccaacgacaacttcgtggagcacatcgtgaccggcagccagagcaagaacgtgacctgccaggccaccagcgtggtgagcgagaagggcagaggcgtggccgtggaggccgagaagatcaacgaggtgctgatccagaacggcagcaagaaccagaacgtgtacatgaagcaccacgacatccaccccatcaaccagtacctgagaaagcagagccacgagcagaccagcaccatcaccaagcagaagaacatcatcgagagacagatgccctgcgaggccgtgagcagctacatcaacagagacagcaacgtgaccatcaactgcgagagaatcaagctgaacaccgaggagaacaagcccagccacttccaggccctgggcgacgacatcagcagaaccgtgatccccagcgaggtgctgcccagcgccggcgccttcagcaagagcgagggccagcacgagaacttcctgaacatcagcagactgcaggagaagaccggcacctacaccaccaacaagaccaagaacaaccacgtgagcgacctgggcctggtgctgtgcgacttcgaggacagcttctacctggacacccagagcgagaagatcatccagcagatggccaccgagaacgccaagctgggcgccaaggacaccaacctggccgccggcatcatgcagaagagcctggtgcagcagaacagcatgaacagcttccagaaggagtgccacatccccttccccgccgagcagcaccccctgggcgccaccaagatcgaccacctggacctgaagaccgtgggcaccatgaagcagagcagcgacagccacggcgtggacatcctgacccccgagagccccatcttccacagccccatcctgctggaggagaacggcctgttcctgaagaagaacgaggtgagcgtgaccgacagccagctgaacagcttcctgcagggctaccagacccaggagaccgtgaagcccgtgatcctgctgatcccccagaagagaacccccaccggcgtggagggcgagtgcctgcccgtgcccgagaccagcctgaacatgagcgacagcctgctgttcgacagcttcagcgacgactacctggtgaaggagcagctgcccgacatgcagatgaaggagcccctgcccagcgaggtgaccagcaaccacttcagcgacagcctgtgcctgcaggaggacctgatcaagaagagcaacgtgaacgagaaccaggacacccaccagcagctgacctgcagcaacgacgagagcatcatcttcagcgagatggacagcgtgcagatggtggaggccctggacaacgtggacatcttccccgtgcaggagaagaaccacaccgtggtgagccccagagccctggagctgagcgaccccgtgctggacgagcaccaccagggcgaccaggacggcggcgaccaggacgagagagccgagaagagcaagctgaccggcaccagacagaaccacagcttcatctggagcggcgccagcttcgacctgagccccggcctgcagagaatcctggacaaggtgagcagccccctggagaacgagaagctgaagagcatgaccatcaacttcagcagcctgaacagaaagaacaccgagctgaacgaggagcaggaggtgatcagcaacctggagaccaagcaggtgcagggcatcagcttcagcagcaacaacgaggtgaagagcaagatcgagatgctggagaacaacgccaaccacgacgagaccagcagcctgctgcccagaaaggagagcaacatcgtggacgacaacggcctgatcccccccacccccatccccaccagcgccagcaagctgaccttccccggcatcctggagacccccgtgaacccctggaagaccaacaacgtgctgcagcccggcgagagctacctgttcggcagccccagcgacatcaagaaccacgacctgagccccggcagcagaaacggcttcaaggacaacagccccatcagcgacaccagcttcagcctgcagctgagccaggacggcctgcagctgacccccgccagcagcagcagcgagagcctgagcatcatcgacgtggccagcgaccagaacctgttccagaccttcatcaaggagtggagatgcaagaagagattcagcatcagcctggcctgcgagaagatcagaagcctgaccagcagcaagaccgccaccatcggcagcagattcaagcaggccagcagcccccaggagatccccatcagagacgacggcttccccatcaagggctgcgacgacaccctggtggtgggcctggccgtgtgctggggcggcagagacgcctactacttcagcctgcagaaggagcagaagcacagcgagatcagcgccagcctggtgccccccagcctggaccccagcctgaccctgaaggacagaatgtggtacctgcagagctgcctgagaaaggagagcgacaaggagtgcagcgtggtgatctacgacttcatccagagctacaagatcctgctgctgagctgcggcatcagcctggagcagagctacgaggaccccaaggtggcctgctggctgctggaccccgacagccaggagcccaccctgcacagcatcgtgaccagcttcctgccccacgagctgcccctgctggagggcatggagaccagccagggcatccagagcctgggcctgaacgccggcagcgagcacagcggcagatacagagccagcgtggagagcatcctgatcttcaacagcatgaaccagctgaacagcctgctgcagaaggagaacctgcaggacgtgttcagaaaggtggagatgcccagccagtactgcctggccctgctggagctgaacggcatcggcttcagcaccgccgagtgcgagagccagaagcacatcatgcaggccaagctggacgccatcgagacccaggcctaccagctggccggccacagcttcagcttcaccagcagcgacgacatcgccgaggtgctgttcctggagctgaagctgccccccaacagagagatgaagaaccagggcagcaagaagaccctgggcagcaccagaagaggcatcgacaacggcagaaagctgagactgggcagacagttcagcaccagcaaggacgtgctgaacaagctgaaggccctgcaccccctgcccggcctgatcctggagtggagaagaatcaccaacgccatcaccaaggtggtgttccccctgcagagagagaagtgcctgaaccccttcctgggcatggagagaatctaccccgtgagccagagccacaccgccaccggcagaatcaccttcaccgagcccaacatccagaacgtgcccagagacttcgagatcaagatgcccaccctggtgggcgagagcccccccagccaggccgtgggcaagggcctgctgcccatgggcagaggcaagtacaagaagggcttcagcgtgaaccccagatgccaggcccagatggaggagagagccgccgacagaggcatgcccttcagcatcagcatgagacacgccttcgtgcccttccccggcggcagcatcctggccgccgactacagccagctggagctgagaatcctggcccacctgagccacgacagaagactgatccaggtgctgaacaccggcgccgacgtgttcagaagcatcgccgccgagtggaagatgatcgagcccgagagcgtgggcgacgacctgagacagcaggccaagcagatctgctacggcatcatctacggcatgggcgccaagagcctgggcgagcagatgggcatcaaggagaacgacgccgcctgctacatcgacagcttcaagagcagatacaccggcatcaaccagttcatgaccgagaccgtgaagaactgcaagagagacggcttcgtgcagaccatcctgggcagaagaagatacctgcccggcatcaaggacaacaacccctacagaaaggcccacgccgagagacaggccatcaacaccatcgtgcagggcagcgccgccgacatcgtgaagatcgccaccgtgaacatccagaagcagctggagaccttccacagcaccttcaagagccacggccacagagagggcatgctgcagagcgaccagaccggcctgagcagaaagagaaagctgcagggcatgttctgccccatcagaggcggcttcttcatcctgcagctgcacgacgagctgctgtacgaggtggccgaggaggacgtggtgcaggtggcccagatcgtgaagaacgagatggagagcgccgtgaagctgagcgtgaagctgaaggtgaaggtgaagatcggcgccagctggggcgagctgaaggacttcgacgtgtag

SEQ ID NO: 261766 - DNA, 1029 bp, Artificial Sequence
  derived and/or modified sequence
atgatccaggagcccgccctgccccccggctgggagatgaagtacaccagcgagggcgtgagatacttcgtggaccacaacaccagaaccaccaccttcaaggaccccagacccggcttcgagagcggcaccaagcagggcagccccggcgcctacgacagaagcttcagatggaagtaccaccagttcagattcctgtgccacagcaacgccctgcccagccacgtgaagatcagcgtgagcagacagaccctgttcgaggacagcttccagcagatcatgaacatgaagccctacgacctgagaagaagactgtacatcatcatgagaggcgaggagggcctggactacggcggcatcgccagagagtggttcttcctgctgagccacgaggtgctgaaccccatgtactgcctgttcgagtacgccggcaagaacaactactgcctgcagatcaaccccgccagcagcatcaaccccgaccacctgacctacttcagattcatcggcagattcatcgccatggccctgtaccacggcaagttcatcgacaccggcttcaccctgcccttctacaagagaatgctgaacaagagacccaccctgaaggacctggagagcatcgaccccgagttctacaacagcatcgtgtggatcaaggagaacaacctggaggagtgcggcctggagctgtacttcatccaggacatggagatcctgggcaaggtgaccacccacgagctgaaggagggcggcgagagcatcagagtgaccgaggagaacaaggaggagtacatcatgctgctgaccgactggagattcaccagaggcgtggaggagcagaccaaggccttcctggacggcttcaacgaggtggcccccctggagtggctgagatacttcgacgagaaggagctggagctgatgctgtgcggcatgcaggagatcgacgccaccggcagaagagcccccagcaccggcaccacccccagaaccgccagcagaagcagcggcagcggcagatggtag

SEQ ID NO: 261767 - DNA, 1029 bp, Artificial Sequence
  derived and/or modified sequence
atgatacaagagcctgcgctaccaccaggatgggagatgaaatacactagtgagggcgtaaggtatttcgtcgaccataacacccggacaactacattcaaggatcctaggcccggcttcgagagcggtaccaaacaaggcagccccggggcatacgaccggagcttcaggtggaaatatcatcaatttcgattcctgtgccattctaatgccctcccatcccatgtgaagatttccgtctcacgccaaaccctgtttgaagactcttttcaacagatcatgaatatgaagccctacgaccttcggcggaggttgtacattatcatgcggggggaggagggtcttgattacggagggatagctcgtgagtggttttttttactgtcccatgaagtgctcaatccaatgtactgcctgtttgagtatgcggggaagaacaactattgcctccagataaacccggcaagcagcataaatcccgatcacctgacctacttcaggttcatagggcgatttatcgccatggccctgtatcatggtaaattcattgacacaggcttcaccttacctttctacaaacgcatgctgaataagcggcccacactaaaagatctggaatccattgaccctgagttttataactcaattgtgtggatcaaagagaacaacctggaggagtgtggcctggagctgtattttatccaggacatggagattctgggaaaggttaccacccatgaactgaaggagggaggcgagagtattagagttacggaagaaaacaaagaagagtatattatgctgctaactgactggcgctttactaggggggtggaggagcaaactaaggctttcttggatggattcaacgaggtggcgcctttagagtggctccgctattttgatgaaaaagagcttgaacttatgctctgcgggatgcaggagatagatgccacaggacgacgcgcgcctagtaccgggaccactccacgaactgcctcgagaagcagtggttccggtaggtggtag

SEQ ID NO: 261768 - DNA, 1029 bp, Artificial Sequence
  derived and/or modified sequence
atgatccaggagcccgccctgcccccaggctgggagatgaagtacaccagcgagggcgtgcgctactttgtggaccacaacaccaggaccaccaccttcaaggacccccggcccggctttgagagcggcaccaagcagggcagccctggggcctatgaccgctccttccgctggaagtaccaccagttccgcttcctgtgccacagcaatgccctgcccagccacgtgaagatctctgtgtcccggcagaccctgtttgaagattccttccagcagatcatgaacatgaagccctatgacctgcggcggcggctgtacatcatcatgagaggagaggagggcctggactatggaggcatcgcccgggagtggttcttcctgctgagccatgaggtgctgaaccccatgtactgcctgtttgaatatgccggcaagaacaactactgcctgcagatcaacccagccagcagcatcaacccagaccacctgacctacttccgcttcatcggccgcttcatcgccatggccctgtaccacggcaagttcatcgacaccggcttcaccctgcccttctacaagaggatgctgaacaagaggcccaccctgaaggacctggagagcattgatcctgagttctacaacagcatcgtgtggatcaaggagaacaacctggaggagtgtggcctggagctgtacttcatccaggacatggagatcctgggcaaggtgaccacccatgagctgaaggagggcggggagagcatccgggtgacagaggagaacaaggaggagtacatcatgctgctgacagactggaggttcacccggggcgtggaggagcagaccaaggccttcctggatggcttcaatgaggtggcccccctggagtggctgcgctactttgatgagaaggagctggagctgatgctgtgtggcatgcaggagattgatgccactggaagaagagcccccagcacaggcaccacccccaggacagccagccgcagcagcggcagcggccgctggtag

SEQ ID NO: 261769 - DNA, 1029 bp, Artificial Sequence
  derived and/or modified sequence
atgatccaggagcccgccctgccccccggctgggagatgaagtacacctcagaaggtgttagatactttgtggaccacaacaccaggacaaccactttcaaggaccctcggcccggtttcgaatcggggaccaagcaggggtcacctggcgcgtacgaccggagtttccggtggaagtaccatcagtttagatttctgtgtcattccaacgctctcccatcccacgttaaaattagtgtcagtcgccagactctgtttgaggactcctttcagcaaatcatgaacatgaaaccctacgatctgagaaggcggctatacatcatcatgagaggagaggagggtttggactatggcggcattgcccgggaatggttctttctactgtcacacgaagtgcttaatcccatgtactgcctcttcgaatacgccggcaagaataactattgccttcagatcaaccccgcgagctctattaatccagaccacctgacttacttcaggttcatcgggcggttcatcgctatggcactctaccatggtaagttcattgacacaggattcactcttcctttttataaaagaatgctgaataaacggcctactctgaaggaccttgagtccatagatcccgagttctataatagcatcgtgtggattaaggagaataacctagaggaatgtggtctggaactttatttcattcaggatatggaaatcttaggtaaggtgacaacacatgagctcaaagaaggcggtgagtctataagagtgaccgaggagaataaggaagagtacataatgttgttaacagattggaggtttacgaggggtgtagaagagcaaacaaaggcattccttgacggcttcaacgaagtggctccgctggagtggctgcggtactttgatgaaaaagagctcgaactcatgttgtgcggtatgcaggaaatcgacgctacaggccggcgtgccccatccactggtacgacaccgcggactgccagcaggtcatccggttccggccggtggtag

SEQ ID NO: 261770 - DNA, 1029 bp, Artificial Sequence
  derived and/or modified sequence
atgatccaggagcccgcactcccacccggatgggaaatgaaatatacatctgagggagtaagatactttgtggaccacaacacccgcactacaacttttaaagacccgcgtccaggattcgaatctggtaccaaacagggaagccctggggcatacgatagaagcttcaggtggaaataccaccagtttcggtttctgtgtcattccaatgcactgccctcccatgtgaagatcagcgtctctcgccagaccctgttcgaggattcctttcaacagatcatgaacatgaagccatatgacctgaggcgcaggctgtacattattatgagaggggaagaaggcctcgattacggcggaatcgctcgagagtggttttttctgctgagccatgaagttctaaaccccatgtactgcttgttcgagtatgcaggtaagaataattattgtctgcaaattaaccccgcatccagcatcaacccagatcacctgacatacttcagatttatcggtaggttcattgcaatggcattataccacggcaagttcattgataccggctttacactccctttttacaagcgcatgctcaataaacgccctacactgaaggatttggaatccatagaccccgagttctataacagcattgtgtggattaaggagaataatctagaagagtgtggcctcgagctatacttcattcaagatatggagatcctgggaaaagtcacaacccatgagctgaaggagggcggtgaaagtatcagagtgaccgaggaaaacaaggaggagtatatcatgttgttgaccgactggcggtttacgcggggagttgaagagcagaccaaggcattcctggatggcttcaacgaagtcgcacctctcgaatggctgaggtatttcgatgagaaagagctggagttgatgctgtgcggtatgcaggaaattgatgctactggccgtcgggcacccagcaccgggaccacgcccaggacagcctcgcgaagcagcgggagcggtcggtggtag

SEQ ID NO: 261771 - protein, 239 aa, Artificial Sequence
  derived and/or modified sequence
MTGRDSLSDGRTSSRALVPGGSPRGSRPRGFAITDLLGLEAELPAPAGPGQGSGCEGPAVAPCPGPGLDGSSLARGALPLGLGLLCGFGTQPPAAARAPCLLLADVPFLPPRGPEPAAPLAPSRPPPALGRQKRSDSVSTSDEDSQSEDRNDLKASPTLGKRKKRRHRTVFTAHQLEELEKAFSEAHYPDVYAREMLAVKTELPEDRIQVSGVPFLRSKDTTENVSFPHSVSQSAVPSL

SEQ ID NO: 261772 - DNA, 720 bp, Artificial Sequence
  derived and/or modified sequence
atgaccggcagagacagcctgagcgacggcagaaccagcagcagagccctggtgcccggcggcagccccagaggcagcagacccagaggcttcgccatcaccgacctgctgggcctggaggccgagctgcccgcccccgccggccccggccagggcagcggctgcgagggccccgccgtggccccctgccccggccccggcctggacggcagcagcctggccagaggcgccctgcccctgggcctgggcctgctgtgcggcttcggcacccagccccccgccgccgccagagccccctgcctgctgctggccgacgtgcccttcctgccccccagaggccccgagcccgccgcccccctggcccccagcagacccccccccgccctgggcagacagaagagaagcgacagcgtgagcaccagcgacgaggacagccagagcgaggacagaaacgacctgaaggccagccccaccctgggcaagagaaagaagagaagacacagaaccgtgttcaccgcccaccagctggaggagctggagaaggccttcagcgaggcccactaccccgacgtgtacgccagagagatgctggccgtgaagaccgagctgcccgaggacagaatccaggtgagcggcgtgcccttcctgagaagcaaggacaccaccgagaacgtgagcttcccccacagcgtgagccagagcgccgtgcccagcctgtag

SEQ ID NO: 261773 - DNA, 720 bp, Artificial Sequence
  derived and/or modified sequence
atgaccggccgggatagcctctctgacggccgaacatcatctagagccctggtcccaggcggatccccacgcggttcacggccaaggggatttgcaataacagacctcctggggctggaggccgagctccctgcacccgctggtcccgggcaggggtctggttgtgagggtcccgcagtggctccatgccccggccccgggttagacggatccagtctcgctcggggcgccttgccactgggccttggcttgctctgtgggtttggaacgcagcccccggcagcggccagggctccctgcctcctgctcgctgacgtgcctttcttaccacctaggggacctgaaccggccgcccctcttgccccctcgagaccccccccagccttaggccggcagaagaggagtgatagcgtgtccacatccgatgaggattcccagtctgaggacagaaacgatttaaaagcttccccaactctagggaagcgcaaaaaacggagacaccgcaccgtatttacagctcaccagttagaggaacttgaaaaggccttcagtgaggcccactaccccgatgtgtatgcccgcgaaatgctggctgtaaagacggagctaccagaagacaggattcaggtgagtggagtaccatttctgcgcagtaaggataccacagaaaatgtatcttttcctcactcagtgagtcagagcgccgttccttccctgtag

SEQ ID NO: 261774 - DNA, 720 bp, Artificial Sequence
  derived and/or modified sequence
atgacaggccgggacagcctgagtgatggccgcaccagcagccgggccctggtgcctgggggcagcccccggggcagccggccccggggctttgccatcacagacctgctgggcctggaggccgagctgcctgccccagctggccctggccagggcagcggctgtgagggccctgctgtggccccctgccccggccctggcctggatggcagcagcctggcccggggggccctgcccctgggcctgggcctgctgtgtggcttcggcacccagcccccagctgctgcccgggccccctgcctgctgctggctgatgtgcccttcctgcccccccggggccctgagcctgctgcccccctggcccccagcaggcctcctccagccctgggccggcagaagagaagtgacagcgtgtccaccagtgatgaggacagccagagcgaggacagaaatgacctgaaggccagccccaccctgggcaagaggaagaagagaagacacaggacagtgttcaccgcccaccagctggaggagctggagaaggccttcagcgaggcccactacccagatgtgtatgcccgggagatgctggccgtgaagacagagctgcctgaagatcgcatccaggtgtctggagtgcccttcctgcggagcaaggacaccacagaaaatgtgtccttcccccacagcgtgtcccagagcgctgtgcccagcctgtag

SEQ ID NO: 261775 - DNA, 720 bp, Artificial Sequence
  derived and/or modified sequence
atgaccggccgggacagcctgagcgacggccggaccagcagccgggccctggttcccggagggtctcccaggggctcgcgccccaggggcttcgccatcacggacctgcttggcctggaagccgagctgcctgccccggcgggaccagggcagggcagcggctgtgaaggccctgccgtcgcaccctgccctgggcccggcctagatggaagcagcctcgccaggggcgccttgcccctgggactgggactgttatgcgggtttggcacccagcctcctgcggcagcccgcgcaccttgcttgctgttagcggacgtgccgttcctgccacctcgcggccctgagcctgccgcccctttagctccctccaggccgcctccggctctagggcggcagaagcgatctgattctgtgagtaccagcgatgaggattcacagagcgaagaccgaaatgatctgaaagctagtcctactctgggaaagcggaaaaaacgcagacaccgaacagtgtttacagctcaccagcttgaagagcttgaaaaagccttctcagaagcccactatccagacgtttatgccagggaaatgctggccgtaaaaaccgagctacccgaggaccgtatacaggtgtccggggttcccttcctgagatcaaaggatacgacagagaacgtgtctttcccccacagcgttagccagtctgctgtcccctcactgtag

SEQ ID NO: 261776 - DNA, 720 bp, Artificial Sequence
  derived and/or modified sequence
atgacaggcagggacagtctgtcagatgggagaaccagcagccgggctctggtgccaggtggctccccccgaggctctagacctagaggctttgcaattaccgacttgctgggactcgaagccgaattacccgcaccggctggtccgggtcaggggagcggctgcgaggggcctgcagtcgcaccctgtcccggaccaggacttgacgggtcatccctcgcacgaggagcactgccgctgggtttaggtctgttgtgtggcttcggcacacagcccccagccgctgctagagcaccatgcctgctgctggctgacgtcccatttttacctccaagggggccagagcctgccgctccattggccccatcaaggcctcccccagctctggggaggcagaagaggtcggactccgtgagcacttcagacgaggatagccagagtgaggatagaaacgatctcaaagcctctcctacactaggcaagcggaaaaaacggaggcataggacagtctttacggcccaccagcttgaagaactggaaaaggccttctcggaagcgcattacccggatgtttacgcgagagaaatgctggcggttaaaaccgagctgcctgaggaccgcattcaggtatctggagtgccatttcttcgctcaaaggataccacggaaaacgtgtccttcccacattcagtgtctcagtccgctgttccatcactgtag

SEQ ID NO: 261777 - DNA, 948 bp, Artificial Sequence
  derived and/or modified sequence
tccagagaggctcgcgccttgcttgctaaggaaccatgaccggccgggactcgctttccgacgggcgcactagcagcagggcgctggtgcctggcggttcccctaggggctcgcgcccccggggcttcgccatcacggacctgctgggcttggaggccgagctgccggcgcccgctggcccaggacagggatctggctgcgagggtccggcagtcgcgccgtgcccgggcccggggcttgacggctccagcctggcgcgtggggccctaccgctgggactcggcctcctctgtggcttcggcacgcagccgccggcggccgctcgagcaccctgcctgctcctagcggacgtgccgttcctgccgcccaggggccccgagcccgctgccccgctggctcccagccgtccgccgcctgcgctcggccgccagaagcgcagcgacagcgtctccacgtccgatgaggacagccagtctgaagacaggaatgacctaaaggcatcccccaccttgggcaagaggaagaagcggcggcacaggacagttttcactgctcaccagctggaagagttggagaaggcattcagcgaggcccactaccctgatgtgtatgcccgagaaatgctggctgtgaaaactgagctccccgaagaccggatacaggtgtctggggtcccttttctccgctccaaagataccacagagaacgtgtcattcccacattcagtgagccaatcagcagtcccttctctatagccaacacgctccctttgcatagaaactgagggtcccttagctgaaggcaccacaagagcttgcccctatgaccctcatgccttttttcattttattattatttagtatcaaatcattctttaaaatcacatgataatgtgtgctgcaactagaaactataaagatatgtcaatgaaaaaaaaaaaaaagagac

SEQ ID NO: 261778 - protein, 679 aa, Artificial Sequence
  derived and/or modified sequence
MNASSEGESFAGSVQSGTTVLVELTPDIHICGICKQQFNNLDAFVAHKQSGCQLTGTSAAAPSTVQFVSEETVPATQTQTTTRTITSETQTITVSAPEFVFEHGYQTYLPTESNENQTATVISLPAKSRTKKPTTPPAQKRLNCCYPGCQFKTAYGMKDMERHLKIHTGDKPHKCEVCGKCFSRKDKLKTHMRCHTGVKPYKCKTCDYAAADSSSLNKHLRIHSDERPFKCQICPYASRNSSQLTVHLRSHTGDAPFQCWLCSAKFKISSDLKRHMRVHSGEKPFKCEFCNVRCTMKGNLKSHIRIKHSGNNFKCPHCDFLGDSKATLRKHSRVHQSEHPEKCSECSYSCSSKAALRIHERIHCTDRPFKCNYCSFDTKQPSNLSKHMKKFHGDMVKTEALERKDTGRQSSRQVAKLDAKKSFHCDICDASFMREDSLRSHKRQHSEYSESKNSDVTVLQFQIDPSKQPATPLTVGHLQVPLQPSQVPQFSEGRVKIIVGHQVPQANTIVQAAAAAVNIVPPALVAQNPEELPGNSRLQILRQVSLIAPPQSSRCPSEAGAMTQPAVLLTTHEQTDGATLHQTLIPTASGGPQEGSGNQTFITSSGITCTDFEGLNALIQEGTAEVTVVSDGGQNIAVATTAPPVFSSSSQQELPKQTYSIIQGAAHPALLCPADSIPD

SEQ ID NO: 261779 - protein, 523 aa, Artificial Sequence
  derived and/or modified sequence
MKDMERHLKIHTGDKPHKCEVCGKCFSRKDKLKTHMRCHTGVKPYKCKTCDYAAADSSSLNKHLRIHSDERPFKCQICPYASRNSSQLTVHLRSHTGDAPFQCWLCSAKFKISSDLKRHMRVHSGEKPFKCEFCNVRCTMKGNLKSHIRIKHSGNNFKCPHCDFLGDSKATLRKHSRVHQSEHPEKCSECSYSCSSKAALRIHERIHCTDRPFKCNYCSFDTKQPSNLSKHMKKFHGDMVKTEALERKDTGRQSSRQVAKLDAKKSFHCDICDASFMREDSLRSHKRQHSEYSESKNSDVTVLQFQIDPSKQPATPLTVGHLQVPLQPSQVPQFSEGRVKIIVGHQVPQANTIVQAAAAAVNIVPPALVAQNPEELPGNSRLQILRQVSLIAPPQSSRCPSEAGAMTQPAVLLTTHEQTDGATLHQTLIPTASGGPQEGSGNQTFITSSGITCTDFEGLNALIQEGTAEVTVVSDGGQNIAVATTAPPVFSSSSQQELPKQTYSIIQGAAHPALLCPADSIPD

SEQ ID NO: 261780 - DNA, 2040 bp, Artificial Sequence
  derived and/or modified sequence
atgaacgccagcagcgagggcgagagcttcgccggcagcgtgcagagcggcaccaccgtgctggtggagctgacccccgacatccacatctgcggcatctgcaagcagcagttcaacaacctggacgccttcgtggcccacaagcagagcggctgccagctgaccggcaccagcgccgccgcccccagcaccgtgcagttcgtgagcgaggagaccgtgcccgccacccagacccagaccaccaccagaaccatcaccagcgagacccagaccatcaccgtgagcgcccccgagttcgtgttcgagcacggctaccagacctacctgcccaccgagagcaacgagaaccagaccgccaccgtgatcagcctgcccgccaagagcagaaccaagaagcccaccaccccccccgcccagaagagactgaactgctgctaccccggctgccagttcaagaccgcctacggcatgaaggacatggagagacacctgaagatccacaccggcgacaagccccacaagtgcgaggtgtgcggcaagtgcttcagcagaaaggacaagctgaagacccacatgagatgccacaccggcgtgaagccctacaagtgcaagacctgcgactacgccgccgccgacagcagcagcctgaacaagcacctgagaatccacagcgacgagagacccttcaagtgccagatctgcccctacgccagcagaaacagcagccagctgaccgtgcacctgagaagccacaccggcgacgcccccttccagtgctggctgtgcagcgccaagttcaagatcagcagcgacctgaagagacacatgagagtgcacagcggcgagaagcccttcaagtgcgagttctgcaacgtgagatgcaccatgaagggcaacctgaagagccacatcagaatcaagcacagcggcaacaacttcaagtgcccccactgcgacttcctgggcgacagcaaggccaccctgagaaagcacagcagagtgcaccagagcgagcaccccgagaagtgcagcgagtgcagctacagctgcagcagcaaggccgccctgagaatccacgagagaatccactgcaccgacagacccttcaagtgcaactactgcagcttcgacaccaagcagcccagcaacctgagcaagcacatgaagaagttccacggcgacatggtgaagaccgaggccctggagagaaaggacaccggcagacagagcagcagacaggtggccaagctggacgccaagaagagcttccactgcgacatctgcgacgccagcttcatgagagaggacagcctgagaagccacaagagacagcacagcgagtacagcgagagcaagaacagcgacgtgaccgtgctgcagttccagatcgaccccagcaagcagcccgccacccccctgaccgtgggccacctgcaggtgcccctgcagcccagccaggtgccccagttcagcgagggcagagtgaagatcatcgtgggccaccaggtgccccaggccaacaccatcgtgcaggccgccgccgccgccgtgaacatcgtgccccccgccctggtggcccagaaccccgaggagctgcccggcaacagcagactgcagatcctgagacaggtgagcctgatcgcccccccccagagcagcagatgccccagcgaggccggcgccatgacccagcccgccgtgctgctgaccacccacgagcagaccgacggcgccaccctgcaccagaccctgatccccaccgccagcggcggcccccaggagggcagcggcaaccagaccttcatcaccagcagcggcatcacctgcaccgacttcgagggcctgaacgccctgatccaggagggcaccgccgaggtgaccgtggtgagcgacggcggccagaacatcgccgtggccaccaccgccccccccgtgttcagcagcagcagccagcaggagctgcccaagcagacctacagcatcatccagggcgccgcccaccccgccctgctgtgccccgccgacagcatccccgactag

SEQ ID NO: 261781 - DNA, 1572 bp, Artificial Sequence
  derived and/or modified sequence
atgaaggacatggagagacacctgaagatccacaccggcgacaagccccacaagtgcgaggtgtgcggcaagtgcttcagcagaaaggacaagctgaagacccacatgagatgccacaccggcgtgaagccctacaagtgcaagacctgcgactacgccgccgccgacagcagcagcctgaacaagcacctgagaatccacagcgacgagagacccttcaagtgccagatctgcccctacgccagcagaaacagcagccagctgaccgtgcacctgagaagccacaccggcgacgcccccttccagtgctggctgtgcagcgccaagttcaagatcagcagcgacctgaagagacacatgagagtgcacagcggcgagaagcccttcaagtgcgagttctgcaacgtgagatgcaccatgaagggcaacctgaagagccacatcagaatcaagcacagcggcaacaacttcaagtgcccccactgcgacttcctgggcgacagcaaggccaccctgagaaagcacagcagagtgcaccagagcgagcaccccgagaagtgcagcgagtgcagctacagctgcagcagcaaggccgccctgagaatccacgagagaatccactgcaccgacagacccttcaagtgcaactactgcagcttcgacaccaagcagcccagcaacctgagcaagcacatgaagaagttccacggcgacatggtgaagaccgaggccctggagagaaaggacaccggcagacagagcagcagacaggtggccaagctggacgccaagaagagcttccactgcgacatctgcgacgccagcttcatgagagaggacagcctgagaagccacaagagacagcacagcgagtacagcgagagcaagaacagcgacgtgaccgtgctgcagttccagatcgaccccagcaagcagcccgccacccccctgaccgtgggccacctgcaggtgcccctgcagcccagccaggtgccccagttcagcgagggcagagtgaagatcatcgtgggccaccaggtgccccaggccaacaccatcgtgcaggccgccgccgccgccgtgaacatcgtgccccccgccctggtggcccagaaccccgaggagctgcccggcaacagcagactgcagatcctgagacaggtgagcctgatcgcccccccccagagcagcagatgccccagcgaggccggcgccatgacccagcccgccgtgctgctgaccacccacgagcagaccgacggcgccaccctgcaccagaccctgatccccaccgccagcggcggcccccaggagggcagcggcaaccagaccttcatcaccagcagcggcatcacctgcaccgacttcgagggcctgaacgccctgatccaggagggcaccgccgaggtgaccgtggtgagcgacggcggccagaacatcgccgtggccaccaccgccccccccgtgttcagcagcagcagccagcaggagctgcccaagcagacctacagcatcatccagggcgccgcccaccccgccctgctgtgccccgccgacagcatccccgactag

SEQ ID NO: 261782 - DNA, 2040 bp, Artificial Sequence
  derived and/or modified sequence
atgaacgcttcaagcgagggggagtcttttgccgggagtgttcagtcaggtacgaccgtgcttgtcgaactgactcccgacattcacatatgtggcatttgcaaacagcagtttaacaacctggacgcattcgtagcccacaaacaatccggatgtcaacttacaggtacctcagccgccgcccccagcacagtgcagttcgtgtctgaagagaccgtcccggctacccagactcagactaccacccgcacaatcactagcgagacacagaccatcactgtctctgctcccgagtttgtgtttgagcatggatatcaaacatacctacccacagagtcaaacgagaaccaaacagcaacagtgatctcgttgccagccaagtccaggaccaaaaagcctaccaccccccctgcccagaagcggttaaactgttgctacccaggctgtcagtttaaaactgcttatgggatgaaggatatggagaggcacttaaagatccacaccggagataaaccccataaatgtgaggtctgcggcaaatgctttagtcgaaaagataagctcaaaacacacatgcgctgtcacacgggcgtgaaaccctacaagtgcaagacgtgcgactacgcagcggccgatagctcaagcctgaataaacacctcaggattcacagcgacgagcgcccttttaaatgtcagatatgcccctacgccagcaggaactcgtcgcaattaactgtacatctgcgctctcacactggcgatgcaccatttcagtgctggctttgttcagccaagttcaaaatttcctccgatctgaagagacatatgcgagtgcattcgggcgaaaagccattcaaatgcgagttttgcaacgtgcgctgtactatgaaaggcaatcttaagtcgcacatccgtattaagcactccggtaataattttaaatgtcctcattgtgatttccttggagattcaaaggcaacactcagaaaacactctcgggtacatcagagcgagcacccagaaaaatgcagcgagtgcagctactcatgctccagcaaggcagctcttaggattcacgaaagaatacattgtacagatcggccattcaaatgcaactactgctccttcgacaccaagcagccttctaatctgtctaagcatatgaaaaaattccacggtgacatggtcaaaactgaggcgctggagaggaaggatacgggccgccagtctagtaggcaggtggcgaagctcgacgccaagaaaagtttccactgtgacatctgcgacgcctcatttatgagggaagactccctgagaagtcacaaaagacagcactcggagtattctgagtcaaaaaactcggatgtcactgtcctccagtttcagatcgatccaagtaagcagcccgcaacccctctaacagtcgggcatctgcaggtgcccttgcagcccagtcaggtgccccagttcagtgagggaagggttaagataatcgttggccaccaggtccctcaagcgaatactattgtccaggccgccgccgctgccgtaaatatcgtgccacctgccctagtagctcagaatcccgaggaactgcctgggaacagtcggctccagatactaaggcaggtgagcctgattgctccacctcaatcctccaggtgtccctctgaggccggggcaatgacacagccggcagtgctgctgacaacgcacgaacagactgacggagcaacacttcaccagactctgattcccaccgcgtcaggtggcccacaggaggggagcggaaatcagacgttcataacaagctctggaatcacatgcactgatttcgagggccttaacgctctgattcaggaaggtactgccgaggtcacagtcgtctcagatggcgggcagaatatcgcggtggctacaaccgctccgccggtgttttccagcagctcccagcaggaactccccaagcaaacctattccatcattcagggcgcagcccaccctgctttactttgccccgccgactccatccccgattag

SEQ ID NO: 261783 - DNA, 1572 bp, Artificial Sequence
  derived and/or modified sequence
atgaaagatatggagcggcatctgaagatccatactggagataaacctcataagtgcgaagtgtgcggcaagtgcttctcaagaaaggataagctcaagactcacatgcgctgtcacactggagtcaagccctacaaatgtaagacatgcgattatgccgccgcggacagtagcagcctcaataagcatcttaggatccattcggacgagaggccattcaaatgtcaaatctgtccttacgcatctcgtaattcgagtcagttaacagtccatctacggtcccatacaggagatgcgcctttccaatgctggctgtgctcggctaagtttaagatctcttccgacttgaaacgccacatgcgagtccactcgggggaaaagcccttcaagtgcgaattctgtaacgtcagatgcacaatgaagggtaatctgaagtcccatattagaattaagcacagcggaaacaattttaagtgcccacactgtgactttctcggggatagtaaggcaaccctccggaaacactcgcgcgtccaccaaagtgaacatcccgaaaaatgttcagaatgctcttacagctgtagcagcaaggccgcccttaggattcacgagcgtattcactgcacagatagacccttcaaatgcaactactgtagcttcgacacaaagcagcccagcaatcttagtaaacacatgaagaaattccatggcgacatggttaagactgaggccctagaacgcaaggatactggtcgccagtccagcaggcaggtggcaaagctggatgccaagaagtcttttcattgcgacatctgtgatgcttccttcatgagagaagattcactcagatcacataagcgacaacacagcgagtatagcgagtcaaaaaactcggacgtgacagtccttcagtttcagatagatccttccaaacagccagccacacccctcacagtggggcatctgcaggtgccactgcaacccagccaggtcccacagttctctgagggccgcgtcaagataatcgtgggtcatcaagtccctcaggcgaacactattgttcaggcagccgctgcagcggtaaatatcgttcctcctgcccttgttgcacagaaccccgaggagctgcctggcaactcacgcctgcagattttacgccaggtgtccttgatcgctcccccccaatcgagtcgctgcccctctgaggctggggcaatgacccaacccgcggttttgctgaccacacatgagcagactgatggagccactctgcatcagacactaatccccacagccagtgggggcccccaagaaggctcaggaaatcagactttcataacatcatctggaatcacatgcaccgatttcgaaggtctgaatgcgctcatacaggaagggacggccgaagtaaccgttgtttccgacggcgggcagaacatagccgtggccacaacagccccccccgttttctcctcttcgtcccagcaggagttgccgaagcagacttattccattatccagggggctgcccatccagctctcctgtgccccgccgactcgatcccagattag

SEQ ID NO: 261784 - DNA, 2040 bp, Artificial Sequence
  derived and/or modified sequence
atgaatgccagcagcgagggggagagctttgctggctctgtgcagagcggcaccaccgtgctggtggagctgaccccagacatccacatctgtggcatctgcaagcagcagttcaacaacctggatgcctttgtggcccacaagcagagcggctgccagctgaccggcaccagcgctgctgcccccagcacagtgcagtttgtgtctgaggagaccgtgcctgccacccagacccagaccaccaccaggaccatcaccagcgagacccagaccatcaccgtgtctgcccctgagtttgtgtttgaacatggctaccagacctacctgcccacagagagcaatgaaaaccagacagccaccgtcatcagcctgcctgccaagagcaggaccaagaagcccaccaccccaccagcccagaagaggctgaactgctgctacccaggctgccagttcaagacagcctacggcatgaaggacatggagcggcacctgaagatccacactggagacaagccccacaagtgtgaggtgtgtgggaagtgcttcagcaggaaggacaagctgaagacccacatgcgctgccacactggagtgaagccctacaagtgcaagacctgtgactatgctgctgctgacagcagcagcctgaacaagcacctgcgcatccacagtgatgagcggcccttcaagtgccagatctgcccctatgccagcaggaacagcagccagctgactgtgcacctgcggagccacactggagatgcccccttccagtgctggctgtgcagcgccaagttcaagatcagcagtgacctgaagaggcacatgagggtgcacagcggggagaagcccttcaagtgtgagttctgcaatgtgcgctgcaccatgaagggcaacctgaagagccacatccgcatcaagcacagcggcaacaacttcaagtgcccccactgtgacttcctgggggacagcaaggccaccctgaggaagcacagccgggtgcaccagagcgagcaccctgagaagtgcagtgaatgttcctacagctgcagcagcaaggccgccctgcgcatccacgagcgcatccactgcacagaccggcccttcaagtgcaactactgcagctttgacaccaagcagcccagcaacctgagcaagcacatgaagaagttccacggggacatggtgaagacagaggccctggagaggaaggacaccggccggcagagcagccggcaggtggccaagctggatgccaagaagagcttccactgtgacatctgtgatgccagcttcatgagggaggacagcctgcggagccacaagaggcagcacagcgagtacagcgagagcaagaacagtgatgtgacagtgctgcagttccagattgaccccagcaagcagcctgccacccccctgactgtgggccacctgcaggtgcccctgcagcccagccaggtgccccagttcagcgagggccgggtgaagatcatcgtgggccaccaggtgccccaggccaacaccatcgtgcaggccgctgctgctgctgtgaacatcgtgcccccagccctggtggcccagaaccctgaggagctgcccggcaacagccggctgcagatcctgcggcaggtgtccctgattgccccaccccagagcagccgctgccccagcgaggccggggccatgacccagcctgctgtgctgctgaccacccatgagcagacagatggagccaccctgcaccagaccctcatccccacagccagcggcggcccccaggagggcagcggcaaccagaccttcatcaccagcagcggcatcacctgcacagactttgagggcctgaatgccctgatccaggagggcacagctgaggtgacagtggtgtctgatggcggccagaacattgctgtggccaccacagcccctcctgtgttcagcagcagcagccagcaggagctgcccaagcagacctacagcatcatccagggcgccgcccacccagccctgctgtgcccagctgacagcatcccagactag

SEQ ID NO: 261785 - DNA, 1572 bp, Artificial Sequence
  derived and/or modified sequence
atgaaggacatggagcggcacctgaagatccacactggagacaagccccacaagtgtgaggtgtgtgggaagtgcttcagcaggaaggacaagctgaagacccacatgcgctgccacactggagtgaagccctacaagtgcaagacctgtgactatgctgctgctgacagcagcagcctgaacaagcacctgcgcatccacagtgatgagcggcccttcaagtgccagatctgcccctatgccagcaggaacagcagccagctgactgtgcacctgcggagccacactggagatgcccccttccagtgctggctgtgcagcgccaagttcaagatcagcagtgacctgaagaggcacatgagggtgcacagcggggagaagcccttcaagtgtgagttctgcaatgtgcgctgcaccatgaagggcaacctgaagagccacatccgcatcaagcacagcggcaacaacttcaagtgcccccactgtgacttcctgggggacagcaaggccaccctgaggaagcacagccgggtgcaccagagcgagcaccctgagaagtgcagtgaatgttcctacagctgcagcagcaaggccgccctgcgcatccacgagcgcatccactgcacagaccggcccttcaagtgcaactactgcagctttgacaccaagcagcccagcaacctgagcaagcacatgaagaagttccacggggacatggtgaagacagaggccctggagaggaaggacaccggccggcagagcagccggcaggtggccaagctggatgccaagaagagcttccactgtgacatctgtgatgccagcttcatgagggaggacagcctgcggagccacaagaggcagcacagcgagtacagcgagagcaagaacagtgatgtgacagtgctgcagttccagattgaccccagcaagcagcctgccacccccctgactgtgggccacctgcaggtgcccctgcagcccagccaggtgccccagttcagcgagggccgggtgaagatcatcgtgggccaccaggtgccccaggccaacaccatcgtgcaggccgctgctgctgctgtgaacatcgtgcccccagccctggtggcccagaaccctgaggagctgcccggcaacagccggctgcagatcctgcggcaggtgtccctgattgccccaccccagagcagccgctgccccagcgaggccggggccatgacccagcctgctgtgctgctgaccacccatgagcagacagatggagccaccctgcaccagaccctcatccccacagccagcggcggcccccaggagggcagcggcaaccagaccttcatcaccagcagcggcatcacctgcacagactttgagggcctgaatgccctgatccaggagggcacagctgaggtgacagtggtgtctgatggcggccagaacattgctgtggccaccacagcccctcctgtgttcagcagcagcagccagcaggagctgcccaagcagacctacagcatcatccagggcgccgcccacccagccctgctgtgcccagctgacagcatcccagactag

SEQ ID NO: 261786 - DNA, 2040 bp, Artificial Sequence
  derived and/or modified sequence
atgaacgccagcagcgagggcgagagcttcgccggcagcgtgcagtcaggaacgactgtcctagtagaactcactcccgacatccatatctgtggcatttgcaaacagcagttcaataacctggatgcctttgttgcccacaaacagagtgggtgccagttgaccggcacatccgcagcagccccttctacggtgcagtttgtgagcgaagaaactgtaccagcaactcagactcagaccacaacaagaactattacatccgaaacacaaaccattaccgtctcagctcctgagtttgtgtttgaacacgggtatcagacttacctccccaccgaaagtaatgaaaatcagacagctacagtgatctccctacccgccaagtctcgcaccaagaagccaaccacaccacccgcccagaaaaggcttaactgttgctaccccgggtgtcagttcaaaacagcatatgggatgaaggacatggagaggcacctgaaaatacacaccggagacaaacctcataagtgtgaggtctgtggcaaatgcttctccaggaaggataaattgaagacccatatgagatgccacacaggtgtcaaaccgtataagtgcaagacttgcgattatgctgccgctgatagctccagcctcaacaagcatctacgcatccattccgatgaacggccctttaagtgccagatctgcccctatgcaagccgcaactcttctcagctcaccgtgcacttgaggtcccacactggcgatgctccatttcagtgctggctttgctctgctaagtttaaaatatcatccgacttgaagcggcatatgagggtccattctggagagaagccattcaagtgcgagttttgcaacgtgcgttgtacaatgaagggcaatcttaagagccacattaggataaagcattcaggaaataactttaaatgcccacactgtgacttcctgggcgacagcaaagctacacttaggaaacattcccgcgtgcaccagtccgaacacccggaaaagtgcagcgaatgctcttatagttgctcttccaaggcagcgttacgcattcatgaacggatccattgtactgaccggcccttcaagtgcaactattgttcattcgacaccaaacagcctagcaatctgtccaaacatatgaagaagtttcatggggatatggttaagactgaagcccttgagaggaaggacacgggccgtcaatccagtcgtcaggtggctaaactggacgctaagaaaagcttccattgcgacatttgcgacgctagttttatgcgggaggatagcctccggtcacataaacggcagcatagcgaatatagcgagtcaaagaatagcgacgtaacagtcctccagttccaaattgacccctcgaaacaaccggcgactccgctgactgtagggcacctgcaggtcccactccagccatcacaggtgccacaattctctgaagggcgggttaagataatcgtggggcaccaggtgcctcaggccaacacaattgtccaggctgcagcagcggccgtgaatattgtcccacctgccctggtcgcacagaatccagaggagctgccaggaaattccaggctgcaaattctaagacaggtgtcactcatcgccccaccacagagcagccgctgtccctctgaagcaggagccatgacgcagccagcagttcttttgacgacccatgagcagacagatggagctaccctgcatcagacacttatacctaccgcttctggtggcccccaggaggggagcggcaaccaaacatttattacctctagcggcatcacgtgcaccgattttgaaggtctcaacgctcttatacaggaaggtacggctgaagtgactgtcgtatccgacggcgggcagaatatcgctgttgccacaacagcgcccccagttttctccagctccagccagcaggaactgccgaagcagacctatagcattatacagggcgccgctcatccagcactattgtgtcccgccgactccataccggattag

SEQ ID NO: 261787 - DNA, 1572 bp, Artificial Sequence
  derived and/or modified sequence
atgaaggacatggagcggcacctgaagatccacaccggcgacaagccccataaatgtgaggtgtgcggaaagtgctttagtcgaaaggataagttgaagacacatatgcgttgtcacactggggtgaagccctacaagtgtaagacttgcgattatgcggccgcggattcctcctctctcaataaacacttgagaatccacagcgacgagcgtccatttaaatgtcaaatctgcccctacgcctccagaaacagctcccaactcacggtgcacctcaggtctcatactggcgacgctcctttccaatgttggctgtgctcagcaaagttcaaaatcagctccgatctgaagcggcatatgcgcgttcactctggggaaaagcccttcaaatgcgagttttgcaatgtgaggtgtacgatgaagggaaaccttaagagccacattcggattaagcattcaggcaacaactttaagtgccctcattgtgatttcctgggcgattccaaggctaccctgcgtaaacattcccgggtgcatcagtcagagcacccagagaagtgttcggaatgttcctattcttgctccagcaaggctgcgcttcggatacatgagagaatacactgcacagacaggcccttcaagtgtaactattgttccttcgacaccaaacagcccagcaacctgagcaagcatatgaagaaatttcacggcgatatggttaaaacagaggcactggaacgaaaagacacaggaaggcaatctagcaggcaggttgctaagctagacgccaagaaaagcttccactgcgacatttgcgatgcctcctttatgcgcgaggactccctcagaagccacaaacgacagcactctgagtactccgagtctaaaaacagcgatgttactgtactgcaattccagatagacccttctaagcagccggccactccattaactgttggacacctgcaagtaccactgcaaccctcacaggtgccccagtttagcgagggaagggttaaaattatcgtgggccatcaggttccccaggctaacactattgtccaggccgccgctgcagccgtcaacattgtcccgccggcgctggtggcacaaaacccagaagagcttcctggcaattcacggctgcagatactgaggcaagtgtccctgatagcacccccccagagttcacggtgtccgtctgaagccggtgctatgactcagcctgccgtgttgctgactactcatgagcagacagacggcgcaactctgcatcagacattaattcccacggcttccggcggaccgcaggaggggtccggcaatcagactttcattacctcttccggcatcacctgtaccgattttgaagggctaaacgcccttattcaggagggtactgcagaagtgacggtggtctccgatgggggtcaaaacatcgctgtcgctacaacagctccgcctgtgttctcctcctcctcccagcaagaactgcccaaacagacttacagcataattcagggggccgcacaccctgccctgctttgtcccgccgacagtattccggactag

SEQ ID NO: 261788 - DNA, 2040 bp, Artificial Sequence
  derived and/or modified sequence
atgaacgcttcctcagaaggagaaagtttcgccggtagcgtgcaaagcgggaccactgtgctcgtggagctgacccctgatattcacatttgtggcatctgtaaacaacagtttaataatctggatgcctttgtggctcacaaacagtcgggctgtcagctgacagggacttctgccgctgcccctagcacggtacagttcgttagtgaggagaccgtcccagccacccaaacccagactacgactagaaccatcacctcagagactcagacgatcacggtttctgccccagagtttgtctttgaacacggataccagacatatcttccaaccgagtctaatgaaaaccaaacagccactgtcatcagtctgcctgcaaagtctcgtacaaaaaagcccaccacgccacccgctcagaagcgtttgaattgctgttaccctggatgccaattcaagactgcctacgggatgaaagatatggagagacacctgaaaatacatactggtgacaaaccccataagtgcgaggtgtgcggaaaatgtttttcaagaaaggataagctgaagactcacatgcgatgccacaccggtgtgaaaccgtacaagtgtaagacctgtgattacgcagccgctgacagcagcagtttaaacaaacaccttaggatacattctgacgaaaggccattcaagtgccaaatctgcccatatgcctctcggaactcatcccagctaactgtgcacctccgctctcataccggcgatgcccctttccagtgctggctctgcagcgcaaagttcaaaatctcgagcgatcttaagcggcacatgagggtgcattctggtgagaaaccttttaaatgtgaattctgcaatgtcagatgcacaatgaaggggaaccttaaatctcacattcgtatcaaacactccggaaataactttaagtgccctcattgtgatttcctcggcgattcaaaggccacgctgcgaaagcattcccgcgtgcatcaatccgagcatcccgagaaatgctctgagtgcagctattcctgttcctcaaaagcggctttacgcatccacgaacgtatccactgcactgataggccttttaaatgtaactactgcagttttgatacaaaacagcccagtaacctgtctaaacacatgaaaaagtttcatggtgacatggtgaagaccgaggctctggaacggaaggacaccggacggcagtcaagtcgacaagtggcaaaattggacgcaaagaagagcttccactgcgatatctgcgacgctagtttcatgagagaggatagcctgaggtcacacaagcgtcagcattctgagtactcggagtcaaaaaactcagacgttacggtgctgcagtttcagatcgacccttctaagcagcctgcgactcctctgaccgtcggccacctgcaggtgcccctccaaccgtcacaagttcctcaattctccgagggacgcgtgaagattatcgtcggacatcaggtaccccaggcgaataccatcgtacaggctgcagctgcggctgtgaacattgtaccaccggcacttgttgctcaaaatccagaggagctccccggtaatagcagactgcagatattgagacaggtgtccctgattgcccctccccagagttcacgatgcccaagtgaggccggtgcaatgacacagcctgctgtgctgcttactacccacgaacagaccgacggagcaactctgcatcagacgctaatccccacagcttcagggggaccccaggagggctccggcaaccagaccttcataacatcttctggtattacttgtacagactttgagggtctgaacgcactcatccaggagggcaccgcagaggtcaccgtggtttcagacggcggacagaacattgctgtcgccaccacagctcccccagtgttttcctccagttctcagcaggagctgcccaaacagacttacagcattatacagggagccgctcacccagccctgttgtgccccgcagatagtatccctgactag

SEQ ID NO: 261789 - DNA, 1572 bp, Artificial Sequence
  derived and/or modified sequence
atgaaggatatggagcgacatcttaagatacacaccggtgacaaacctcacaagtgtgaggtgtgcggaaagtgcttctctagaaaagacaagctgaaaacgcacatgcggtgtcacaccggcgtcaaaccctacaaatgtaagacatgtgactatgccgctgctgattcctcaagtcttaataaacacctgaggatacactccgatgagcggccttttaagtgtcagatttgcccttacgccagccgcaattcctcccagttaaccgtgcatttacggagtcacaccggagacgcgcctttccagtgctggctgtgctccgctaagttcaagattagctcagatctcaagcggcacatgcgtgtgcatagcggagagaaacccttcaagtgcgagttctgtaatgtgaggtgtacaatgaagggaaacctcaaaagccacatacgcataaaacactcaggtaataactttaagtgtccccactgcgacttcctcggcgacagcaaagccactttgcgaaagcattcacgggtccatcagagcgagcatcctgagaagtgcagcgagtgctcttactcttgttcctccaaggctgcactgcgtatccatgagaggatccattgcaccgatagaccgttcaaatgcaactattgctctttcgatacaaagcagccaagcaatctatcgaaacacatgaaaaaattccacggagatatggtgaagacagaagctctggaaaggaaagacaccggcagacagtcaagccgccaggtagctaagctcgacgccaaaaagagcttccactgcgatatttgcgatgctagttttatgagggaggatagcctcagaagtcacaaacgtcagcacagcgaatatagcgaaagcaaaaacagcgacgtcaccgtcttgcagtttcagatcgacccttcaaagcaaccggctaccccactcactgtaggacaccttcaggtacccctgcagccatcacaggttccacagttctcggaagggagggtcaagatcatcgtcggacaccaggtcccccaagcgaatactatcgtgcaagcagccgcagctgccgtgaacatcgtccctcctgccctagtcgctcaaaatcccgaagagttaccgggaaactctaggttacaaattctcaggcaggtttctctgattgcgccaccccagtctagtcggtgtcccagcgaagcaggggctatgacccagcctgccgtgttacttaccacccacgaacagaccgacggggctacactgcaccaaaccctcatcccaaccgcttccggcggaccccaagaaggcagcggaaaccagaccttcatcacctcatccgggatcacgtgtaccgatttcgaaggtctgaacgctcttatccaagaggggacagctgaagtgactgtggttagcgacggcggacagaatatcgctgtcgcgaccaccgcaccacctgtgttttcatcctcatcccagcaggagctgccaaaacagacatattcgattattcaaggcgctgctcacccagcgctgctttgtcccgctgattctattcccgattag

SEQ ID NO: 261790 - DNA, 3040 bp, Artificial Sequence
  derived and/or modified sequence
ccccgcctcgcagagttgggagaaggcagggtggggggtgtggaaaaataaaaggaaaagtccttgcaccatgtagatcagcgtcccccactttggcatcccggccggccggggacctcccagtctgcggccatgaacgcgagcagcgagggcgagagcttcgcgggctcggtgcaaagtggcacaacggtgctggtggagctgactcccgacatccatatctgcggcatctgcaagcagcagtttaacaacctggatgcctttgtagctcacaagcaaagtggctgccagctgacaggcacatccgcagcagcccccagcacggtccagtttgtatcggaggaaacagtgcctgccacccagactcagaccaccaccagaaccatcacctcggagacccagacaatcacagtttcagctccagaatttgtttttgaacatggctatcaaacttacctgcccacggaaagtaatgaaaaccagacagccactgtcatctctctccctgccaagtcacgcaccaaaaagcccacaacaccacctgctcagaaaaggcttaactgttgctatccaggttgccaattcaagactgcttatggcatgaaggacatggagcggcatttaaaaattcacacgggagacaaaccccataagtgtgaagtctgtggcaagtgctttagccggaaagacaagctgaaaactcacatgcggtgccacacgggcgtgaagccctacaagtgtaagacgtgtgactacgccgctgccgacagcagcagcctcaacaagcacctgaggatccactcggacgagcggcccttcaaatgccagatctgcccctacgccagccgcaactccagccagctcactgtccacctgcgatcccacacgggggacgcccccttccagtgctggctctgtagcgccaagttcaaaatcagctcggacttgaaaaggcacatgcgggtgcactcgggggagaagcctttcaagtgcgagttctgcaatgtccgctgcaccatgaaggggaacctcaagtcgcacatccgtatcaagcacagcgggaataacttcaagtgtcctcattgcgacttcctgggtgacagcaaagccaccctccggaagcacagccgcgtgcaccagtcggagcatcctgagaagtgctcggaatgcagctactcctgctccagcaaggccgccctgcgcatccacgagcgtatccactgcaccgaccgccctttcaagtgcaactactgcagcttcgacaccaaacagcccagcaacctgagcaagcacatgaagaagttccatggggacatggttaagactgaggctctagagaggaaggacaccggcaggcagagcagccggcaggtggccaagctggatgccaagaagagtttccactgcgatatatgcgatgcctccttcatgcgggaggactcgctccgcagccacaagagacagcacagtgagtacagtgagagtaagaactcggacgtgaccgttctccagtttcagatcgaccccagcaagcagcccgccacgcccctcactgtgggacacctccaggtgcccctccagcccagccaagtgccccagttcagcgagggaagagtcaaaatcatcgttgggcatcaggtgccccaggcgaacaccatcgtccaggctgccgccgctgcagtgaacatcgtcccgcctgccttggtggcccagaacccagaggaactcccagggaacagccggctgcagatcctgcgccaggtcagtctgatcgccccccctcagtcctcgcggtgtccgagcgaggcgggcgcaatgacccagccggctgtcctgctgaccacccacgagcagacggacggagccactctgcaccagactctcatccccacggcctcaggtggcccccaggaaggctctggcaatcaaactttcattaccagttcgggtattacttgcactgactttgaaggcctaaacgccttgattcaggaggggacagcagaagtgacagtggtgagcgatggaggccagaacatcgcagtggccaccacagcgccaccggtcttctcctcctcttcccagcaagaactacccaagcagacctactccatcattcaaggggcagcccatccagctttgctctgtcccgccgactccattccagattagtgcttaaaaaaacaaaaggagtgggggaaaggaattgagaaaaagaaatcttaagtagaattctctaaaaggtttgctcttaatgttttctttgttttgttttgtttttgagacggagtctcgctctgtttcccaggctggagtgcagtggcgctatcttggctcactgcaacgtccgcctcccaggttcaagcgattctcatgcctcagccctccgagtagctgggaccacaggtgtacgacatcatgactggctaatttttgtatatttagtagagacggggtttcatcatgttgaactcctgacctcaagtgatctgcccacctcagcctcccaaagtgctgggattacaggtgtgagccaccatgcctggccgtggtttgctcttaatgtttttaaggatggttgtgaatccccctggccccataataaattgtaattttatactgcttactataatttttttaacactgtaacaactttgagaccacctctgaatcgtcgcattataactgttgtagaatcttaaatgttaccaagatgattccaatgaggggttggaattaaatgcattaagtagtgaattcatgtgtttgtttccaacttgattttccaactctaataaaggtttctgtccatcttattacatttgtgtagtaaatggtacttcccagcctctcttttgccccattctggaatactccccagagtttgggggtgttcatgttttatacatgtaagtctgttggcatgaaggaccattttctacataatatgacatggatacttgacccaaaaaaaaatgtttagtgctaatgagcagaaaatgaatggttccataataaattgatatctgattaaaatata

SEQ ID NO: 261791 - DNA, 2922 bp, Artificial Sequence
  derived and/or modified sequence
gtggaaaaataaaaggaaaagtccttgcaccatgtagatcagcgtcccccactttggcatcccggccggccggggacctcccagtctgcggccatgaacgcgagcagcgagggcgagagcttcgcgggctcggtgcaaattccaggtggcacaacggtgctggtggagctgactcccgacatccatatctgcggcatctgcaagcagcagtttaacaacctggatgcctttgtagctcacaagcaaagtggctgccagctgacaggcacatccgcagcagcccccagacaatcacagtttcagctccagaatttgtttttgaacatggctatcaaacttacctgcccacggaaagtaatgaaaaccagacagccactgtcatctctctccctgccaagtcacgcaccaaaaagcccacaacaccacctgctcagaaaaggcttaactgttgctatccaggttgccaattcaagactgcttatggcatgaaggacatggagcggcatttaaaaattcacacgggagacaaaccccataagtgtgaagtctgtggcaagtgctttagccggaaagacaagctgaaaactcacatgcggtgccacacgggcgtgaagccctacaagtgtaagacgtgtgactacgccgctgccgacagcagcagcctcaacaagcacctgaggatccactcggacgagcggcccttcaaatgccagatctgcccctacgccagccgcaactccagccagctcactgtccacctgcgatcccacacgggggacgcccccttccagtgctggctctgtagcgccaagttcaaaatcagctcggacttgaaaaggcacatgcgggtgcactcgggggagaagcctttcaagtgcgagttctgcaatgtccgctgcaccatgaaggggaacctcaagtcgcacatccgtatcaagcacagcgggaataacttcaagtgtcctcattgcgacttcctgggtgacagcaaagccaccctccggaagcacagccgcgtgcaccagtcggagcatcctgagaagtgctcggaatgcagctactcctgctccagcaaggccgccctgcgcatccacgagcgtatccactgcaccgaccgccctttcaagtgcaactactgcagcttcgacaccaaacagcccagcaacctgagcaagcacatgaagaagttccatggggacatggttaagactgaggctctagagaggaaggacaccggcaggcagagcagccggcaggtggccaagctggatgccaagaagagtttccactgcgatatatgcgatgcctccttcatgcgggaggactcgctccgcagccacaagagacagcacagtgagtacagtgagagtaagaactcggacgtgaccgttctccagtttcagatcgaccccagcaagcagcccgccacgcccctcactgtgggacacctccaggtgcccctccagcccagccaagtgccccagttcagcgagggaagagtcaaaatcatcgttgggcatcaggtgccccaggcgaacaccatcgtccaggctgccgccgctgcagtgaacatcgtcccgcctgccttggtggcccagaacccagaggaactcccagggaacagccggctgcagatcctgcgccaggtcagtctgatcgccccccctcagtcctcgcggtgtccgagcgaggcgggcgcaatgacccagccggctgtcctgctgaccacccacgagcagacggacggagccactctgcaccagactctcatccccacggcctcaggtggcccccaggaaggctctggcaatcaaactttcattaccagttcgggtattacttgcactgactttgaaggcctaaacgccttgattcaggaggggacagcagaagtgacagtggtgagcgatggaggccagaacatcgcagtggccaccacagcgccaccggtcttctcctcctcttcccagcaagaactacccaagcagacctactccatcattcaaggggcagcccatccagctttgctctgtcccgccgactccattccagattagtgcttaaaaaaacaaaaggagtgggggaaaggaattgagaaaaagaaatcttaagtagaattctctaaaaggtttgctcttaatgttttctttgttttgttttgtttttgagacggagtctcgctctgtttcccaggctggagtgcagtggcgctatcttggctcactgcaacgtccgcctcccaggttcaagcgattctcatgcctcagccctccgagtagctgggaccacaggtgtacgacatcatgactggctaatttttgtatatttagtagagacggggtttcatcatgttgaactcctgacctcaagtgatctgcccacctcagcctcccaaagtgctgggattacaggtgtgagccaccatgcctggccgtggtttgctcttaatgtttttaaggatggttgtgaatccccctggccccataataaattgtaattttatactgcttactataatttttttaacactgtaacaactttgagaccacctctgaatcgtcgcattataactgttgtagaatcttaaatgttaccaagatgattccaatgaggggttggaattaaatgcattaagtagtgaattcatgtgtttgtttccaacttgattttccaactctaataaaggtttctgtccatcttattacatttgtgtagtaaatggtacttcccagcctctcttttgccccattctggaatactccccagagtttgggggtgttcatgttttatacatgtaagtctgttggcatgaaggaccattttctacataatatgacatggatacttgacccaaaaaaaaatgtttagtgctaatgagcagaaaatgaatggttccataataaattgatatctgattaaaat

SEQ ID NO: 261792 - protein, 645 aa, Artificial Sequence
  derived and/or modified sequence
MNASSEGESFAGSVQIPGGTTVLVELTPDIHICGICKQQFNNLDAFVAHKQSGCQLTGTSAAAPSTVQFVSEETVPATQTQTTTRTITSETQTITVSAPEFVFEHGYQTYLPTESNENQTATVISLPAKSRTKKPTTPPAQKRLNCCYPGCQFKTAYGMKDMERHLKIHTGDKPHKCEVCGKCFSRKDKLKTHMRCHTGVKPYKCKTCDYAAADSSSLNKHLRIHSDERPFKCQICPYASRNSSQLTVHLRSHTASELDDDVPKANCLSTESTDTPKAPVITLPSEAREQMATLGERTFNCCYPGCHFKTVHGMKDLDRHLRIHTGDKPHKCEFCDKCFSRKDNLTMHMRCHTSVKPHKCHLCDYAAVDSSSLKKHLRIHSDERPYKCQLCPYASRNSSQLTVHLRSHTGDTPFQCWLCSAKFKISSDLKRHMIVHSGEKPFKCEFCDVRCTMKANLKSHIRIKHTFKCLHCAFQGRDRADLLEHSRLHQADHPEKCPECSYSCSSAAALRVHSRVHCKDRPFKCDFCSFDTKRPSSLAKHVDKVHRDEAKTENRAPLGKEGLREGSSQHVAKIVTQRAFRCETCGASFVRDDSLRCHKKQHSDQSENKNSDLVTFPPESGASGQLSTLVSVGQLEAPLEPSQDL

SEQ ID NO: 261793 - protein, 643 aa, Artificial Sequence
  derived and/or modified sequence
MNASSEGESFAGSVQIPGGTTVLVELTPDIHICGICKQQFNNLDAFVAHKQSGCQLTGTSAAAPSTVQFVSEETVPATQTQTTTRTITSETQTITVSAPEFVFEHGYQTYLPTESNENQTATVISLPAKSRTKKPTTPPAQKRLNCCYPGKGSIMSYLCRGLGRYPSEIISDVQKSCKNCTKKNSPNVTILLYLLCHSLYIYKLLQCVFPKNQNILLNNHRTIIKSDFVIKCHFMSFISSNQEQLSIYLSFRLCSFGRNHKMTVCFSRSSHIFPITVVLTLVTWLRMFLPVFSMLKLSFFFLGCQFKTAYGMKDMERHLKIHTGDKPHKCEVCGKCFSRKDKLKTHMRCHTGVKPYKCKTCDYAAADSSSLNKHLRIHSDERPFKCQICPYASRNSSQLTVHLRSHTGDAPFQCWLCSAKFKISSDLKRHMRVHSGEKPFKCEFCNVRCTMKGNLKSHIRIKHSGNNFKCPHCDFLGDSKATLRKHSRVHQSEHPEKCSECSYSCSSKAALRIHERIHCTDRPFKCNYCSFDTKQPSNLSKHMKKFHGDMVKTEALERKDTGRQSSRQVAKLDAKKSFHCDICDASFMREDSLRSHKRQHSEYSESKNSDVTVLQFQIDPSKQPATPLTVGHLQVPLQPSQVP

SEQ ID NO: 261794 - protein, 120 aa, Artificial Sequence
  derived and/or modified sequence
  misc_feature (1)..(1): Xaa can be any naturally occurring amino acid
XERTFNCCYPGCHFKTVHGMKDLDRHLRIHTGDKPHKCEFCDKCFSRKDNLTMHMRCHTSVKPHKCHLCDYAAVDSSSLKKHLRIHSDERPYKCQLCPYASRNSSQLTVHLRSHTGPGPG

SEQ ID NO: 261795 - DNA, 1938 bp, Artificial Sequence
  derived and/or modified sequence
atgaacgccagcagcgagggcgagagcttcgccggcagcgtgcagatccccggcggcaccaccgtgctggtggagctgacccccgacatccacatctgcggcatctgcaagcagcagttcaacaacctggacgccttcgtggcccacaagcagagcggctgccagctgaccggcaccagcgccgccgcccccagcaccgtgcagttcgtgagcgaggagaccgtgcccgccacccagacccagaccaccaccagaaccatcaccagcgagacccagaccatcaccgtgagcgcccccgagttcgtgttcgagcacggctaccagacctacctgcccaccgagagcaacgagaaccagaccgccaccgtgatcagcctgcccgccaagagcagaaccaagaagcccaccaccccccccgcccagaagagactgaactgctgctaccccggctgccagttcaagaccgcctacggcatgaaggacatggagagacacctgaagatccacaccggcgacaagccccacaagtgcgaggtgtgcggcaagtgcttcagcagaaaggacaagctgaagacccacatgagatgccacaccggcgtgaagccctacaagtgcaagacctgcgactacgccgccgccgacagcagcagcctgaacaagcacctgagaatccacagcgacgagagacccttcaagtgccagatctgcccctacgccagcagaaacagcagccagctgaccgtgcacctgagaagccacaccgccagcgagctggacgacgacgtgcccaaggccaactgcctgagcaccgagagcaccgacacccccaaggcccccgtgatcaccctgcccagcgaggccagagagcagatggccaccctgggcgagagaaccttcaactgctgctaccccggctgccacttcaagaccgtgcacggcatgaaggacctggacagacacctgagaatccacaccggcgacaagccccacaagtgcgagttctgcgacaagtgcttcagcagaaaggacaacctgaccatgcacatgagatgccacaccagcgtgaagccccacaagtgccacctgtgcgactacgccgccgtggacagcagcagcctgaagaagcacctgagaatccacagcgacgagagaccctacaagtgccagctgtgcccctacgccagcagaaacagcagccagctgaccgtgcacctgagaagccacaccggcgacacccccttccagtgctggctgtgcagcgccaagttcaagatcagcagcgacctgaagagacacatgatcgtgcacagcggcgagaagcccttcaagtgcgagttctgcgacgtgagatgcaccatgaaggccaacctgaagagccacatcagaatcaagcacaccttcaagtgcctgcactgcgccttccagggcagagacagagccgacctgctggagcacagcagactgcaccaggccgaccaccccgagaagtgccccgagtgcagctacagctgcagcagcgccgccgccctgagagtgcacagcagagtgcactgcaaggacagacccttcaagtgcgacttctgcagcttcgacaccaagagacccagcagcctggccaagcacgtggacaaggtgcacagagacgaggccaagaccgagaacagagcccccctgggcaaggagggcctgagagagggcagcagccagcacgtggccaagatcgtgacccagagagccttcagatgcgagacctgcggcgccagcttcgtgagagacgacagcctgagatgccacaagaagcagcacagcgaccagagcgagaacaagaacagcgacctggtgaccttcccccccgagagcggcgccagcggccagctgagcaccctggtgagcgtgggccagctggaggcccccctggagcccagccaggacctgtag

SEQ ID NO: 261796 - DNA, 1932 bp, Artificial Sequence
  derived and/or modified sequence
atgaacgccagcagcgagggcgagagcttcgccggcagcgtgcagatccccggcggcaccaccgtgctggtggagctgacccccgacatccacatctgcggcatctgcaagcagcagttcaacaacctggacgccttcgtggcccacaagcagagcggctgccagctgaccggcaccagcgccgccgcccccagcaccgtgcagttcgtgagcgaggagaccgtgcccgccacccagacccagaccaccaccagaaccatcaccagcgagacccagaccatcaccgtgagcgcccccgagttcgtgttcgagcacggctaccagacctacctgcccaccgagagcaacgagaaccagaccgccaccgtgatcagcctgcccgccaagagcagaaccaagaagcccaccaccccccccgcccagaagagactgaactgctgctaccccggcaagggcagcatcatgagctacctgtgcagaggcctgggcagataccccagcgagatcatcagcgacgtgcagaagagctgcaagaactgcaccaagaagaacagccccaacgtgaccatcctgctgtacctgctgtgccacagcctgtacatctacaagctgctgcagtgcgtgttccccaagaaccagaacatcctgctgaacaaccacagaaccatcatcaagagcgacttcgtgatcaagtgccacttcatgagcttcatcagcagcaaccaggagcagctgagcatctacctgagcttcagactgtgcagcttcggcagaaaccacaagatgaccgtgtgcttcagcagaagcagccacatcttccccatcaccgtggtgctgaccctggtgacctggctgagaatgttcctgcccgtgttcagcatgctgaagctgagcttcttcttcctgggctgccagttcaagaccgcctacggcatgaaggacatggagagacacctgaagatccacaccggcgacaagccccacaagtgcgaggtgtgcggcaagtgcttcagcagaaaggacaagctgaagacccacatgagatgccacaccggcgtgaagccctacaagtgcaagacctgcgactacgccgccgccgacagcagcagcctgaacaagcacctgagaatccacagcgacgagagacccttcaagtgccagatctgcccctacgccagcagaaacagcagccagctgaccgtgcacctgagaagccacaccggcgacgcccccttccagtgctggctgtgcagcgccaagttcaagatcagcagcgacctgaagagacacatgagagtgcacagcggcgagaagcccttcaagtgcgagttctgcaacgtgagatgcaccatgaagggcaacctgaagagccacatcagaatcaagcacagcggcaacaacttcaagtgcccccactgcgacttcctgggcgacagcaaggccaccctgagaaagcacagcagagtgcaccagagcgagcaccccgagaagtgcagcgagtgcagctacagctgcagcagcaaggccgccctgagaatccacgagagaatccactgcaccgacagacccttcaagtgcaactactgcagcttcgacaccaagcagcccagcaacctgagcaagcacatgaagaagttccacggcgacatggtgaagaccgaggccctggagagaaaggacaccggcagacagagcagcagacaggtggccaagctggacgccaagaagagcttccactgcgacatctgcgacgccagcttcatgagagaggacagcctgagaagccacaagagacagcacagcgagtacagcgagagcaagaacagcgacgtgaccgtgctgcagttccagatcgaccccagcaagcagcccgccacccccctgaccgtgggccacctgcaggtgcccctgcagcccagccaggtgccctag

SEQ ID NO: 261797 - DNA, 1938 bp, Artificial Sequence
  derived and/or modified sequence
atgaacgcctcaagcgagggggaatcgtttgcggggtccgtgcaaatacccgggggcacaacagttctggttgaacttacccctgacatacatatctgtgggatttgcaaacaacagttcaataatctcgacgcttttgttgcccataagcagagtgggtgccaattaactggaacatctgccgccgctccatctacggttcagttcgtatcagaagagacagtgcctgcaactcagacgcagaccactactagaaccatcacttccgaaacacagactatcacagtttccgctccggaattcgtttttgagcatggctaccagacttatttgcccactgaaagcaatgaaaatcagaccgcaaccgttatctcacttcccgccaagtcccgaactaagaagcctacgaccccgcctgcacagaagagattaaattgctgttatcctggatgccagtttaagacggcctacggtatgaaggacatggagaggcacctgaagatccacaccggcgacaaaccccacaagtgcgaggtctgcgggaagtgtttcagtagaaaggacaagctgaagactcatatgcggtgtcacacaggcgtcaagccctacaaatgtaaaacttgtgattacgccgcggctgatagctcctcactcaacaaacatctccgcattcactccgacgaacgacctttcaagtgccagatctgcccgtacgcatccaggaatagctcccagctcactgtacatttacgtagccatacagcctcagagctggatgacgacgtgcccaaggccaactgtctgagtaccgaaagtacggacacaccgaaggcaccggtcattactttgcccagtgaggcccgggagcaaatggccactctgggggagcgcacattcaattgctgctatcccggctgtcatttcaaaaccgtacacggcatgaaagatctggacaggcatttacgcatacataccggtgataagccacacaaatgtgagttttgcgacaagtgctttagcagaaaggacaatctcactatgcacatgcggtgccatacctctgtgaaacctcataagtgccatctttgtgattatgcagccgttgactcttcaagtcttaaaaaacacctgagaatccacagtgacgagcggccatacaaatgtcagctctgtccctatgctagccgcaactcttctcaattgactgtacatttgcgatcgcatacaggggacacaccgtttcagtgctggttatgtagtgccaaattcaagattagttctgatcttaagcgacacatgattgttcatagcggggagaagcccttcaaatgcgaattttgtgatgtccggtgcactatgaaagcaaacttgaagtcccatattcggattaaacacacattcaagtgtcttcattgcgctttccagggacgggatcgggcagacctgctcgaacacagtcggctccatcaggcggatcatccagaaaaatgccctgaatgcagttactcttgcagttctgccgccgcactgcgcgttcactcacgcgtccactgcaaggatcgcccattcaagtgtgatttctgttcatttgataccaagaggccctcgtcactcgcaaagcacgtggacaaagtgcacagagacgaagccaaaaccgagaaccgcgccccgctggggaaagaggggctgcgggaggggagctcccaacacgtcgctaagattgtcacccagcgcgcattcagatgcgagacttgtggagcttctttcgtgcgcgacgattcgctgaggtgtcataaaaagcagcatagtgatcagtcagagaacaagaacagcgacctagtcacattcccccccgagagcggtgcaagcgggcagctgtctacactggtgtcggtgggacaactagaggcacccttagagccctcccaggacctctag

SEQ ID NO: 261798 - DNA, 1932 bp, Artificial Sequence
  derived and/or modified sequence
atgaacgcaagtagtgaaggggaatcatttgcaggatcagttcagattcccggcgggacaacagtgcttgtagagttgactccagatattcatatctgcggtatttgcaagcagcagtttaacaacttggatgcctttgtggctcacaagcagtcggggtgccaattgactggaaccagcgccgcagcaccttcgacagtccagtttgtgagcgaagaaacggtacctgctacccagacacaaactacgacccggaccatcactagtgagacccagaccatcacagtgagcgcaccagaatttgtgtttgaacatgggtaccaaacttacctgcccaccgagtccaacgagaatcagaccgccaccgtcatctcactccctgcgaaatctaggaccaaaaagcctacaacaccccccgcccagaagcggcttaactgttgttaccctggcaaaggttcaattatgtcttatctgtgcagggggttgggacgttacccaagcgaaatcatctccgacgtccagaagtcatgcaagaattgcaccaagaagaactcgccaaacgtcacgattcttctctatttgctgtgtcacagcctgtatatttacaagctgctgcagtgcgtctttccaaagaaccagaatatcctgcttaacaaccaccgaaccatcatcaagtccgacttcgtgattaagtgccactttatgtccttcatctcctccaaccaggagcaactgtctatatatctttcctttaggttgtgctccttcggccgaaatcataagatgaccgtgtgtttctctcggtcgagccatatctttcctattactgtggtcctgacgcttgtgacgtggctccgtatgtttttgcctgtgttttcaatgctgaaactgtctttcttttttcttggatgccagtttaagaccgcttacggcatgaaagacatggagcgccacctgaaaatccatactggcgacaagccgcacaagtgtgaggtctgcggcaaatgtttctctcggaaagataaactgaaaacacatatgcgctgccacactggagttaagccatataagtgcaagacctgcgattacgctgcagctgactcttcctcgctaaacaagcacctcagaatccattcagacgaaagacccttcaaatgtcaaatctgtccctacgctagccggaattcatctcaactcacagtgcacttaaggtcacataccggcgatgccccgttccaatgctggttgtgtagtgccaaatttaagatctcaagcgatctaaaacggcatatgcgtgtccattcaggagaaaagccctttaaatgtgagttctgtaatgtgaggtgcacaatgaaagggaacctgaaaagccacatcagaattaagcactctggcaacaacttcaagtgcccgcactgtgacttcctcggggacagcaaagccactctgcgcaaacatagtagggtgcaccaaagcgagcaccccgaaaaatgttctgagtgctcatactcttgcagcagcaaggctgcactcaggatccatgagcggattcactgtacagatcgcccattcaagtgtaattattgcagctttgacacaaagcagccttccaacttgtctaaacatatgaaaaaatttcacggggatatggtcaaaaccgaggcactagagagaaaagacaccggcaggcagtccagtagacaggtcgcaaagctggacgcaaagaagtcgtttcactgtgacatttgtgatgcctccttcatgagggaggattccttgagaagccataagagacagcactccgagtacagtgaaagcaagaattccgatgtcacagttctgcagttccagatagaccctagcaagcagccagcaacacctctgactgtgggccatctacaggtcccgctgcagccctctcaggttccgtag

SEQ ID NO: 261799 - DNA, 1938 bp, Artificial Sequence
  derived and/or modified sequence
atgaatgccagcagcgagggggagagctttgctggctctgtgcagatccctgggggcaccaccgtgctggtggagctgaccccagacatccacatctgtggcatctgcaagcagcagttcaacaacctggatgcctttgtggcccacaagcagagcggctgccagctgaccggcaccagcgctgctgcccccagcacagtgcagtttgtgtctgaggagaccgtgcctgccacccagacccagaccaccaccaggaccatcaccagcgagacccagaccatcaccgtgtctgcccctgagtttgtgtttgaacatggctaccagacctacctgcccacagagagcaatgaaaaccagacagccaccgtcatcagcctgcctgccaagagcaggaccaagaagcccaccaccccaccagcccagaagaggctgaactgctgctacccaggctgccagttcaagacagcctacggcatgaaggacatggagcggcacctgaagatccacactggagacaagccccacaagtgtgaggtgtgtgggaagtgcttcagcaggaaggacaagctgaagacccacatgcgctgccacactggagtgaagccctacaagtgcaagacctgtgactatgctgctgctgacagcagcagcctgaacaagcacctgcgcatccacagtgatgagcggcccttcaagtgccagatctgcccctatgccagcaggaacagcagccagctgactgtgcacctgcggagccacacagccagcgagctggatgatgatgtgcccaaggccaactgcctgagcacagagagcacagacacccccaaggcccctgtgatcaccctgcccagcgaggcccgggagcagatggccaccctgggggagaggaccttcaactgctgctacccaggctgccacttcaagacagtgcacggcatgaaggacctggacagacacctgcgcatccacactggagacaagccccacaagtgtgagttctgtgacaagtgcttcagcaggaaggacaacctgaccatgcacatgcgctgccacacctctgtgaagccccacaagtgccacctgtgtgactatgctgctgtggacagcagcagcctgaagaagcacctgcgcatccacagtgatgagcggccctacaagtgccagctgtgcccctatgccagcaggaacagcagccagctgactgtgcacctgcggagccacactggagacacccccttccagtgctggctgtgcagcgccaagttcaagatcagcagtgacctgaagaggcacatgattgtgcacagcggggagaagcccttcaagtgtgagttctgtgatgtgcgctgcaccatgaaggccaacctgaagagccacatccgcatcaagcacaccttcaagtgcctgcactgtgccttccagggccgggacagagctgacctgctggagcacagccggctgcaccaggccgaccaccctgagaagtgcccagaatgttcctacagctgcagcagcgctgctgccctgcgggtgcacagccgggtgcactgcaaggaccggcccttcaagtgtgacttctgcagctttgacaccaagaggcccagcagcctggccaagcacgtggacaaggtgcacagagatgaggccaagacagaaaatagagcccccctgggcaaggagggcctgcgggagggcagcagccagcacgtggccaagatcgtgacccagagggccttccgctgtgagacctgtggggccagctttgtgagagatgacagcctgcgctgccacaagaagcagcacagcgaccagagcgagaacaagaacagcgacctggtgaccttccccccagagagcggggccagcggccagctgagcaccctggtgtctgtgggccagctggaggcccccctggagcccagccaggacctgtag

SEQ ID NO: 261800 - DNA, 1932 bp, Artificial Sequence
  derived and/or modified sequence
atgaatgccagcagcgagggggagagctttgctggctctgtgcagatccctgggggcaccaccgtgctggtggagctgaccccagacatccacatctgtggcatctgcaagcagcagttcaacaacctggatgcctttgtggcccacaagcagagcggctgccagctgaccggcaccagcgctgctgcccccagcacagtgcagtttgtgtctgaggagaccgtgcctgccacccagacccagaccaccaccaggaccatcaccagcgagacccagaccatcaccgtgtctgcccctgagtttgtgtttgaacatggctaccagacctacctgcccacagagagcaatgaaaaccagacagccaccgtcatcagcctgcctgccaagagcaggaccaagaagcccaccaccccaccagcccagaagaggctgaactgctgctacccaggcaagggcagcatcatgagctacctgtgccggggcctgggccgctaccccagcgagatcatcagtgatgtgcagaagagctgcaagaactgcaccaagaagaacagccccaacgtgaccatcctgctgtacctgctgtgccacagcctgtacatctacaagctgctgcagtgtgtgttccccaagaaccagaacatcctgctgaacaaccacaggaccatcatcaagagtgactttgtgatcaagtgccacttcatgtccttcatcagcagcaaccaggagcagctgagcatctacctgtccttccggctgtgcagctttggaagaaaccacaagatgacagtgtgcttcagccgcagcagccacatcttccccatcaccgtggtgctgaccctggtgacctggctgaggatgttcctgcccgtcttctccatgctgaagctgtccttcttcttcctgggctgccagttcaagacagcctacggcatgaaggacatggagcggcacctgaagatccacactggagacaagccccacaagtgtgaggtgtgtgggaagtgcttcagcaggaaggacaagctgaagacccacatgcgctgccacactggagtgaagccctacaagtgcaagacctgtgactatgctgctgctgacagcagcagcctgaacaagcacctgcgcatccacagtgatgagcggcccttcaagtgccagatctgcccctatgccagcaggaacagcagccagctgactgtgcacctgcggagccacactggagatgcccccttccagtgctggctgtgcagcgccaagttcaagatcagcagtgacctgaagaggcacatgagggtgcacagcggggagaagcccttcaagtgtgagttctgcaatgtgcgctgcaccatgaagggcaacctgaagagccacatccgcatcaagcacagcggcaacaacttcaagtgcccccactgtgacttcctgggggacagcaaggccaccctgaggaagcacagccgggtgcaccagagcgagcaccctgagaagtgcagcgagtgcagctacagctgcagcagcaaggccgccctgcgcatccacgagcgcatccactgcacagaccggcccttcaagtgcaactactgcagctttgacaccaagcagcccagcaacctgagcaagcacatgaagaagttccatggagacatggtgaagacagaggccctggagaggaaggacaccggccggcagagcagccggcaggtggccaagctggatgccaagaagagcttccactgtgacatctgtgatgccagcttcatgagggaggacagcctgcggagccacaagaggcagcacagcgagtacagcgagagcaagaacagtgatgtgacagtgctgcagttccagattgaccccagcaagcagcctgccacccccctgactgtgggccacctgcaggtgcccctgcagcccagccaggtgccctag

SEQ ID NO: 261801 - DNA, 1938 bp, Artificial Sequence
  derived and/or modified sequence
atgaacgccagcagcgagggcgagagcttcgccggcagcgtgcagatccccggtggcaccacagttttagtggagctcaccccagacatccacatttgcggcatttgtaagcagcagtttaacaatttggatgcattcgtggctcacaagcagagtgggtgtcagctgactggaacgagcgctgcagctccctccaccgtccagtttgtgagtgaggagaccgtacccgctactcagactcagaccactacacggacaatcacatcggaaacgcagaccatcaccgtctccgctcctgagttcgtctttgagcacggatatcaaacatatctccccactgagagcaatgaaaatcagacggcaactgtgattagcttacccgccaagtcccgaacaaagaagccgacaactcctcctgcgcagaaacgcctcaattgttgttatcccgggtgccagtttaaaacagcttatggaatgaaggatatggaacggcacctcaagatccacactggtgataaaccccacaaatgtgaggtatgtggaaaatgcttctcacgtaaggataaactgaagacgcacatgaggtgtcacaccggcgtgaaaccatacaaatgtaagacctgcgattatgctgccgcagatagtagttctctgaacaaacacctgcgtattcactcagacgagaggcccttcaaatgtcaaatctgtccctacgctagtaggaacagcagccaactgacagttcatctcagaagtcacaccgcctccgagctagacgatgatgtgccaaaggccaactgtttaagtaccgaatccaccgatactcctaaggccccagtcataaccctgcccagcgaggccagagaacagatggccactcttggtgagcggaccttcaactgttgttatcccgggtgccattttaagacagtgcatggcatgaaggacctcgaccggcatctccggattcataccggcgacaaaccacataagtgtgagttttgtgataagtgtttctctcggaaggacaacctaactatgcacatgcgatgccacacatccgttaagccccacaaatgccatctatgcgactacgcggcagttgactctagttctctcaaaaagcatttacggattcactctgacgagcgaccttacaaatgccagctatgtccatacgcaagccgaaatagcagccagctcacggttcatctgaggagccatactggagacacaccattccaatgctggctttgttctgccaaattcaaaatctcgtccgatttaaaaaggcatatgatagtgcattcaggagagaagcccttcaagtgtgaattttgtgatgtgaggtgcaccatgaaagctaatcttaagagtcacattcgcattaaacatactttcaagtgtctgcattgcgcatttcagggcagagaccgcgcggatctgctcgaacacagtaggctccaccaggccgaccaccccgagaagtgccccgagtgttcttattcctgtagtagcgccgccgcattacgggtccattcaagagtgcattgtaaggatcgccccttcaagtgcgatttttgtagcttcgatactaagagacccagctctctggcaaagcatgttgataaggtgcaccgagatgaggccaaaactgagaatcgggcccctctggggaaggagggactgagggagggctcgagccaacacgttgcgaaaatcgttactcagcgagctttcagatgtgagacatgcggagcgagtttcgtcagagacgattctctaaggtgccataagaagcagcattctgaccaaagcgaaaataagaatagcgacctggtgacctttccacccgagagtggagcctctgggcagctgagtacattggtgagtgtggggcaactcgaggctccattggagccaagtcaggacctgtag

SEQ ID NO: 261802 - DNA, 1932 bp, Artificial Sequence
  derived and/or modified sequence
atgaacgccagcagcgagggcgagagcttcgccggcagcgtgcagattccaggtgggacaacagtgttggttgagctgactccagacattcacatttgtggcatctgcaaacaacaattcaataacctggatgccttcgtggcacataagcagtccggatgccagctcaccggtacctctgccgccgcacccagcactgtgcaattcgtctctgaagagactgtgcctgctacacaaacccagaccaccacaaggacaatcaccagcgagactcagacaatcacagtgtcagccccagagttcgttttcgaacatggatatcagacatacctcccaactgaatctaacgagaaccagaccgccaccgtcatctccctgccagcgaaatctcgtacaaaaaagcccactaccccaccagcacagaaaagattaaactgctgctatcctggtaaaggcagcatcatgtcttacctgtgccgcggcctgggccgatacccttccgagataatttcagacgttcaaaagtcctgcaagaattgcaccaagaagaatagccccaacgtcacaatcctcttatacctgctttgtcattctttgtacatctataaactcctccagtgcgttttcccgaaaaatcagaatatcctgttgaataaccatcggactattataaagtccgatttcgtcataaaatgtcacttcatgtcattcataagctccaatcaggaacagctgtccatatacttgtcctttcgattgtgctcttttggccggaaccataagatgacagtttgcttttctcggtctagccacatcttccctattacagttgtgctgacccttgtaacttggctgagaatgttcttaccagttttctccatgcttaagctgagtttcttcttcctcgggtgtcagtttaaaacagcatatgggatgaaagacatggagcggcatctgaagatccatactggagacaagcctcacaagtgcgaagtgtgtggaaagtgtttttctcgaaaagataagctgaaaacccatatgagatgccatactggggtgaagccctacaaatgcaagacctgtgactatgcagccgcagactcctcctctttgaacaaacacctcagaattcactctgacgaaagaccattcaagtgccagatttgcccgtacgcctcgaggaacagctcccaactgacagtgcaccttcggtcccacactggcgatgcgccctttcagtgttggttgtgtagcgccaagttcaagatctctagcgatctgaagagacatatgagggtgcacagcggcgaaaagcctttcaaatgcgagttttgcaacgttagatgtactatgaagggcaacctgaagtcgcacatccgtatcaaacattcaggcaacaatttcaagtgtccacactgcgacttcctcggcgattccaaggccactttgcgtaaacatagccgcgtgcatcaatcagaacatcccgaaaaatgtagcgagtgctcctacagctgctcctcaaaagcggcgctcagaatccacgagcggatccactgcacggaccgcccattcaagtgcaattattgtagcttcgacactaaacagccatccaatctctcaaagcatatgaaaaagtttcacggcgatatggtgaagacggaggctctcgagcggaaggacacaggtcggcagtcctctagacaagtggccaaactcgacgcaaaaaagtcttttcattgcgacatctgtgatgctagcttcatgcgggaggattccctgcgatcccacaagcggcaacacagcgaatacagtgagtctaagaactctgatgtgactgttctgcagttccagatagacccctcaaaacagcccgcaaccccactgaccgtaggtcatctgcaagtccctctgcagccttcccaggtgccctag

SEQ ID NO: 261803 - DNA, 1938 bp, Artificial Sequence
  derived and/or modified sequence
atgaatgcctcgtctgaaggcgaatcattcgcgggatcagtccagatcccgggaggaacgaccgtgcttgtggaattgacccccgacatccatatttgcggaatttgtaagcagcaatttaacaacttagatgctttcgtggcgcataaacagtctggctgccagctgaccggaacgagcgccgcagcgcctagcactgtgcagttcgtttcggaggagacagtgcccgctacacagacgcagacaacaactagaacgatcacgagtgagactcagacgatcaccgtatccgccccagagtttgtgttcgaacacggctatcagacctaccttcctacagagtccaacgagaaccagaccgcgactgtcataagcctcccagcaaagagccggacaaagaaacccactacaccgcctgcgcaaaaacgactgaactgctgctatcccggatgtcagtttaagaccgcttatggaatgaaggacatggagcgccacctgaaaattcataccggcgataaaccgcacaagtgcgaagtttgtggaaaatgttttagcagaaaggacaaactgaagacacacatgagatgtcatacaggtgtcaagccatacaaatgcaaaacctgcgactacgcagccgctgattctagctctctgaacaagcaccttagaattcatagtgacgagaggccttttaagtgtcagatctgtccctatgcctcccggaattccagccagctgaccgtgcatcttcggtcacacacagcttctgagcttgatgatgacgtgcccaaagcaaattgcctctcgaccgagagcactgatactccaaaagccccagtgattacactgcccagtgaagcacgggaacaaatggcaacacttggcgaacgaactttcaattgttgttaccccggttgccattttaaaaccgtgcacggcatgaaggacctggaccgccaccttcggattcacacgggggataagccccataagtgtgagttttgcgataaatgctttagtaggaaagacaaccttacaatgcatatgcggtgccatacaagcgtgaagccgcacaagtgccacctatgtgattacgccgcagtggactcgtcctcccttaagaagcacttgcgcatacatagcgacgaaaggccctataaatgccagctgtgtccatatgcttcaagaaacagtagccaactgacagtacacctccgctctcataccggcgataccccttttcagtgttggctgtgcagcgcgaagttcaagatctcaagcgatctcaaaaggcatatgattgttcactcgggagagaagccattcaagtgcgaattttgcgacgtaaggtgtaccatgaaggcaaatctcaagtcccacatccggattaagcacacgtttaaatgcctgcattgcgcattccagggcagggatagagcagacctactcgagcacagcaggctgcaccaggcagaccacccagaaaaatgcccagaatgctcatacagttgctctagcgcggcagcgttacgagtacacagccgcgtgcactgtaaagatcgcccatttaagtgtgatttctgcagctttgatacaaaaaggccttctagcttagccaagcatgtcgacaaggtgcatcgagacgaggctaaaaccgaaaatcgcgcaccgctgggaaaggagggactgcgcgaaggctctagccagcacgttgcaaaaattgtgacacagagggcctttagatgtgagacatgcggagcttcatttgtgagagacgactccctgagatgtcataagaagcagcacagcgaccaatccgaaaacaagaattcagatctggtcactttcccccctgaatccggcgctagcgggcagttgtcaactctcgtcagcgtggggcagttggaagctcctctggaaccgagtcaggacctgtag

SEQ ID NO: 261804 - DNA, 1932 bp, Artificial Sequence
  derived and/or modified sequence
atgaatgcgtctagtgagggggaatctttcgctggttctgtacagattcccggagggaccaccgtgctcgtggagctcacgcctgatatacacatttgcgggatctgcaaacagcagtttaacaatttggatgcttttgtagcacacaaacagagtggttgccagctaaccggaacatcagccgcagcacctagcacagtccaatttgtctcggaggaaactgtccccgcaactcagacgcagaccaccaccagaacgattacctctgaaacccagactatcactgtatctgcaccagaattcgtttttgaacatggttatcaaacctatctgcctacggagagtaacgagaatcaaaccgcaaccgtcatcagcttacccgcaaagagcaggacaaagaagcccaccaccccacctgcccagaagaggctgaattgctgctacccaggtaaaggaagcatcatgtcatatctttgtagaggcttaggaaggtacccaagcgagatcatatccgatgttcagaagtcctgcaagaattgtaccaaaaagaatagccccaatgtgacgatcctactgtacctgctgtgccacagcttatatatctacaagcttttacagtgcgtctttcccaaaaatcagaacattctcttaaataatcaccgtacgatcattaaaagcgactttgtgatcaaatgccacttcatgagctttatctcatctaaccaggaacagctgtccatctacctctcttttcgtttgtgcagtttcgggcgtaaccacaagatgactgtctgttttagccggagttctcatatcttcccaattaccgtcgtgcttaccctggtgacgtggctacgcatgtttttacctgtgttcagtatgttgaagttgagctttttcttcttagggtgccaattcaagaccgcctacgggatgaaagatatggaacgtcacctaaaaattcataccggcgacaagcctcataagtgtgaagtttgtgggaagtgcttttccaggaaggacaaacttaagacccacatgcggtgccacaccggagttaaaccctacaagtgcaagacttgcgattacgcagctgccgattcttcatccctcaataagcacctgcggatccatagtgacgagagacctttcaagtgccagatttgtccatacgccagcagaaattcctctcagctgacagtccatctccgaagtcatactggcgacgcaccctttcaatgttggttatgctccgccaaatttaagatctccagcgacctgaagagacacatgcgcgtgcactctggtgagaagcctttcaagtgtgagttttgcaacgtacggtgcactatgaaaggaaacctcaaatcacatatccggatcaaacattccggcaacaatttcaagtgcccccactgtgacttcctgggcgacagtaaggcgaccttgcggaagcacagccgcgtgcaccaaagcgagcaccctgagaagtgctctgagtgttcctacagttgctcttctaaagcagctctgcgaattcacgagcggattcactgtaccgaccgcccttttaagtgtaactattgcagctttgacactaaacagccatctaatctaagtaagcacatgaagaagtttcacggcgatatggtgaagaccgaggccctggagcggaaggacacaggtagacagtcttctaggcaggtcgccaaactagacgccaagaaatcatttcattgcgacatctgcgatgcctctttcatgagagaggactcgctcagaagccacaagagacaacattctgagtattccgagtcgaaaaactccgacgtgacagttttgcagttccaaatcgatccgtccaagcagcctgcaacaccattgacggtgggacacctgcaggtgccactgcagccatcacaggtgccgtag

SEQ ID NO: 261805 - DNA, 2545 bp, Artificial Sequence
  derived and/or modified sequence
tgtagatcagcgtcccccactttggcatcccggccggccggggacctcccagtctgcggccatgaacgcgagcagcgagggcgagagcttcgcgggctcggtgcaaattccaggtggcacaacggtgctggtggagctgactcccgacatccatatctgcggcatctgcaagcagcagtttaacaacctggatgcctttgtagctcacaagcaaagtggctgccagctgacaggcacatccgcagcagcccccagcacggtccagtttgtatcggaggaaacagtgcctgccacccagactcagaccaccaccagaaccatcacctcggagacccagacaatcacagtttcagctccagaatttgtttttgaacatggctatcaaacttacctgcccacggaaagtaatgaaaaccagacagccactgtcatctctctccctgccaagtcacgcaccaaaaagcccacaacaccacctgctcagaaaaggcttaactgttgctatccaggttgccaattcaagactgcttatggcatgaaggacatggagcggcatttaaaaattcacacgggagacaaaccccataagtgtgaagtctgtggcaagtgctttagccggaaagacaagctgaaaactcacatgcggtgccacacgggcgtgaagccctacaagtgtaagacgtgtgactacgccgctgccgacagcagcagcctcaacaagcacctgaggatccactcggacgagcggcccttcaaatgccagatctgcccctacgccagccgcaactccagccagctcactgtccacctgcgatcccacacggcttcagaacttgatgatgatgttccaaaagcaaactgcctctccactgaaagcactgacactccgaaggcccctgtcatcactcttccctcagaggcaagggaacaaatggccacccttggagagaggacgttcaactgttgctacccaggttgccacttcaaaactgtccatggcatgaaagacttggaccgccatctcagaatccacacgggagacaaaccgcacaagtgtgagttctgtgacaagtgcttcagccggaaggacaacctgaccatgcacatgcggtgccacaccagtgtgaagccacacaagtgtcacctgtgtgactacgctgccgtggacagcagtagcctcaagaagcacctgcggatccactctgatgagcggccgtacaaatgccagctctgcccctatgccagccgcaactccagccagctcaccgtccacctgcgatctcacacgggggatacccccttccagtgctggctctgtagcgccaagttcaaaatcagctcggacttgaaaaggcacatgatcgtgcactcgggggagaagcctttcaagtgcgagttctgcgacgtccgctgcaccatgaaggcgaatctcaaatcgcacatccgcatcaagcacaccttcaaatgtctgcactgtgccttccagggccgggaccgggctgacctcctggagcacagccggctgcaccaggccgaccacccggagaagtgtccagagtgcagctactcctgctccagcgcggccgccctgcgcgtgcacagcagagtccactgtaaggaccgtcccttcaagtgtgacttctgcagcttcgacacgaagcggcccagcagcctggccaagcacgtcgacaaggtgcacagggacgaggccaagacggagaaccgggcccctctgggcaaggaagggctcagagagggcagctcccagcacgtggccaagatcgtgacgcagagggccttccgctgtgagacctgcggcgcctccttcgtcagggatgactctctgagatgccacaagaagcagcacagtgatcagagtgagaacaagaactcagacttggtcaccttcccaccggaaagcggtgcctcgggacagctcagcaccctggtctccgtggggcagctcgaggctcccctagagcccagccaagacctctagctcagccgaagagggtggtcagctgtcggaacttctgaccagtgctgttgcccagccctccagaggtgaggccactgagagacaggctttgggcaccacttctggggctggccgctccaacttcacaggccttcagaggcgatggctgggcgacagtgacgaaagcaaagcaaagcagggctgtggagacactcctcgcatttgtctcttccctccaaggattatctgagcaagtcgacttgttcattcaaaggcggggtctgccaagccctgctctatccaatggggatagcttctacgtaacggattccaattttaaaactgatccatctctgatggaattattaaacttagacgatatagaaaactaaaactaatctctagagtggaaagggttaaagtgaggaaggtgtacgtgaagggtctggggttgctggaaaacttctatttcataacctgggtgatcgttctaagagtgtttgccttatatgtttgtgtggtttcttttacctgttgtcttacaataaaaaaggcagactcatggta

SEQ ID NO: 261806 - DNA, 2278 bp, Artificial Sequence
  derived and/or modified sequence
ggcaggggcgcatccctcgccacccgcggtcgcccagcacgccgggacgcgcgtggccatccagctccccgggggcgttggggggctccgcgggcctgggcctcgggattcgcccgccgcttccccggggagccgctgctgcaaagccaggttggggcgccgggcccggccagcgccctctaggcagcggaagtgcagcttgctttacatccgtcctccccgcctcgcagagttgggagaaggcagggtggggggtgtggaaaaataaaaggaaaagtccttgcaccatgtagatcagcgtcccccactttggcatcccggccggccggggacctcccagtctgcggccatgaacgcgagcagcgagggcgagagcttcgcgggctcggtgcaaattccaggtggcacaacggtgctggtggagctgactcccgacatccatatctgcggcatctgcaagcagcagtttaacaacctggatgcctttgtagctcacaagcaaagtggctgccagctgacaggcacatccgcagcagcccccagcacggtccagtttgtatcggaggaaacagtgcctgccacccagactcagaccaccaccagaaccatcacctcggagacccagacaatcacagtttcagctccagaatttgtttttgaacatggctatcaaacttacctgcccacggaaagtaatgaaaaccagacagccactgtcatctctctccctgccaagtcacgcaccaaaaagcccacaacaccacctgctcagaaaaggcttaactgttgctatccaggtaaaggcagcattatgtcctacttgtgtagaggcttaggaagatatccatcagaaataatttcagatgtacagaaaagttgcaaaaattgtaccaaaaaaaattccccaaatgttaccattttattatatttgctttgtcattctttgtatatatacaaattacttcagtgtgtatttcctaaaaaccagaatattcttttaaataaccacaggacaatcatcaagtcagatttcgtcatcaagtgtcattttatgtctttcatttcctctaatcaagaacagttaagcatttatctttcattcaggttatgcagttttggcaggaaccacaaaatgacggtgtgtttttcccggtcatcacatatttttcccattaccgtggtgttaactcttgtcacttggttaaggatgtttctaccagttttctccatgctaaaactttcctttttttttttaggttgccaattcaagactgcttatggcatgaaggacatggagcggcatttaaaaattcacacgggagacaaaccccataagtgtgaagtctgtggcaagtgctttagccggaaagacaagctgaaaactcacatgcggtgccacacgggcgtgaagccctacaagtgtaagacgtgtgactacgccgctgccgacagcagcagcctcaacaagcacctgaggatccactcggacgagcggcccttcaaatgccagatctgcccctacgccagccgcaactccagccagctcactgtccacctgcgatcccacacgggggacgcccccttccagtgctggctctgtagcgccaagttcaaaatcagctcggacttgaaaaggcacatgcgggtgcactcgggggagaagcctttcaagtgcgagttctgcaatgtccgctgcaccatgaaggggaacctcaagtcgcacatccgtatcaagcacagcgggaataacttcaagtgtcctcattgcgacttcctgggtgacagcaaagccaccctccggaagcacagccgcgtgcaccagtcggagcatcctgagaagtgctcggaatgcagctactcctgctccagcaaggccgccctgcgcatccacgagcgtatccactgcaccgaccgccctttcaagtgcaactactgcagcttcgacaccaaacagcccagcaacctgagcaagcacatgaagaagttccatggggacatggttaagactgaggctctagagaggaaggacaccggcaggcagagcagccggcaggtggccaagctggatgccaagaagagtttccactgcgatatatgcgatgcctccttcatgcgggaggactcgctccgcagccacaagagacagcacagtgagtacagtgagagtaagaactcggacgtgaccgttctccagtttcagatcgaccccagcaagcagcccgccacgcccctcactgtgggacacctccaggtgcccctccagcccagccaagtgccc

SEQ ID NO: 261807 - protein, 584 aa, Artificial Sequence
  derived and/or modified sequence
MNSPGGRGKKKGSGGASNPVPPRPPPPCLAPAPPAAGPAPPPESPHKRNLYYFSYPLFVGFALLRLVAFHLGLLFVWLCQRFSRALMAAKRSSGAAPAPASASAPAPVPGGEAERVRVFHKQAFEYISIALRIDEDEKAGQKEQAVEWYKKGIEELEKGIAVIVTGQGEQCERARRLQAKMMTNLVMAKDRLQLLESGAVPKRKDPLTHTSNSLPRSKTVMKTGSAGLSGHHRAPSYSGLSMVSGVKQGSGPAPTTHKGTPKTNRTNKPSTPTTATRKKKDLKNFRNVDSNLANLIMNEIVDNGTAVKFDDIAGQDLAKQALQEIVILPSLRPELFTGLRAPARGLLLFGPPGNGKTMLAKAVAAESNATFFNISAASLTSKYVGEGEKLVRALFAVARELQPSIIFIDEVDSLLCERREGEHDASRRLKTEFLIEFDGVQSAGDDRVLVMGATNRPQELDEAVLRRFIKRVYVSLPNEETRLLLLKNLLCKQGSPLTQKELAQLARMTDGYSGSDLTALAKDAALGPIRELKPEQVKNMSASEMRNIRLSDFTESLKKIKRSVSPQTLEAYIRWNKDFGDTTV

SEQ ID NO: 261808 - DNA, 1755 bp, Artificial Sequence
  derived and/or modified sequence
atgaacagccccggcggcagaggcaagaagaagggcagcggcggcgccagcaaccccgtgccccccagacccccccccccctgcctggcccccgccccccccgccgccggccccgcccccccccccgagagcccccacaagagaaacctgtactacttcagctaccccctgttcgtgggcttcgccctgctgagactggtggccttccacctgggcctgctgttcgtgtggctgtgccagagattcagcagagccctgatggccgccaagagaagcagcggcgccgcccccgcccccgccagcgccagcgcccccgcccccgtgcccggcggcgaggccgagagagtgagagtgttccacaagcaggccttcgagtacatcagcatcgccctgagaatcgacgaggacgagaaggccggccagaaggagcaggccgtggagtggtacaagaagggcatcgaggagctggagaagggcatcgccgtgatcgtgaccggccagggcgagcagtgcgagagagccagaagactgcaggccaagatgatgaccaacctggtgatggccaaggacagactgcagctgctggagagcggcgccgtgcccaagagaaaggaccccctgacccacaccagcaacagcctgcccagaagcaagaccgtgatgaagaccggcagcgccggcctgagcggccaccacagagcccccagctacagcggcctgagcatggtgagcggcgtgaagcagggcagcggccccgcccccaccacccacaagggcacccccaagaccaacagaaccaacaagcccagcacccccaccaccgccaccagaaagaagaaggacctgaagaacttcagaaacgtggacagcaacctggccaacctgatcatgaacgagatcgtggacaacggcaccgccgtgaagttcgacgacatcgccggccaggacctggccaagcaggccctgcaggagatcgtgatcctgcccagcctgagacccgagctgttcaccggcctgagagcccccgccagaggcctgctgctgttcggcccccccggcaacggcaagaccatgctggccaaggccgtggccgccgagagcaacgccaccttcttcaacatcagcgccgccagcctgaccagcaagtacgtgggcgagggcgagaagctggtgagagccctgttcgccgtggccagagagctgcagcccagcatcatcttcatcgacgaggtggacagcctgctgtgcgagagaagagagggcgagcacgacgccagcagaagactgaagaccgagttcctgatcgagttcgacggcgtgcagagcgccggcgacgacagagtgctggtgatgggcgccaccaacagaccccaggagctggacgaggccgtgctgagaagattcatcaagagagtgtacgtgagcctgcccaacgaggagaccagactgctgctgctgaagaacctgctgtgcaagcagggcagccccctgacccagaaggagctggcccagctggccagaatgaccgacggctacagcggcagcgacctgaccgccctggccaaggacgccgccctgggccccatcagagagctgaagcccgagcaggtgaagaacatgagcgccagcgagatgagaaacatcagactgagcgacttcaccgagagcctgaagaagatcaagagaagcgtgagcccccagaccctggaggcctacatcagatggaacaaggacttcggcgacaccaccgtgtag

SEQ ID NO: 261809 - DNA, 1755 bp, Artificial Sequence
  derived and/or modified sequence
atgaactccccgggaggccgcggaaagaaaaagggcagcggaggagcctcaaatccagttcctccccggccccctcctccctgcctggcgccagcacctccggccgccgggcctgctccccctcctgagtctcctcataaaagaaatctttattatttcagttatcccctcttcgttgggttcgccctcttgcggctggtggcatttcacctggggctcctcttcgtatggctctgtcaacggttctctagagcactcatggccgccaaacggtcctccggggctgctcctgcacccgcgtcggctagcgctcccgcgcctgtccctggaggcgaagccgaacgcgtgagagtgtttcataaacaggctttcgaatacatcagcatcgcactgcgcatcgatgaggacgaaaaagctggccagaaagaacaagccgtcgagtggtataagaaggggatcgaggaattggaaaaaggtatagccgtgattgtgactggtcagggtgagcagtgcgaacgcgccagaaggctccaggctaaaatgatgaccaacctcgtgatggctaaggacagactgcagctgcttgagtctggtgccgtaccgaagcgtaaggacccactcacacacactagcaatagcctcccacggtcgaagactgtgatgaagaccggcagcgctgggctcagcggacatcaccgggcaccctcatattctgggctatcgatggtaagcggagtcaagcaggggtctggtccagccccaaccacacataagggcaccccgaaaacaaacagaaccaacaaaccaagtacccccaccactgcgacccggaagaagaaagatctgaagaacttcagaaacgtcgattctaatctggccaatctcataatgaatgagattgtcgacaacgggacagctgtgaaatttgacgatattgccggacaggacttggccaagcaggctctacaggagatcgtcatcctcccgagtctaagacccgaactgtttaccggactgagagctcctgctcgaggtttgctactgttcggccctccaggaaatggcaagacaatgttggccaaagctgtggcagctgaaagtaatgccacattttttaacatttctgctgcatccctgaccagtaagtacgtgggcgagggcgaaaagctggtgcgggctctttttgcggtggctagagagttacaaccctcaatcatcttcatcgatgaggttgattcactgctgtgtgaacgaagggagggggaacacgatgctagcaggcgactgaagacggaatttctgatcgaatttgacggagtacagtctgctggagatgaccgagtgctggttatgggagctaccaataggcctcaagaacttgacgaagccgttctcagaagatttataaagagagtatacgtcagcttgcctaatgaagaaacacgactgctcttactgaaaaatctgctgtgtaagcaaggtagccctctgacccagaaggaactcgcccagctggcccgcatgactgatgggtattccggcagcgacctgacagcactggccaaggacgcagcactgggcccaattagggagttgaagccagaacaagttaaaaacatgagcgcgtcggaaatgcggaacatccggctgagcgactttacagagtccttgaagaaaatcaaacgtagtgtgtccccgcagaccctggaggcctatatccgatggaataaggattttggagataccacagtgtag

SEQ ID NO: 261810 - DNA, 1755 bp, Artificial Sequence
  derived and/or modified sequence
atgaacagccctgggggccggggcaagaagaagggcagcggcggggccagcaaccctgtgcccccccggcccccaccaccctgcctggccccagcccctcctgctgctggccctgcccctcctcctgagagcccccacaagaggaacctgtactacttctcctaccccctgtttgtgggctttgccctgctgcggctggtggccttccacctgggcctgctgtttgtgtggctgtgccagcgcttcagccgggccctgatggccgccaagaggagcagtggagctgccccagccccagccagcgccagcgccccagcccctgtgcctggaggagaggccgagcgggtgcgggtcttccacaagcaggcctttgagtacatcagcatcgccctgagaattgatgaagatgagaaggccggccagaaggagcaggccgtggagtggtacaagaagggcatcgaggagctggagaagggcattgctgtgattgtgacaggccagggcgagcagtgtgagcgggcccggcggctgcaggccaagatgatgaccaacctggtgatggccaaggaccggctgcagctgctggagagcggggctgtgcccaagaggaaggaccccctgacccacaccagcaacagcctgcccaggagcaagacagtgatgaagacaggcagcgctggcctgagcggccaccaccgggcccccagctacagcggcctgtccatggtgtctggagtgaagcagggcagcggccctgcccccaccacccacaagggcacccccaagaccaacagaaccaacaagcccagcacccccaccacagccaccaggaagaagaaggacctgaagaacttcagaaatgtggacagcaacctggccaacctgatcatgaatgagatcgtggacaatggaacagctgtgaagtttgatgacattgctggccaggacctggccaagcaggccctgcaggagatcgtcatcctgcccagcctgcggcctgagctgttcaccggcctgcgggccccagcccggggcctgctgctgtttggacctcctggaaatggcaagaccatgctggccaaggctgtggccgctgagagcaatgccaccttcttcaacatctctgctgccagcctgaccagcaaatatgtgggggagggggagaagctggtgcgggccctgtttgctgtggcccgggagctgcagcccagcatcatcttcattgatgaggtggacagcctgctgtgtgagcggcgggagggggagcatgatgccagccggcggctgaagacagagttcctgattgaatttgatggagtgcagagcgctggagatgacagagtgctggtgatgggcgccaccaaccggccccaggagctggatgaagctgtgctgcggcgcttcatcaagagggtgtatgtgtccctgcccaatgaggagacccggctgctgctgctgaagaacctgctgtgcaagcagggcagccccctgacccagaaggagctggcccagctggccaggatgacagatggctacagcggcagtgacctgacagccctggccaaggatgctgccctgggccccatccgggagctgaagccagagcaggtgaagaacatgtctgccagcgagatgaggaacatccggctgagtgacttcacagagagcctgaagaagatcaagaggtctgtgagcccccagaccctggaggcctacatccgctggaacaaggactttggagacaccaccgtgtag

SEQ ID NO: 261811 - DNA, 1755 bp, Artificial Sequence
  derived and/or modified sequence
atgaacagccccggcggccggggcaagaagaagggcagcggcggcgccagcaatcctgtgccaccacggcctccccccccctgtttagccccagccccgcctgctgccggccctgcacccccgccagagtctccccacaagaggaatctgtattatttttcataccctctgttcgtcggttttgccctattgcgactggtagcttttcacctgggcctgttgtttgtgtggctttgccaacggttctcccgggccctgatggctgccaagcgcagttctggggcggcgcccgccccagcctccgcaagcgcacccgcaccagtgccgggcggggaagctgagcgagtgagagtgtttcataagcaggcctttgagtacatcagtatcgctctgcgcattgacgaggatgaaaaggctggacagaaggagcaggcggtggagtggtacaaaaaaggcattgaggagctcgaaaagggcattgcagtgatcgtaaccgggcagggtgagcagtgtgaaagagccaggaggcttcaggccaagatgatgaccaatctggtgatggctaaggataggctgcagctcctagagtccggcgcggtgcctaaaagaaaagaccccttaacgcatacaagcaatagcttaccacgttcaaagacggttatgaagactggatcagctgggctctcaggccaccatagggcccccagctactctggtttgtctatggtgagcggggtcaaacagggttctggccccgctccaacaacacacaagggaactcccaaaacaaatcgaaccaacaaacccagtactcccactacagccacgagaaagaaaaaagatttgaagaacttccgaaatgtggattccaacttagccaacttgatcatgaatgaaattgtggataacggcactgcggtgaaatttgacgatatagcaggtcaggatctggcgaagcaggcactacaggagatagttattctgccgtctctacggccggaattattcaccggcttgcgggctccggcgcgcggcctgttactgttcggcccccccggaaatggtaaaaccatgctggccaaggctgtggccgcagagtccaacgccaccttcttcaacattagcgcagccagtctaacctcgaagtacgtgggagagggggagaagttagtgagagcactgtttgcggttgcacgtgaactccagccatccattatctttatcgatgaggtagatagcctgctctgtgaaagacgcgaaggcgagcacgatgcatctcgacggctgaagaccgagtttctgatcgaattcgacggggttcaaagtgcaggcgacgacagagtacttgtgatgggagcgactaatcgcccacaagagctggatgaggccgtgctgcggcgattcattaagagagtatacgtgtctctgcctaacgaagagactcgcctgcttttgctgaaaaacctgctttgcaaacaagggtcccccttaacccagaaggaacttgcacaactggcccggatgaccgacggatactccggctccgatttaactgccctcgcaaaggacgccgccctgggaccgatacgcgagctgaaacccgaacaggttaaaaatatgtctgcttccgaaatgcgaaacatcaggctgtctgatttcactgagtctcttaaaaaaattaaacgtagtgtgtcccctcagaccttagaggcttatatccggtggaataaagattttggcgacaccacagtgtag

SEQ ID NO: 261812 - DNA, 1755 bp, Artificial Sequence
  derived and/or modified sequence
atgaactccccgggtgggaggggaaagaagaaggggagcggaggagccagtaaccctgtacccccacgaccacccccaccctgcttggcaccggcaccaccagccgcagggcctgcaccacctcctgagagcccacataagcggaatctgtactacttttcctacccgctcttcgtgggcttcgctttgctgcgacttgtggctttccacctcgggctcttgttcgtgtggctctgtcagcggttcagtcgtgctctcatggcagcaaaacgttctagtggcgcagccccagcgccagctagcgcttcagcccctgccccagttccgggaggggaggcagagcgggtgcgggtgtttcacaaacaggcgttcgaatatatctccattgccttgagaatcgatgaagatgaaaaggcgggacaaaaggaacaggcggtggagtggtataagaaggggatagaggaactggaaaaaggcatcgccgtgatcgtgacaggccaaggggaacaatgtgaacgcgctaggcgcctgcaagccaaaatgatgacaaatctcgtgatggctaaggatcgtttgcagctgttggagtcaggagcggtcccaaagcggaaggaccctctgacgcacacctctaactcccttccaagatcaaagacagtcatgaagacgggatcagcagggctctcaggacaccaccgagcccctagctacagcggcctcagtatggtctcgggcgtaaaacagggctcggggcctgcccctaccacacataaaggcacccccaagaccaacaggacaaataaacccagcactcctaccaccgctactcggaagaagaaagatttgaagaacttccggaacgttgattcgaacttggctaatttgattatgaatgagatagtggataacggaacagccgtgaagtttgacgacatcgcaggacaggatttagccaagcaggcattgcaggagatcgttatcctgccttccctgcggcctgaactgtttaccggcttacgggctcccgctcgcggactccttcttttcggcccacctggaaacggcaagacaatgctggccaaggctgtggctgcagagagtaacgccacctttttcaatatctctgccgcatcactaacttcaaagtacgtcggtgagggggagaagctagtccgtgccttgttcgcggtcgccagggagttgcagccatcaattatattcatcgacgaggtcgactccctgctgtgtgagagaagggaaggagagcatgatgcctcacgtcgtctcaagaccgaattcctcatcgagttcgacggagtgcagagcgcaggtgatgaccgagtgctggtgatgggggcaactaacaggccacaggagctagatgaagcagtcctgcgtcgtttcattaaacgcgtgtacgttagtctgccaaatgaggagactagactgctgttactcaaaaatctgctctgcaaacagggttcccccctgacacagaaagaattggcgcagctcgctcgcatgaccgatggctattcggggtcagatttgaccgccctcgctaaggacgcagccctagggcctatccgagaactgaagccagaacaggtgaaaaacatgtccgcgtccgaaatgcgtaatatccgtctgagcgatttcacagaatctctgaagaagatcaagcggtctgtgtctccacagacattagaggcctacatacgctggaacaaagatttcggggatactactgtgtag

SEQ ID NO: 261813 - DNA, 5116 bp, Artificial Sequence
  derived and/or modified sequence
ggcccgagccaccgactgcaggaggagaaggggttgtgctcctggccgaggaaggagaaaggggcggggccggcgggcagcgtgcggcagtgcggagctcctgagaccggcgggcacacgggggtctgtggcccccgccgtagcagtggctgccgccgtcgcttggttcccgtcggtctgcgggaggcgggttatggcggcggcggcagtgagagctgtgaatgaattctccgggtggacgagggaagaagaaaggctccggcggcgccagcaacccggtgcctcccaggcctccgcccccttgcctggcccccgcccctcccgccgccgggccggcccctccgcccgagtcgccgcataagcggaacctgtactatttctcctacccgctgtttgtaggcttcgcgctgctgcgtttggtcgccttccacctggggctcctcttcgtgtggctctgccagcgcttctcccgcgccctcatggcagccaagaggagctccggggccgcgccagcacctgcctcggcctcggccccggcgccggtgccgggcggcgaggccgagcgcgtccgagtcttccacaaacaggccttcgagtacatctccattgccctgcgcatcgatgaggatgagaaagcaggacagaaggagcaagctgtggaatggtataagaaaggtattgaagaactggaaaaaggaatagctgttatagttacaggacaaggtgaacagtgtgaaagagctagacgccttcaagctaaaatgatgactaatttggttatggccaaggaccgcttacaacttctagaaagtggagctgttccaaaaagaaaagaccccttaacacacactagtaattcactgcctcgttcaaaaacagttatgaaaactggatctgcaggcctttcaggccaccatagagcacctagttacagtggtttatccatggtttctggagtgaaacagggatctggtcctgctcctaccactcataagggtactccgaaaacaaataggacaaataaaccttctacccctacaactgctactcgtaagaaaaaagacttgaagaattttaggaatgtggacagcaaccttgctaaccttataatgaatgaaattgtggacaatggaacagctgttaaatttgatgatatagctggtcaagacttggcaaaacaagcattgcaagaaattgttattcttccttctctgaggcctgagttgttcacagggcttagagctcctgccagagggctgttactctttggtccacctgggaatgggaagacaatgctggctaaagcagtagctgcagaatcgaatgcaaccttctttaatataagtgctgcaagtttaacttcaaaatacgtgggagaaggagagaaattggtgagggctctttttgctgtggctcgagaacttcaaccttctataatttttatagatgaagttgatagccttttgtgtgaaagaagagaaggggagcacgatgctagtagacgcctaaaaactgaatttctaatagaatttgatggtgtacagtctgctggagatgacagagtacttgtaatgggtgcaactaataggccacaagagcttgatgaggctgttctcaggcgtttcatcaaacgggtatatgtgtctttaccaaatgaggagacaagactacttttgcttaaaaatctgttatgtaaacaaggaagtccattgacccaaaaagaactagcacaacttgctagaatgactgatggatactcaggaagtgacctaacagctttggcaaaagatgcagcactgggtcctatccgagaactaaaaccagaacaggtgaagaatatgtctgccagtgagatgagaaatattcgattatctgacttcactgaatccttgaaaaaaataaaacgcagcgtcagccctcaaactttagaagcgtacatacgttggaacaaggactttggagataccactgtttaaggaaatacctttgtaaacctgcagaacattttacttaaaagaggaaacacaagatcttcaatgaacgtcatcggctacagaaacagcctaagtttacaggactttttagagtcttacatatttgtgcaccaaacttgaagatgaaccagaaaacagacttaaacaaaatatacaatgcaaatgtaattttttgttgtttaaggccttgccttgatggtcacagttatcccaatggacactaagttagagcacaacaaaacctgattctggtcttctttaccaatataatcataatgtaaataataatttgtatattgtgttgcagatgaaagtattccaggaacagtgaatggtagaagacacaagaacatttgtttgtttgtcttctgatgttttttcttaaaatagtaatttctcctacttttcttttctactgttgtcttaactacaggtgattggaatgccaaacactcttaagtttattttcttttttcgttttataaattcagtgtgccaaatgaaacttttttcctaagtaactgtaataggaaaaagtttattttgagagtttcttcttcataaatctacagacattaaacaattgttgtgttctttttaccttttatttttctattaccttgctaccaaacagtttagatagcaatataatagcaaaaaagcaaatatggtaaaatagagaaggtttgaaggtttgagttactctgtcatataacatgtagatcagtcttcatgtgacctgcagtatttttttttctaatgtatttgtcagaaatctgttgtagactgttaacttcttcctgatggaatttattttctgcaagaattattctgatatttaagagagccaattttaactgctgtgaaaatgtttccagtgcaagagaagggaaatactaggaactaagacatttctaatttattgcttattactttcttaattttacaggataattataagcaagtggaactaccatcttttattcttaataattattaatcccttcaatgaaactttaaaaaaactgaatttttatacatggcatacatttttctagttccttctgcttgctttattaactcaaaagttctagttctagtctgttgatctgccttttgttctcccaaaatgtacagtaattccatttgtttgtataaatatgcctggattttcattataaaaatgtcattgtagggagtagagactcatatcatggccttttaaatattgtaataaaggcaaatagatatttgcccttagtttactggttaaaagtttgtttacagaacttttctctggtgcttaaatgatgctatgtaaaatgtcatgagtggaaagaatatttgtagtagtaacaagaatttttcatttaggaaagatttcttaggttttgaaagaatacattaaaataaaaaacttgcccctactaggtaagaactttataatgaagacatacattcttcttaattttactcttgctcttgttaaagatttgtttgaatatagaagatgcatgatttctgggtttttttttttttttgagacagagtttcgctcttgttgcccaggctggagtgcaatggcgcaatctcgactcaccacaacctccgcctcccaggttcaagcaattctcctgcctcagcctcccgagtagctgggattacaggcatgcgccactaccccagctaattttgtatttttagtagagatggggtttctccatgttggtcaggctggtcttgaactcctgacctcaggtgatccgcctgcctcggcctcccaaagtgctgggattacaggcataagccactgcgcccagccagaagatgcatgatttcttaggatcatatgctgtttgtagccataaggtaaatcatgtctcttccaatcatgactttggaactccctgaataataaaaatgagagttgagataaataggggaaaaaaaatttttttcaagccagagctatgcatatgttaggtgatgggtagtatccctttaaggtctcaaacattacaacatcaattatgaaatactgataacgaaaggtagtaatgaaatatatatgatgaaaagaattgagaagttctaaattaagacatttcagttaagctcataaaatttcattgttttcatttaaaagattaacgttattgatacttggataactggctaatcatattaaaggactatgtggttccagctcaacttttaatatattgtctcctttaaaactatcatggttataattctattgggaaagacttttagataacaaagatttcaaatgttaaaagagataaaagtcaggttaatactatcttaaacactgagtcagaaaatcattactgtatagaagttgctttcctgatcaagtctgaacttcagctagtgctagagaactattttctatgacttaactctaaccaagttttattttaagctgtttctttgatagaagggccatgaaaatagagtaatgatatagtaggagataagggattggtttggtctttttcaataaagatagaagttgctgaagttttctgaattaataatgacttagattgtgaccttttagattcggtgttgagctctgtgttgtattacttcctaaaagataatgcttaaacattaagcattagtgtgctcttcatgttaatatggcagagttttgtaaactaaattaaaacttactgatatattggactttgagccaagggaaagaatgagtactatctttccagatatcttaagggtaaaagcttattctaagacagtctgtccattgagaatattagatttctgacttgcaaatatgtttgtactccagaagaattagaggaaaagcagatactagaattctaatttaattacatatacagccgtctttgtttatagtgtagaattctttatattttgtacaaaaactaattcttttggtaaaatgaaccatttacagttcggttttggactctgagtcaaaggattttcctttaaatgcttgtctcaattttagtctggtcttttgtacttttcttcagaagaaatgaattaaagggtacagttgcataaagtgggtttttatcctaatgtattggaaataaatgataaacttt

SEQ ID NO: 261814 - protein, 1156 aa, Artificial Sequence
  derived and/or modified sequence
MDSKDESSHVWPTSAEHEQNAAQVHFVPDTGTVAQIVYTDDQVRPPQQVVYTADGASYTSVDGPEHTLVYIHPVEAAQTLFTDPGQVAYVQQDATAQQASLPVHNQVLPSIESVDGSDPLATLQTPLGRLEAKEEEDEDEDEDTEEDEEEDGEDTDLDDWEPDPPRPFDPHDLWCEECNNAHASVCPKHGPLHPIPNRPVLTRARASLPLVLYIDRFLGGVFSKRRIPKRTQFGPVEGPLVRGSELKDCYIHLKVSLDKGDRKERDLHEDLWFELSDETLCNWMMFVRPAQNHLEQNLVAYQYGHHVYYTTIKNVEPKQELKVWYAASYAEFVNQKIHDISEEERKVLREQEKNWPCYECNRRFISSEQLQQHLNSHDEKLDVFSRTRGRGRGRGKRRFGPGRRPGRPPKFIRLEITSENGEKSDDGTQDLLHFPTKEQFDEAEPATLNGLDQPEQTTIPIPQLPQETQSSLEHEPETHTLHLQPQHEESVVPTQSTLTADDMRRAKRIRNAALQHLFIRKSFRPFKCLQCGKAFREKDKLDQHLRFHGREGNCPLTCDLCNKGFISSTSLESHMKLHSDQKTYSCIFCPESFDRLDLLKDHVAIHINDGYFTCPTCKKRFPDFIQVKKHVRSFHSEKIYQCTECDKAFCRPDKLRLHMLRHSDRKDFLCSTCGKQFKRKDKLREHMQRMHNPEREAKKADRISRSKTFKPRITSTDYDSFTFKCRLCMMGFRRRGMLVNHLSKRHPDMKIEEVPELTLPIIKPNRDYFCQYCDKVYKSASKRKAHILKNHPGAELPPSIRKLRPAGPGEPDPMLSTHTQLTGTIATPPVCCPHCSKQYSSKTKMVQHIRKKHPEFAQLSNTIHTPLTTAVISATPAVLTTDSATGETVVTTDLLTQAMTELSQTLTTDYRTPQGDYQRIQYIPVSQSASGLQQPQHIQLQVVQVASATSPHQSQQSTVDVGQLHDPQPYPQHAIQVQHIQVSEPTASAPSSAQVSGQPLSPSAQQAQQGLSPSHIQGSSSTQGQALQQQQQQQQNSSVQHTYLPSAWNSFRGYSSEIQMMTLPPGQFVITDSGVATPVTTGQVKAVTSGHYVLSESQSELEEKQTSALSGGVQVEPPAHSDSLDPQTNSQQQTTQYIITTTTNGNGSSEVHITKP

SEQ ID NO: 261815 - DNA, 3471 bp, Artificial Sequence
  derived and/or modified sequence
atggacagcaaggacgagagcagccacgtgtggcccaccagcgccgagcacgagcagaacgccgcccaggtgcacttcgtgcccgacaccggcaccgtggcccagatcgtgtacaccgacgaccaggtgagacccccccagcaggtggtgtacaccgccgacggcgccagctacaccagcgtggacggccccgagcacaccctggtgtacatccaccccgtggaggccgcccagaccctgttcaccgaccccggccaggtggcctacgtgcagcaggacgccaccgcccagcaggccagcctgcccgtgcacaaccaggtgctgcccagcatcgagagcgtggacggcagcgaccccctggccaccctgcagacccccctgggcagactggaggccaaggaggaggaggacgaggacgaggacgaggacaccgaggaggacgaggaggaggacggcgaggacaccgacctggacgactgggagcccgacccccccagacccttcgacccccacgacctgtggtgcgaggagtgcaacaacgcccacgccagcgtgtgccccaagcacggccccctgcaccccatccccaacagacccgtgctgaccagagccagagccagcctgcccctggtgctgtacatcgacagattcctgggcggcgtgttcagcaagagaagaatccccaagagaacccagttcggccccgtggagggccccctggtgagaggcagcgagctgaaggactgctacatccacctgaaggtgagcctggacaagggcgacagaaaggagagagacctgcacgaggacctgtggttcgagctgagcgacgagaccctgtgcaactggatgatgttcgtgagacccgcccagaaccacctggagcagaacctggtggcctaccagtacggccaccacgtgtactacaccaccatcaagaacgtggagcccaagcaggagctgaaggtgtggtacgccgccagctacgccgagttcgtgaaccagaagatccacgacatcagcgaggaggagagaaaggtgctgagagagcaggagaagaactggccctgctacgagtgcaacagaagattcatcagcagcgagcagctgcagcagcacctgaacagccacgacgagaagctggacgtgttcagcagaaccagaggcagaggcagaggcagaggcaagagaagattcggccccggcagaagacccggcagaccccccaagttcatcagactggagatcaccagcgagaacggcgagaagagcgacgacggcacccaggacctgctgcacttccccaccaaggagcagttcgacgaggccgagcccgccaccctgaacggcctggaccagcccgagcagaccaccatccccatcccccagctgccccaggagacccagagcagcctggagcacgagcccgagacccacaccctgcacctgcagccccagcacgaggagagcgtggtgcccacccagagcaccctgaccgccgacgacatgagaagagccaagagaatcagaaacgccgccctgcagcacctgttcatcagaaagagcttcagacccttcaagtgcctgcagtgcggcaaggccttcagagagaaggacaagctggaccagcacctgagattccacggcagagagggcaactgccccctgacctgcgacctgtgcaacaagggcttcatcagcagcaccagcctggagagccacatgaagctgcacagcgaccagaagacctacagctgcatcttctgccccgagagcttcgacagactggacctgctgaaggaccacgtggccatccacatcaacgacggctacttcacctgccccacctgcaagaagagattccccgacttcatccaggtgaagaagcacgtgagaagcttccacagcgagaagatctaccagtgcaccgagtgcgacaaggccttctgcagacccgacaagctgagactgcacatgctgagacacagcgacagaaaggacttcctgtgcagcacctgcggcaagcagttcaagagaaaggacaagctgagagagcacatgcagagaatgcacaaccccgagagagaggccaagaaggccgacagaatcagcagaagcaagaccttcaagcccagaatcaccagcaccgactacgacagcttcaccttcaagtgcagactgtgcatgatgggcttcagaagaagaggcatgctggtgaaccacctgagcaagagacaccccgacatgaagatcgaggaggtgcccgagctgaccctgcccatcatcaagcccaacagagactacttctgccagtactgcgacaaggtgtacaagagcgccagcaagagaaaggcccacatcctgaagaaccaccccggcgccgagctgccccccagcatcagaaagctgagacccgccggccccggcgagcccgaccccatgctgagcacccacacccagctgaccggcaccatcgccaccccccccgtgtgctgcccccactgcagcaagcagtacagcagcaagaccaagatggtgcagcacatcagaaagaagcaccccgagttcgcccagctgagcaacaccatccacacccccctgaccaccgccgtgatcagcgccacccccgccgtgctgaccaccgacagcgccaccggcgagaccgtggtgaccaccgacctgctgacccaggccatgaccgagctgagccagaccctgaccaccgactacagaaccccccagggcgactaccagagaatccagtacatccccgtgagccagagcgccagcggcctgcagcagccccagcacatccagctgcaggtggtgcaggtggccagcgccaccagcccccaccagagccagcagagcaccgtggacgtgggccagctgcacgacccccagccctacccccagcacgccatccaggtgcagcacatccaggtgagcgagcccaccgccagcgcccccagcagcgcccaggtgagcggccagcccctgagccccagcgcccagcaggcccagcagggcctgagccccagccacatccagggcagcagcagcacccagggccaggccctgcagcagcagcagcagcagcagcagaacagcagcgtgcagcacacctacctgcccagcgcctggaacagcttcagaggctacagcagcgagatccagatgatgaccctgccccccggccagttcgtgatcaccgacagcggcgtggccacccccgtgaccaccggccaggtgaaggccgtgaccagcggccactacgtgctgagcgagagccagagcgagctggaggagaagcagaccagcgccctgagcggcggcgtgcaggtggagccccccgcccacagcgacagcctggacccccagaccaacagccagcagcagaccacccagtacatcatcaccaccaccaccaacggcaacggcagcagcgaggtgcacatcaccaagccctag

SEQ ID NO: 261816 - DNA, 3471 bp, Artificial Sequence
  derived and/or modified sequence
atggactctaaagacgaaagctcacacgtttggcctacgagcgccgagcatgagcagaatgctgcgcaggtacacttcgtgcccgacacgggaaccgtagcccagattgtctatacagacgatcaggtccgcccaccacagcaggttgtgtatacagccgatggagcatcgtatacctcagtagatggcccagaacatacattagtctatatccacccagtggaggcagctcagactttgttcaccgaccctggacaggtggcctatgtccaacaggacgcaacagctcagcaggctagcctgcccgtgcacaatcaggttctcccttctatcgagagtgtggacggctctgatccactggcgactctgcagacccctctgggacgactcgaagcaaaagaggaggaagatgaggacgaagacgaggacaccgaagaagatgaggaggaggacggagaagataccgatctggacgactgggagcctgatccccccagaccatttgacccgcacgacctttggtgtgaagaatgcaataacgcccatgcaagtgtgtgccctaagcacgggccccttcatccaatcccaaaccgccctgtgttaactagagccagggcaagtttgccacttgtactttatattgataggtttttgggtggagtgttctctaaacgtcgtattccaaagcgcacacaattcggccctgtggaaggtccactcgttcgcggctctgagctgaaggactgctacatccatctgaaggtcagtcttgataaaggggatagaaaagagcgcgatctgcatgaggacctgtggttcgagctatcggacgagacactgtgtaactggatgatgttcgtgaggcccgcacaaaaccatctcgagcaaaatcttgtggcgtaccagtatgggcatcatgtgtactacacgacaatcaagaacgtcgagcctaagcaggagcttaaggtgtggtatgccgcgtcctatgctgagtttgtaaaccagaagattcacgacatctcagaggaagagcggaaggttcttcgagagcaggaaaagaactggccatgctatgaatgtaatcggcggtttatttcaagcgaacagctgcagcaacatttgaattcgcacgacgagaagctagacgttttctcacgcacgaggggtcgtggacgtgggcgtgggaaacgtcgctttggcccaggccggcgtcctgggcgcccccccaaattcatccggctggaaataacttctgaaaatggagagaagagcgatgatggcactcaagacctgctgcattttccaactaaagagcagttcgacgaagccgaacctgccacccttaacgggcttgatcaaccagagcagaccactattccgatcccacaactgccacaagagacccaatcttctctggagcatgaacccgagacccacactttgcacctgcagccacagcatgaagagtccgtggttccgacacagtcgacgctcactgccgatgacatgagaagagccaagagaattcgtaatgcggctctgcagcatctgtttattagaaagagtttccgaccatttaaatgcctccagtgcggaaaggcctttagggaaaaggacaagttggaccagcatttgcgattccacggccgtgagggcaactgcccactcacatgtgatctgtgcaacaagggttttatctcttccacatctcttgagtcgcatatgaaactgcactctgatcaaaaaacctatagttgcatcttttgtcccgaaagtttcgatcgactagatctgctcaaggaccacgtagctatccacataaatgacggctacttcacttgtcccacgtgtaagaagcgcttccccgacttcatacaggtaaaaaagcatgtgagatcatttcacagcgagaaaatttaccagtgcaccgagtgcgacaaggctttctgcaggcccgacaaacttcggctgcacatgctacgccattccgacagaaaggattttttatgttctacatgtgggaaacagttcaaacggaaggacaagttgcgagagcacatgcagcgcatgcataatcctgaacgcgaggcgaagaaagctgatcgcatatcgcggagcaaaacattcaaacccagaatcaccagcactgactatgattcttttacattcaagtgtaggttgtgtatgatgggatttcgaaggcgggggatgctggtgaatcacctgagtaaaagacaccctgatatgaagatcgaagaagtaccggagctcaccttgccaataattaagccaaaccgggactacttctgccagtactgcgataaggtatacaagtccgcctcgaaacgtaaggcccacatcctaaaaaaccatcccggagccgagctgcccccatcaatacgcaagctgcggcctgccggccccggcgagcccgatccgatgctaagtacacacacccagttaaccggcacaatcgccaccccccctgtctgctgcccacattgctctaagcagtactctagcaaaacgaagatggtgcagcatattcggaaaaaacaccccgaatttgcacagttgtccaataccattcataccccgttgacaaccgccgtgatcagtgcaacacctgctgtcctgaccacagactctgccacaggcgaaaccgtggtcactacagacttgcttacacaggcgatgacagagctttctcaaacactcactacagattatagaacaccccagggggattatcagaggattcagtatattcctgtgtcacaaagtgcttccgggctgcaacagccacagcatattcaactgcaggtggtgcaggttgcatcggcaacatcaccgcatcagtctcagcagagtaccgtggacgttggccagttgcatgacccccagccctatccccaacatgcgatccaggttcaacatatccaggtcagcgaaccgaccgcatccgccccatcatctgcccaggtgagtgggcaacctctgagcccatcagctcagcaggctcagcagggtctcagtcccagccacatccagggatctagctcaacccagggacaagctcttcagcaacagcagcagcagcagcagaactccagtgttcagcacacatacctcccttctgcctggaattcatttcgtggatactcaagtgaaatccagatgatgactttgcctccagggcagttcgtcatcaccgattctggcgtagctacacccgtcacaacagggcaagtcaaagccgttacctcaggacattacgtgctgagtgagagtcagtccgaattagaggaaaagcagacctccgcactctctgggggagtacaggtggaaccccctgcccattctgacagcctggacccccagactaattcccagcagcagaccactcaatacattattacaaccactactaatgggaatggctcttcggaagtgcatatcaccaaaccatag

SEQ ID NO: 261817 - DNA, 3471 bp, Artificial Sequence
  derived and/or modified sequence
atggacagcaaggatgagagcagccacgtgtggcccaccagcgctgagcacgagcagaatgctgcccaggtgcactttgtgcctgacaccggcaccgtggcccagatcgtgtacacagatgaccaggtgcggcccccccagcaggtggtgtacacagcagatggagccagctacacctctgtggatggccctgagcacaccctggtgtacatccaccctgtggaggccgcccagaccctcttcacagaccccggccaggtggcctacgtgcagcaggatgccacagcccagcaggccagcctgcctgtgcacaaccaggtgctgcccagcattgaatctgtggatggcagtgaccccctggccaccctgcagacccccctgggccgcctggaggccaaggaggaggaggatgaagatgaagatgaggacacagaggaggatgaggaggaggatggagaggacacagacctggatgactgggagccagaccccccccggccctttgacccccatgacctgtggtgtgaggagtgcaacaatgcccacgcctctgtgtgccccaagcacggccccctgcaccccatccccaacagacctgtgctgacccgggcccgggccagcctgcccctggtgctgtacatcgaccgcttcctgggcggcgtcttcagcaagaggcgcatccccaagaggacccagtttggacctgtggagggccccctggtgcggggcagcgagctgaaggactgctacatccacctgaaggtgtccctggacaagggggacaggaaggagcgggacctgcacgaggacctgtggtttgagctgagtgatgagaccctgtgcaactggatgatgtttgtgcggcctgcccagaaccacctggagcagaacctggtggcctaccagtatggccaccacgtgtactacaccaccatcaagaatgtggagcccaagcaggagctgaaggtgtggtacgccgccagctatgcagagtttgtgaaccagaagatccatgacatcagcgaggaggagaggaaggtgctgcgggagcaggagaagaactggccctgctatgagtgcaacagacgcttcatcagcagcgagcagctgcagcagcacctgaacagccatgatgagaagctggatgtgttcagcaggacccggggccggggccggggccggggcaagagaagatttggacctggaagaagacctggccggccccccaagttcatccggctggagatcaccagtgaaaatggagagaagagtgatgatggcacccaggacctgctgcacttccccaccaaggagcagtttgatgaagctgagcccgccaccctgaatggcctggaccagcctgagcagaccaccatccccatcccccagctgccccaggagacccagagcagcctggagcacgagcctgagacccacaccctgcacctgcagccccagcacgaggagagcgtggtgcccacccagagcaccctgacagcagatgacatgaggcgggccaagaggatcagaaatgctgccctgcagcacctgttcatcaggaagagcttccggcccttcaagtgcctgcagtgtgggaaggccttccgggagaaggacaagctggaccagcacctgcgcttccacggccgggagggcaactgccccctgacctgtgacctgtgcaacaagggcttcatcagcagcaccagcctggagagccacatgaagctgcacagcgaccagaagacctacagctgcatcttctgcccagagagctttgaccggctggacctgctgaaggaccacgtggccatccacatcaatgatggctacttcacctgccccacctgcaagaagcgcttcccagacttcatccaggtgaagaagcacgtgcgctccttccacagcgagaagatctaccagtgcacagaatgtgacaaggccttctgcaggccagacaagctgcggctgcacatgctgcggcacagcgacaggaaggacttcctgtgcagcacctgtgggaagcagttcaagaggaaggacaagctgcgggagcacatgcagaggatgcacaaccctgagcgggaggccaagaaggctgaccgcatcagccgcagcaagaccttcaagccccgcatcaccagcacagattatgacagcttcaccttcaagtgccgcctgtgcatgatgggcttcagaagaagaggcatgctggtgaaccacctgagcaagaggcacccagacatgaagattgaggaggtgcctgagctgaccctgcccatcatcaagcccaacagagactacttctgccagtactgtgacaaggtgtacaagagcgccagcaagaggaaggcccacatcctgaagaaccaccctggagctgagctgcccccatccatcaggaagctgcggcctgctggccctggagagccagaccccatgctgagcacccacacccagctgaccggcaccatcgccaccccacctgtgtgctgcccccactgcagcaagcagtacagcagcaagaccaagatggtgcagcacatcaggaagaagcaccctgagtttgcccagctgagcaacaccatccacacccccctgaccacagctgtgatcagcgccaccccagctgtgctgaccacagattctgccactggagagaccgtggtgaccacagacctgctgacccaggccatgacagagctgagccagaccctgaccacagactaccgcaccccccagggcgactaccagaggatccagtacatccctgtgtcccagagcgccagcggcctgcagcagccccagcacatccagctgcaggtggtgcaggtggccagcgccaccagcccccaccagagccagcagagcacagtggatgtgggccagctgcatgacccccagccctacccccagcacgccatccaggtgcagcacatccaggtgtctgagcccacagccagcgcccccagcagcgcccaggtgtctggccagcccctgagccccagcgcccagcaggcccagcagggcctgagccccagccacatccagggcagcagcagcacccagggccaggccctgcagcagcagcagcagcagcagcagaacagctctgtgcagcacacctacctgcccagcgcctggaacagcttccggggctacagcagcgagatccagatgatgaccctgcccccaggccagtttgtgatcacagattctggagtggccacccctgtgaccaccggccaggtgaaggctgtgaccagcggccactacgtgctgtctgagagccagagcgagctggaggagaagcagaccagcgccctgagcggcggcgtgcaggtggagcccccagcccacagcgacagcctggacccccagaccaacagccagcagcagaccacccagtacatcatcaccaccaccaccaatggaaatggcagcagcgaggtgcacatcaccaagccctag

SEQ ID NO: 261818 - DNA, 3471 bp, Artificial Sequence
  derived and/or modified sequence
atggacagcaaggacgagagcagccacgtgtggcccaccagcgccgagcatgagcagaacgctgcacaggtgcactttgtcccggataccgggactgtcgcacagatagtttacactgacgatcaggtgaggccacctcagcaggtggtgtacaccgcagacggcgccagttacactagtgtggatggccccgaacatacgctagtctacatccaccccgtggaggcagcccaaactctgttcactgaccccgggcaggtggcctacgtccagcaggacgctaccgcgcaacaagcctctctgccggtccacaatcaggttctgcctagtatcgagtctgtcgatggctcagatccgctcgctacactgcaaactcctctcggtcgattggaggccaaggaggaagaggacgaggacgaggatgaagacaccgaagaggacgaagaggaagatggcgaagatacggatcttgatgattgggagcccgacccacccagacccttcgacccacatgatctctggtgcgaagagtgcaataacgcccacgccagcgtttgccccaagcatggacctctccatcccataccgaaccggcctgtgctcactcgggcccgggctagcctgccattggttctgtatatcgacagatttctgggaggggtcttttcaaaaagacggatccccaagcgcacacagtttggcccagtcgaggggccactggtcagggggtccgaactgaaggactgttatatacacttaaaagtgtcccttgacaaaggcgacaggaaggagagagacctccacgaggatctctggtttgaactgagtgatgagacgctatgcaactggatgatgtttgtccgcccagcacaaaatcatcttgagcagaaccttgtcgcataccagtacgggcaccacgtctattacaccactatcaagaacgttgagcccaagcaggaactcaaagtgtggtacgcagcctcttatgccgaattcgtaaaccagaaaatccacgatattagcgaagaggagcgcaaagtgttgcgggagcaggagaagaattggccatgctacgaatgcaatagaaggttcatttctagcgagcaacttcagcagcacctgaactctcatgatgagaagttggatgtattcagtcggacacggggccgaggtcgcgggagaggcaaacggagatttggcccaggacgccgccccggacgccccccgaagttcattcgcctcgaaattacatctgagaacggcgagaagagtgatgacgggacacaggacttattgcactttcccaccaaagagcagtttgacgaagcagaaccagctactttaaatgggctggaccagcccgagcagacgacaatacccatccctcagttgccacaggagacccagagctcgcttgaacacgagccagagacccataccctgcatctgcagcctcaacatgaagagtcagtcgttcctactcaatcgacactcacagcggatgacatgcgaagagctaagaggattagaaatgcagctttgcagcatctgtttatcagaaagtctttccgccctttcaagtgtttgcagtgcggcaaggccttccgcgagaaagacaagctggatcagcacttaaggttccacgggcgcgaggggaactgccctcttacgtgcgacctttgcaacaagggctttataagctccacgtcgctggagagtcatatgaaattacacagtgaccaaaaaacttactcctgcatcttctgcccagagtctttcgatcggctggacctgcttaaggaccacgtggcaatccacataaatgatggttattttacctgtcctacttgtaaaaagcgctttccggacttcattcaggtgaagaagcatgtgaggtcatttcactccgaaaaaatatatcagtgcactgagtgtgacaaggccttctgccgccccgacaagctgcggctccacatgctgagacactccgacagaaaggactttctgtgttccacctgcggcaagcagttcaagagaaaagacaaactgcgggagcacatgcagcgaatgcataaccccgaaagagaggccaaaaaggccgataggatcagtagatctaaaaccttcaagccacgaatcacttccactgattatgatagctttacctttaaatgtcggctgtgtatgatggggtttcggcggaggggaatgctcgtgaaccatctcagtaagagacaccctgacatgaaaatcgaagaagtccccgagttaacactgccaatcatcaagcctaatcgagattacttctgtcagtactgcgacaaggtttataaaagtgcttctaagaggaaggcccatattctgaaaaatcatcccggcgccgagttgccaccgagcataaggaagctgaggccagccggcccaggggagcctgaccctatgctgtccacccacacacagttgaccggtacaatagcaaccccaccggtttgttgtccccactgctctaagcaatactcctccaaaactaaaatggtccaacatatccgcaaaaaacatcctgagtttgcacagttatcaaacacaatccacacaccgctgactactgccgtcataagcgcaacacccgccgtgttaaccaccgattccgccactggagagactgtcgttacaactgacctgctgacacaagccatgactgaattgtcacaaactctgacgactgattatcgtaccccgcaaggagactatcaaaggatccagtacattcctgtgagccagagcgcatctgggttgcagcaacctcagcatatccagttgcaggttgtgcaagtggcatcggccacctcacctcaccagtcacagcaaagcaccgttgacgttggtcagctccacgatccccaaccttacccccagcacgcaattcaggtccagcatatccaggtcagcgagcctaccgcctcagccccctcttccgcccaggtgagcgggcagccactgagccccagtgctcagcaggcccaacagggactgagtccctctcacattcaaggatcctcctctacacaaggacaagctctgcagcagcagcagcagcagcagcagaactcttctgtccagcacacatatcttccttctgcctggaattcattcagggggtatagctctgaaatccagatgatgaccctcccaccaggacagttcgtaattaccgatagtggtgtggccactccagtcacaaccggccaggttaaggctgttacatcgggacattacgtgctgagcgagtctcagagcgaactggaagagaaacagacaagcgcgttgtcaggaggagtgcaagtcgagccccctgcacacagcgacagcctggatccccaaactaactctcagcaacagacaacacagtatatcatcactaccaccaccaacgggaacgggtcctctgaggtccatataacaaagccctag

SEQ ID NO: 261819 - DNA, 3471 bp, Artificial Sequence
  derived and/or modified sequence
atggattcaaaagatgagtcctcacatgtgtggccaacctctgcggagcatgaacagaacgcagcacaggttcattttgtcccagacaccggaaccgtagcacaaatagtgtatactgacgatcaggttagaccaccacagcaggtggtctataccgctgatggggcaagttacacgtccgtggatggacccgaacacacgctcgtatatattcatccagtggaagcagctcaaaccctcttcaccgacccaggccaagttgcttacgttcagcaggatgctacagcccagcaggcatcactgccagtgcacaaccaggttctcccttccatcgaatccgtggacggctccgatcctctcgcaaccctccaaacccccctgggcaggctggaggctaaagaggaggaagacgaggatgaggacgaggacaccgaagaggatgaggaggaagatggagaggacaccgacctggatgattgggaaccagaccctcccaggcccttcgatccacacgacctctggtgtgaggaatgcaataacgcacatgccagcgtatgtcctaaacatggaccactgcacccaattcctaaccgacctgtgctgacacgtgccagggcctctttacccttggtgctgtacatcgatagatttttgggcggagtctttagcaaacggaggattccgaagcgcacacagtttggacccgtggaaggcccactcgtccgaggttcagaactaaaagattgctatattcatctaaaggtgagtctggataagggcgaccggaaagagcgggatctgcacgaagacttgtggtttgagctttcagatgaaacactctgtaattggatgatgtttgtaaggcctgctcagaatcaccttgagcagaatctggttgcataccagtacggacaccatgtgtactatacaacaatcaaaaatgtggagccaaaacaggagctgaaagtctggtatgcggcttcttatgcagagttcgttaaccagaagatccacgatatctctgaggaggaacgtaaggtcctgcgcgaacaggaaaaaaactggccatgttatgagtgcaacagacggttcatatcctcagagcagcttcagcagcacctgaactcccacgatgagaagcttgacgtgttctctcgcactcggggtcgcggacgcggacgcggaaagagacgttttggccctgggaggcggccaggtagaccgccaaagtttatccgactggagataactagcgagaatggtgagaaaagtgatgacgggacccaggaccttctgcatttcccgacaaaagaacagtttgacgaagctgagccagcaaccctgaacggactcgatcagccggagcagaccacaatcccaatacctcagcttccccaggagactcagagtagtcttgagcacgaacccgaaacacacactttgcacctccagccacagcatgaagaatcagtagtacccacacagtccacgctgactgccgacgacatgaggagagccaaacggattagaaacgctgccctgcaacatctcttcattcgtaagtcattcagaccatttaaatgcctgcagtgtggcaaggctttccgggaaaaagacaagctcgaccagcatctccgcttccacggaagagagggcaactgcccattaacatgcgacctgtgcaacaagggctttatctccagtacctccctcgagtcgcatatgaaactgcactcggatcagaagacctacagctgcattttttgtccagagtcgttcgacagactggatttattgaaggatcatgtcgccattcacataaatgacggatactttacttgccctacttgtaagaagaggttccctgactttatccaggtgaaaaagcatgtcaggtcgtttcactccgaaaaaatatatcagtgtacagaatgtgataaggcattttgccgtccagacaagcttcgactacatatgctaaggcactctgaccgcaaggacttcttgtgctctacatgtgggaagcaatttaagcggaaagacaagctgagggaacatatgcagcggatgcataaccccgaacgggaggctaaaaaggccgaccgtatatcacgctccaagaccttcaagcctaggatcaccagcaccgattatgatagcttcactttcaaatgtagactttgcatgatgggctttcgcaggagaggcatgctggtgaatcacctgagcaaacggcatcctgatatgaagattgaggaagtcccagaactgacactgcccatcataaagcccaaccgagactatttttgccagtactgcgacaaagtttacaagtccgcatctaaaaggaaggctcatatattgaagaaccaccccggagccgagttacccccatctatccgcaagctgaggccggcaggtccgggagaaccggatccgatgctttcaacacatactcagctcacaggtactatcgcgacacctcctgtttgctgcccacactgcagtaaacaatattccagcaaaacaaagatggtgcagcatattagaaaaaagcacccagagttcgctcaactgagcaatacgattcacaccccattaaccacagcggtaatctccgcgacccccgctgtgttgaccaccgatagcgctaccggggaaacggtcgtgactaccgacctattaacccaggccatgacagagctcagtcaaacgctcacgacagattacagaaccccacagggagattatcagaggatccagtatatccctgtctcccagtctgccagcggcctgcaacaacctcagcacatacagctccaggtggtgcaggtggcttctgcaacctcaccacaccagagccagcagtctacggtggatgtaggtcagctgcacgaccctcaaccttacccccaacacgccatccaagtgcagcacatacaggttagcgaaccgacagcctctgcaccttcttctgcgcaggtgtcaggccagcccctcagccctagtgctcagcaagctcagcaggggctgtctcctagtcacattcaagggagttcgagcacacaggggcaggctctgcaacagcagcaacagcagcagcagaacagctcggtccagcatacatatctgccttctgcatggaattcgttcagaggctacagctctgagatccagatgatgaccctcccaccaggacagtttgtgattaccgattcaggtgtcgccactccggtcactacaggccaggtcaaggccgtgacaagtggccattacgtgctgagcgaatctcaaagcgagctggaggagaaacagacctctgctctctccgggggagtgcaagttgaaccacctgcccattcagattctcttgatccccagacaaactcccagcagcaaactacccagtatattattactaccaccaccaacggaaacgggagcagcgaagtgcatatcaccaaaccttag

SEQ ID NO: 261820 - DNA, 6301 bp, Artificial Sequence
  derived and/or modified sequence
actctgcggcgggaagaaccacctggaggtggcggggggggttgatttctatcacccctagggagagaggatcggggacccgctgatcttccagctcccctcacccaacgtcgtgcatgctgcagacagacctttccgtccttcatgaacacacgtgtggtagacagatgactgtcctgtaccctgtgctgctctaggtgtgccagacgtggagctgtccagttgggagaagatggattccaaagatgaaagctcgcatgtgtggccgacatctgcagagcatgaacagaatgccgcacaggtgcactttgttccggacacaggaacagtggctcagattgtctataccgatgaccaggttcgccccccacagcaggtggtgtacacggcagatggtgcctcctacacatcagtggatggtccagagcacacgctggtgtacatccacccggtggaagctgcacagactctgtttacagaccccggccaggtagcttatgtccaacaggatgctacagctcagcaggcctcattgccagttcataaccaggtgctgccttccatcgagagtgtagatgggtccgaccctttggcaactctgcagacccctctaggcagactggaggccaaagaggaagaggatgaggatgaggacgaggacactgaggaagatgaggaagaagacggtgaggacacggatctggatgactgggagccagacccgccccggcccttcgacccacacgacttgtggtgtgaggagtgcaataacgcgcatgcttcagtgtgtccgaagcacggccccttgcacccgatccccaaccggccggtgctcacccgggccagggcgagcctccccctggtgctctacatagacaggtttctgggcggggtgttctccaagcggcgcatccccaagcgcacccagtttggccccgtggaggggcctctcgtcaggggctcggagctgaaagactgttacattcacctcaaggtttctcttgataaaggggacaggaaagaaagggatttacatgaagacctatggtttgagttgtctgatgagacgctttgtaactggatgatgtttgtacggccagcccagaatcacctggagcagaacctggtggcttaccagtatggccaccatgtgtattatacaaccataaaaaatgtggagcccaagcaggaactgaaggtgtggtatgccgcatcctatgctgagttcgtgaaccagaaaattcatgacatttctgaggaagaaaggaaagttcttcgagagcaagagaagaattggccctgctatgaatgtaaccgccgatttataagctcggagcagttgcaacagcatctcaattctcatgatgagaaactagatgtgtttagcagaacaagaggcagaggaaggggacgaggcaagaggcgattcggtccaggtcgacggccggggcgtcctccaaaatttatccgcctggaaatcaccagcgaaaatggggaaaagagtgacgatgggacacaggacttgctacattttcccacaaaggagcaatttgatgaggctgaaccagccactctgaatgggctggatcaaccagaacagaccactatcccaatccctcagctgccacaggaaacccagtcttccctggaacatgaaccagaaactcacaccctgcacctgcagccgcagcatgaagagagcgtggtgcccacccagagcacgctgacagccgacgacatgcgcagagccaagcgcatccgaaatgcagctcttcagcatctgtttattcggaagtccttccggccttttaaatgcttgcagtgtgggaaggccttccgggaaaaggacaaactggaccagcacttacgcttccatgggcgggaggggaactgcccactgacctgtgatctctgtaacaagggcttcatcagcagcacatccttggagagccacatgaagctccactcagaccagaagacttactcttgcattttttgcccagaatcctttgaccgccttgatttgttgaaagatcatgtggccattcatatcaatgatggctacttcacctgcccaacttgtaagaaacggttcccagattttatccaggtgaaaaaacacgtgcgcagcttccactcagaaaagatctaccagtgcacagagtgtgacaaggccttctgtcgccccgataaactgcgactccacatgctccggcattcggaccgcaaagacttcctgtgttccacctgtgggaagcaatttaagcgaaaagacaaactacgggaacacatgcagaggatgcataatcctgagagggaggccaagaaagccgaccgcatcagccgctccaagacgttcaagccccgcatcacgtccacagactacgacagcttcacgttcaagtgccgcctgtgcatgatgggcttccggcggcgcggcatgctggtaaatcacttatcgaagagacacccagacatgaagatagaagaggtgccagagttaactctacccatcataaaacccaatcgtgattacttttgtcagtattgcgataaggtttataaaagtgccagcaagcgcaaagcccacattctgaagaaccacccaggagcagagctcccaccgagcattcggaagctccgacccgctggtcctggagagccagaccccatgctgagcacacacacccagctgacgggcaccatcgccacccctcccgtctgctgtccccactgctccaagcagtacagcagcaagaccaagatggtccagcacattcgaaagaagcatccagagttcgcccagctctccaacaccatacacacaccactgacgacagctgtgatcagtgccaccccagcggttttgactacagacagcgccactggagagactgtggtgacgacggacctgctcacccaagcaatgacagaactgtcccagaccttaacgacagactaccgaacgccacaaggggattaccagagaattcagtacatccctgtgtcgcagtcggcgtctggcctccagcagcctcagcacatacagctgcaagtggttcaagtggcctcggccacttcccctcaccagtcacagcagtccactgtggatgttggccagctccatgatcctcagccctacccccagcacgccatccaggtgcagcacatccaggtcagcgagcctaccgcctcggccccgtcctccgcccaggtatctgggcagccgttgagtccctcagcccagcaggctcagcaggggctcagcccctcccacatccagggcagttcttccacacaggggcaggctctgcagcagcagcagcagcagcagcagaattcctctgtgcagcacacgtacctgcccagtgcttggaattccttccgtggctattcatctgagattcaaatgatgacgcttcctccgggtcagtttgtgattacagacagtggtgtggcaactccagttactactggccaggtgaaggcggttacttcgggtcattatgtgttatcagaaagtcaatcagaattggaagaaaagcaaacttctgccctctctggtggagtccaggtcgagccacctgcacacagtgactccctggacccccagaccaacagccaacagcagaccacacagtacatcatcaccaccaccaccaacgggaacggaagcagcgaagtgcatatcaccaaaccatgacttccaccctggagcttgaatccagcacccacctcatgtctgttctcataagtctgaaagctctgacacgtagagctcttttgtaagatttattattcactcaagagttcggaaaccacagttttgtctctcatccatacactggggtttattttgccaaggtcatctttatcaaattgactcttcaaaccctcggtttttgccacagaacagagatctttcaggggaaagtagatttcgaggtggagagaatttgccttgctcttgagctggtcttttaacatactgacgagccttacttttcctttgtggaaatattaagtggcatattgtgttcataccaaaggtggagacaggatgtgccaagttcatggttactggacttcttattccaagccatggcaccaaaggagaaggggcattttgtgggtgtgcattaggtctgaactgctttatcttgttttagttttcagtaatttaacaaagggagcctgctgaataacaaaattaaaatgatgaaacaaaagtttgacagtgatattctgaagcaaaaactgtcatctaaatttttcttgctgattttttttaacttccctattttagaaaactattgttgggctgttggtagtgctttccacagatgctggtcctcagtggattaggtcagaagctcatgttctgatagttcttcattatttcacaaaggtggacaacctgaaagagaaaaggctgcttgatgtcagcagaatctaaacccctacattaaagctttgcctcccattctgtggttgtggtggtggtaagaaggagatattggtaccaagaaaaatttccaaaactattgagagagagagagagaaagtattgaaattttgttctgccttgcaggatccatttatcattcattggtaaaggatatattccttgttcttaccaagtgtacatttaactcttgctgacatgttcagtgtattttattacttttaatgctgtcttaaaatgaacattctttaaagttggacaggaaggtggcatttcttatttattaacatttttaactttaaacatattgtgactcatctagaccttttaataagacggtcaacttcacacttagggaaaaaattaaaatgtgatggccacttctaataattcaggtagttataagggatctggaagaaatccagtctttatgaatatactattagttgggcattaaaaaatcagtatatattttaactttttgtgacatgctaacacattttcagaataattattgcatagtagaatttattactccagaacagaaagaccttacttcatttcaaatgaagttaattaatttacatttctgggtaaaaactggttctataaattaagtagagtagcttctttatgataaagacaattttctgaaaagtgaacaattctgttaaaagaactttattgatgtgtagatttcgcactttatttctgagactgcgttcatgtagttgttccccaatgtttgagtactaagagaacttgagaaaattacttcataaacatatggaaactgaaaatggactctctttgtgacaaagatattcaacagaaaatattgaccctgcattgcaaaacacaggttcgggttccctaagtcccacagtgtaatgattacaaatatcctagtgtccggtctagaaagactttctaggagaagactagtggaattttctaaaggttcagttttagcttttataacttaaatttggccctgttacgttctttttaatttgaaccataaggtatctcccctcccttcaggaataacttattggaaaactgaaaagaatcactgaatggaatgttcattttatggcagttgttttaagttttaaaatacacagaggaaaatattgtggaaggacctctttgttgctttcccttctaagttgtcttcttcttcttcttcttcttcttcttctttggtccttaagtgaaataaagactctaaaactaatttgtatattatcagccagagatgcggatggcagtcgagccaaatcgcatggctttcagatcaggtattctgcacattcattccaaggtcatagatttttaaaaggacctggatttgaagagatggcaaatgatgagccatcagaaaacttaatttggaaaacatgtatgtagccagtgtggatattgtggcctctctcaagacacattgacactgtagacttcattcagtccagtgtgagtattttggagtaggttggatgtagattttgtttttatcattgatttgtaccgacagaaatagacatttcatcatgtaaaattcctgttattctggaaaaacctattgttttgatcttcttgttttctgacttggaagtatcctttcaaaaaaactcttaagatatctaggtctaaaaagcacttcatgagatgctaaagctgacccactggttgaaaatgttgaccctatcctgttatttaaatgtgaacatttattgtacattcagtgagttatagtgttaatagtcttgtgctatgcagcaggtgtaaaaattaataaatatattttttaataaacatgtttgtatgtgtgaa

SEQ ID NO: 261821 - protein, 1061 aa, Artificial Sequence
  derived and/or modified sequence
MSAYSVPSTFAQASLPVHNQVLPSIESVDGSDPLATLQTPLGRLEAKEEEDEDEDEDTEEDEEEDGEDTDLDDWEPDPPRPFDPHDLWCEECNNAHASVCPKHGPLHPIPNRPVLTRARASLPLVLYIDRFLGGVFSKRRIPKRTQFGPVEGPLVRGSELKDCYIHLKVSLDKGDRKERDLHEDLWFELSDETLCNWMMFVRPAQNHLEQNLVAYQYGHHVYYTTIKNVEPKQELKVWYAASYAEFVNQKIHDISEEERKVLREQEKNWPCYECNRRFISSEQLQQHLNSHDEKLDVFSRTRGRGRGRGKRRFGPGRRPGRPPKFIRLEITSENGEKSDDGTQDLLHFPTKEQFDEAEPATLNGLDQPEQTTIPIPQLPQETQSSLEHEPETHTLHLQPQHEESVVPTQSTLTADDMRRAKRIRLELQNAALQHLFIRKSFRPFKCLQCGKAFREKDKLDQHLRFHGREGNCPLTCDLCNKGFISSTSLESHMKLHSDQKTYSCIFCPESFDRLDLLKDHVAIHINDGYFTCPTCKKRFPDFIQVKKHVRSFHSEKIYQCTECDKAFCRPDKLRLHMLRHSDRKDFLCSTCGKQFKRKDKLREHMQRMHNPEREAKKADRISRSKTFKPRITSTDYDSFTFKCRLCMMGFRRRGMLVNHLSKRHPDMKIEEVPELTLPIIKPNRDYFCQYCDKVYKSASKRKAHILKNHPGAELPPSIRKLRPAGPGEPDPMLSTHTQLTGTIATPPVCCPHCSKQYSSKTKMVQHIRKKHPEFAQLSNTIHTPLTTAVISATPAVLTTDSATGETVVTTDLLTQAMTELSQTLTTDYRTPQGDYQRIQYIPVSQSASGLQQPQHIQLQVVQVASATSPHQSQQSTVDVGQLHDPQPYPQHAIQVQHIQVSGQPLSPSAQQAQQGLSPSHIQGSSSTQGQALQQQQQQQQNSSVQHTYLPSAWNSFRGYSSEIQMMTLPPGQFVITDSGVATPVTTGQVKAVTSGHYVLSESQSELEEKQTSALSGGVQVEPPAHSDSLDPQTNSQQQTTQYIITTTTNGNGSSEVHITKP

SEQ ID NO: 261822 - DNA, 3186 bp, Artificial Sequence
  derived and/or modified sequence
atgagcgcctacagcgtgcccagcaccttcgcccaggccagcctgcccgtgcacaaccaggtgctgcccagcatcgagagcgtggacggcagcgaccccctggccaccctgcagacccccctgggcagactggaggccaaggaggaggaggacgaggacgaggacgaggacaccgaggaggacgaggaggaggacggcgaggacaccgacctggacgactgggagcccgacccccccagacccttcgacccccacgacctgtggtgcgaggagtgcaacaacgcccacgccagcgtgtgccccaagcacggccccctgcaccccatccccaacagacccgtgctgaccagagccagagccagcctgcccctggtgctgtacatcgacagattcctgggcggcgtgttcagcaagagaagaatccccaagagaacccagttcggccccgtggagggccccctggtgagaggcagcgagctgaaggactgctacatccacctgaaggtgagcctggacaagggcgacagaaaggagagagacctgcacgaggacctgtggttcgagctgagcgacgagaccctgtgcaactggatgatgttcgtgagacccgcccagaaccacctggagcagaacctggtggcctaccagtacggccaccacgtgtactacaccaccatcaagaacgtggagcccaagcaggagctgaaggtgtggtacgccgccagctacgccgagttcgtgaaccagaagatccacgacatcagcgaggaggagagaaaggtgctgagagagcaggagaagaactggccctgctacgagtgcaacagaagattcatcagcagcgagcagctgcagcagcacctgaacagccacgacgagaagctggacgtgttcagcagaaccagaggcagaggcagaggcagaggcaagagaagattcggccccggcagaagacccggcagaccccccaagttcatcagactggagatcaccagcgagaacggcgagaagagcgacgacggcacccaggacctgctgcacttccccaccaaggagcagttcgacgaggccgagcccgccaccctgaacggcctggaccagcccgagcagaccaccatccccatcccccagctgccccaggagacccagagcagcctggagcacgagcccgagacccacaccctgcacctgcagccccagcacgaggagagcgtggtgcccacccagagcaccctgaccgccgacgacatgagaagagccaagagaatcagactggagctgcagaacgccgccctgcagcacctgttcatcagaaagagcttcagacccttcaagtgcctgcagtgcggcaaggccttcagagagaaggacaagctggaccagcacctgagattccacggcagagagggcaactgccccctgacctgcgacctgtgcaacaagggcttcatcagcagcaccagcctggagagccacatgaagctgcacagcgaccagaagacctacagctgcatcttctgccccgagagcttcgacagactggacctgctgaaggaccacgtggccatccacatcaacgacggctacttcacctgccccacctgcaagaagagattccccgacttcatccaggtgaagaagcacgtgagaagcttccacagcgagaagatctaccagtgcaccgagtgcgacaaggccttctgcagacccgacaagctgagactgcacatgctgagacacagcgacagaaaggacttcctgtgcagcacctgcggcaagcagttcaagagaaaggacaagctgagagagcacatgcagagaatgcacaaccccgagagagaggccaagaaggccgacagaatcagcagaagcaagaccttcaagcccagaatcaccagcaccgactacgacagcttcaccttcaagtgcagactgtgcatgatgggcttcagaagaagaggcatgctggtgaaccacctgagcaagagacaccccgacatgaagatcgaggaggtgcccgagctgaccctgcccatcatcaagcccaacagagactacttctgccagtactgcgacaaggtgtacaagagcgccagcaagagaaaggcccacatcctgaagaaccaccccggcgccgagctgccccccagcatcagaaagctgagacccgccggccccggcgagcccgaccccatgctgagcacccacacccagctgaccggcaccatcgccaccccccccgtgtgctgcccccactgcagcaagcagtacagcagcaagaccaagatggtgcagcacatcagaaagaagcaccccgagttcgcccagctgagcaacaccatccacacccccctgaccaccgccgtgatcagcgccacccccgccgtgctgaccaccgacagcgccaccggcgagaccgtggtgaccaccgacctgctgacccaggccatgaccgagctgagccagaccctgaccaccgactacagaaccccccagggcgactaccagagaatccagtacatccccgtgagccagagcgccagcggcctgcagcagccccagcacatccagctgcaggtggtgcaggtggccagcgccaccagcccccaccagagccagcagagcaccgtggacgtgggccagctgcacgacccccagccctacccccagcacgccatccaggtgcagcacatccaggtgagcggccagcccctgagccccagcgcccagcaggcccagcagggcctgagccccagccacatccagggcagcagcagcacccagggccaggccctgcagcagcagcagcagcagcagcagaacagcagcgtgcagcacacctacctgcccagcgcctggaacagcttcagaggctacagcagcgagatccagatgatgaccctgccccccggccagttcgtgatcaccgacagcggcgtggccacccccgtgaccaccggccaggtgaaggccgtgaccagcggccactacgtgctgagcgagagccagagcgagctggaggagaagcagaccagcgccctgagcggcggcgtgcaggtggagccccccgcccacagcgacagcctggacccccagaccaacagccagcagcagaccacccagtacatcatcaccaccaccaccaacggcaacggcagcagcgaggtgcacatcaccaagccctag

SEQ ID NO: 261823 - DNA, 3186 bp, Artificial Sequence
  derived and/or modified sequence
atgtctgcctactcagtgccatccacatttgctcaggcatcgttgcctgtccataatcaggtgctgccaagtatcgaatccgtggatggctccgacccactggctaccttgcaaacccctttgggtcgcctagaggctaaagaagaggaagatgaagatgaggacgaagatacagaggaagacgaggaggaggatggcgaagatacagatttggatgactgggaacccgacccaccacggcctttcgaccctcacgacctttggtgtgaagagtgtaataatgcccacgcttcggtctgccctaaacatggcccccttcatccaatccccaatcgacctgttcttacgcgggcccgtgcctccctgcccctggtgctgtacatcgacagattcctggggggcgtgttcagcaaacgccgtataccgaaacggacacaatttggtcccgtggaggggcccttagttagaggctctgagctcaaagactgctacatacatttgaaggtcagcctggacaaaggagaccgtaaggaacgggacctccatgaagatttgtggtttgaactgtcggatgagaccctgtgtaactggatgatgtttgtcagacctgcccagaatcaccttgaacaaaatttggttgcatatcaatatgggcatcacgtttactataccacgatcaagaatgtggaacccaagcaggagcttaaagtgtggtacgccgcctcctacgccgagtttgtcaatcagaagatacatgatatttcagaagaagagagaaaagtgcttagagaacaggaaaaaaactggccatgttacgaatgcaatcgtaggttcatttcttccgaacagctgcagcagcacttaaacagtcatgatgaaaaacttgacgtgttttccaggacgcgcggacgtggccggggccggggcaaacgtcgcttcggccccggacgcaggcccggccgcccgcctaagtttattcggctggagatcacatccgagaatggcgaaaagtctgacgacggcactcaggacttgctgcacttccctactaaagagcagtttgacgaagccgagcctgcaacactgaatggcctcgaccagccagagcagacgaccatcccgattccacagctccctcaggagacccagtcttcactggaacatgagccagagacccacacgctacatttgcagccccagcacgaggaatcggtcgtgcccacccagtctactctcactgcggatgatatgcgtcgcgcaaaacgcataagactggagctacagaacgcagccttgcagcatctctttatacgcaagtcgtttaggcccttcaaatgcctgcagtgcggtaaagcattccgggaaaaagacaagctcgaccagcatctccgcttccatgggagggaagggaattgtccccttacatgtgacttgtgtaataaggggttcatatcttccacaagcctcgagtctcacatgaaacttcacagcgaccagaagacctactcttgtatattttgccccgaatctttcgaccgtttagacttacttaaggatcacgtcgccatccacataaacgacggttattttacgtgccccacctgcaagaaacggttcccagacttcatccaggtgaaaaaacacgtacggtcctttcattcagagaaaatataccagtgtacagaatgcgataaagcattttgtaggccggataaactgcgattgcacatgctgcgtcactctgatagaaaggatttcctgtgcagtacctgtggaaagcagtttaaacgcaaggacaagctgcgtgaacatatgcagaggatgcacaatccagaacgggaggccaaaaaggccgacaggatctccagatcaaaaaccttcaagccccggattacctctacggattacgattccttcacatttaaatgccggttgtgcatgatggggtttagaagaagggggatgctggtgaatcacttaagcaagagacatccagacatgaagatcgaggaagtcccggaattaacgctccctatcataaaaccaaaccgagattatttctgtcagtattgtgataaggtgtataagagcgcctctaagcggaaagctcatatcttaaagaatcatcccggcgcggaactacctccgtccatacgcaagctgaggccagcgggtccaggtgagcccgacccaatgttgtccactcacacccagctgactggaacgatagcgacacccccagtttgctgtccgcactgctcaaagcagtacagctcaaagacaaagatggtgcagcatattcgcaagaagcaccctgaattcgcgcaactgagcaatacgatccacaccccactcaccaccgcagtgatctccgccacacctgctgttctgaccaccgattcagccacaggagaaaccgttgtgaccaccgatctacttacccaggccatgactgagctgtcgcagactctgacaaccgattatcggaccccccagggtgattaccagcggatccagtatattcctgtgtctcagtctgcttctggtctgcagcagccacagcatatccagttgcaggttgttcaggtagcttcggccacctctccccaccaatctcagcaaagtaccgtggatgtaggtcagcttcacgaccctcagccctatccacagcatgccatccaggtccagcacatacaggtgagcggtcagcccctgagccctagcgcccaacaggcccaacaaggactaagccctagccatattcagggatctagctctacccagggccaggcgcttcagcagcagcaacagcagcagcagaactcaagtgtacagcatacgtacttaccatctgcttggaatagtttcagaggatatagctccgaaatacaaatgatgaccctcccacctgggcagtttgtcatcactgattccggagtggcgacaccagtgactactgggcaggttaaagcagtaacatctggtcactacgtcttatctgaatctcagtcggaattggaggagaaacagaccagtgcactgtccggcggcgtgcaggtcgagcctcctgctcatagcgatagccttgacccacagaccaactctcagcaacagaccacccagtacattattacaacgaccaccaatggcaacgggtccagcgaagtgcacatcactaagccatag

SEQ ID NO: 261824 - DNA, 3186 bp, Artificial Sequence
  derived and/or modified sequence
atgtctgcctacagcgtgcccagcacctttgcccaggccagcctgcctgtgcacaaccaggtgctgcccagcattgaatctgtggatggcagtgaccccctggccaccctgcagacccccctgggccgcctggaggccaaggaggaggaggatgaagatgaagatgaggacacagaggaggatgaggaggaggatggagaggacacagacctggatgactgggagccagaccccccccggccctttgacccccatgacctgtggtgtgaggagtgcaacaatgcccacgcctctgtgtgccccaagcacggccccctgcaccccatccccaacagacctgtgctgacccgggcccgggccagcctgcccctggtgctgtacatcgaccgcttcctgggcggcgtcttcagcaagaggcgcatccccaagaggacccagtttggacctgtggagggccccctggtgcggggcagcgagctgaaggactgctacatccacctgaaggtgtccctggacaagggggacaggaaggagcgggacctgcacgaggacctgtggtttgagctgagtgatgagaccctgtgcaactggatgatgtttgtgcggcctgcccagaaccacctggagcagaacctggtggcctaccagtatggccaccacgtgtactacaccaccatcaagaatgtggagcccaagcaggagctgaaggtgtggtacgccgccagctatgcagagtttgtgaaccagaagatccatgacatcagcgaggaggagaggaaggtgctgcgggagcaggagaagaactggccctgctatgagtgcaacagacgcttcatcagcagcgagcagctgcagcagcacctgaacagccatgatgagaagctggatgtgttcagcaggacccggggccggggccggggccggggcaagagaagatttggacctggaagaagacctggccggccccccaagttcatccggctggagatcaccagtgaaaatggagagaagagtgatgatggcacccaggacctgctgcacttccccaccaaggagcagtttgatgaagctgagcccgccaccctgaatggcctggaccagcctgagcagaccaccatccccatcccccagctgccccaggagacccagagcagcctggagcacgagcctgagacccacaccctgcacctgcagccccagcacgaggagagcgtggtgcccacccagagcaccctgacagcagatgacatgaggcgggccaagaggatccggctggagctgcagaatgctgccctgcagcacctgttcatcaggaagagcttccggcccttcaagtgcctgcagtgtgggaaggccttccgggagaaggacaagctggaccagcacctgcgcttccacggccgggagggcaactgccccctgacctgtgacctgtgcaacaagggcttcatcagcagcaccagcctggagagccacatgaagctgcacagcgaccagaagacctacagctgcatcttctgcccagagagctttgaccggctggacctgctgaaggaccacgtggccatccacatcaatgatggctacttcacctgccccacctgcaagaagcgcttcccagacttcatccaggtgaagaagcacgtgcgctccttccacagcgagaagatctaccagtgcacagaatgtgacaaggccttctgcaggccagacaagctgcggctgcacatgctgcggcacagcgacaggaaggacttcctgtgcagcacctgtgggaagcagttcaagaggaaggacaagctgcgggagcacatgcagaggatgcacaaccctgagcgggaggccaagaaggctgaccgcatcagccgcagcaagaccttcaagccccgcatcaccagcacagattatgacagcttcaccttcaagtgccgcctgtgcatgatgggcttcagaagaagaggcatgctggtgaaccacctgagcaagaggcacccagacatgaagattgaggaggtgcctgagctgaccctgcccatcatcaagcccaacagagactacttctgccagtactgtgacaaggtgtacaagagcgccagcaagaggaaggcccacatcctgaagaaccaccctggagctgagctgcccccatccatcaggaagctgcggcctgctggccctggagagccagaccccatgctgagcacccacacccagctgaccggcaccatcgccaccccacctgtgtgctgcccccactgcagcaagcagtacagcagcaagaccaagatggtgcagcacatcaggaagaagcaccctgagtttgcccagctgagcaacaccatccacacccccctgaccacagctgtgatcagcgccaccccagctgtgctgaccacagattctgccactggagagaccgtggtgaccacagacctgctgacccaggccatgacagagctgagccagaccctgaccacagactaccgcaccccccagggcgactaccagaggatccagtacatccctgtgtcccagagcgccagcggcctgcagcagccccagcacatccagctgcaggtggtgcaggtggccagcgccaccagcccccaccagagccagcagagcacagtggatgtgggccagctgcatgacccccagccctacccccagcacgccatccaggtgcagcacatccaggtgtctggccagcccctgagccccagcgcccagcaggcccagcagggcctgagccccagccacatccagggcagcagcagcacccagggccaggccctgcagcagcagcagcagcagcagcagaacagctctgtgcagcacacctacctgcccagcgcctggaacagcttccggggctacagcagcgagatccagatgatgaccctgcccccaggccagtttgtgatcacagacagcggcgtggccacccctgtgaccaccggccaggtgaaggctgtgaccagcggccactacgtgctgtctgagagccagagcgagctggaggagaagcagaccagcgccctgtctggaggagtgcaggtggagcccccagcccacagcgacagcctggacccccagaccaacagccagcagcagaccacccagtacatcatcaccaccaccaccaatggaaatggcagcagcgaggtgcacatcaccaagccctag

SEQ ID NO: 261825 - DNA, 3186 bp, Artificial Sequence
  derived and/or modified sequence
atgagcgcctacagcgtgcccagcaccttcgcccaggccagcctgcctgtccataaccaggttctcccttctatagagagcgttgacgggtctgatcccctggctacactacagacacctcttggcagactggaagctaaagaggaggaggacgaggacgaagatgaagacactgaggaagatgaggaagaggatggtgaggacactgatttagatgactgggaacctgaccctccacgcccttttgacccccatgacctctggtgcgaggaatgtaacaatgcacacgcaagtgtgtgtccaaaacacggacccctacaccctatccccaatcgccctgtgctgacacgcgccagggcatctctaccactggtcctgtacattgacagattcctgggcggggtcttttccaaaagacgcatacccaagcgtactcagttcggccccgtagagggtccgctggtccggggatccgagcttaaggactgctatattcacctcaaggtcagcctagataaaggcgacaggaaagagagagatcttcacgaggacctgtggtttgaactttctgatgaaacactatgtaactggatgatgtttgtgcgccctgctcagaaccatcttgagcagaacctagtagcttaccagtacggccaccacgtgtattacacaaccataaagaacgtagaaccaaaacaggagctcaaagtgtggtatgcagccagttacgccgagtttgtcaaccaaaagatccatgacatctcagaggaagaacggaaggtgctgagagagcaggagaaaaattggccatgttatgagtgcaatcggcgctttatatctagcgagcagttgcaacagcaccttaattctcatgatgagaagctggacgtattctctcggacaagaggacggggtcgcggtcgtggcaagcgccggttcgggccgggtcgcaggccaggaaggccccccaagttcatcagactcgagatcacctcagagaatggcgagaaatctgatgatggtactcaggacctgcttcactttccgacaaaggagcagtttgacgaggcagaacctgcaacattgaatggcctcgaccagccagagcagacaactatcccaattccgcagttgcctcaggaaactcagtcaagcctggaacacgaacccgagacccacaccctgcatctgcagccccagcatgaggagagcgtcgtgccaacacaaagcacactgactgccgatgatatgagacgggcaaaaaggatcagactggagttgcaaaatgccgcactgcagcacctcttcataaggaagtcctttaggccatttaaatgcctgcaatgtgggaaggctttccgtgaaaaggacaagctggaccagcacctgagatttcacggccgcgaagggaattgtcccctgacttgtgatctttgtaacaaggggtttatcagcagtacatctttagagagccatatgaaactgcattccgatcaaaagacatactcctgtatcttctgtcctgagagctttgacaggttggatctcctgaaggaccatgtcgccatacacatcaacgatggatacttcacgtgtccgacatgtaagaaacgattcccggattttattcaggtgaagaaacatgtgaggtcctttcacagcgagaaaatctatcaatgcactgagtgcgataaggccttctgccggcccgataaacttcggctgcacatgctaagacacagcgaccggaaggatttcctgtgctcaacctgtggcaagcagtttaagcggaaggacaagcttcgggaacacatgcagcgcatgcacaaccccgaaagggaggccaagaaagcggatagaataagccggagcaaaacttttaagcccaggatcaccagcacagactacgactcctttaccttcaagtgtcgactctgtatgatgggcttcaggcgtagaggcatgttagtgaatcacctgagcaagcgtcatcctgatatgaaaattgaggaagtgccagaattgaccctccccattatcaaaccgaaccgcgactatttctgtcagtactgcgacaaggtgtataagtcagcttcaaaacggaaggctcacatcctgaaaaaccaccccggcgcagaactgcccccttccatcagaaagctgcggcccgctggacccggtgagcctgacccaatgctgtctacccacacccagctcactggtaccatcgctacccctcccgtttgttgtccccattgttccaagcagtactccagcaaaacaaagatggtccagcacatcagaaaaaagcatcccgagtttgcccagctgtccaacaccattcacactccattaaccactgccgtgatatcagccacgcccgcggtactgacaactgatagcgcaacaggtgaaactgtggtgaccactgatctgctcactcaggcgatgacggaactgagtcagacccttacgacagactaccgcactcctcagggtgattaccagcgaatccagtacattcctgtcagccagtccgctagcggcctgcaacaaccacagcatatccaactccaagttgtccaggtcgcttccgccaccagtccccatcagtcccaacagagtacggttgacgtgggccagctgcatgatccccagccttatcctcagcacgccattcaggtgcagcacatccaggtgtcaggtcagcctttgagtcctagcgcacagcaggctcagcaagggctgtcccccagccatatacagggttccagttcaactcaaggtcaggccctgcaacagcagcagcagcaacagcaaaacagctctgtgcagcatacctatctgcccagcgcctggaactctttccgtggctacagctccgagatacaaatgatgacactacctccgggccagttcgttattacagactcaggggtggctactccagtgacaacaggccaggtgaaggctgtaacctccggccattacgttttgtccgagtcccaatctgagctggaggaaaaacagacttccgccctctctggcggcgtccaggtcgagccacctgcgcactctgactctctggacccccagacaaattcgcagcagcagacaacccagtacatcattaccactactacgaacggcaatggaagctcggaggtgcatattactaagccttag

SEQ ID NO: 261826 - DNA, 3186 bp, Artificial Sequence
  derived and/or modified sequence
atgagcgcatacagcgtcccctctacatttgcccaggccagcctgcccgttcacaaccaggtcttaccttctatcgagtctgtggatggttctgaccctttagcaactctgcagaccccactcgggagactggaggccaaggaggaagaggatgaagatgaggatgaggatacagaagaggacgaagaggaggatggcgaagacaccgacctcgacgactgggagcccgatccaccgaggccttttgacccgcatgacctatggtgtgaggaatgcaataacgcccacgcaagcgtgtgtcctaagcatggtcccttgcacccgatccctaaccgcccagtcctgaccagggctcgagcaagtctgcccttggttttatacatcgatcggttcctgggtggagttttcagcaaacgcagaatacctaagcggacccagtttggacccgtggagggaccactcgttcggggttcagagcttaaggattgttacatccacctgaaggtctccctggataagggcgatcgaaaggagagggatctgcacgaggatctctggttcgagttatcggacgagaccctctgcaactggatgatgttcgttcgaccagctcagaaccatttggagcaaaatcttgtcgcctatcagtatggccaccacgtctattacacaaccattaaaaacgtggaaccgaagcaggagttgaaggtctggtacgctgcatcctatgctgagtttgtgaatcagaagatccatgatattagtgaggaggaacgtaaggtcttgagagaacaggagaagaactggccctgttacgaatgcaatcgacgctttatctcctccgaacaactgcagcaacatcttaactcccacgacgagaagttggatgttttctcaaggacccgcggacggggtcgcggtcgcggaaaacgacggtttggacctgggaggcgtcccggaagaccgcctaagtttatcaggctcgaaatcacatctgagaatggagaaaagtccgacgacggaactcaggacctactgcacttcccgactaaagagcaattcgacgaggcagaacccgctactctgaatggactggatcaaccggagcagactacaatccctattccacaactgcctcaggagacacagagcagtctggagcatgaacctgaaacacacactttacatctgcagccgcagcatgaggaatcggtggttccaactcagtctactctgacagccgacgacatgaggagagcaaaaagaataaggctggagcttcagaatgccgcactgcagcacctttttattaggaagtccttccgccctttcaagtgcctccaatgtggtaaggcattcagggaaaaagacaaattggaccagcatctgaggttccatggacgggagggaaattgccctttgacctgcgacctgtgtaacaaggggttcatttcgagcacgtccctggagagtcacatgaagctccacagcgaccagaaaacgtattcctgcatcttctgtcccgaaagttttgacaggcttgatcttctgaaagaccacgtggctatccacattaatgacggatattttacttgtccgacctgcaaaaagaggtttcccgatttcatccaggtgaaaaaacacgtccggtcttttcacagtgagaagatctatcagtgtactgagtgcgacaaggctttctgtcggcctgataagcttagattgcacatgttacgccactcggataggaaagacttcctttgcagcacgtgtggtaaacagtttaaacgtaaggataaactgagggagcacatgcaacgaatgcataacccagagcgagaagccaagaaagccgatagaattagtcgttctaaaacctttaagcctagaattacgagcacggattacgattctttcacctttaagtgccgtctgtgcatgatgggctttcgcagacgcggaatgctagtcaaccatcttagcaaacgtcacccggatatgaagattgaggaggtgcctgagctgacattacctatcatcaaacccaacagggattatttttgccagtactgcgacaaagtctataaaagcgcttcaaagcgaaaggcccacattctcaagaatcacccaggcgctgaactacctccctccataaggaagctgcggccagctggccctggggagcccgatcccatgttgagtacccacactcaactgacgggaactattgcaacaccaccggtgtgctgcccacattgctcgaaacagtactcttctaagactaagatggtgcaacatatccgcaagaaacatcctgaattcgctcagctgtcaaacactatccatactcccctgaccactgccgtgatctcagccaccccggcagtgttgactaccgactccgctaccggtgagaccgtggtgacaactgatctcctaacacaggccatgaccgagctgtcccagacactgactaccgactatcgcacacctcagggcgactatcagagaatccagtatatccccgtgtcccagagtgcttctggcctgcagcagcctcagcatattcaacttcaggttgtccaggtggcctctgccacatctcctcaccagagtcagcaaagcacggtggacgtgggccagttacatgatccccaaccttacccccagcacgcaattcaggtccaacatatccaggtatccggccagcctttaagcccttctgcccagcaagcgcagcaagggctgtcaccatcacacattcagggcagctccagcacccagggccaggccctgcagcagcagcagcagcagcagcagaactcaagcgtgcagcatacttacctgcccagcgcatggaactcctttagggggtactcatcagaaatccaaatgatgacgctcccccctggtcaattcgtcatcactgattctggcgtcgccactccggtaacaaccggtcaagtaaaggccgtgacctcaggacattacgtgctgtctgagtcacaatcagagctcgaggagaaacagacgtctgcactttccggaggagtacaggtcgaaccgcctgcacactcagattcactagatcctcagaccaactcccagcagcagactactcagtatattatcacaaccaccaccaacggaaacggaagctctgaggttcacattaccaaaccttag

SEQ ID NO: 261827 - DNA, 5998 bp, Artificial Sequence
  derived and/or modified sequence
agccctcccaggtgtgggacagaaggggcagagggagggcagaggcttaaaggctgtgagcagtcagatcaaaaatgaagccagctcttcctcacagccggtagatggaagtcatttttccagggcctggaaggagttggtaggaagactagatttcagccagcccttgcgccctgtttgtgccagcaggcaccagcgaaccaaaagcaggtgtccatgtctgcttactctgtgccttcaacttttgcccaggcctcattgccagttcataaccaggtgctgccttccatcgagagtgtagatgggtccgaccctttggcaactctgcagacccctctaggcagactggaggccaaagaggaagaggatgaggatgaggacgaggacactgaggaagatgaggaagaagacggtgaggacacggatctggatgactgggagccagacccgccccggcccttcgacccacacgacttgtggtgtgaggagtgcaataacgcgcatgcttcagtgtgtccgaagcacggccccttgcacccgatccccaaccggccggtgctcacccgggccagggcgagcctccccctggtgctctacatagacaggtttctgggcggggtgttctccaagcggcgcatccccaagcgcacccagtttggccccgtggaggggcctctcgtcaggggctcggagctgaaagactgttacattcacctcaaggtttctcttgataaaggggacaggaaagaaagggatttacatgaagacctatggtttgagttgtctgatgagacgctttgtaactggatgatgtttgtacggccagcccagaatcacctggagcagaacctggtggcttaccagtatggccaccatgtgtattatacaaccataaaaaatgtggagcccaagcaggaactgaaggtgtggtatgccgcatcctatgctgagttcgtgaaccagaaaattcatgacatttctgaggaagaaaggaaagttcttcgagagcaagagaagaattggccctgctatgaatgtaaccgccgatttataagctcggagcagttgcaacagcatctcaattctcatgatgagaaactagatgtgtttagcagaacaagaggcagaggaaggggacgaggcaagaggcgattcggtccaggtcgacggccggggcgtcctccaaaatttatccgcctggaaatcaccagcgaaaatggggaaaagagtgacgatgggacacaggacttgctacattttcccacaaaggagcaatttgatgaggctgaaccagccactctgaatgggctggatcaaccagaacagaccactatcccaatccctcagctgccacaggaaacccagtcttccctggaacatgaaccagaaactcacaccctgcacctgcagccgcagcatgaagagagcgtggtgcccacccagagcacgctgacagccgacgacatgcgcagagccaagcgcatccgattggagctgcagaatgcagctcttcagcatctgtttattcggaagtccttccggccttttaaatgcttgcagtgtgggaaggccttccgggaaaaggacaaactggaccagcacttacgcttccatgggcgggaggggaactgcccactgacctgtgatctctgtaacaagggcttcatcagcagcacatccttggagagccacatgaagctccactcagaccagaagacttactcttgcattttttgcccagaatcctttgaccgccttgatttgttgaaagatcatgtggccattcatatcaatgatggctacttcacctgcccaacttgtaagaaacggttcccagattttatccaggtgaaaaaacacgtgcgcagcttccactcagaaaagatctaccagtgcacagagtgtgacaaggccttctgtcgccccgataaactgcgactccacatgctccggcattcggaccgcaaagacttcctgtgttccacctgtgggaagcaatttaagcgaaaagacaaactacgggaacacatgcagaggatgcataatcctgagagggaggccaagaaagccgaccgcatcagccgctccaagacgttcaagccccgcatcacgtccacagactacgacagcttcacgttcaagtgccgcctgtgcatgatgggcttccggcggcgcggcatgctggtaaatcacttatcgaagagacacccagacatgaagatagaagaggtgccagagttaactctacccatcataaaacccaatcgtgattacttttgtcagtattgcgataaggtttataaaagtgccagcaagcgcaaagcccacattctgaagaaccacccaggagcagagctcccaccgagcattcggaagctccgacccgctggtcctggagagccagaccccatgctgagcacacacacccagctgacgggcaccatcgccacccctcccgtctgctgtccccactgctccaagcagtacagcagcaagaccaagatggtccagcacattcgaaagaagcatccagagttcgcccagctctccaacaccatacacacaccactgacgacagctgtgatcagtgccaccccagcggttttgactacagacagcgccactggagagactgtggtgacgacggacctgctcacccaagcaatgacagaactgtcccagaccttaacgacagactaccgaacgccacaaggggattaccagagaattcagtacatccctgtgtcgcagtcggcgtctggcctccagcagcctcagcacatacagctgcaagtggttcaagtggcctcggccacttcccctcaccagtcacagcagtccactgtggatgttggccagctccatgatcctcagccctacccccagcacgccatccaggtgcagcacatccaggtatctgggcagccgttgagtccctcagcccagcaggctcagcaggggctcagcccctcccacatccagggcagttcttccacacaggggcaggctctgcagcagcagcagcagcagcagcagaattcctctgtgcagcacacgtacctgcccagtgcttggaattccttccgtggctattcatctgagattcaaatgatgacgcttcctccgggtcagtttgtgattacagacagtggtgtggcaactccagttactactggccaggtgaaggcggttacttcgggtcattatgtgttatcagaaagtcaatcagaattggaagaaaagcaaacttctgccctctctggtggagtccaggtcgagccacctgcacacagtgactccctggacccccagaccaacagccaacagcagaccacacagtacatcatcaccaccaccaccaacgggaacggaagcagcgaagtgcatatcaccaaaccatgacttccaccctggagcttgaatccagcacccacctcatgtctgttctcataagtctgaaagctctgacacgtagagctcttttgtaagatttattattcactcaagagttcggaaaccacagttttgtctctcatccatacactggggtttattttgccaaggtcatctttatcaaattgactcttcaaaccctcggtttttgccacagaacagagatctttcaggggaaagtagatttcgaggtggagagaatttgccttgctcttgagctggtcttttaacatactgacgagccttacttttcctttgtggaaatattaagtggcatattgtgttcataccaaaggtggagacaggatgtgccaagttcatggttactggacttcttattccaagccatggcaccaaaggagaaggggcattttgtgggtgtgcattaggtctgaactgctttatcttgttttagttttcagtaatttaacaaagggagcctgctgaataacaaaattaaaatgatgaaacaaaagtttgacagtgatattctgaagcaaaaactgtcatctaaatttttcttgctgattttttttaacttccctattttagaaaactattgttgggctgttggtagtgctttccacagatgctggtcctcagtggattaggtcagaagctcatgttctgatagttcttcattatttcacaaaggtggacaacctgaaagagaaaaggctgcttgatgtcagcagaatctaaacccctacattaaagctttgcctcccattctgtggttgtggtggtggtaagaaggagatattggtaccaagaaaaatttccaaaactattgagagagagagagagaaagtattgaaattttgttctgccttgcaggatccatttatcattcattggtaaaggatatattccttgttcttaccaagtgtacatttaactcttgctgacatgttcagtgtattttattacttttaatgctgtcttaaaatgaacattctttaaagttggacaggaaggtggcatttcttatttattaacatttttaactttaaacatattgtgactcatctagaccttttaataagacggtcaacttcacacttagggaaaaaattaaaatgtgatggccacttctaataattcaggtagttataagggatctggaagaaatccagtctttatgaatatactattagttgggcattaaaaaatcagtatatattttaactttttgtgacatgctaacacattttcagaataattattgcatagtagaatttattactccagaacagaaagaccttacttcatttcaaatgaagttaattaatttacatttctgggtaaaaactggttctataaattaagtagagtagcttctttatgataaagacaattttctgaaaagtgaacaattctgttaaaagaactttattgatgtgtagatttcgcactttatttctgagactgcgttcatgtagttgttccccaatgtttgagtactaagagaacttgagaaaattacttcataaacatatggaaactgaaaatggactctctttgtgacaaagatattcaacagaaaatattgaccctgcattgcaaaacacaggttcgggttccctaagtcccacagtgtaatgattacaaatatcctagtgtccggtctagaaagactttctaggagaagactagtggaattttctaaaggttcagttttagcttttataacttaaatttggccctgttacgttctttttaatttgaaccataaggtatctcccctcccttcaggaataacttattggaaaactgaaaagaatcactgaatggaatgttcattttatggcagttgttttaagttttaaaatacacagaggaaaatattgtggaaggacctctttgttgctttcccttctaagttgtcttcttcttcttcttcttcttcttcttctttggtccttaagtgaaataaagactctaaaactaatttgtatattatcagccagagatgcggatggcagtcgagccaaatcgcatggctttcagatcaggtattctgcacattcattccaaggtcatagatttttaaaaggacctggatttgaagagatggcaaatgatgagccatcagaaaacttaatttggaaaacatgtatgtagccagtgtggatattgtggcctctctcaagacacattgacactgtagacttcattcagtccagtgtgagtattttggagtaggttggatgtagattttgtttttatcattgatttgtaccgacagaaatagacatttcatcatgtaaaattcctgttattctggaaaaacctattgttttgatcttcttgttttctgacttggaagtatcctttcaaaaaaactcttaagatatctaggtctaaaaagcacttcatgagatgctaaagctgacccactggttgaaaatgttgaccctatcctgttatttaaatgtgaacatttattgtacattcagtgagttatagtgttaatagtcttgtgctatgcagcaggtgtaaaaattaataaatatattttttaataaacatgtttgtatgtgtg

SEQ ID NO: 261828 - protein, 1023 aa, Artificial Sequence
  derived and/or modified sequence
MSAYSVPSTFAQASLPVHNQVLPSIESVDGSDPLATLQTPLGRLEAKEEEDEDEDEDTEEDEEEDGEDTDLDDWEPDPPRPFDPHDLWCEECNNAHASVCPKHGPLHPIPNRPVLTRARASLPLVLYIDRFLGGVFSKRRIPKRTQFGPVEGPLVRGSELKDCYIHLKVSLDKGDRKERDLHEDLWFELSDETLCNWMMFVRPAQNHLEQNLVAYQYGHHVYYTTIKNVEPKQELKVWYAASYAEFVNQKIHDISEEERKVLREQEKNWPCYECNRRFISSEQLQQHLNSHDEKLDVFSRTRGRGRGRGKRRFGPGRRPGRPPKFIRLEITSENGEKSDDGTQDLLHFPTKEQFDEAEPATLNGLDQPEQTTIPIPQLPQETQSSLEHEPETHTLHLQPQHEESVVPTQSTLTADDMRRAKRIRNAALQHLFIRKSFRPFKCLQCGKAFREKDKLDQHLRFHGREGNCPLTCDLCNKGFISSTSLESHMKLHSDQKTYSCIFCPESFDRLDLLKDHVAIHINDGYFTCPTCKKRFPDFIQVKKHVRSFHSEKIYQCTECDKAFCRPDKLRLHMLRHSDRKDFLCSTCGKQFKRKDKLREHMQRMHNPEREAKKADRISRSKTFKPRITSTDYDSFTFKCRLCMMGFRRRGMLVNHLSKRHPDMKIEEVPELTLPIIKPNRDYFCQYCDKVYKSASKRKAHILKNHPGAELPPSIRKLRPAGPGEPDPMLSTHTQLTGTIATPPVCCPHCSKQYSSKTKMVQHIRKKHPEFAQLSNTIHTPLTTAVISATPAVLTTDSATGETVVTTDLLTQAMTELSQTLTTDYRTPQGDYQRIQYIPVSQSASGLQQPQHIQLQVVQVASVSGQPLSPSAQQAQQGLSPSHIQGSSSTQGQALQQQQQQQQNSSVQHTYLPSAWNSFRGYSSEIQMMTLPPGQFVITDSGVATPVTTGQVKAVTSGHYVLSESQSELEEKQTSALSGGVQVEPPAHSDSLDPQTNSQQQTTQYIITTTTNGNGSSEVHITKP

SEQ ID NO: 261829 - DNA, 3072 bp, Artificial Sequence
  derived and/or modified sequence
atgagcgcctacagcgtgcccagcaccttcgcccaggccagcctgcccgtgcacaaccaggtgctgcccagcatcgagagcgtggacggcagcgaccccctggccaccctgcagacccccctgggcagactggaggccaaggaggaggaggacgaggacgaggacgaggacaccgaggaggacgaggaggaggacggcgaggacaccgacctggacgactgggagcccgacccccccagacccttcgacccccacgacctgtggtgcgaggagtgcaacaacgcccacgccagcgtgtgccccaagcacggccccctgcaccccatccccaacagacccgtgctgaccagagccagagccagcctgcccctggtgctgtacatcgacagattcctgggcggcgtgttcagcaagagaagaatccccaagagaacccagttcggccccgtggagggccccctggtgagaggcagcgagctgaaggactgctacatccacctgaaggtgagcctggacaagggcgacagaaaggagagagacctgcacgaggacctgtggttcgagctgagcgacgagaccctgtgcaactggatgatgttcgtgagacccgcccagaaccacctggagcagaacctggtggcctaccagtacggccaccacgtgtactacaccaccatcaagaacgtggagcccaagcaggagctgaaggtgtggtacgccgccagctacgccgagttcgtgaaccagaagatccacgacatcagcgaggaggagagaaaggtgctgagagagcaggagaagaactggccctgctacgagtgcaacagaagattcatcagcagcgagcagctgcagcagcacctgaacagccacgacgagaagctggacgtgttcagcagaaccagaggcagaggcagaggcagaggcaagagaagattcggccccggcagaagacccggcagaccccccaagttcatcagactggagatcaccagcgagaacggcgagaagagcgacgacggcacccaggacctgctgcacttccccaccaaggagcagttcgacgaggccgagcccgccaccctgaacggcctggaccagcccgagcagaccaccatccccatcccccagctgccccaggagacccagagcagcctggagcacgagcccgagacccacaccctgcacctgcagccccagcacgaggagagcgtggtgcccacccagagcaccctgaccgccgacgacatgagaagagccaagagaatcagaaacgccgccctgcagcacctgttcatcagaaagagcttcagacccttcaagtgcctgcagtgcggcaaggccttcagagagaaggacaagctggaccagcacctgagattccacggcagagagggcaactgccccctgacctgcgacctgtgcaacaagggcttcatcagcagcaccagcctggagagccacatgaagctgcacagcgaccagaagacctacagctgcatcttctgccccgagagcttcgacagactggacctgctgaaggaccacgtggccatccacatcaacgacggctacttcacctgccccacctgcaagaagagattccccgacttcatccaggtgaagaagcacgtgagaagcttccacagcgagaagatctaccagtgcaccgagtgcgacaaggccttctgcagacccgacaagctgagactgcacatgctgagacacagcgacagaaaggacttcctgtgcagcacctgcggcaagcagttcaagagaaaggacaagctgagagagcacatgcagagaatgcacaaccccgagagagaggccaagaaggccgacagaatcagcagaagcaagaccttcaagcccagaatcaccagcaccgactacgacagcttcaccttcaagtgcagactgtgcatgatgggcttcagaagaagaggcatgctggtgaaccacctgagcaagagacaccccgacatgaagatcgaggaggtgcccgagctgaccctgcccatcatcaagcccaacagagactacttctgccagtactgcgacaaggtgtacaagagcgccagcaagagaaaggcccacatcctgaagaaccaccccggcgccgagctgccccccagcatcagaaagctgagacccgccggccccggcgagcccgaccccatgctgagcacccacacccagctgaccggcaccatcgccaccccccccgtgtgctgcccccactgcagcaagcagtacagcagcaagaccaagatggtgcagcacatcagaaagaagcaccccgagttcgcccagctgagcaacaccatccacacccccctgaccaccgccgtgatcagcgccacccccgccgtgctgaccaccgacagcgccaccggcgagaccgtggtgaccaccgacctgctgacccaggccatgaccgagctgagccagaccctgaccaccgactacagaaccccccagggcgactaccagagaatccagtacatccccgtgagccagagcgccagcggcctgcagcagccccagcacatccagctgcaggtggtgcaggtggccagcgtgagcggccagcccctgagccccagcgcccagcaggcccagcagggcctgagccccagccacatccagggcagcagcagcacccagggccaggccctgcagcagcagcagcagcagcagcagaacagcagcgtgcagcacacctacctgcccagcgcctggaacagcttcagaggctacagcagcgagatccagatgatgaccctgccccccggccagttcgtgatcaccgacagcggcgtggccacccccgtgaccaccggccaggtgaaggccgtgaccagcggccactacgtgctgagcgagagccagagcgagctggaggagaagcagaccagcgccctgagcggcggcgtgcaggtggagccccccgcccacagcgacagcctggacccccagaccaacagccagcagcagaccacccagtacatcatcaccaccaccaccaacggcaacggcagcagcgaggtgcacatcaccaagccctag

SEQ ID NO: 261830 - DNA, 3072 bp, Artificial Sequence
  derived and/or modified sequence
atgagcgcatattcggtaccatctacatttgctcaggcatccctgcctgtccacaaccaggtgctgccctccatcgagtcagtggacggctccgaccctctcgccactcttcagacaccccttggacggcttgaggccaaagaggaggaagacgaggatgaagatgaggatacagaggaagatgaggaggaagacggcgaggatactgatctggatgactgggagcccgacccaccccgcccatttgacccacatgatctctggtgcgaagagtgtaacaacgcacacgcaagcgtatgtcccaagcacggaccgcttcaccctatccccaaccggcccgtgcttaccagggcaagggcctcccttcccctcgttctctacattgaccgctttctgggtggcgtttttagcaagcgacgcatccccaaacgcacacagtttggccctgtagagggtcctctggtgcgcggctctgagctcaaggattgttacatccacctgaaggtctcgctggacaagggtgaccgaaaggagcgagatctccatgaggatctttggtttgaattgagcgatgagacattgtgcaattggatgatgtttgtgcgccccgcacagaaccaccttgaacagaacctcgtggcttaccagtatgggcatcacgtgtactacacgaccatcaagaacgtggagccaaagcaggaactgaaagtgtggtatgcagcttcgtacgctgaatttgtgaaccaaaagatccatgatatcagcgaggaggaaaggaaggttctccgcgagcaggaaaagaattggccatgctatgaatgtaatagacggttcatatcgagcgaacagctgcagcagcaccttaattctcacgatgaaaaactggatgtgtttagccgcacgaggggcaggggacgagggcgcggaaagaggaggttcggccccggccggcggcctggacgccctccaaaatttatcagactcgagattacctctgaaaacggcgaaaagagtgatgatggcactcaggaccttttgcacttccccacaaaagagcagttcgacgaggcggagccggcaactctgaatgggctggaccagccagagcagaccacaatccctattcctcaacttccacaagagacccagtcaagcctggaacatgagcctgagacccacacactgcacttgcagccgcagcatgaagaaagcgtagtgccaactcaatctactctgacggcagacgatatgaggcgtgccaagcggatcaggaatgcagctctgcagcatcttttcatcagaaagtcctttcgacctttcaagtgtttgcagtgtggaaaggccttcagagaaaaagataagctggaccagcatctgcgcttccacggcagggaagggaactgccccctcacatgtgacttatgcaataaaggttttattagttcaacaagcctagagagccacatgaagctgcactccgaccagaagacttacagctgcatcttttgccctgagagcttcgataggctcgaccttctgaaggaccatgtggccattcacataaatgacggttacttcacttgtccaacctgtaaaaagcggttcccagacttcatccaggtgaaaaagcatgtgcggagcttccactctgagaaaatttaccagtgtacagaatgcgacaaggccttttgcagaccagacaagcttaggctccacatgctgcgccattcagacagaaaggatttcttgtgttctacgtgcgggaagcaatttaaaaggaaggacaaactccgtgaacacatgcagagaatgcataaccccgagcgcgaggccaaaaaggccgaccgcatttcaaggtccaagacgttcaaaccacggataacgagcacggactacgattccttcacgtttaaatgtcgactgtgcatgatggggttccgacgcaggggcatgttggtgaatcatctgagtaagcggcaccccgacatgaagatcgaggaagttcccgaactcactttacctataattaagcccaaccgcgactacttctgccaatattgcgataaagtgtataagtccgcttctaagagaaaggcacatatccttaagaatcaccctggagccgaattaccgccatccataagaaagctgcggcctgccggccccggagagccagatcctatgctgagcacccacacacagctgaccggcactattgcaacgcctccagtttgctgccctcactgttctaagcagtattcctctaaaacgaagatggtgcaacacattcgcaagaaacaccctgagtttgctcagctttctaatactattcatacacctttgaccacggcagttattagcgcgactcccgcagtcctgacaactgattcagcgactggggagaccgtagttacaaccgacctgctaacacaagccatgaccgaattatctcaaacacttactactgactacaggacccctcagggagattatcaacggatccagtacattccagtgtcacagagcgcctccgggttgcagcagccacagcacatccagctgcaggtcgtgcaggtcgcctctgtgagcgggcagcctctctcccctagtgcccagcaagcgcagcaggggcttagtcccagccacatacaggggagctcctccacacaggggcaggcactgcaacaacaacaacaacaacagcagaactcttctgtgcagcacacttacctgccctcagcatggaacagtttccgtggctattctagcgagatccagatgatgacattgccaccgggtcagtttgtgataaccgattctggcgtcgccacccctgtgacaacaggacaggtcaaggccgtcacttccggccactacgtcctgtctgagagccagagtgagctagaggaaaagcagacaagcgcactgtccggaggggtccaggttgaaccccctgctcacagtgatagcctggacccccagacaaattcccagcaacagactacccagtatatcattacaaccacaacaaacggcaatggctcctctgaggttcatatcacgaaaccttag

SEQ ID NO: 261831 - DNA, 3072 bp, Artificial Sequence
  derived and/or modified sequence
atgtctgcctacagcgtgcccagcacctttgcccaggccagcctgcctgtgcacaaccaggtgctgcccagcattgaatctgtggatggcagtgaccccctggccaccctgcagacccccctgggccgcctggaggccaaggaggaggaggatgaagatgaagatgaggacacagaggaggatgaggaggaggatggagaggacacagacctggatgactgggagccagaccccccccggccctttgacccccatgacctgtggtgtgaggagtgcaacaatgcccacgcctctgtgtgccccaagcacggccccctgcaccccatccccaacagacctgtgctgacccgggcccgggccagcctgcccctggtgctgtacatcgaccgcttcctgggcggcgtcttcagcaagaggcgcatccccaagaggacccagtttggacctgtggagggccccctggtgcggggcagcgagctgaaggactgctacatccacctgaaggtgtccctggacaagggggacaggaaggagcgggacctgcacgaggacctgtggtttgagctgagtgatgagaccctgtgcaactggatgatgtttgtgcggcctgcccagaaccacctggagcagaacctggtggcctaccagtatggccaccacgtgtactacaccaccatcaagaatgtggagcccaagcaggagctgaaggtgtggtacgccgccagctatgcagagtttgtgaaccagaagatccatgacatcagcgaggaggagaggaaggtgctgcgggagcaggagaagaactggccctgctatgagtgcaacagacgcttcatcagcagcgagcagctgcagcagcacctgaacagccatgatgagaagctggatgtgttcagcaggacccggggccggggccggggccggggcaagagaagatttggacctggaagaagacctggccggccccccaagttcatccggctggagatcaccagtgaaaatggagagaagagtgatgatggcacccaggacctgctgcacttccccaccaaggagcagtttgatgaagctgagcccgccaccctgaatggcctggaccagcctgagcagaccaccatccccatcccccagctgccccaggagacccagagcagcctggagcacgagcctgagacccacaccctgcacctgcagccccagcacgaggagagcgtggtgcccacccagagcaccctgacagcagatgacatgaggcgggccaagaggatcagaaatgctgccctgcagcacctgttcatcaggaagagcttccggcccttcaagtgcctgcagtgtgggaaggccttccgggagaaggacaagctggaccagcacctgcgcttccacggccgggagggcaactgccccctgacctgtgacctgtgcaacaagggcttcatcagcagcaccagcctggagagccacatgaagctgcacagcgaccagaagacctacagctgcatcttctgcccagagagctttgaccggctggacctgctgaaggaccacgtggccatccacatcaatgatggctacttcacctgccccacctgcaagaagcgcttcccagacttcatccaggtgaagaagcacgtgcgctccttccacagcgagaagatctaccagtgcacagaatgtgacaaggccttctgcaggccagacaagctgcggctgcacatgctgcggcacagcgacaggaaggacttcctgtgcagcacctgtgggaagcagttcaagaggaaggacaagctgcgggagcacatgcagaggatgcacaaccctgagcgggaggccaagaaggctgaccgcatcagccgcagcaagaccttcaagccccgcatcaccagcacagattatgacagcttcaccttcaagtgccgcctgtgcatgatgggcttcagaagaagaggcatgctggtgaaccacctgagcaagaggcacccagacatgaagattgaggaggtgcctgagctgaccctgcccatcatcaagcccaacagagactacttctgccagtactgtgacaaggtgtacaagagcgccagcaagaggaaggcccacatcctgaagaaccaccctggagctgagctgcccccatccatcaggaagctgcggcctgctggccctggagagccagaccccatgctgagcacccacacccagctgaccggcaccatcgccaccccacctgtgtgctgcccccactgcagcaagcagtacagcagcaagaccaagatggtgcagcacatcaggaagaagcaccctgagtttgcccagctgagcaacaccatccacacccccctgaccacagctgtgatcagcgccaccccagctgtgctgaccacagattctgccactggagagaccgtggtgaccacagacctgctgacccaggccatgacagagctgagccagaccctgaccacagactaccgcaccccccagggcgactaccagaggatccagtacatccctgtgtcccagagcgccagcggcctgcagcagccccagcacatccagctgcaggtggtgcaggtggcctctgtgtctggccagcccctgagccccagcgcccagcaggcccagcagggcctgagccccagccacatccagggcagcagcagcacccagggccaggccctgcagcagcagcagcagcagcagcagaacagctctgtgcagcacacctacctgcccagcgcctggaacagcttccggggctacagcagcgagatccagatgatgaccctgcccccaggccagtttgtgatcacagacagcggcgtggccacccctgtgaccaccggccaggtgaaggctgtgaccagcggccactacgtgctgtctgagagccagagcgagctggaggagaagcagaccagcgccctgtctggaggagtgcaggtggagcccccagcccacagcgacagcctggacccccagaccaacagccagcagcagaccacccagtacatcatcaccaccaccaccaatggaaatggcagcagcgaggtgcacatcaccaagccctag

SEQ ID NO: 261832 - DNA, 3072 bp, Artificial Sequence
  derived and/or modified sequence
atgagcgcctacagcgtgcccagcaccttcgcccaggccagcctgcccgtacacaatcaagtgttgccttcgatcgagagcgtcgacgggtcagatcccctcgccaccctgcagaccccattagggagactggaggcgaaggaagaagaggacgaagacgaggacgaggatacggaggaagatgaggaagaggatggagaggacactgacctagacgattgggaacccgacccacctagacccttcgacccacacgatctgtggtgtgaggaatgcaacaacgcccatgccagtgtctgtccgaaacatggcccgctgcacccaattcctaatcgccctgttctgactcgcgcccgcgcgagtctgccgttggtcctgtacatcgatagatttctgggaggtgtcttttctaagcggcgcatccccaagaggacgcagttcgggcccgtagaaggcccacttgtcagggggagcgagctaaaagattgttacattcatctgaaggtcagcctggacaagggcgaccgcaaggagagggacctgcacgaggacctttggtttgagctgagcgatgaaacactgtgtaactggatgatgtttgttaggcctgcccaaaatcatctcgaacagaatctggtcgcgtaccagtatggccaccacgtgtactatacgactattaaaaacgtggaacctaagcaggagcttaaggtgtggtacgccgcctcttatgctgaattcgtgaaccagaagattcacgacatatcagaggaagagcggaaggtgctgcgggagcaggaaaagaactggccttgctacgaatgcaaccgaaggttcatttcatcagaacagttacagcaacatttgaactcccacgatgaaaagctggacgtgttctcccgcactagaggccgcgggcggggcagagggaaacggcggttcgggcccggccggagacccggacggccccctaaatttatacggctggagattacgtctgaaaatggggaaaaatctgacgacggcacacaggatttgctgcattttcctacaaaggagcaatttgacgaggccgaacccgccacccttaatggccttgaccaaccggagcagaccacaattcctatccctcagcttcctcaggaaacccagtcatcactcgaacatgagccggagacgcataccctgcaccttcagcctcagcatgaggagtcagtagtgcctacacagagtacactgaccgcagacgacatgcgccgtgctaaacggattagaaacgcagcccttcagcacctctttatacgaaaatcattccgtccctttaagtgcctgcagtgcggcaaagcttttagggagaaggataagcttgatcagcacttgaggttccacgggcgggagggtaactgccctcttacatgtgacctgtgcaacaaggggttcatctcttccacaagcctagagtcgcatatgaagcttcattccgaccagaagacatactcttgtatcttttgtcccgagagctttgatcgactggatctcttgaaagatcacgttgctattcacattaatgatggctactttacatgccccacctgcaagaaacggttccctgactttatacaggtgaagaaacatgttaggagttttcattcagagaagatctaccagtgtaccgaatgcgataaggcgttttgtagaccggacaaactgcgcttgcatatgctgcggcacagcgatagaaaggattttttatgtagcacctgtggcaagcagtttaagaggaaggataagctgcgagagcacatgcagcggatgcataatcccgaacgggaggccaaaaaggcagaccgtatctccaggagcaaaacgttcaagcccagaattacctccaccgactacgattcgtttacgttcaaatgcaggctgtgtatgatgggctttaggcgacggggtatgctggtgaatcatctgagcaaacgacaccctgacatgaagatagaagaagttcctgaacttactctgcctatcattaaacctaatcgagattatttttgccagtactgtgacaaggtgtataagtccgcctcaaagcgaaaggcccacatccttaaaaatcaccctggcgcggaattgcccccatctatcagaaaacttaggcccgctggaccaggcgagcctgatccgatgctgagtacacacacacaactcaccggaactattgcaacacctcccgtgtgctgcccccattgctccaaacagtatagcagcaaaaccaagatggtgcagcacatcagaaaaaagcaccctgagttcgctcagctgtccaataccatacacacacctctgactactgctgtgatctccgcaacccccgcagtgctcacaaccgacagtgccactggtgagaccgtggtcactacggacctcctcacacaggctatgacagagctctctcagacgctcaccaccgattacagaacgccgcaaggtgattaccagaggatccaatatatcccagtgtctcagagtgcatcaggactgcaacaaccacagcacattcaactccaggtcgtgcaagtcgctagcgtcagcggtcagccgttgtcaccctcagcccagcaggcccaacaggggctcagccctagccatatccagggaagcagttccacccaaggtcaggcgctccagcagcagcaacagcagcagcaaaactctagcgtgcagcacacatacctgccatcagcatggaactcatttcggggatacagcagtgaaattcagatgatgactctgcctcctggtcaattcgtcattaccgactctggtgtcgccacacccgtcaccactggacaggtgaaggccgtgacctccggacactacgtactgagtgagtcacagtctgagcttgaggagaagcagacctcggccctgagtggcggtgtccaggtggaacccccggcgcactccgattcattggatccacaaactaatagtcaacagcagacaactcaatatatcatcacaacaactacaaacggcaatggctcgtcggaggtacatatcaccaagccctag

SEQ ID NO: 261833 - DNA, 3072 bp, Artificial Sequence
  derived and/or modified sequence
atgtcggcctacagcgtccctagcacattcgcccaagctagcctgccagtgcacaaccaggtgcttccctctatcgagagtgtggatggatctgatcctctggccaccctccaaacacccttgggccgactagaggctaaagaagaggaggacgaggacgaggatgaagatactgaggaggatgaggaggaagacggcgaggacaccgacctcgatgactgggagcctgaccccccacgccctttcgaccctcacgacctatggtgtgaggagtgtaacaatgcccacgcctccgtttgcccgaaacatgggcctctgcaccccatcccaaaccgtcccgtccttacacgggcacgtgcatccctgcccctggtcctgtacatagacaggttcctggggggtgtgtttagcaaaagacggatccctaagcggactcagtttggaccagtcgaaggccctcttgtccgcggtagcgagctcaaagactgttatatccatctcaaggtgtccctcgacaaaggcgataggaaggagagagatctccatgaggatctgtggtttgagctgagtgatgagaccttgtgcaactggatgatgttcgtgcgaccagcacagaatcacctggagcaaaatttagtagcttaccagtatgggcaccatgtgtattatacaacaatcaagaacgtggaaccaaagcaggaactgaaggtttggtacgctgcctcatatgccgaattcgtgaatcagaaaatacatgatatatccgaagaggagcgtaaagtcctgagggagcaggagaaaaattggccctgttatgaatgcaatagacggttcatcagctccgagcagctacagcaacatcttaacagccacgatgagaaacttgatgtgtttagtcggacacggggacgagggcgtggacgcggtaagcgccgtttcggaccagggagaaggcccggaaggcctccaaaatttattcggctggaaattacctccgagaatggcgaaaaaagcgacgatggcacccaggacctgctccatttcccaaccaaagaacagttcgatgaggccgaaccagccaccctgaacggcctcgaccagcctgaacagaccactattccaatccctcagttaccccaggaaacacaaagctcgctcgagcacgagcctgaaacccacactctgcacctacagcctcagcacgaggaatctgtcgtgccaacacagtcaactctgaccgcagatgatatgcgaagagccaaacgcattcgaaatgctgctctccagcacctgtttatacggaagtcgtttcgtccatttaaatgccttcaatgtggcaaggcttttcgggaaaaagataaactggaccagcacctccgtttccacggccgtgaagggaattgcccgttgacttgcgacctgtgcaataaaggctttatcagcagtacgtctctggagtctcacatgaagctccatagtgaccaaaagacttattcttgcatcttttgccccgaatcctttgacagacttgatttattgaaggatcacgtggcaatccatatcaacgatggctatttcacttgcccgacgtgtaaaaagcgcttccccgattttattcaggtcaaaaagcacgtgcgtagttttcatagcgagaagatataccagtgtaccgagtgcgacaaggctttctgccggcctgataagttgaggttgcatatgctgagacatagtgacagaaaggattttctgtgttccacctgcggaaagcagtttaaacgcaaggacaaactgcgggagcacatgcagagaatgcataacccggaacgtgaagcaaagaaagccgaccgtatttcccggtctaagacgtttaaaccaaggattacttctacggactatgactcatttaccttcaagtgccggctctgtatgatggggttccggcgaagaggcatgcttgtgaatcatctgagcaagagacatccagacatgaagatcgaggaggtccctgagctgactctccctattattaaacccaatcgggactatttttgccagtactgtgataaagtctataaatctgcctcaaaacgtaaggctcacattctcaagaatcaccccggagccgaacttccgccaagcataaggaagctgagacccgctggacctggggaacctgatcctatgctgagcacacatactcagctgactggcactatcgccaccccccctgtctgctgtccccactgcagcaagcaatacagctccaaaacaaaaatggtccaacacatccggaaaaagcatcccgaattcgctcagttatccaacaccatccatactcccctcactacagcagtgatcagcgccacccccgctgtcctcaccacggactctgcaacaggcgagacagtcgtgactaccgatctgctgacacaagccatgactgaactcagccagaccctgaccacagactatcggacgcctcagggtgattatcagagaatacagtacatccctgtgtctcagtccgcaagtggtctgcaacaaccacaacacatccagctgcaggttgtccaggtggccagtgtgtcaggccaacctctgtccccctctgcccaacaggcgcagcaaggcttgtccccgagtcatattcaagggtccagttccacacagggacaggccctgcagcagcagcagcagcagcagcagaactcttcggtccagcacacgtatttaccatccgcctggaatagctttaggggctatagctccgagattcagatgatgactctgccacctggccagtttgttattaccgacagcggagtcgccactcccgtcacgacaggtcaggtgaaggcagttactagtggccattacgtgctgagcgagtctcagagtgagctggaggagaagcaaacgtctgccttgagcggcggagtgcaagtggagcctccggcacatagtgactcactggacccccagactaacagccagcagcagactacccagtacatcatcactacgacaaccaatgggaatgggtcaagcgaggtccacatcacgaagccctag

SEQ ID NO: 261834 - DNA, 5817 bp, Artificial Sequence
  derived and/or modified sequence
caaaaatgaagccagctcttcctcacagccggtagatggaagtcatttttccagggcctggaaggagttggtaggaagactagatttcagccagcccttgcgccctgtttgtgccagcaggcaccagcgaaccaaaagcaggtgtccatgtctgcttactctgtgccttcaacttttgcccaggcctcattgccagttcataaccaggtgctgccttccatcgagagtgtagatgggtccgaccctttggcaactctgcagacccctctaggcagactggaggccaaagaggaagaggatgaggatgaggacgaggacactgaggaagatgaggaagaagacggtgaggacacggatctggatgactgggagccagacccgccccggcccttcgacccacacgacttgtggtgtgaggagtgcaataacgcgcatgcttcagtgtgtccgaagcacggccccttgcacccgatccccaaccggccggtgctcacccgggccagggcgagcctccccctggtgctctacatagacaggtttctgggcggggtgttctccaagcggcgcatccccaagcgcacccagtttggccccgtggaggggcctctcgtcaggggctcggagctgaaagactgttacattcacctcaaggtttctcttgataaaggggacaggaaagaaagggatttacatgaagacctatggtttgagttgtctgatgagacgctttgtaactggatgatgtttgtacggccagcccagaatcacctggagcagaacctggtggcttaccagtatggccaccatgtgtattatacaaccataaaaaatgtggagcccaagcaggaactgaaggtgtggtatgccgcatcctatgctgagttcgtgaaccagaaaattcatgacatttctgaggaagaaaggaaagttcttcgagagcaagagaagaattggccctgctatgaatgtaaccgccgatttataagctcggagcagttgcaacagcatctcaattctcatgatgagaaactagatgtgtttagcagaacaagaggcagaggaaggggacgaggcaagaggcgattcggtccaggtcgacggccggggcgtcctccaaaatttatccgcctggaaatcaccagcgaaaatggggaaaagagtgacgatgggacacaggacttgctacattttcccacaaaggagcaatttgatgaggctgaaccagccactctgaatgggctggatcaaccagaacagaccactatcccaatccctcagctgccacaggaaacccagtcttccctggaacatgaaccagaaactcacaccctgcacctgcagccgcagcatgaagagagcgtggtgcccacccagagcacgctgacagccgacgacatgcgcagagccaagcgcatccgaaatgcagctcttcagcatctgtttattcggaagtccttccggccttttaaatgcttgcagtgtgggaaggccttccgggaaaaggacaaactggaccagcacttacgcttccatgggcgggaggggaactgcccactgacctgtgatctctgtaacaagggcttcatcagcagcacatccttggagagccacatgaagctccactcagaccagaagacttactcttgcattttttgcccagaatcctttgaccgccttgatttgttgaaagatcatgtggccattcatatcaatgatggctacttcacctgcccaacttgtaagaaacggttcccagattttatccaggtgaaaaaacacgtgcgcagcttccactcagaaaagatctaccagtgcacagagtgtgacaaggccttctgtcgccccgataaactgcgactccacatgctccggcattcggaccgcaaagacttcctgtgttccacctgtgggaagcaatttaagcgaaaagacaaactacgggaacacatgcagaggatgcataatcctgagagggaggccaagaaagccgaccgcatcagccgctccaagacgttcaagccccgcatcacgtccacagactacgacagcttcacgttcaagtgccgcctgtgcatgatgggcttccggcggcgcggcatgctggtaaatcacttatcgaagagacacccagacatgaagatagaagaggtgccagagttaactctacccatcataaaacccaatcgtgattacttttgtcagtattgcgataaggtttataaaagtgccagcaagcgcaaagcccacattctgaagaaccacccaggagcagagctcccaccgagcattcggaagctccgacccgctggtcctggagagccagaccccatgctgagcacacacacccagctgacgggcaccatcgccacccctcccgtctgctgtccccactgctccaagcagtacagcagcaagaccaagatggtccagcacattcgaaagaagcatccagagttcgcccagctctccaacaccatacacacaccactgacgacagctgtgatcagtgccaccccagcggttttgactacagacagcgccactggagagactgtggtgacgacggacctgctcacccaagcaatgacagaactgtcccagaccttaacgacagactaccgaacgccacaaggggattaccagagaattcagtacatccctgtgtcgcagtcggcgtctggcctccagcagcctcagcacatacagctgcaagtggttcaagtggcctcggtatctgggcagccgttgagtccctcagcccagcaggctcagcaggggctcagcccctcccacatccagggcagttcttccacacaggggcaggctctgcagcagcagcagcagcagcagcagaattcctctgtgcagcacacgtacctgcccagtgcttggaattccttccgtggctattcatctgagattcaaatgatgacgcttcctccgggtcagtttgtgattacagacagtggtgtggcaactccagttactactggccaggtgaaggcggttacttcgggtcattatgtgttatcagaaagtcaatcagaattggaagaaaagcaaacttctgccctctctggtggagtccaggtcgagccacctgcacacagtgactccctggacccccagaccaacagccaacagcagaccacacagtacatcatcaccaccaccaccaacgggaacggaagcagcgaagtgcatatcaccaaaccatgacttccaccctggagcttgaatccagcacccacctcatgtctgttctcataagtctgaaagctctgacacgtagagctcttttgtaagatttattattcactcaagagttcggaaaccacagttttgtctctcatccatacactggggtttattttgccaaggtcatctttatcaaattgactcttcaaaccctcggtttttgccacagaacagagatctttcaggggaaagtagatttcgaggtggagagaatttgccttgctcttgagctggtcttttaacatactgacgagccttacttttcctttgtggaaatattaagtggcatattgtgttcataccaaaggtggagacaggatgtgccaagttcatggttactggacttcttattccaagccatggcaccaaaggagaaggggcattttgtgggtgtgcattaggtctgaactgctttatcttgttttagttttcagtaatttaacaaagggagcctgctgaataacaaaattaaaatgatgaaacaaaagtttgacagtgatattctgaagcaaaaactgtcatctaaatttttcttgctgattttttttaacttccctattttagaaaactattgttgggctgttggtagtgctttccacagatgctggtcctcagtggattaggtcagaagctcatgttctgatagttcttcattatttcacaaaggtggacaacctgaaagagaaaaggctgcttgatgtcagcagaatctaaacccctacattaaagctttgcctcccattctgtggttgtggtggtggtaagaaggagatattggtaccaagaaaaatttccaaaactattgagagagagagagagaaagtattgaaattttgttctgccttgcaggatccatttatcattcattggtaaaggatatattccttgttcttaccaagtgtacatttaactcttgctgacatgttcagtgtattttattacttttaatgctgtcttaaaatgaacattctttaaagttggacaggaaggtggcatttcttatttattaacatttttaactttaaacatattgtgactcatctagaccttttaataagacggtcaacttcacacttagggaaaaaattaaaatgtgatggccacttctaataattcaggtagttataagggatctggaagaaatccagtctttatgaatatactattagttgggcattaaaaaatcagtatatattttaactttttgtgacatgctaacacattttcagaataattattgcatagtagaatttattactccagaacagaaagaccttacttcatttcaaatgaagttaattaatttacatttctgggtaaaaactggttctataaattaagtagagtagcttctttatgataaagacaattttctgaaaagtgaacaattctgttaaaagaactttattgatgtgtagatttcgcactttatttctgagactgcgttcatgtagttgttccccaatgtttgagtactaagagaacttgagaaaattacttcataaacatatggaaactgaaaatggactctctttgtgacaaagatattcaacagaaaatattgaccctgcattgcaaaacacaggttcgggttccctaagtcccacagtgtaatgattacaaatatcctagtgtccggtctagaaagactttctaggagaagactagtggaattttctaaaggttcagttttagcttttataacttaaatttggccctgttacgttctttttaatttgaaccataaggtatctcccctcccttcaggaataacttattggaaaactgaaaagaatcactgaatggaatgttcattttatggcagttgttttaagttttaaaatacacagaggaaaatattgtggaaggacctctttgttgctttcccttctaagttgtcttcttcttcttcttcttcttcttcttctttggtccttaagtgaaataaagactctaaaactaatttgtatattatcagccagagatgcggatggcagtcgagccaaatcgcatggctttcagatcaggtattctgcacattcattccaaggtcatagatttttaaaaggacctggatttgaagagatggcaaatgatgagccatcagaaaacttaatttggaaaacatgtatgtagccagtgtggatattgtggcctctctcaagacacattgacactgtagacttcattcagtccagtgtgagtattttggagtaggttggatgtagattttgtttttatcattgatttgtaccgacagaaatagacatttcatcatgtaaaattcctgttattctggaaaaacctattgttttgatcttcttgttttctgacttggaagtatcctttcaaaaaaactcttaagatatctaggtctaaaaagcacttcatgagatgctaaagctgacccactggttgaaaatgttgaccctatcctgttatttaaatgtgaacatttattgtacattcagtgagttatagtgttaatagtcttgtgctatgcagcaggtgtaaaaattaataaatatattttttaataaacatgtttgtatgtgtgaa

SEQ ID NO: 261835 - protein, 257 aa, Artificial Sequence
  derived and/or modified sequence
MAPPAPGPASGGSGEVDELFDVKNAFYIGSYQQCINEAQRVKLSSPERDVERDVFLYRAYLAQRKFGVVLDEIKPSSAPELQAVRMFADYLAHESRSTAMTVQILLKLDRLDLARKELKRMQDLDEDATLTQLATAWVSLATGGEKLQDAYYIFQEMADKCSPTLLLLNGQAACHMAQGRWEAAEGLLQEALDKDSGYPETLVNLIVLSQHLGKPPEVTNRYLSQLKDAHRSHPFIKEYQAKENDFDRLVLQYAPSA

SEQ ID NO: 261836 - DNA, 774 bp, Artificial Sequence
  derived and/or modified sequence
atggcacctccggcgcctggacccgcctccggagggtctggcgaagtggacgagttgttcgacgtcaaaaacgcattttatataggctcctaccagcagtgcataaatgaagcccagagagtgaaactgagtagccctgagagagacgtggagcgtgacgtgtttctgtacagggcgtacctcgcccagcgtaagttcggcgtggttctggatgagattaaaccttcctccgcacctgaactacaggcagtaagaatgtttgcggattatctcgctcatgagtctcggtccactgccatgaccgttcaaatactgctgaagctggacaggctggacctggcccgaaaggaactgaagcggatgcaagacctggacgaggacgccaccttgacccagttagctacagcttgggtctctctggcaaccgggggcgagaaattacaggacgcctactacattttccaggagatggccgacaaatgttcacctacccttctattactgaacggtcaggccgcctgccacatggcccaggggcgctgggaggcggcagaagggttgcttcaggaagccctggataaagattcaggatacccagagaccctcgtcaatctgattgtgcttagccagcatctgggaaagccacctgaagtcacaaaccgctacctctctcagctaaaagacgctcacaggtcacacccatttatcaaagagtaccaagccaaggaaaatgattttgacagactggtactgcagtacgcaccgtctgcttag

SEQ ID NO: 261837 - DNA, 774 bp, Artificial Sequence
  derived and/or modified sequence
atggcccccccagcccctggccctgccagcggcggcagcggggaggtggatgagctgtttgatgtgaagaatgccttctacatcggcagctaccagcagtgcatcaatgaggcccagagggtgaagctgagcagccctgagagagatgtggagagagatgtgttcctgtaccgggcctacctggcccagaggaagtttggagtggtgctggatgagatcaagcccagcagcgcccctgagctgcaggccgtgaggatgtttgctgactacctggcccacgagagccgcagcacagccatgacagtgcagatcctgctgaagctggaccggctggacctggccaggaaggagctgaagaggatgcaggacctggatgaagatgccaccctgacccagctggccacagcctgggtgtccctggccaccggcggggagaagctgcaggatgcctactacatcttccaggagatggctgacaagtgcagccccaccctgctgctgctgaatggccaggccgcctgccacatggcccagggccgctgggaggccgctgagggcctgctgcaggaggccctggacaaggacagcggctacccagagaccctggtgaacctgattgtgctgagccagcacctgggcaagcccccagaggtgaccaaccgctacctgagccagctgaaggatgcccacaggagccaccccttcatcaaggagtaccaggccaaggaaaatgactttgaccggctggtgctgcagtatgcccccagcgcctag

SEQ ID NO: 261838 - DNA, 774 bp, Artificial Sequence
  derived and/or modified sequence
atggccccccccgcccccggccccgccagcggcggcagcggcgaggtcgatgaactgtttgacgtgaagaacgcgttctacatcgggtcttaccagcagtgcataaacgaggcacagagggttaagttgtcttcacccgagcgcgacgttgagagagatgtgtttctatatcgggcttacctcgcacaacggaagttcggcgtggtgctcgatgagatcaaaccaagctccgccccggagcttcaggccgttaggatgtttgccgactacttggcacatgagtccaggtccacggccatgactgttcagattctgctgaagctggacagactcgaccttgctcgaaaagagctcaagcgcatgcaagatttggatgaagacgctaccctgacgcagctcgcaaccgcctgggtgtcactcgcaaccggcggggagaagcttcaggacgcctactacatctttcaggagatggcagataagtgttcccccactctcttactgctcaacgggcaagctgcttgccatatggcccagggacggtgggaagccgccgagggtcttctccaagaggcactagacaaggactcaggctaccccgaaaccctggtgaacctgatcgttctgagtcagcatctggggaagcctccagaggtaaccaacagatatctgtctcagctgaaagacgcacacagaagtcacccttttatcaaagagtaccaggctaaagaaaacgatttcgaccggctggtcttgcagtacgcaccttcagcttag

SEQ ID NO: 261839 - DNA, 774 bp, Artificial Sequence
  derived and/or modified sequence
atggcgcctcccgcacccggacctgcctccggagggagcggagaggtggatgaacttttcgatgttaagaatgccttctacattggcagttatcagcaatgcatcaatgaggcccagcgtgtaaaactttcaagtcctgagagagatgtagaacgtgatgtgttcctatacagggcttacttagctcaacgtaagttcggagtcgtgctggatgagatcaagccttcctctgctccagaactgcaggccgtgcgcatgttcgccgactatttagcccatgagagcaggagtaccgcaatgaccgtccagattctgctcaagctagacaggcttgacctagcacggaaagagctcaaaagaatgcaggaccttgatgaagacgcgacacttacccagctcgctacagcgtgggtgtcactggcaacgggaggagagaaactccaggatgcgtattacatttttcaggaaatggcagacaaatgcagccctacactgttactccttaatggacaggcggcatgtcatatggctcaggggcgttgggaggctgccgagggattactgcaggaagcccttgataaagactccggctatcccgaaaccctggtgaacctcattgtactttctcaacatcttgggaaacccccagaggttacgaatcgctatctgtctcaattaaaggacgcgcaccggtctcatccatttattaaggagtaccaggcaaaagaaaatgatttcgatcgcctcgtgttgcaatatgctccctccgcgtag

SEQ ID NO: 261840 - DNA, 981 bp, Artificial Sequence
  derived and/or modified sequence
gacgtgtctttcaggaagaggagctggtgagaagacagcgaaatggcgcctccggcccccggcccggcctccggcggctccggggaggtagacgagctgttcgacgtaaagaacgccttctacatcggcagctaccagcagtgcataaacgaggcgcagcgggtgaagctatcaagcccagagagagacgtggagagggacgtcttcctgtatagagcgtacctggcgcagaggaagttcggtgtggtcctggatgagatcaagccctcctcggcccctgagctccaggccgtgcgcatgtttgctgactacctcgcccacgagagtcggagcacagccatgacagtgcagatcctgctgaagctggaccgcctggacctcgcccggaaggagctgaagagaatgcaggacctggacgaggatgccaccctcacccagctcgccactgcctgggtcagcctggccacgggtggtgagaagctgcaggatgcctactacatcttccaggagatggctgacaagtgctcgcccaccctgctgctgctcaatgggcaggcggcctgccacatggcccagggccgctgggaggccgctgagggcctgctgcaggaggcgctagacaaggatagtggctacccagagacgctggtcaacctcatcgtcctgtcccagcacctgggcaagccccctgaggtgacaaaccgatacctgtcccagctgaaggatgcccacaggtcccatcccttcatcaaggagtaccaggccaaggagaacgactttgacaggctggtgctacagtacgctcccagcgcctgaggctggcccagagctgtcaggaccatgaagccaggacagaggccaggagccagccctgcagccctccccacccggcatccacctgcatcccctctgggggcaggagcccacccccagcacccccatctgttaataaatatctcaactccagggtgttccacctga

SEQ ID NO: 261841 - DNA, 774 bp, Artificial Sequence
  derived and/or modified sequence
atggccccccccgcccccggccccgccagcggcggcagcggcgaggtggacgagctgttcgacgtgaagaacgccttctacatcggcagctaccagcagtgcatcaacgaggcccagagagtgaagctgagcagccccgagagagacgtggagagagacgtgttcctgtacagagcctacctggcccagagaaagttcggcgtggtgctggacgagatcaagcccagcagcgcccccgagctgcaggccgtgagaatgttcgccgactacctggcccacgagagcagaagcaccgccatgaccgtgcagatcctgctgaagctggacagactggacctggccagaaaggagctgaagagaatgcaggacctggacgaggacgccaccctgacccagctggccaccgcctgggtgagcctggccaccggcggcgagaagctgcaggacgcctactacatcttccaggagatggccgacaagtgcagccccaccctgctgctgctgaacggccaggccgcctgccacatggcccagggcagatgggaggccgccgagggcctgctgcaggaggccctggacaaggacagcggctaccccgagaccctggtgaacctgatcgtgctgagccagcacctgggcaagccccccgaggtgaccaacagatacctgagccagctgaaggacgcccacagaagccaccccttcatcaaggagtaccaggccaaggagaacgacttcgacagactggtgctgcagtacgcccccagcgcctag

SEQ ID NO: 261842 - protein, 916 aa, Artificial Sequence
  derived and/or modified sequence
MAEGGGCRERPDAETQKSELGPLMRTTLQRGAQWYLIDSRWFKQWKKYVGFDSWDMYNVGEHNLFPGPIDNSGLFSDPESQTLKEHLIDELDYVLVPTEAWNKLLNWYGCVEGQQPIVRKVVEHGLFVKHCKVEVYLLELKLCENSDPTNVLSCHFSKADTIATIEKEMRKLFNIPAERETRLWNKYMSNTYEQLSKLDNTVQDAGLYQGQVLVIEPQNEDGTWPRQTLQSNGSGFSASYNCQEPPSSHIQPGLCGLGNLGNTCFMNSALQCLSNTAPLTDYFLKDEYEAEINRDNPLGMKGEIAEAYAELIKQMWSGRDAHVAPRMFKTQVGRFAPQFSGYQQQDSQELLAFLLDGLHEDLNRVKKKPYLELKDANGRPDAVVAKEAWENHRLRNDSVIVDTFHGLFKSTLVCPECAKVSVTFDPFCYLTLPLPLKKDRVMEVFLVPADPHCRPTQYRVTVPLMGAVSDLCEALSRLSGIAAENMVVADVYNHRFHKIFQMDEGLNHIMPRDDIFVYEVCSTSVDGSECVTLPVYFRERKSRPSSTSSASALYGQPLLLSVPKHKLTLESLYQAVCDRISRYVKQPLPDEFGSSPLEPGACNGSRNSCEGEDEEEMEHQEEGKEQLSETEGSGEDEPGNDPSETTQKKIKGQPCPKRLFTFSLVNSYGTADINSLAADGKLLKLNSRSTLAMDWDSETRRLYYDEQESEAYEKHVSMLQPQKKKKTTVALRDCIELFTTMETLGEHDPWYCPNCKKHQQATKKFDLWSLPKILVVHLKRFSYNRYWRDKLDTVVEFPIRGLNMSEFVCNLSARPYVYDLIAVSNHYGAMGVGHYTAYAKNKLNGKWYYFDDSNVSLASEDQIVTKAAYVLFYQRRDDEFYKTPSLSSSGSSDGGTRPSSSQQGFGDDEACSMDTN

SEQ ID NO: 261843 - DNA, 2751 bp, Artificial Sequence
  derived and/or modified sequence
atggccgagggcggcggctgcagagagagacccgacgccgagacccagaagagcgagctgggccccctgatgagaaccaccctgcagagaggcgcccagtggtacctgatcgacagcagatggttcaagcagtggaagaagtacgtgggcttcgacagctgggacatgtacaacgtgggcgagcacaacctgttccccggccccatcgacaacagcggcctgttcagcgaccccgagagccagaccctgaaggagcacctgatcgacgagctggactacgtgctggtgcccaccgaggcctggaacaagctgctgaactggtacggctgcgtggagggccagcagcccatcgtgagaaaggtggtggagcacggcctgttcgtgaagcactgcaaggtggaggtgtacctgctggagctgaagctgtgcgagaacagcgaccccaccaacgtgctgagctgccacttcagcaaggccgacaccatcgccaccatcgagaaggagatgagaaagctgttcaacatccccgccgagagagagaccagactgtggaacaagtacatgagcaacacctacgagcagctgagcaagctggacaacaccgtgcaggacgccggcctgtaccagggccaggtgctggtgatcgagccccagaacgaggacggcacctggcccagacagaccctgcagagcaacggcagcggcttcagcgccagctacaactgccaggagccccccagcagccacatccagcccggcctgtgcggcctgggcaacctgggcaacacctgcttcatgaacagcgccctgcagtgcctgagcaacaccgcccccctgaccgactacttcctgaaggacgagtacgaggccgagatcaacagagacaaccccctgggcatgaagggcgagatcgccgaggcctacgccgagctgatcaagcagatgtggagcggcagagacgcccacgtggcccccagaatgttcaagacccaggtgggcagattcgccccccagttcagcggctaccagcagcaggacagccaggagctgctggccttcctgctggacggcctgcacgaggacctgaacagagtgaagaagaagccctacctggagctgaaggacgccaacggcagacccgacgccgtggtggccaaggaggcctgggagaaccacagactgagaaacgacagcgtgatcgtggacaccttccacggcctgttcaagagcaccctggtgtgccccgagtgcgccaaggtgagcgtgaccttcgaccccttctgctacctgaccctgcccctgcccctgaagaaggacagagtgatggaggtgttcctggtgcccgccgacccccactgcagacccacccagtacagagtgaccgtgcccctgatgggcgccgtgagcgacctgtgcgaggccctgagcagactgagcggcatcgccgccgagaacatggtggtggccgacgtgtacaaccacagattccacaagatcttccagatggacgagggcctgaaccacatcatgcccagagacgacatcttcgtgtacgaggtgtgcagcaccagcgtggacggcagcgagtgcgtgaccctgcccgtgtacttcagagagagaaagagcagacccagcagcaccagcagcgccagcgccctgtacggccagcccctgctgctgagcgtgcccaagcacaagctgaccctggagagcctgtaccaggccgtgtgcgacagaatcagcagatacgtgaagcagcccctgcccgacgagttcggcagcagccccctggagcccggcgcctgcaacggcagcagaaacagctgcgagggcgaggacgaggaggagatggagcaccaggaggagggcaaggagcagctgagcgagaccgagggcagcggcgaggacgagcccggcaacgaccccagcgagaccacccagaagaagatcaagggccagccctgccccaagagactgttcaccttcagcctggtgaacagctacggcaccgccgacatcaacagcctggccgccgacggcaagctgctgaagctgaacagcagaagcaccctggccatggactgggacagcgagaccagaagactgtactacgacgagcaggagagcgaggcctacgagaagcacgtgagcatgctgcagccccagaagaagaagaagaccaccgtggccctgagagactgcatcgagctgttcaccaccatggagaccctgggcgagcacgacccctggtactgccccaactgcaagaagcaccagcaggccaccaagaagttcgacctgtggagcctgcccaagatcctggtggtgcacctgaagagattcagctacaacagatactggagagacaagctggacaccgtggtggagttccccatcagaggcctgaacatgagcgagttcgtgtgcaacctgagcgccagaccctacgtgtacgacctgatcgccgtgagcaaccactacggcgccatgggcgtgggccactacaccgcctacgccaagaacaagctgaacggcaagtggtactacttcgacgacagcaacgtgagcctggccagcgaggaccagatcgtgaccaaggccgcctacgtgctgttctaccagagaagagacgacgagttctacaagacccccagcctgagcagcagcggcagcagcgacggcggcaccagacccagcagcagccagcagggcttcggcgacgacgaggcctgcagcatggacaccaactag

SEQ ID NO: 261844 - DNA, 2751 bp, Artificial Sequence
  derived and/or modified sequence
atggcagaagggggcggctgtagagagagacccgacgcagagacgcagaaatcagaactggggcccctgatgaggacgactcttcagcggggggcccaatggtaccttatcgattcacgatggtttaagcagtggaagaagtacgtaggcttcgactcatgggatatgtataatgttggagagcacaatctctttccgggacctatcgacaattccggcctgttttccgatcccgagtcccagacacttaaggagcacctgatcgatgagctcgattatgtcctagtacctacagaggcttggaataaactcctcaattggtatgggtgcgtcgagggccagcagccaatcgtccgtaaggtcgttgagcacggccttttcgtgaaacactgtaaagtcgaggtgtaccttctcgagctgaaactgtgtgaaaactctgatccaactaacgtactttcctgccactttagcaaggctgacactatcgccaccattgagaaggagatgaggaaattattcaatataccagctgaacgggagacccggctgtggaataaatacatgtcgaatacgtacgaacagctctcaaaattggataacaccgtgcaagacgcagggctgtatcagggccaagtgctcgtaatcgagccccagaatgaagacggcacttggccccgacaaacactgcagtcgaatggctctggattctctgcctcctataactgtcaggagcccccaagttcccacattcagccagggctctgtggattaggtaatctgggcaacacctgttttatgaactctgcccttcagtgtctctccaacaccgcacccctcaccgattacttcttgaaggacgaatatgaggccgaaattaaccgcgacaatcctctgggtatgaagggcgagatcgcggaggcctacgcggagctgattaaacaaatgtggtccggccgagacgcccacgtcgcgccgagaatgttcaagacccaggtcgggagatttgctccacaattttccggctatcaacagcaggactcccaggagctgttggctttcctgctcgatggcctccatgaagacctgaaccgtgtgaaaaagaagccatatctagaactcaaggacgctaacggtcggcctgatgcagtcgtagccaaagaggcatgggagaatcaccgccttcgcaatgattccgtaatcgtcgacacctttcacgggttattcaagagcaccctcgtgtgcccagagtgtgccaaggtgagtgtgactttcgacccattctgttacctcacactgcctttgccacttaagaaggacagggtcatggaagtgttcctcgtgcctgccgatccacattgtagaccaactcaatatcgcgtgaccgtgccgttgatgggagcagtcagcgatctttgtgaagcgctgagtaggctgtcaggaattgcagccgagaatatggtggtggctgatgtctacaaccaccggttccacaagatcttccaaatggatgaaggacttaaccatatcatgccccgcgacgacatatttgtctacgaggtatgttctacttcagtggatggctcagagtgtgttaccctgcctgtgtatttccgcgaaagaaaaagtagaccaagcagcacaagctctgcctctgccctgtatgggcaaccgctcttgctcagcgtccctaaacataagctcacactggagagcctctatcaggccgtgtgcgatcgaatttccaggtatgtgaaacagcccctgcctgacgaatttgggagcagtcccctcgaacccggcgcatgtaacggctcacgtaatagctgcgagggtgaagacgaggaggagatggagcaccaggaggagggcaaggaacagctttctgaaactgaaggcagcggggaagacgagccaggcaatgatccaagcgaaacaacacagaagaagatcaagggccaaccatgtcccaaaaggctgttcacgttctcccttgtcaattcatatggaaccgccgatataaacagccttgccgctgacggcaagttgctgaagctaaactccagatcaaccctcgcgatggactgggatagtgagacgaggcgcttatattatgacgagcaggaatccgaagcttatgagaaacacgtgtcgatgcttcagccgcagaaaaagaaaaagacgacagttgctctgcgtgactgcattgagctgtttaccactatggaaactctcggggaacacgacccctggtactgccccaattgtaaaaagcaccagcaggccacaaagaaatttgatctctggtccctccccaagattctagtcgtccacctgaagcggttcagttataatcggtactggcgagacaaattagacacagtcgttgagtttccgatcagagggctgaatatgtcagagttcgtttgtaatttgtcagcccgcccctacgtctatgacctcatcgctgtgagcaaccattacggcgccatgggcgtcggccattatactgcatacgcaaaaaacaagcttaatgggaagtggtattattttgatgacagcaacgtttcactagcctctgaagaccagattgttaccaaagccgcttatgttttgttctaccaaagacgggacgatgagttttacaagacccctagtctgtcctcaagtggaagcagtgacgggggtaccaggccgagttcgtctcaacagggatttggagacgatgaagcatgcagtatggatactaactag

SEQ ID NO: 261845 - DNA, 2751 bp, Artificial Sequence
  derived and/or modified sequence
atggccgagggcggcggctgccgggagaggccagatgctgagacccagaagtctgagctgggccccctgatgaggaccaccctgcagagaggagcccagtggtacctgattgacagccgctggttcaagcagtggaagaagtatgtgggctttgacagctgggacatgtacaacgtgggggagcacaacctcttccctggccccatcgacaacagcggcctcttcagtgaccctgagagccagaccctgaaggagcacctgattgatgagctggactatgtgctggtgcccacagaggcctggaacaagctgctgaactggtacggctgtgtggagggccagcagcccatcgtgaggaaggtggtggagcacggcctgtttgtgaagcactgcaaggtggaggtgtacctgctggagctgaagctgtgtgagaacagcgaccccaccaacgtgctgagctgccacttcagcaaggctgacaccatcgccaccatcgagaaggagatgaggaagctgttcaacatcccagctgagcgggagacccggctgtggaacaagtacatgagcaacacctatgagcagctgagcaagctggacaacacagtgcaggatgctggcctgtaccagggccaggtgctggtgattgagccccagaatgaagatggcacctggccccggcagaccctgcagagcaatggcagcggcttcagcgccagctacaactgccaggagccccccagcagccacatccagcccggcctgtgtggcctgggcaacctgggcaacacctgcttcatgaacagcgccctgcagtgcctgagcaacacagcccccctgacagactacttcctgaaggatgaatatgaggccgagatcaacagagacaaccccctgggcatgaagggggagattgctgaggcctatgcagagctgatcaagcagatgtggagcggcagagatgcccacgtggcccccaggatgttcaagacccaggtgggccgctttgccccccagttcagcggctaccagcagcaggacagccaggagctgctggccttcctgctggatggcctgcacgaggacctgaacagagtgaagaagaagccctacctggagctgaaggatgccaacggccgcccagatgctgtggtggccaaggaggcctgggagaaccaccggctgagaaatgacagcgtcatcgtggacaccttccacggcctcttcaagagcaccctggtgtgcccagaatgtgccaaggtgtctgtgacctttgaccccttctgctacctgaccctgcccctgcccctgaagaaggacagagtgatggaggtgttcctggtgcctgctgacccccactgccggcccacccagtacagagtgacagtgcccctgatgggcgctgtgtctgacctgtgtgaggccctgagccggctgtctggaattgctgctgagaacatggtggtggctgatgtgtacaaccaccgcttccacaagatcttccagatggatgagggcctgaaccacatcatgcccagagatgacatctttgtgtatgaggtgtgcagcacctctgtggatggctctgaatgtgtgaccctgcctgtgtacttccgggagaggaagagccggcccagcagcaccagcagcgccagcgccctgtatggccagcccctgctgctgtctgtgcccaagcacaagctgaccctggagagcctgtaccaggccgtgtgtgaccgcatcagccgctacgtgaagcagcccctgcctgatgaatttggcagcagccccctggagcccggggcctgcaatggcagcaggaacagctgtgagggggaggatgaggaggagatggagcaccaggaggagggcaaggagcagctgtctgaaacagagggcagcggagaagatgagcctggaaatgaccccagcgagaccacccagaagaagatcaagggccagccctgccccaagaggctcttcaccttcagcctggtgaacagctatggaacagctgacatcaacagcctggccgcagatggcaagctgctgaagctgaacagccgcagcaccctggccatggactgggacagcgagacccggcggctgtactatgatgagcaggagagcgaggcctatgagaagcacgtgtccatgctgcagccccagaagaagaagaagaccaccgtggccctgcgggactgcatcgagctgttcaccaccatggagaccctgggggagcatgacccctggtactgccccaactgcaagaagcaccagcaggccaccaagaagtttgacctgtggagcctgcccaagatcctggtggtgcacctgaagcgcttctcctacaaccgctactggagggacaagctggacacagtggtggagttccccatccggggcctgaacatgtctgaatttgtgtgcaacctgagcgcccggccctacgtgtatgacctgattgctgtgagcaaccactatggagccatgggcgtgggccactacacagcctatgccaagaacaagctgaatggcaagtggtactactttgatgacagcaatgtgtccctggccagcgaggaccagatcgtgaccaaggccgcctacgtgctcttctaccagaggagagatgatgagttctacaagacccccagcctgagcagcagcggcagcagtgatggcggcacccggcccagcagcagccagcagggctttggagatgatgaggcctgcagcatggacaccaactag

SEQ ID NO: 261846 - DNA, 2751 bp, Artificial Sequence
  derived and/or modified sequence
atggccgagggcggcggctgccgggagcggcccgacgccgagacccagaaatctgagctgggccccctgatgcggacaaccctgcagcgaggagctcagtggtacctcatagacagtcgctggtttaagcaatggaaaaaatacgtaggtttcgactcctgggatatgtataatgtaggcgagcacaatctattccctggaccgatcgataacagcgggcttttctccgatcctgagtctcaaactctgaaagaacatctgatcgacgagcttgactacgtcctggtcccaaccgaggcctggaataagctactgaattggtatggctgcgtcgagggccagcagcccattgttagaaaagtcgtcgaacatggtctgttcgttaaacactgtaaggtagaggtctatttactcgaactcaaactttgcgaaaactcagatcccaccaatgtccttagctgccatttttcgaaggccgacaccattgcgactatcgagaaggagatgagaaagctgtttaacattcctgctgaacgtgaaacaaggctctggaacaaatatatgtccaatacctacgagcagctgtcaaagctggacaacaccgtgcaggatgccgggctgtaccaaggccaggtcttggttatagagccacagaatgaagatgggacgtggcccagacaaacactacagtcaaacgggagtggtttctccgcttcatacaattgtcaggaacctccatcaagccatattcagcctggactctgcggcctgggtaatctgggtaatacctgcttcatgaactctgccttgcagtgcctctccaacacagcaccactgactgattatttcctgaaagacgaatacgaagccgaaattaaccgagacaaccccctgggtatgaaaggcgaaatcgcagaggcatatgccgagctgattaaacagatgtggtctggtagagatgctcatgttgcacccaggatgttcaagacgcaagtgggacgcttcgccccccagttctctggttatcagcagcaggatagccaggagctgctggcattccttctggatgggctgcatgaagacctcaatcgagtcaagaaaaagccatacttggagttgaaggacgcgaacggaaggccagatgcagttgtggcaaaggaggcttgggagaaccaccggctgaggaacgattctgtgatcgtggatacgtttcacggcctgttcaagagtacactcgtctgtcccgagtgcgctaaggtctcagtgacattcgatcctttttgctaccttacattgccacttcccctgaagaaggaccgtgtgatggaagtctttctggtgcctgctgatccacactgtcgacctacacaatatcgtgtaaccgtgccacttatgggggccgttagcgatctgtgcgaggctctgtctcggctgagtggcattgccgcggaaaatatggtggtggccgatgtctataaccaccgatttcataaaatttttcagatggatgagggccttaaccacataatgccccgggacgacatatttgtgtacgaagtgtgtagtacaagtgtagacggctcagagtgcgtgaccctgccagtctattttcgggaaagaaaatcccggccctcatccactagtagcgccagtgccctgtatggtcagccgctgctgttgagcgtgcccaagcataagctcacactggaatcactctaccaagccgtctgtgatagaatctctaggtatgtgaagcagcccttgccagatgaattcggcagcagtccgctggaaccaggggcctgcaacggttcaagaaactcctgcgaaggtgaagatgaagaggagatggagcatcaggaagaggggaaggagcaattgagtgaaactgagggttctggagaagacgagccggggaatgacccttcagagacaactcagaaaaaaattaaaggacagccttgcccaaaacgtcttttcaccttcagcttagtcaacagttacgggaccgccgatatcaactctctggcggcagacggaaagttactgaagctcaattctcgctctactctggcaatggactgggatagcgaaactcgacgcctgtattacgacgagcaggagagcgaagcatacgagaaacatgtgagtatgctgcagccccagaagaagaagaagacaactgtggccctgagggattgcatcgaactgttcaccacaatggaaacgcttggggaacacgacccctggtattgtcctaattgcaaaaaacatcagcaggctaccaagaagtttgatttgtggtccctgccaaagattctcgtcgtgcatctgaaacgatttagttacaatagatactggcgggacaaactagatactgtagtcgagttccctattaggggtctgaacatgagtgaattcgtgtgtaatcttagcgcgcgcccctatgtgtatgaccttatcgctgtgagcaaccactatggagcgatgggcgtgggccactacactgcatacgccaagaacaaattgaacggtaagtggtattactttgatgactcgaatgtgagcctcgcaagtgaggatcagatcgtcaccaaagccgcttacgtcctcttttaccagcgtcgcgacgacgagttctataaaacgccgtccctgtctagttccggatcctcagacgggggcacccgaccatcatcttcccagcagggcttcggtgacgatgaagcctgttccatggataccaactag

SEQ ID NO: 261847 - DNA, 2751 bp, Artificial Sequence
  derived and/or modified sequence
atggctgagggagggggatgcagagagaggcccgacgccgagacacaaaagtctgagctgggtccactgatgcgcactaccctccagagaggggcacaatggtatctgatcgattctagatggtttaagcagtggaagaaatacgtgggctttgactcatgggacatgtataacgtgggggaacacaacctttttcctggccctatcgataactcaggtctgtttagtgaccccgaaagtcagacgctgaaggagcatcttatcgacgagctggattacgtacttgttccaaccgaggcttggaataaattgctaaactggtatggctgcgtggagggacagcagcccatcgtaagaaaggtggtcgagcacggactttttgtcaagcattgcaaggtcgaggtttatctcctggaactcaagctgtgtgaaaactctgaccctacgaacgtattaagctgccacttttcgaaggcagacaccattgcaacaattgagaaggagatgaggaaactcttcaatattcctgccgagcgcgagactagactatggaataaatatatgtcaaacacttatgaacagctatccaaactggacaacactgtccaggacgcaggcctgtaccagggacaagttctcgtcattgagccccagaacgaggatggcacctggccccgacagaccctccagtccaacggatccggcttttctgcaagctataattgccaagagcccccatctagccacatccagcctgggctctgcggcctgggtaacttgggcaacacttgtttcatgaattccgctctccagtgcctcagcaatactgccccactcacagactattttctgaaggatgaatacgaagccgagataaacagagataaccctctgggtatgaagggcgagattgctgaagcctatgcagaacttatcaagcaaatgtggagcgggagagacgcccatgttgctccacgcatgtttaagactcaggttggccgttttgctcctcagttctctggataccagcaacaggattcccaggagctgctggcattcctgcttgatggtctgcacgaggatctgaacagggttaaaaaaaaaccatatctcgagctgaaggatgcaaatgggagaccagatgcagtcgtggccaaagaagcttgggagaaccacaggctgcgcaacgactccgtgatagtggatacctttcacggtctgttcaaatctactctcgtctgtcccgagtgcgcaaaggtgagtgtgaccttcgatcctttctgttacctcactctaccactgcccctcaagaaggacagggttatggaggtctttctggtgccggctgacccacattgtagaccgacccagtatcgtgtgaccgtcccactaatgggggcagtgagtgatctgtgtgaggctctgtcccggttgtccggcattgcagcagagaacatggtggttgccgatgtgtacaaccatagatttcacaagatttttcagatggacgaggggctgaatcacatcatgcccagggacgatatttttgtctacgaagtgtgtagtacaagtgtcgatgggagcgaatgtgtgacactcccagtctattttcgggaacgcaagtctaggccttctagtacgagctccgcaagcgccctctacggacagcccctgctgctcagcgtgccaaagcataaattaacattagaatctctataccaggccgtatgcgataggatctctcggtacgtgaagcagccgcttccggatgaattcgggagtagccctctggagcccggagcttgcaacggttcaagaaattcatgtgagggggaggacgaagaggaaatggagcaccaggaggagggtaaggaacaactatctgaaactgagggcagcggtgaggatgagcccggtaatgacccatccgagaccacacagaaaaagatcaaaggtcagccctgccccaagcgcctcttcacgttctccctggtcaattcgtatggcacagcagacattaattcccttgctgccgacggcaagctgttaaaactgaattctaggagtacacttgcaatggattgggatagcgaaacgagacgcctctattacgacgaacaagagtcagaagcttatgaaaagcacgtttcaatgctacagcctcagaaaaagaaaaagacaacagtagcactgcgcgattgtattgagctctttactaccatggaaactctcggtgaacatgacccttggtattgtccaaattgtaaaaaacaccagcaggccacaaagaaattcgatctctggagcctgccgaagattctcgtggtgcatctcaagcgattttcctataacagatactggagggacaaattggatactgttgtcgagttcccgattagaggtctgaacatgtctgagtttgtgtgcaatctttcagcccgaccgtacgtctatgatttgattgccgtatcaaatcactacggagcaatgggcgtgggccattatacagcctacgcaaaaaacaaactcaacgggaaatggtattattttgatgattcaaacgtctccctggcttctgaggaccagattgtgacaaaggcagcgtacgttcttttttaccagagaagggatgatgagttttacaaaactccatccttatccagtagtgggagctcggacggaggaacacggccatccagctcacaacagggttttggtgacgatgaagcctgtagcatggacactaactag

SEQ ID NO: 261848 - DNA, 3222 bp, Artificial Sequence
  derived and/or modified sequence
gcggaggagatggcggaaggtggaggctgccgtgagcgaccggatgcggagactcagaagtccgagcttggacccttaatgaggaccacactccaacgcggggcgcagtggtatcttattgacagccggtggttcaagcagtggaagaagtatgtgggctttgacagctgggacatgtacaatgtgggtgaacataacctatttcctggcccaatagacaactctgggctattttcagatcctgagagtcagaccttgaaagaacacttaattgatgaattggactatgtattggtccctaccgaggcgtggaataaactactaaactggtacggctgtgtagaaggccagcaacccatcgtcagaaaagttgtggagcatggcctgtttgtcaagcactgcaaagtcgaggtgtatttgctggaactgaagctctgtgagaacagtgaccccaccaatgtgctgagttgccatttcagcaaggcagacaccattgcaaccatcgagaaagagatgcggaagctattcaacatccctgcggagcgtgaaacacggctctggaacaaatacatgagcaacacctacgagcagttgagcaagctagacaacactgtccaggatgctgggctataccagggtcaggtgctagtaattgagcctcaaaatgaagatggcacatggcccaggcagaccttgcagtcaaatggatctggcttttctgcttcgtataattgtcaggagccaccatcctctcatatacaacctgggctctgtggacttggaaacctgggaaacacctgcttcatgaactccgctttgcagtgtttgagcaacactgcaccactgactgactactttctcaaagatgagtatgaagccgaaatcaacagagacaaccctctggggatgaaaggggaaattgcagaagcctatgctgaactcattaagcagatgtggtctggaagggacgcccatgtggcacctcgcatgttcaaaactcaagtaggacgttttgctcctcaattttctggctaccagcaacaagattctcaggagctgctggcctttcttctagatggattgcatgaagatctgaaccgggtaaagaaaaagccctacttggagctgaaggatgccaatgggcggccagatgcggtggtggcaaaggaagcctgggagaatcacaggttgaggaatgattctgtgattgtggatactttccatggcctcttcaaatctactttggtttgcccagaatgtgctaaggtttctgtgacctttgacccattttgctatctaacgctgccactgcccttgaagaaagatcgagttatggaggttttcctggttcctgctgaccctcactgcagacctactcagtaccgtgtgactgtgccgctgatgggggctgtgtccgacctgtgcgaggctctctccaggctgtctggcattgctgcagaaaatatggtggtcgcagatgtgtataatcaccgattccacaaaattttccaaatggatgaaggtttaaaccacatcatgcctcgggatgacattttcgtgtacgaggtctgcagcacttccgtggatggctcggaatgtgtcacgcttccagtctacttcagggagaggaagtccaggccatcaagcacttcctccgcatcagcgctatatgggcagccactattgctttctgtccccaagcacaagttaacccttgagtctttgtaccaggctgtttgtgatcgtatcagccgctatgtgaaacagcctttacctgatgagtttggcagctcacccttggagccaggggcctgcaatggctccaggaacagctgtgaaggagaagatgaggaagaaatggagcatcaggaagaaggcaaagagcagctttcagaaacagaaggcagtggggaagatgagccaggaaatgaccccagtgagaccacccaaaagaagatcaaaggccagccctgcccaaaaaggctttttaccttcagtcttgtgaactcctatggaacagctgacataaattcacttgcagctgatggaaaactacttaaactcaactctcgatctacactggccatggattgggacagtgaaactcggagactttactatgatgagcaagaatctgaggcctacgagaagcatgtgagcatgttgcagcctcagaagaagaagaagaccacagtggccctgagagactgcatcgagctcttcaccaccatggagacccttggggagcatgacccctggtactgtcccaactgtaagaagcatcaacaggccacaaaaaagtttgacctatggtccttgcccaagatcctggtggtccacctcaaacgtttctcctacaacagatactggagggataagctcgacacagtcgtagaattcccaatcagagggctgaacatgtccgagtttgtctgtaacctgtcagcaaggccttatgtgtacgacctcattgccgtgtccaatcattatggagccatgggggttggccactacactgcatatgcgaagaacaaactgaatggtaaatggtattactttgatgatagcaacgtgtccctggcctctgaggatcagatagtgactaaagcagcttatgtgctattttaccaacgtcgagatgatgaattttataagacaccttcacttagcagttctggttcctctgatggagggacacgaccaagcagctctcagcagggctttggggatgatgaggcttgcagcatggacaccaactaatgctgactccacgatcctgccaccctgtagcgccagtgtaatcccccaggagaacatctttgacactctgcagactgctagtgttctgtctaaaaaccagacaaggaaatacccttcttttatgagcagaaggaaacaaaaaaaaaaaaagaagaccgtttacctagaagaagctatgtcaagaggctgaattatttttatttttaaacaggtggtgagaaatttctgtgaaacctgtgaagctgaaaagggggtgggatgggggtactcaatggagtatgtctgatggatcccgaagaatggagaggaacacaggcgctgagtatggagcagcctggagacccaccccacctgcagggctgccctgagcgcctggatttctggttctgatgccaatactagtcaccccaagtagtctgctcacagtaacccaaacctcaagtaaactcccctttccctcgc

SEQ ID NO: 261849 - protein, 256 aa, Artificial Sequence
  derived and/or modified sequence
MAPPAPGPASGGSGEVDELFDVKNAFYIGSYQQCINEAQRVKLSSPERDVERDVFLYRAYLAQRKFGVVLDEIKPSSAPELQAVRMFADYLAHESRRDSIVAELDREMSRSVDVTNTTFLLMAASIYLHDQNPDAALRALHQGDSLECTAMTVQILLKLDRLDLARKELKRMQDLDEDATLTQLATAWVSLATDSGYPETLVNLIVLSQHLGKPPEVTNRYLSQLKDAHRSHPFIKEYQAKENDFDRLVLQYAPSA

SEQ ID NO: 261850 - DNA, 771 bp, Artificial Sequence
  derived and/or modified sequence
atggctcctccggcacctggcccggccagtggagggtccggtgaagtcgatgagctgtttgacgtgaagaacgccttctacataggtagttatcagcagtgcatcaacgaggcccagcgcgttaaactctcttcccccgagcgggatgttgaaagggacgtatttctttatcgcgcctatctggcccagaggaaattcggtgttgtgctggatgagataaaacccagctccgcacctgaactacaggccgttcgaatgtttgccgactacctcgcccatgaaagtcggcgagacagtatagtggctgaactcgaccgggaaatgtctcgatcagtggatgtgacgaataccactttcttgcttatggcggccagcatctacctgcatgaccagaacccagacgctgctctcagagcactgcaccaaggcgactcattagagtgcacggcgatgacagtgcaaatcctgctgaaacttgacagactcgatttggcccggaaagagctgaagagaatgcaggatctggatgaggacgcaacattgacccagctggcaacagcctgggtaagcctggcaacagactcgggctacccggaaacccttgtcaacctcattgtgcttagccagcacctgggcaaaccaccagaagtgacgaatcgatacctcagccagctaaaggacgcacaccggtcccatcccttcataaaggaataccaagctaaagaaaatgactttgatagacttgtactgcagtacgccccatcggcctag

SEQ ID NO: 261851 - DNA, 771 bp, Artificial Sequence
  derived and/or modified sequence
atggcccccccagcccctggccctgccagcggcggcagcggggaggtggatgagctgtttgatgtgaagaatgccttctacatcggcagctaccagcagtgcatcaatgaggcccagagggtgaagctgagcagccctgagagagatgtggagagagatgtgttcctgtaccgggcctacctggcccagaggaagtttggagtggtgctggatgagatcaagcccagcagcgcccctgagctgcaggccgtgaggatgtttgctgactacctggcccacgagagccggcgggacagcatcgtggccgagctggaccgggagatgagccgctctgtggatgtgaccaacaccaccttcctgctgatggccgccagcatctacctgcatgaccagaacccagatgctgccctgcgggccctgcaccagggcgacagcctggagtgcacagccatgacagtgcagatcctgctgaagctggaccggctggacctggccaggaaggagctgaagaggatgcaggacctggatgaagatgccaccctgacccagctggccacagcctgggtgtccctggccacagattctggctacccagagaccctggtgaacctgattgtgctgagccagcacctgggcaagcccccagaggtgaccaaccgctacctgagccagctgaaggatgcccacaggagccaccccttcatcaaggagtaccaggccaaggaaaatgactttgaccggctggtgctgcagtatgcccccagcgcctag

SEQ ID NO: 261852 - DNA, 771 bp, Artificial Sequence
  derived and/or modified sequence
atggccccccccgcccccggccccgccagcggcggcagcggcgaggtcgatgagctgttcgatgtgaaaaacgcattctatatcggttcatatcagcagtgtattaatgaggcacagcgcgttaagctctctagtcctgagcgcgacgttgagcgcgacgtctttctttacagagcttacttggcccagcggaaatttggcgtggtgctagacgaaatcaaaccgagctcagctcctgaactccaggcagtgcggatgtttgccgactatcttgcccacgagagtcgccgagactcaattgtggctgagctagacagggagatgtcccgcagcgtggatgtgaccaacacaacattcctgctcatggctgcatccatatacttgcacgaccagaaccctgatgccgccctcagggcccttcatcaaggcgacagcctggagtgcactgcaatgacagtgcagattttgctgaagttagataggcttgacctagcccgtaaagagctcaagagaatgcaggatttggacgaagatgctactctcacacagctggcaaccgcttgggtgtcactcgccaccgactctgggtatcctgagaccctcgtcaacctgatcgttctctcccagcatctgggtaaaccccctgaggttactaaccgctatctgagccagctgaaggatgctcacagatcccacccttttatcaaagagtatcaggctaaagaaaatgacttcgaccggctagtcttgcaatacgccccttctgcctag

SEQ ID NO: 261853 - DNA, 771 bp, Artificial Sequence
  derived and/or modified sequence
atggctcctcccgcacctgggccagcatcaggaggttccggtgaggtagacgagttgttcgatgtgaaaaatgctttttacattggaagctatcagcagtgcataaatgaggcacagagagtgaagctgtcctctccagaacgggacgtggaacgggatgtattcctctatagggcctatctcgctcagcggaaatttggtgtcgtgttggacgaaatcaagcccagctctgcccctgaacttcaggctgtccggatgtttgctgattatctggcccacgagagtaggagagattccatagtggctgaactagatcgtgagatgtcccgctctgttgatgtcacaaatacaactttcttattgatggccgcttctatttatctgcatgaccaaaaccctgatgcagctcttcgagccctgcaccagggcgattccctggagtgtactgccatgacagtccaaatactcctgaaactggatagactcgacttggccaggaaagagttgaaaagaatgcaggacctggatgaggacgcgacacttactcagcttgccacggcctgggtaagtttagctacggactcaggctaccctgagacactggtgaatctgattgtgttgagccagcacctaggcaagcctcctgaggtgacaaatcggtatctttctcagctcaaggatgctcaccgatcccacccctttatcaaggagtatcaggccaaggaaaacgattttgaccgtctcgtgttacagtacgccccaagtgcgtag

SEQ ID NO: 261854 - DNA, 978 bp, Artificial Sequence
  derived and/or modified sequence
gacgtgtctttcaggaagaggagctggtgagaagacagcgaaatggcgcctccggcccccggcccggcctccggcggctccggggaggtagacgagctgttcgacgtaaagaacgccttctacatcggcagctaccagcagtgcataaacgaggcgcagcgggtgaagctatcaagcccagagagagacgtggagagggacgtcttcctgtatagagcgtacctggcgcagaggaagttcggtgtggtcctggatgagatcaagccctcctcggcccctgagctccaggccgtgcgcatgtttgctgactacctcgcccacgagagtcggagggacagcatcgtggccgagctggaccgagagatgagcaggagcgtggacgtgaccaacaccaccttcctgctcatggccgcctccatctatctccacgaccagaacccggatgccgccctgcgtgcgctgcaccagggggacagcctggagtgcacagccatgacagtgcagatcctgctgaagctggaccgcctggacctcgcccggaaggagctgaagagaatgcaggacctggacgaggatgccaccctcacccagctcgccactgcctgggtcagcctggccacggatagtggctacccagagacgctggtcaacctcatcgtcctgtcccagcacctgggcaagccccctgaggtgacaaaccgatacctgtcccagctgaaggatgcccacaggtcccatcccttcatcaaggagtaccaggccaaggagaacgactttgacaggctggtgctacagtacgctcccagcgcctgaggctggcccagagctgtcaggaccatgaagccaggacagaggccaggagccagccctgcagccctccccacccggcatccacctgcatcccctctgggggcaggagcccacccccagcacccccatctgttaataaatatctcaactccagggtgttccacctga

SEQ ID NO: 261855 - DNA, 771 bp, Artificial Sequence
  derived and/or modified sequence
atggccccccccgcccccggccccgccagcggcggcagcggcgaggtggacgagctgttcgacgtgaagaacgccttctacatcggcagctaccagcagtgcatcaacgaggcccagagagtgaagctgagcagccccgagagagacgtggagagagacgtgttcctgtacagagcctacctggcccagagaaagttcggcgtggtgctggacgagatcaagcccagcagcgcccccgagctgcaggccgtgagaatgttcgccgactacctggcccacgagagcagaagagacagcatcgtggccgagctggacagagagatgagcagaagcgtggacgtgaccaacaccaccttcctgctgatggccgccagcatctacctgcacgaccagaaccccgacgccgccctgagagccctgcaccagggcgacagcctggagtgcaccgccatgaccgtgcagatcctgctgaagctggacagactggacctggccagaaaggagctgaagagaatgcaggacctggacgaggacgccaccctgacccagctggccaccgcctgggtgagcctggccaccgacagcggctaccccgagaccctggtgaacctgatcgtgctgagccagcacctgggcaagccccccgaggtgaccaacagatacctgagccagctgaaggacgcccacagaagccaccccttcatcaaggagtaccaggccaaggagaacgacttcgacagactggtgctgcagtacgcccccagcgcctag

SEQ ID NO: 261856 - protein, 333 aa, Artificial Sequence
  derived and/or modified sequence
MQQKAFEESRYPWQESFENVAVCLPLRCPRCGDHTRFRSLSSLRAHLEFSHSYEERTLLTKCSLFPSLKDTDLVTSSELLKPGKLQSSGNVVKQKPSYVNLYSISHEHSKDRKPFEVVAERPVSYVQTYTAMDLHADSLDGTRSGPGLPTSDTKASFEAHVREKFNRMVEAVDRTIEKRIDKLTKELAQKTAELLEVRAAFVQLTQKKQEVQRRERALNRQVDVAVEMIAVLRQRLTESEEELLRKEEEVVTFNHFLEAAAEKEVQGKARLQDFIENLLQRVELAEKQLEYYQSQQASGFVRDLSGHVSWKGAGEARLVCQNDLELEESAIVE

SEQ ID NO: 261857 - protein, 53 aa, Artificial Sequence
  derived and/or modified sequence
MQQKAFEESRYPWQESFENVAVCLPLRCPRCGDHTRFRSLSSLRAHLEFSHSY

SEQ ID NO: 261858 - DNA, 1002 bp, Artificial Sequence
  derived and/or modified sequence
atgcagcagaaggccttcgaggagagcagatacccctggcaggagagcttcgagaacgtggccgtgtgcctgcccctgagatgccccagatgcggcgaccacaccagattcagaagcctgagcagcctgagagcccacctggagttcagccacagctacgaggagagaaccctgctgaccaagtgcagcctgttccccagcctgaaggacaccgacctggtgaccagcagcgagctgctgaagcccggcaagctgcagagcagcggcaacgtggtgaagcagaagcccagctacgtgaacctgtacagcatcagccacgagcacagcaaggacagaaagcccttcgaggtggtggccgagagacccgtgagctacgtgcagacctacaccgccatggacctgcacgccgacagcctggacggcaccagaagcggccccggcctgcccaccagcgacaccaaggccagcttcgaggcccacgtgagagagaagttcaacagaatggtggaggccgtggacagaaccatcgagaagagaatcgacaagctgaccaaggagctggcccagaagaccgccgagctgctggaggtgagagccgccttcgtgcagctgacccagaagaagcaggaggtgcagagaagagagagagccctgaacagacaggtggacgtggccgtggagatgatcgccgtgctgagacagagactgaccgagagcgaggaggagctgctgagaaaggaggaggaggtggtgaccttcaaccacttcctggaggccgccgccgagaaggaggtgcagggcaaggccagactgcaggacttcatcgagaacctgctgcagagagtggagctggccgagaagcagctggagtactaccagagccagcaggccagcggcttcgtgagagacctgagcggccacgtgagctggaagggcgccggcgaggccagactggtgtgccagaacgacctggagctggaggagagcgccatcgtggagtag

SEQ ID NO: 261859 - DNA, 162 bp, Artificial Sequence
  derived and/or modified sequence
atgcagcagaaggccttcgaggagagcagatacccctggcaggagagcttcgagaacgtggccgtgtgcctgcccctgagatgccccagatgcggcgaccacaccagattcagaagcctgagcagcctgagagcccacctggagttcagccacagctactag

SEQ ID NO: 261860 - DNA, 1002 bp, Artificial Sequence
  derived and/or modified sequence
atgcaacagaaggcctttgaagagtcacgctacccgtggcaggaaagtttcgagaatgttgctgtttgtctaccactgcgctgccctagatgtggggaccacacgagatttcggtctctaagctcgttgcgcgctcacttagaattctctcattcctacgaagaacgtactctgcttacgaagtgctctctgtttccctcactcaaggacaccgaccttgtcaccagtagtgagctgctcaagcccggaaagctgcagtcatctggtaacgtggtgaaacaaaagccgtcttacgtgaatttatattcaatctcacacgaacactcaaaggacagaaaaccattcgaggtagtggccgagcggcctgtttcttacgtgcagacgtacactgcaatggacttgcatgcagacagtcttgatggcacaagaagtggcccaggcctcccaacctctgataccaaagcaagctttgaggcccacgtgcgagaaaagttcaaccggatggtcgaggctgtagaccgtaccatcgaaaaacggattgataaactgacaaaggagcttgcacagaagacggccgagcttctggaagtaagagctgcgttcgtgcagctgacccagaaaaagcaagaggtgcagcggcgcgaaagggcacttaatcggcaggtcgacgtggccgtagaaatgatcgcagttctgaggcagaggttgactgaaagtgaggaagagctcctgcgaaaggaggaagaagtggtgactttcaatcatttcctagaggctgctgcagaaaaggaagtgcaggggaaggcccgcctgcaggattttatcgaaaatttgctgcagagagttgaactcgccgagaagcagttggagtattaccagtcccagcaagcgtccgggttcgtaagggatctaagtggtcatgtctcatggaaaggagccggagaggctcgcctggtttgtcagaatgacctcgagctggaggagtctgccattgtggaatag

SEQ ID NO: 261861 - DNA, 162 bp, Artificial Sequence
  derived and/or modified sequence
atgcagcagaaagcatttgaagaaagtcgatatccctggcaggaatcatttgaaaacgtcgccgtgtgtctaccattgagatgtcctagatgtggcgaccacacaagatttcgctccctgtcgagtctgcgtgcacacttggagttctcacacagctactag

SEQ ID NO: 261862 - DNA, 1002 bp, Artificial Sequence
  derived and/or modified sequence
atgcagcagaaggcctttgaggagagccgctacccctggcaggagagctttgaaaatgtggccgtgtgcctgcccctgcgctgcccccgctgtggggaccacacccgcttccgcagcctgagcagcctgcgggcccacctggagttcagccacagctatgaggagaggaccctgctgaccaagtgcagcctcttccccagcctgaaggacacagacctggtgaccagcagcgagctgctgaagccaggcaagctgcagagcagtggaaatgtggtgaagcagaagcccagctatgtgaacctgtacagcatcagccatgagcacagcaaggacaggaagccctttgaggtggtggccgagaggcctgtgtcctatgtgcagacctacacagccatggacctgcacgccgacagcctggatggcaccaggagcggccctggcctgcccaccagtgacaccaaggccagctttgaggcccacgtgcgggagaagttcaacaggatggtggaggccgtggacaggaccatcgagaagagaattgacaagctgaccaaggagctggcccagaagacagctgagctgctggaggtgcgggccgcctttgtgcagctgacccagaagaagcaggaggtgcagaggcgggagcgggccctgaaccggcaggtggatgtggccgtggagatgattgctgtgctgcggcagaggctgacagaaagtgaggaggagctgctgaggaaggaggaggaggtggtgaccttcaaccacttcctggaggccgctgctgagaaggaggtgcagggcaaggcccggctgcaggacttcatcgagaacctgctgcagagggtggagctggccgagaagcagctggagtactaccagagccagcaggccagcggctttgtgcgggacctgagcggccacgtgtcctggaagggagctggggaggcccggctggtgtgccagaatgacctggagctggaggagagcgccatcgtggagtag

SEQ ID NO: 261863 - DNA, 162 bp, Artificial Sequence
  derived and/or modified sequence
atgcagcagaaggcctttgaggagagccgctacccctggcaggagagctttgaaaatgtggccgtgtgcctgcccctgcgctgcccccgctgtggggaccacacccgcttccgcagcctgagcagcctgcgggcccacctggagttcagccacagctactag

SEQ ID NO: 261864 - DNA, 1002 bp, Artificial Sequence
  derived and/or modified sequence
atgcagcagaaggccttcgaggagagccggtacccctggcaggagagctttgaaaatgtggcggtatgcttgcccctgcgatgcccacgctgcggggaccatacaagatttcgctcgctcagtagcctgcgggctcatctggagtttagccacagttacgaagaacggacactgctcaccaagtgcagtttgttcccatctctaaaagacacagacctggttaccagcagcgagttgctaaagcctggaaaattgcagagtagtgggaatgtcgtgaaacagaaaccatcatacgttaacctctattccatctcacatgagcactccaaggaccggaagccttttgaggtcgtcgcagagaggcccgttagttacgtgcagacctataccgccatggatctgcacgccgactcactggacggaactcggagcggtcctgggctgcccacctccgatactaaggcctcctttgaagcacacgtccgggaaaagttcaatcgtatggtcgaagcagtggatagaaccatcgagaagaggatagataagctaaccaaggagttagcacagaagacagcggaactgctggaggtcagagctgcttttgtacagctcacccaaaagaagcaagaggtgcaaagacgcgaaagggctctgaacaggcaggtggatgtggcagtcgaaatgattgccgttctgcgacagaggttaaccgaatccgaagaagagctcctgagaaaggaggaggaagtggtcaccttcaaccacttccttgaggcagcggctgagaaggaagttcaggggaaggcacggctgcaggacttcatagaaaatttgctccagagagttgagctggctgaaaagcaactcgaatactaccagtcacagcaagctagcggctttgttagggatctgtcaggtcatgtaagctggaagggagcaggagaggctagactggtctgtcaaaacgacctcgagctagaagagtctgctatcgttgagtag

SEQ ID NO: 261865 - DNA, 162 bp, Artificial Sequence
  derived and/or modified sequence
atgcagcagaaggccttcgaggagagccggtacccctggcaggagtctttcgagaatgtggcggtttgcctgccacttcgatgcccccgatgcggtgaccatactcgcttcagatctctgtcctcattgagagcccacctggagttctcacattcttactag

SEQ ID NO: 261866 - DNA, 1002 bp, Artificial Sequence
  derived and/or modified sequence
atgcagcagaaggcctttgaggagagcagatatccctggcaagagtcattcgagaatgtggccgtctgcctgccgctgcgctgcccacgatgcggtgatcatacaaggttcaggagcttgtcatcactccgtgcccatctcgaatttagccatagctacgaggagaggacgcttctcacaaaatgttctctctttccctctctcaaggatacagacctggtgacaagcagcgaactgctgaagccaggtaaactgcagagctctgggaatgtcgttaagcagaagcccagctatgtcaatttatactccataagtcacgaacacagcaaagaccgcaaaccattcgaagtggtggccgaaagaccagtaagttacgtgcaaacctacactgcaatggacctgcatgctgattctcttgacgggacccgaagcggaccagggctccccacgtctgataccaaggccagcttcgaagcacacgtgcgggaaaagttcaatagaatggtagaagccgttgaccgcaccattgagaaacggatcgacaagctgacgaaagagttggcccaaaaaacagcggagctgctcgaggtgcgcgctgcatttgttcagctgactcagaaaaagcaagaggtgcaacgacgagagcgcgcacttaaccggcaggttgatgtggctgtggaaatgatcgctgtactcagacagaggctgacggagtccgaagaggagctactgcggaaggaagaagaagtggttacatttaaccactttctggaggcagcagcagaaaaagaggtgcaggggaaagctaggctccaagactttattgaaaacctactccaacgggtggaattagccgagaagcagttggagtactaccaatcccagcaagcctctggctttgtgagagatctgagcgggcacgttagctggaagggagctggcgaggccagattggtgtgtcagaacgacctggaactcgaggaatctgcgatcgttgagtag

SEQ ID NO: 261867 - DNA, 162 bp, Artificial Sequence
  derived and/or modified sequence
atgcagcaaaaagcctttgaggagtcacgatacccgtggcaagagagtttcgaaaatgtggcggtttgcctcccgttgcgttgtccgaggtgtggtgatcacacccggtttcgatcgttgtcttccctcagggcacacctggaatttagtcatagctactag

SEQ ID NO: 261868 - DNA, 1674 bp, Artificial Sequence
  derived and/or modified sequence
gttccccgcggaggtggcagccctgggccgcggcgttccggaacccccgcacccacggcgcggtgccccacggtgcccgcgagcgccgcccccgctggctagccgcgcctcgctccgccctggacgccgccggtcccggcgcggaggtgcggcggggagtgggagccggcccggctcagtctgatttacggctctgctgaaaaccgcttcgctcccgcagcatcagcaccggaggcggcggctgcagcagcagcagcaacaagtcgggacttttagagtaatgcaacagaaggcttttgaggaaagcagatatccctggcaggagtcctttgagaatgttgctgtgtgcctgccattacgctgcccgaggtgtggagaccataccagatttagaagcttgtcatccttgagggcccatctggagttcagtcacagctacgaagaaagaaccctcttgacaaaatgcagtctctttccatccctcaaagacacagacctagtcacttcctcagaactcctgaaaccgggaaaattgcagagcagtggcaacgtggtaaagcagaaaccgagctatgttaacttgtacagcatttcacatgaacattccaaggacaggaagccatttgaggtggtggcagagaggcctgtgtcctatgtgcagacctacactgccatggacctccatgcagactcgctggatgggacacggtcgggtcctggactgcccacctcagacaccaaagcttctttcgaggcacatgtcagagaaaaattcaatcgaatggttgaggctgtggataggaccattgagaagagaattgataaactcaccaaagagttggcccagaaaactgcggaactgttggaagttcgggcagcttttgtgcagctgactcagaaaaagcaggaagttcagagacgagagcgggccttaaacagacaggtggacgtggccgtggaaatgatagctgtactgaggcaacgcctgacggaatctgaggaggagcttcttaggaaagaagaagaagttgtcacattcaaccatttcctggaagcggcagctgagaaggaggttcaagggaaagcccggctccaggactttattgagaatctgttacagcgggtagaactggcggagaagcagcttgagtactatcagagccagcaggcctctggctttgtccgtgatctcagcgggcacgtgagctggaaaggtgctggcgaagctcgcctggtgtgccaaaatgacctggaattggaggagtctgcgattgtggaataatgaacttcgaatgatgtgattctggatgaggacttggatcaagagaatcgcaaattaattgtgccagagaagctttcattcattcaacaaatatttattaagcatgttttacactccaggaactttacaagaaacttgggctacttggtgactttactcaccaggagtgggttcagactcctgatggatgagctccaggtcctccctaacaagactgcagacttcctgagggcacagcccacccctcatgctttgagtttctcatataacccatcatagcaagtagaagatgcttcagaacatttgtccctatgagatagagtcatattctatttagcttgggacatggcaggtactcagttgttaaataaaaaatagttattgagtaattt

SEQ ID NO: 261869 - DNA, 489 bp, Artificial Sequence
  derived and/or modified sequence
ttgcaggcttaatgccactgtgcatagcttgagtaatctttcctgtacttgaggataggtcctgagcttgctgtcttaggacccattttgacaattcatgtgagttttcatatgttcttgtgttcacgcatctcggattgtatccttaaaatggggcacggttttgcatttagtgtgccaaattcaggaggggaggaaacttgaattccacttctggatctaccactttccatctgaccttggattaatggctttacttccttgcttcagtgttctcttctgtggagagggaatgttacccacctttttgattctaggacttttagagtaatgcaacagaaggcttttgaggaaagcagatatccctggcaggagtcctttgagaatgttgctgtgtgcctgccattacgctgcccgaggtgtggagaccataccagatttagaagcttgtcatccttgagggcccatctggagttcagtcacagctac

SEQ ID NO: 261870 - protein, 462 aa, Artificial Sequence
  derived and/or modified sequence
MQQKAFEESRYPWQESFENVAVCLPLRCPRCGDHTRFRSLSSLRAHLEFSHSYEERTLLTKCSLFPSLKDTDLVTSSELLKPGKLQSSGNVVKQKPSYVNLYSISHEHSKDRKPFEVVAERPVSYVQTYTAMDLHADSLDGTRSGPGLPTSDTKASFEAHVREKFNRMVEAVDRTIEKRIDKLTKELAQKTAELLEVRAAFVQLTQKKQEVQRRERALNRQVDVAVEMIAVLRQRLTESEEELLRKEEEVVTFNHFLEAAAEKEVQGKARLQDFIENLLQRVELAEKQLEYYQSQQASGFVRDLSGHVSWKGAGEARLVCQNDLELEIFGHINHHLSGLKDSHCLVFLQAPPVPWIILASFLWILGNPWTSSTATAGFSQIWVLFPFCGGTFHHNEKDVLGLQDFERESVSTSQSRNISLLTLGQLQNCVIGKLTIIDLLTEHLLGVRHGVICFPWGLPSSS

SEQ ID NO: 261871 - DNA, 1389 bp, Artificial Sequence
  derived and/or modified sequence
atgcagcagaaggccttcgaggagagcagatacccctggcaggagagcttcgagaacgtggccgtgtgcctgcccctgagatgccccagatgcggcgaccacaccagattcagaagcctgagcagcctgagagcccacctggagttcagccacagctacgaggagagaaccctgctgaccaagtgcagcctgttccccagcctgaaggacaccgacctggtgaccagcagcgagctgctgaagcccggcaagctgcagagcagcggcaacgtggtgaagcagaagcccagctacgtgaacctgtacagcatcagccacgagcacagcaaggacagaaagcccttcgaggtggtggccgagagacccgtgagctacgtgcagacctacaccgccatggacctgcacgccgacagcctggacggcaccagaagcggccccggcctgcccaccagcgacaccaaggccagcttcgaggcccacgtgagagagaagttcaacagaatggtggaggccgtggacagaaccatcgagaagagaatcgacaagctgaccaaggagctggcccagaagaccgccgagctgctggaggtgagagccgccttcgtgcagctgacccagaagaagcaggaggtgcagagaagagagagagccctgaacagacaggtggacgtggccgtggagatgatcgccgtgctgagacagagactgaccgagagcgaggaggagctgctgagaaaggaggaggaggtggtgaccttcaaccacttcctggaggccgccgccgagaaggaggtgcagggcaaggccagactgcaggacttcatcgagaacctgctgcagagagtggagctggccgagaagcagctggagtactaccagagccagcaggccagcggcttcgtgagagacctgagcggccacgtgagctggaagggcgccggcgaggccagactggtgtgccagaacgacctggagctggagatcttcggccacatcaaccaccacctgagcggcctgaaggacagccactgcctggtgttcctgcaggccccccccgtgccctggatcatcctggccagcttcctgtggatcctgggcaacccctggaccagcagcaccgccaccgccggcttcagccagatctgggtgctgttccccttctgcggcggcaccttccaccacaacgagaaggacgtgctgggcctgcaggacttcgagagagagagcgtgagcaccagccagagcagaaacatcagcctgctgaccctgggccagctgcagaactgcgtgatcggcaagctgaccatcatcgacctgctgaccgagcacctgctgggcgtgagacacggcgtgatctgcttcccctggggcctgcccagcagcagctag

SEQ ID NO: 261872 - DNA, 1389 bp, Artificial Sequence
  derived and/or modified sequence
atgcagcagaaagctttcgaagagtctcgatatccatggcaggaatccttcgaaaacgtggcggtttgtctgccgttaagatgtcctaggtgcggtgaccatacaaggtttaggtcccttagtagtctccgagcccacctcgagttttctcactcttacgaagagagaacgctgcttacgaaatgtagtctcttcccctcactaaaagatacagatctcgtgactagttcggaactgttaaaaccaggcaagctccaaagctccggcaatgtggtgaaacaaaaaccgagttacgtgaacctctattccatctcccacgaacactccaaggaccgtaagcctttcgaggtggtcgccgagcgtccagtttcttacgtgcaaacttatactgcaatggatctgcacgcagatagcttggatggaacccggagtggccctggcctgcccacaagcgacacaaaggccagtttcgaggctcacgtgagagagaagttcaaccgaatggttgaagctgtggacaggaccatcgaaaaacgcatcgataagttaacaaaagagcttgctcagaaaaccgcagaactgcttgaggtccgggctgccttcgtccaactgacacagaagaaacaggaagtgcagcggagagaacgtgccctcaatcgccaggtagatgtcgccgtggaaatgatcgcagttttgcgtcagagactgacagagtccgaagaggagctcctccggaaagaagaagaggtcgtgacttttaaccattttctggaggctgcagctgagaaggaggttcaggggaaagctaggctgcaggacttcattgaaaacttgctccagagagtagaattggccgagaaacagttggagtactaccagtcacaacaggcctccggctttgtgagggacctatccggccacgtttcttggaagggcgcaggggaggcaagactggtgtgtcaaaatgacctggaactggaaatcttcggacacatcaaccaccacctgtcaggattgaaagattctcactgcctggtgtttctgcaagcgccccctgtgccttggatcatcttagcatcctttctctggatcctcggaaacccatggacaagctccacggcgactgcgggattttcacagatctgggttctgttcccattctgtggaggaacattccatcataacgagaaagatgtgctcggactccaggacttcgagcgcgagtctgtttccactagtcagtcccgtaatatcagtctgctgacccttggacaactccagaattgcgtgattggtaagctaacaattatagacctgctgaccgagcacttactgggcgtgcgccacggtgttatctgcttcccgtggggactgcctagctcttcctag

SEQ ID NO: 261873 - DNA, 1389 bp, Artificial Sequence
  derived and/or modified sequence
atgcagcagaaggcctttgaggagagccgctacccctggcaggagagctttgaaaatgtggccgtgtgcctgcccctgcgctgcccccgctgtggggaccacacccgcttccgcagcctgagcagcctgcgggcccacctggagttcagccacagctatgaggagaggaccctgctgaccaagtgcagcctcttccccagcctgaaggacacagacctggtgaccagcagcgagctgctgaagccaggcaagctgcagagcagtggaaatgtggtgaagcagaagcccagctatgtgaacctgtacagcatcagccatgagcacagcaaggacaggaagccctttgaggtggtggccgagaggcctgtgtcctatgtgcagacctacacagccatggacctgcacgccgacagcctggatggcaccaggagcggccctggcctgcccaccagtgacaccaaggccagctttgaggcccacgtgcgggagaagttcaacaggatggtggaggccgtggacaggaccatcgagaagagaattgacaagctgaccaaggagctggcccagaagacagctgagctgctggaggtgcgggccgcctttgtgcagctgacccagaagaagcaggaggtgcagaggcgggagcgggccctgaaccggcaggtggatgtggccgtggagatgattgctgtgctgcggcagaggctgacagaaagtgaggaggagctgctgaggaaggaggaggaggtggtgaccttcaaccacttcctggaggccgctgctgagaaggaggtgcagggcaaggcccggctgcaggacttcatcgagaacctgctgcagagggtggagctggccgagaagcagctggagtactaccagagccagcaggccagcggctttgtgcgggacctgagcggccacgtgtcctggaagggagctggggaggcccggctggtgtgccagaatgacctggagctggagatcttcggccacatcaaccaccacctgagcggcctgaaggacagccactgcctggtgttcctgcaggcccctcctgtgccctggatcatcctggccagcttcctgtggatcctgggcaacccctggaccagcagcacagccacagctggcttcagccagatctgggtgctcttccccttctgtggcggcaccttccaccacaatgagaaggatgtgctgggcctgcaggactttgagcgggagagcgtgtccaccagccagagcaggaacatcagcctgctgaccctgggccagctgcagaactgtgtgattggcaagctgaccatcatcgacctgctgacagagcacctgctgggcgtgagacatggagtcatctgcttcccctggggcctgcccagcagcagctag

SEQ ID NO: 261874 - DNA, 1389 bp, Artificial Sequence
  derived and/or modified sequence
atgcagcagaaggccttcgaggagagccggtacccctggcaggagagctttgaaaatgtggccgtttgtcttcctctgcggtgtcctagatgcggagatcacactcgtttccgatcattgagctctctgcgggcccatcttgaattctcccacagctacgaagaaaggaccctgctgaccaagtgcagcctgtttccaagccttaaggatactgacctcgtaacctcatccgagctcctgaagccaggaaaattacagtcttctggcaacgtggtcaagcagaagccatcttacgttaacctgtacagcatcagccatgagcactctaaagatcgaaaaccgttcgaagtcgtcgccgagaggccagtgtcttacgtccagacttataccgctatggacctgcacgccgacagcctagacgggactaggtcagggcctggcctgccaacttctgacacaaaggcctcatttgaagcccacgttagagagaaattcaaccggatggtcgaggcagtagaccggacaatcgagaagcggattgataaactgacgaaagagttggcccaaaagactgccgagttgttagaagtacgcgctgcattcgtgcaacttactcagaagaaacaagaagtccagcgaagagaaagggctctaaaccgccaggtcgatgttgcagttgagatgattgccgtgctcaggcagaggctgacggagtccgaagaagaactgctgcgcaaggaggaggaggtggtcacatttaatcatttcctggaagccgccgccgagaaggaagtgcagggaaaggcccgccttcaggacttcatcgagaacttactgcagagggtggagctggccgagaagcagcttgagtattaccaatcacagcaggcctccggattcgtcagagacctgtccggccatgtcagttggaagggcgctggcgaagcccgccttgtgtgccagaatgacctggagctggagatctttggccatattaatcaccatttatcgggtcttaaggattcacattgccttgtgtttctgcaggctccacccgtaccttggatcatcctagcaagtttcctctggattctcggcaatccatggacatcttcgaccgcgaccgcaggattctctcaaatctgggttcttttccccttctgcggtggcacatttcatcacaatgaaaaggacgtgttgggtctccaagacttcgagcgagaaagtgtgtcaacaagtcagagtagaaatataagcttgttgacccttggtcagctgcagaattgcgtgattggcaagctaaccattatcgacttactgactgaacacctactaggggtgcggcacggcgttatttgctttccctggggactgccaagcagctcttag

SEQ ID NO: 261875 - DNA, 1389 bp, Artificial Sequence
  derived and/or modified sequence
atgcagcagaaggccttcgaggaatctagatacccatggcaggagagctttgaaaatgtggccgtgtgtcttccccttcgctgccctcgttgtggcgaccatacaagatttcgctcgctgagctccctgcgggcacatcttgaatttagtcattcatacgaagaaaggacccttctaacaaaatgctctctgtttccatcccttaaggatacagaccttgtgacctctagcgagctactgaaacccggtaaactgcagagttctggcaacgtggtcaagcagaagccttcctatgtgaatctttatagtattagccatgagcactccaaggaccggaagccatttgaggttgttgcagagagaccggtttcatacgtccagacttacaccgctatggacctccacgcagattccctcgatggcacacgaagcgggccaggattgccaacctctgataccaaagcctccttcgaagcccacgtaagggaaaagtttaatcgaatggttgaggccgtggatcggactatcgagaaaagaatagataaactgacgaaagagctggcccagaaaactgctgagctgctagaggtaagagccgcttttgttcagctaacacagaagaaacaagaggtgcaaagaagggaacgggcacttaaccgtcaggtagacgttgcagtggaaatgatcgctgtcctgcggcagaggttaactgagtccgaggaagagctgctgcgcaaggaagaggaggtggtgacctttaaccattttttggaagccgcagcggaaaaagaagtgcaaggaaaagcacgcctccaggacttcattgagaaccttctgcaaagagtggaactcgccgaaaaacagctggaatattaccagagccagcaggcctccggattcgtgcgtgatctttctggccacgtttcctggaagggagcgggagaggcaaggctcgtgtgccagaatgatctggagctagagatttttgggcatattaaccaccacctgagcggacttaaagactctcactgtctggtgttcctgcaggcaccaccagtgccttggatcatcttggcaagttttctgtggatccttgggaatccttggacatcctctacagccacggctggcttttcccagatctgggtgttgtttcctttttgcgggggaacatttcatcataatgaaaaagatgttctcggcctgcaggacttcgaacgcgaatcggtgtccaccagtcagtctcgcaatatcagtttgctgactctcgggcaacttcagaactgtgtcattgggaaattaacaataatcgacctactgactgagcatctcctcggagtccggcacggcgttatctgctttccctggggtctgccttcttcctcttag

SEQ ID NO: 261876 - DNA, 3379 bp, Artificial Sequence
  derived and/or modified sequence
gttccccgcggaggtggcagccctgggccgcggcgttccggaacccccgcacccacggcgcggtgccccacggtgcccgcgagcgccgcccccgctggctagccgcgcctcgctccgccctggacgccgccggtcccggcgcggaggtgcggcggggagtgggagccggcccggctcagtctgatttacggctctgctgaaaaccgcttcgctcccgcagcatcagcaccggaggcggcggctgcagcagcagcagcaacaagtcgggacttttagagtaatgcaacagaaggcttttgaggaaagcagatatccctggcaggagtcctttgagaatgttgctgtgtgcctgccattacgctgcccgaggtgtggagaccataccagatttagaagcttgtcatccttgagggcccatctggagttcagtcacagctacgaagaaagaaccctcttgacaaaatgcagtctctttccatccctcaaagacacagacctagtcacttcctcagaactcctgaaaccgggaaaattgcagagcagtggcaacgtggtaaagcagaaaccgagctatgttaacttgtacagcatttcacatgaacattccaaggacaggaagccatttgaggtggtggcagagaggcctgtgtcctatgtgcagacctacactgccatggacctccatgcagactcgctggatgggacacggtcgggtcctggactgcccacctcagacaccaaagcttctttcgaggcacatgtcagagaaaaattcaatcgaatggttgaggctgtggataggaccattgagaagagaattgataaactcaccaaagagttggcccagaaaactgcggaactgttggaagttcgggcagcttttgtgcagctgactcagaaaaagcaggaagttcagagacgagagcgggccttaaacagacaggtggacgtggccgtggaaatgatagctgtactgaggcaacgcctgacggaatctgaggaggagcttcttaggaaagaagaagaagttgtcacattcaaccatttcctggaagcggcagctgagaaggaggttcaagggaaagcccggctccaggactttattgagaatctgttacagcgggtagaactggcggagaagcagcttgagtactatcagagccagcaggcctctggctttgtccgtgatctcagcgggcacgtgagctggaaaggtgctggcgaagctcgcctggtgtgccaaaatgacctggaattggagatttttggccatataaaccaccatctttcggggttgaaagattctcattgtctagtttttctgcaagccccacctgtgccctggatcattttagccagctttctctggattctcggaaatccctggacgtcttccacggctactgcaggatttagccaaatttgggtgctatttcccttttgtggagggacttttcatcacaatgagaaggacgtcttaggactccaggactttgagagagaaagtgtctctacaagtcaaagcaggaatatcagccttcttacactaggacaactccaaaattgtgtgattggcaaattgacaatcatcgatttgttgactgaacacctgttaggtgtaaggcacggtgtcatatgctttccttggggcttgccttcaagcagctaacagaaataagaagaaaacaggtgaaaaagacagtgtgataaggccatggtggtggattgtggatgccctgccctgtatccacttgggagagagcctctacaacatgctggcaacttccccctcactgattcaaatgttaatctcctttggcaacaccctcacagacacacccaggatcaatacgttgtatcctttgatccaatcaagttgccactcagtattaaccatgacaccttctaagccatcatctcctcctaatcctcccataacaatgggtataagttatgaaggtgggttagaaactagtgcctatccctcactaagttgccagatggatttaacagcacctcaaagtcaacatgccccaagtcaaagtcttctttacccatggaataagctggcttgctacttccctacatctctgaagggctccaccattcctctagcaaccatgctctcaaagctcagagggaggaaaaggaaatggatctaaatggaattccaggtcccacgctggatattttcacaccttacctcatttaatacaacaagcaaggaggtagacaatattgtctacctttgcaaatgaggaaacagaggcttagagaagttaaataatttgcctgagaataaagctaaaagtagctttaaaatactagagctgggattgcaagtttgatgcaaagtttgtgctctcttcatccttcaccaagatctttcattttccctttaaatatctcttatgtctgcatttcccttccattcccatcactagcactgtcctctaatgccccacccagtggggaagtctccaataggtccccctgcttataacagccaagagggtagctataaactaggtccaataacatgcttcatgtgagggaactgatggacagctgtctaattcataacctctggcctcaacggaatttacagttcagagtccaaaatagcaaggaagtggtgggaagaaggtgagagaaaagggtgggagggtgagagaggggagggaggggaataaggtgtgggcagtagagggaatctgtcagtctcatggtttgccctaggaaaccttctgctcagccccagcctgcttctgggcactcctcctcacccctccttgctgtccatatgggttcaatgtgagtaaccacaattgtagagtgtggccatcttcttctgacatggtcctaaataaacctaactgagtagccagaagaatcacttctaaggtaaacatctgtaaacattggttatatttattttcaatattactggttaacattgtggagctattactgatgggccagactctgtgctaggcacagactttctagggattatttcatttaattctcatggcaaccaccatgcatttgcagataggcaagtcaggctcacaaaaatgtatgcagagcttcagggttgtgatgggtagagccaaacccatctgcccaacccaagggcccgtgcgctccaaccctgcatcgaactgccaacatagtacaccttttagaaaaagattcttgttgcaaaagtaccataggcagtgtgtgtgtaaggtcattgtaaaagtgtagataagcaagaaagtgttataccaccactcagaagtaaccactgttaacatgttggcttatctgctctcaggtgtttctgtgcctgtacatactattcttcttgaataaaaacaggattacacagtgt

SEQ ID NO: 261877 - protein, 216 aa, Artificial Sequence
  derived and/or modified sequence
MSALGQITITVSRCWNTERNQTDKNPCLHGAYLQLRETVKNKSTHLKKPLMKQAPPWKDHLTFQPLHPAERKTQVWRWQSGNSSDLETTSSASPWPTGSNRDVVLNTLAESCCGLSELITAPPYAGVSIQGFSQIWVLFPFCGGTFHHNEKDVLGLQDFERESVSTSQSRNISLLTLGQLQNCVIGKLTIIDLLTEHLLGVRHGVICFPWGLPSSS

SEQ ID NO: 261878 - DNA, 651 bp, Artificial Sequence
  derived and/or modified sequence
atgagcgccctgggccagatcaccatcaccgtgagcagatgctggaacaccgagagaaaccagaccgacaagaacccctgcctgcacggcgcctacctgcagctgagagagaccgtgaagaacaagagcacccacctgaagaagcccctgatgaagcaggcccccccctggaaggaccacctgaccttccagcccctgcaccccgccgagagaaagacccaggtgtggagatggcagagcggcaacagcagcgacctggagaccaccagcagcgccagcccctggcccaccggcagcaacagagacgtggtgctgaacaccctggccgagagctgctgcggcctgagcgagctgatcaccgcccccccctacgccggcgtgagcatccagggcttcagccagatctgggtgctgttccccttctgcggcggcaccttccaccacaacgagaaggacgtgctgggcctgcaggacttcgagagagagagcgtgagcaccagccagagcagaaacatcagcctgctgaccctgggccagctgcagaactgcgtgatcggcaagctgaccatcatcgacctgctgaccgagcacctgctgggcgtgagacacggcgtgatctgcttcccctggggcctgcccagcagcagctag

SEQ ID NO: 261879 - DNA, 651 bp, Artificial Sequence
  derived and/or modified sequence
atgagtgctcttggacagatcaccatcactgtttcccgctgctggaacaccgagagaaaccaaaccgacaagaacccttgcctccatggcgcttatctgcagttgcgggagacagtgaagaataagtcaactcacctgaaaaagcctctcatgaaacaggcacccccatggaaggaccaccttacattccagcctctgcacccagccgagcgaaaaacccaagtttggcggtggcagtccgggaacagcagtgatcttgaaaccacatctagtgcctcaccctggcccaccgggtccaacagggacgtagtactgaacactttggctgaatcttgctgcggactctcggagttaatcactgcccctccctacgctggcgtgagcatccagggtttttcccagatttgggtgcttttccctttctgtggcggcacattccaccacaacgagaaagacgttctcgggcttcaggacttcgagcgagagtcggtgtccacttcccagtcccggaatatttcgcttctcactctgggccagttgcagaattgcgttataggaaaactaacaattatcgatctcctgacagagcatcttcttggagtgaggcatggagtcatttgttttccttgggggctaccaagttcctcttag

SEQ ID NO: 261880 - DNA, 651 bp, Artificial Sequence
  derived and/or modified sequence
atgtctgccctgggccagatcaccatcaccgtgagccgctgctggaacacagaaagaaaccagacagacaagaacccctgcctgcatggagcctacctgcagctgcgggagaccgtgaagaacaagagcacccacctgaagaagcccctgatgaagcaggccccaccctggaaggaccacctgaccttccagcccctgcaccctgctgagaggaagacccaggtgtggcgctggcagagcggcaacagcagtgacctggagaccaccagcagcgccagcccctggcccaccggcagcaacagagatgtggtgctgaacaccctggccgagagctgctgcggcctgtctgagctgatcacagccccaccctatgccggcgtgtccatccagggcttcagccagatctgggtgctcttccccttctgtggcggcaccttccaccacaatgagaaggatgtgctgggcctgcaggactttgagcgggagagcgtgtccaccagccagagcaggaacatcagcctgctgaccctgggccagctgcagaactgtgtgattggcaagctgaccatcatcgacctgctgacagagcacctgctgggcgtgagacatggagtcatctgcttcccctggggcctgcccagcagcagctag

SEQ ID NO: 261881 - DNA, 651 bp, Artificial Sequence
  derived and/or modified sequence
atgagcgccctgggccagatcaccatcaccgtgagccggtgctggaacaccgaaaggaaccagactgacaaaaatccgtgtctgcacggagcttaccttcaactccgcgaaacagtcaaaaacaagagcacacacctcaagaagcccctgatgaagcaggcccctccttggaaggatcatttgacgtttcaacctctgcatccagccgagcgcaaaacccaggtgtggcggtggcagagcggcaatagctctgaccttgaaacgacctcaagcgcctcaccttggcctaccggatcaaaccgggatgtggtgcttaatacattggccgaaagttgttgtggcctgtcggaacttatcaccgcccccccgtacgccggggtttccatccaggggttttcccagatctgggtactgttccctttttgcggcggcactttccatcacaatgagaaagacgtgcttgggcttcaggactttgagcgggagtccgtaagtacgagccaatccaggaatatttcccttttaaccctcggtcagctgcagaattgcgtcattgggaagctgacaatcatcgatctgctcacggaacacctgctcggtgtgcgacacggcgtaatttgctttccctgggggcttccaagctcttcttag

SEQ ID NO: 261882 - DNA, 651 bp, Artificial Sequence
  derived and/or modified sequence
atgtccgctctgggccagatcacaatcactgtttctcgctgttggaacacagaacgtaaccagacagacaagaacccgtgtcttcacggggcttacctgcagttgagagagaccgtcaagaacaaaagcacacacttgaagaaaccactaatgaaacaggccccaccatggaaggaccacctgacatttcagccattacaccccgcagaacgcaagacacaagtgtggcgttggcagagtgggaacagctccgaccttgagacaacttcctcagcctcaccctggcccacgggctccaatcgagacgtcgtcttgaatacattggccgagagctgctgcggcttatccgagctaataacagcccctccttatgcaggggtgtccatccagggcttcagccagatttgggtgctcttccctttttgcggaggcactttccaccacaatgagaaagatgtgctagggctgcaggactttgagagggagtcagtctcaacatctcagagccgcaacattagcctgctgactctcgggcagctacagaactgtgttatcggaaagctgaccatcatcgatctgctcacggagcacctgctcggagtgaggcacggggtgatctgcttcccctggggcttgccctcatctagctag

SEQ ID NO: 261883 - DNA, 2695 bp, Artificial Sequence
  derived and/or modified sequence
gaagaggaagagagacccgagctagcacactcagtccccttgctatgtgatgttctttaccatctcaggactctgcacagagtccccaacagcaagaaggccctcaccagatacagccccttgacctgggacttctcagcctccataaccgaattggcccctacaagtcaagttgcaaaccctgggtcaaagggtgaagtagaaggaagctggaaacacatagtattttagaagtttttcagagaaatcacaaggcaggaacttctgctcagtttggaagaaagagcattccatcatgacccttggactgggtgagagcatcatcctttaattaatgtctgcgctgggtcagataaccatcactgtctccaggtgctggaatacagagaggaaccaaacagataaaaatccttgcctgcacggagcttaccttcagctaagggagacagtcaaaaacaagtcaacacatctaaagaagccactgatgaaacaggctcccccttggaaagaccatctcaccttccaacctctccatcctgcagagaggaaaacccaagtttggcgttggcagtcaggtaattcatcagatctggaaaccacctcatcagcatccccctggccaactggaagcaaccgtgacgttgtgctgaatacacttgcagagtcgtgctgtggtctctccgagctcatcacggcacctccctatgcaggagtttcaattcaaggatttagccaaatttgggtgctatttcccttttgtggagggacttttcatcacaatgagaaggacgtcttaggactccaggactttgagagagaaagtgtctctacaagtcaaagcaggaatatcagccttcttacactaggacaactccaaaattgtgtgattggcaaattgacaatcatcgatttgttgactgaacacctgttaggtgtaaggcacggtgtcatatgctttccttggggcttgccttcaagcagctaacagaaataagaagaaaacaggtgaaaaagacagtgtgataaggccatggtggtggattgtggatgccctgccctgtatccacttgggagagagcctctacaacatgctggcaacttccccctcactgattcaaatgttaatctcctttggcaacaccctcacagacacacccaggatcaatacgttgtatcctttgatccaatcaagttgccactcagtattaaccatgacaccttctaagccatcatctcctcctaatcctcccataacaatgggtataagttatgaaggtgggttagaaactagtgcctatccctcactaagttgccagatggatttaacagcacctcaaagtcaacatgccccaagtcaaagtcttctttacccatggaataagctggcttgctacttccctacatctctgaagggctccaccattcctctagcaaccatgctctcaaagctcagagggaggaaaaggaaatggatctaaatggaattccaggtcccacgctggatattttcacaccttacctcatttaatacaacaagcaaggaggtagacaatattgtctacctttgcaaatgaggaaacagaggcttagagaagttaaataatttgcctgagaataaagctaaaagtagctttaaaatactagagctgggattgcaagtttgatgcaaagtttgtgctctcttcatccttcaccaagatctttcattttccctttaaatatctcttatgtctgcatttcccttccattcccatcactagcactgtcctctaatgccccacccagtggggaagtctccaataggtccccctgcttataacagccaagagggtagctataaactaggtccaataacatgcttcatgtgagggaactgatggacagctgtctaattcataacctctggcctcaacggaatttacagttcagagtccaaaatagcaaggaagtggtgggaagaaggtgagagaaaagggtgggagggtgagagaggggagggaggggaataaggtgtgggcagtagagggaatctgtcagtctcatggtttgccctaggaaaccttctgctcagccccagcctgcttctgggcactcctcctcacccctccttgctgtccatatgggttcaatgtgagtaaccacaattgtagagtgtggccatcttcttctgacatggtcctaaataaacctaactgagtagccagaagaatcacttctaaggtaaacatctgtaaacattggttatatttattttcaatattactggttaacattgtggagctattactgatgggccagactctgtgctaggcacagactttctagggattatttcatttaattctcatggcaaccaccatgcatttgcagataggcaagtcaggctcacaaaaatgtatgcagagcttcagggttgtgatgggtagagccaaacccatctgcccaacccaagggcccgtgcgctccaaccctgcatcgaactgccaacatagtacaccttttagaaaaagattcttgttgcaaaagtaccataggcagtgtgtgtgtaaggtcattgtaaaagtgtagataagcaagaaagtgttataccaccactcagaagtaaccactgttaacatgttggcttatctgctctcaggtgtttctgtgcctgtacatactattcttcttgaataaaaacaggattacacagtgt

SEQ ID NO: 261884 - protein, 378 aa, Artificial Sequence
  derived and/or modified sequence
MDKLDANVSSEEGFGSVEKVVLLTFLSTVILMAILGNLLVMVAVCWDRQLRKIKTNYFIVSLAFADLLVSVLVMPFGAIELVQDIWIYGEVFCLVRTSLDVLLTTASIFHLCCISLDRYYAICCQPLVYRNKMTPLRIALMLGGCWVIPTFISFLPIMQGWNNIGIIDLIEKRKFNQNSNSTYCVFMVNKPYAITCSVVAFYIPFLLMVLAYYRIYVTAKEHAHQIQMLQRAGASSESRPQSADQHSTHRMRTETKAAKTLCIIMGCFCLCWAPFFVTNIVDPFIDYTVPGQVWTAFLWLGYINSGLNPFLYAFLNKSFRRAFLIILCCDDERYRRPSILGQTVPCSTTTINGSTHVLSGCSPVSSFLLLFCNRPVPV

SEQ ID NO: 261885 - DNA, 1137 bp, Artificial Sequence
  derived and/or modified sequence
atggacaagttggacgccaacgtaagtagcgaggaagggttcggctccgttgaaaaagtcgttttgctgacgtttctttctacagtgattctcatggccattctaggaaacctccttgtgatggtggctgtgtgttgggaccggcaactccgaaaaatcaagaccaactattttattgtgagcctggccttcgccgatctgcttgtctccgtgctggtaatgccattcggcgccatagaactggtacaggatatttggatctacggagaggtgttttgtcttgtgaggactagtctggacgttcttctgactaccgcgagtatttttcatttgtgttgtataagccttgaccggtattacgccatctgctgccagcctttagtttatagaaacaaaatgacccccttgaggatcgctttaatgttgggcgggtgctgggtaattcctacctttattagcttcctacctatcatgcagggatggaacaacatcggcatcatagacctaatcgaaaagcgcaaatttaaccagaactcaaatagcacctactgtgtgtttatggtcaataagccctacgccatcacatgttcagtagtggctttctacattcctttcctgctcatggtcctggcctattaccgcatttacgtcacagctaaggaacacgctcatcaaatccagatgctgcaaagggcgggtgccagctctgaatccaggccccagtcagctgatcaacactccacacaccggatgaggaccgagaccaaggctgcaaagaccttgtgcattattatggggtgtttctgcctatgttgggcccccttttttgtgaccaatatcgtggacccatttatagactatactgttcctggccaggtctggactgcctttctctggttgggctacattaactcaggtctgaatccctttctgtatgcgtttctgaataagtccttccggagagccttcctgatcatcctctgttgcgacgatgaacgataccggcgcccgtccatactgggccagactgtgccatgcagtacaactaccataaatggctccacccatgtgctgagcgggtgtagccctgtcagcagttttttactcttgttctgtaatcggccagtgcccgtctag

SEQ ID NO: 261886 - DNA, 1137 bp, Artificial Sequence
  derived and/or modified sequence
atggataaactcgatgctaatgtgagtagtgaggagggcttcggatctgtggagaaggtggtccttttaacgttcctatcgacagttatcctgatggctattctgggcaacctactggtaatggtggcagtttgttgggatcggcagttgcgaaagatcaagactaattatttcatagtcagtctggcattcgccgatcttctggtaagcgtcttggtcatgccatttggcgctatcgagctcgtgcaagacatttggatttacggagaagttttctgccttgtgcgcacgagcctggatgttcttctcaccactgcctctatctttcacctgtgctgcatttcacttgacagatactacgccatctgctgccagccactggtgtacaggaataagatgactcctctgcggatagctctgatgctcggtgggtgttgggttatccccacattcatatcttttttacccattatgcagggttggaacaacattgggatcattgaccttatcgagaaacggaaatttaaccagaattcaaattccacgtactgcgtgtttatggtgaacaagccatatgcgattacatgcagcgtggttgccttctacatcccgttccttctgatggtgctggcttactaccggatttacgtgaccgccaaggagcatgcacatcagatccagatgctccagcgggcaggagctagctctgagtcaagaccgcagtccgcggatcagcacagtactcaccgaatgagaacggagacgaaagccgccaaaacactgtgcatcatcatgggctgcttctgcctctgctgggcacctttctttgtcacaaatatcgtggaccctttcatcgattacaccgtgcctgggcaggtgtggacagcctttctgtggctcggctacattaactctggtctgaacccgttcctgtacgcttttctgaacaaaagttttcggcgagcctttctgattatactgtgctgtgatgacgaacgctatagacgccctagtattctcggccagacagtcccttgcagcactactactatcaatggctctacgcatgttctctcaggatgttccccggtgtcttcattccttttactgttctgtaacaggccagtaccggtttag

SEQ ID NO: 261887 - DNA, 1137 bp, Artificial Sequence
  derived and/or modified sequence
atggacaagctggatgctaacgttagctctgaagaaggctttgggtcagttgaaaaggttgtactcctaaccttcctgagcacagttatcctgatggcaatcctggggaacctgcttgtcatggtagcagtgtgctgggaccgacaattgcggaaaattaagacaaattattttatcgtcagcctggcctttgccgacctgctggtgtccgttctggtgatgcccttcggagcaattgagctggtacaggatatttggatatacggtgaagtcttttgccttgtgcggacctccctggacgttctccttacgacagccagcatcttccacctttgctgcatctcgctggataggtactatgcaatctgttgtcagcccctggtatacagaaacaagatgacacccctcagaatcgccttgatgctcggaggatgttgggtcatccctacttttatcagcttcctgcctatcatgcagggctggaacaatataggcattatcgatcttatcgagaagcgcaagttcaatcagaactcaaactccacctattgtgtgttcatggtaaataaaccttatgcaatcacatgcagcgtggtcgccttctacatccctttcctcttaatggtgctagcttattacagaatctatgtgaccgctaaggagcatgcccaccagatccagatgttacagcgggcaggggctagttccgaaagcagacctcagtccgctgatcaacatagcacccaccggatgaggacagaaacaaaggccgctaaaacactctgtataatcatgggctgcttttgcctctgctgggctcccttcttcgtcacaaatattgtcgatcccttcattgactatacggtccccggacaagtgtggactgctttcttatggttaggctatataaactccggcctgaatccattcctgtacgcttttcttaataagtccttcagaagggctttcctgatcatcctatgttgcgatgacgaacggtaccgaaggccaagcatcttagggcagaccgtcccctgcagcacaaccacaattaacggtagtacccacgttctgagcggatgctctccggtcagttcattcctgctgttgttctgcaataggccggttcccgtatag

SEQ ID NO: 261888 - DNA, 1137 bp, Artificial Sequence
  derived and/or modified sequence
atggacaagctggatgccaacgtgagcagcgaggagggcttcggctctgtggagaaggtggtgctgctgaccttcctgagcaccgtcatcctgatggccatcctgggcaacctgctggtgatggtggccgtgtgctgggaccggcagctgaggaagatcaagaccaactacttcatcgtgtccctggcctttgctgacctgctggtgtctgtgctggtgatgccctttggagccatcgagctggtgcaggacatctggatctacggggaggtgttctgcctggtgaggaccagcctggatgtgctgctgaccacagccagcatcttccacctgtgctgcatcagcctggaccgctactatgccatctgctgccagcccctggtgtacagaaacaagatgacccccctgcgcatcgccctgatgctgggcggctgctgggtgatccccaccttcatctccttcctgcccatcatgcagggctggaacaacatcggcatcatcgacctgattgagaagaggaagttcaaccagaacagcaacagcacctactgtgtgttcatggtgaacaagccctatgccatcacctgcagcgtggtggccttctacatccccttcctgctgatggtgctggcctactaccgcatctacgtgacagccaaggagcacgcccaccagatccagatgctgcagagagctggggccagcagcgagagccggccccagagcgctgaccagcacagcacccacaggatgaggacagagaccaaggccgccaagaccctgtgcatcatcatgggctgcttctgcctgtgctgggcccccttctttgtgaccaacatcgtggaccccttcatcgactacacagtgcccggccaggtgtggacagccttcctgtggctgggctacatcaacagcggcctgaaccccttcctgtatgccttcctgaacaagagcttccggcgggccttcctgatcatcctgtgctgtgatgatgagcgctacagaagacccagcatcctgggccagacagtgccctgcagcaccaccaccatcaatggcagcacccacgtgctgagcggctgcagccctgtgagcagcttcctgctgctcttctgcaacagacctgtgcctgtgtag

SEQ ID NO: 261889 - DNA, 1137 bp, Artificial Sequence
  derived and/or modified sequence
atggacaagctggacgccaacgtgagcagcgaggagggcttcggctctgtggaaaaggtggtgttgttgacgttcctatctaccgtaatcctgatggctatcctggggaatctgcttgtcatggtcgccgtctgttgggaccggcagcttcggaagattaagacgaactatttcatcgtgagtcttgcgtttgcggatctgttggtgagcgttctggtgatgcccttcggggcgatcgagttggtgcaagacatttggatctacggcgaggtgttttgtcttgtccgcacatccctcgatgtgctgctcaccacggcgtctattttccacctgtgctgtatcagcttagaccgctactacgcgatttgctgccagcctctcgtgtaccgtaataaaatgacccccctccgaattgccctcatgttaggcggatgctgggtgatacccacattcatatctttccttcctatcatgcagggatggaacaatattggcataattgacttgattgaaaagcggaagttcaatcagaattctaattctacgtattgtgtctttatggtgaataaaccctacgcgattacttgtagcgtcgtcgcattttacataccgttccttctaatggttctggcatattaccgcatttacgtgacagcgaaggagcacgcccaccagatacagatgctgcagcgagcgggggcctccagcgagagtagaccccagtccgccgaccaacattcaacccatcgcatgaggacggagaccaaagcagccaagactctgtgcattatcatgggatgcttctgcctctgttgggcgccatttttcgttacaaatatcgttgatccattcattgattataccgtgccggggcaggtatggacagcttttctgtggttaggctatatcaacagcggcctaaaccccttcttgtatgcctttttgaacaagtcctttagacgtgcgtttctgatcattctgtgctgtgatgacgagcgttatcgaagaccttctatactgggacagaccgttccatgctcaaccacaacgatcaacggatcgacgcacgtactttcgggctgctcccccgtctcttcatttctcctgttattttgcaaccgacctgttccggtgtag

SEQ ID NO: 261890 - DNA, 1137 bp, Artificial Sequence
  derived and/or modified sequence
atggacaagctggacgccaacgtgagcagcgaggagggcttcggctccgttgagaaagtagtgttgttgaccttcctgagcacagtgattctgatggctatcctgggaaatctgctcgtaatggttgcggtctgctgggatcggcagctgcgcaagattaagaccaactacttcatcgtctctctggccttcgccgatctcttagtgtccgttttagtcatgccctttggtgccattgagctcgtccaagatatttggatttatggggaggtgttttgtttggtgagaacctctttggacgtgttgctgacaacagcctcgatttttcacctctgttgcatttctttggatagatactacgctatctgttgtcagcccctggtatacaggaataaaatgacccccttgcgcattgcgttgatgctgggtgggtgttgggtgatacccaccttcatttcttttcttcccatcatgcaggggtggaacaatatcggcattatcgacctgattgaaaaacgcaaattcaaccagaattcaaactccacctactgtgtcttcatggtaaacaagccttatgccatcacttgttctgtggtcgctttctatatccctttccttctcatggtgctggcttattatcggatatatgtgactgctaaagagcatgcgcatcagatccagatgctacagagagccggcgcctcttcggagagccgaccgcagtctgctgaccaacactctactcaccgcatgagaaccgagaccaaggccgccaagaccctctgtattatcatgggctgcttttgtctgtgctgggcaccattttttgttaccaatatcgtcgatcccttcattgactatacagtacctggccaggtctggacggccttcctctggctgggatacattaattccggcttaaacccctttttgtacgcattcctgaataagtccttccgcagagcttttctgatcattttgtgttgtgacgatgagcgctaccggaggcctagcatcctgggccagaccgtgccttgctccacaacaaccatcaacgggagcacgcatgtccttagtggctgcagccctgttagctctttcttgctgcttttctgtaacagacccgtgcctgtatag

SEQ ID NO: 261891 - DNA, 1137 bp, Artificial Sequence
  derived and/or modified sequence
atggacaagctggacgccaacgtgagcagcgaggagggcttcggctccgtggagaaagtggtgttactgaccttcctttctacggtcatccttatggcaattctcggcaatctgctggttatggtggccgtatgctgggatagacagctaagaaagatcaagacaaactatttcattgtgtcactcgccttcgctgatttgttggtgagcgtactggtgatgccttttggtgcaatcgaactcgtccaggacatttggatatacggcgaggtcttctgtcttgtgagaacatctctggacgtcctacttactacagcttccatctttcacctctgctgtatcagcctggacagatactatgctatctgttgccagcccttagtgtacaggaataagatgaccccccttcggatcgctctgatgctgggtggctgctgggtaatcccaacattcattagctttctacccataatgcagggctggaacaacatcggcattattgacctgatagagaagcgcaagtttaaccagaacagcaactctacatactgtgtattcatggtcaacaaaccgtacgctataacctgcagtgtcgttgcgttctatattcccttcctgctgatggtcctggcctactaccgaatatatgtgacagctaaggagcacgcccatcaaatccaaatgcttcagcgcgccggcgcgtcttcagaatcacgaccccagtctgccgaccagcattcaacccatcgcatgcgcaccgagacaaaggccgctaagactctgtgcattatcatgggatgtttctgcctttgttgggcacctttctttgtgaccaacatcgttgatccatttatcgattacaccgtgcctggtcaggtctggaccgccttcctgtggctgggatatattaactctggcctaaatccctttttgtacgcctttctgaacaaaagtttccggcgggccttcctcattatactctgctgcgacgacgagcggtataggcgaccatcaatcctagggcagaccgtgccctgtagcaccaccacgatcaatggttccactcacgttctctccgggtgctcacccgtttcctcctttttgctgttgttctgcaatcgacctgtgcctgtttag

SEQ ID NO: 261892 - DNA, 1137 bp, Artificial Sequence
  derived and/or modified sequence
atggataagctcgacgccaacgtgtctagcgaagagggcttcggtagtgttgagaaagtggtactcctgactttcttatccacagtgattctaatggcaatcctgggaaacctcctcgtcatggtggcagtgtgctgggatcgccaacttaggaagataaaaaccaattatttcatcgtgtctctggcctttgcagacctcctggtatcggtgctcgtcatgcctttcggcgcaatcgaactggtccaggacatctggatctacggagaagtgttctgtcttgttagaacgagcctcgatgtcctgctgaccaccgcatccattttccacctctgctgcatctcccttgacaggtactacgctatttgctgccagccactggtgtataggaacaagatgacccctctgcgcatagcactgatgcttgggggatgctgggttatccccactttcatctcctttttaccaatcatgcaggggtggaataacatcggaataatcgacctcatagagaaacggaagttcaaccagaatagcaattctacctattgtgtgtttatggtgaataaaccgtatgctattacttgcagtgttgtcgcattttatatcccatttctgttgatggtgttagcctactacaggatttacgttacagcaaaggaacatgcacaccagatccagatgttgcaacgcgctggcgcttcctccgagtctcggcctcagagtgctgaccagcattcgactcatcggatgcgcaccgagaccaaggccgctaagacgctgtgcatcattatgggctgcttttgcctatgttgggcaccgtttttcgtgaccaacatagttgaccctttcattgattacacagttcccggtcaagtctggaccgcgttcctttggcttggctacatcaactctggcctcaatcctttcctgtacgcctttctcaacaagtcctttaggagggcgttcctcataatcctgtgttgcgacgatgagaggtatcgcaggccctccattctaggacagaccgtcccatgctccaccaccacaattaacggctcaactcatgtgctttccggatgcagccccgtctcatcatttcttctgttgttctgcaataggcccgtgcccgtgtag

SEQ ID NO: 261893 - DNA, 1137 bp, Artificial Sequence
  derived and/or modified sequence
atggataaattggacgccaacgtgtcttcagaggaggggtttgggtccgtcgaaaaagtcgtcttattgacatttctctcaacggtaattctgatggccatcctcggtaatctcctggtgatggtcgccgtctgctgggatcgtcagctccggaaaattaagacgaattacttcatcgtttcactggcattcgctgacttactagtgtcagtgctagtaatgccattcggtgcaattgaattagtgcaagacatttggatttacggcgaagttttctgcttggtacgtacgtctctggacgtgcttctcactactgcctccatattccatctgtgctgcatctctctcgaccggtattacgccatctgttgccagcccctggtgtaccgtaataaaatgacccctctcagaatagctctgatgttgggagggtgctgggtgatccccacgttcattagtttcctgccaataatgcaggggtggaacaacataggtattatcgatctgatagagaagaggaaattcaaccagaattctaatagtacctactgcgttttcatggtgaacaaaccttatgcaataacatgctctgtcgtagccttttatatcccttttctcttgatggtcctggcttattaccggatttacgttacagctaaggaacatgcccaccagattcagatgcttcagcgagcaggggcttcttcagaatcaaggccccaaagcgccgaccagcatagcacccatcgtatgcgcacagagacaaaggcggcaaaaacactttgcatcattatgggctgcttttgcttgtgctgggctccattctttgtgaccaacattgtggatccatttattgactatactgttcctggtcaagtctggacggcttttctttggctcggctatattaacagcggtctgaacccatttttgtacgcttttctgaacaagagcttcaggcgtgccttcttgatcatcctgtgctgcgacgatgaacggtaccgccgtcctagtatcctgggccaaacagtaccttgctcaactactactatcaacggcagtacgcacgttctaagtggatgctctccagtcagctctttcttgctgctgttttgcaatcgccctgttcccgtctag

SEQ ID NO: 261894 - DNA, 1137 bp, Artificial Sequence
  derived and/or modified sequence
atggacaaactggacgctaacgtaagctctgaggaaggctttggctccgtggaaaaagtggtgcttctgacctttctcagcaccgtgatcctgatggcaatcctcggcaacctcctggtgatggtggcggtttgctgggaccgccagctccggaagatcaagaccaactatttcatcgtcagcctggctttcgccgatttgttggtgagcgtgctggtcatgcccttcggcgctatcgaactcgtgcaggatatctggatatatggggaggtcttctgtctggtgcgcacgtccctggatgtcctgctaaccactgcgagtattttccatctgtgttgcatcagtctcgatagatactacgcaatctgttgtcaacctctggtttataggaataaaatgaccccactgcggattgcactcatgttaggaggttgctgggtaatacctactttcatttcctttctgcctattatgcagggatggaacaatattgggataatcgatctcattgaaaagagaaagtttaatcagaatagtaacagtacttattgtgtcttcatggtgaacaaaccgtacgccattacctgttctgtggtggccttctatatcccatttcttctaatggtgctcgcgtactacaggatctatgtcacagcaaaagagcacgcccaccagattcaaatgttacagagagccggtgcatcatccgagtcgaggcctcagagtgccgatcagcattccacccacaggatgaggacggagactaaggctgctaaaaccctctgtatcatcatgggctgcttctgtctttgctgggcaccattttttgtaacaaatattgtagacccattcatcgattacacagtacctggccaggtgtggactgcattcctctggctggggtacattaactcgggcctgaacccattcctgtatgcttttctgaacaagtccttccgtcgggcatttctcatcatcttgtgttgtgacgatgagcgctatagacggccttctattctcggtcagactgtgccttgcagtaccactaccatcaacgggtccacacacgtactgtccggttgcagccccgtgagcagttttctgctgctcttctgcaacaggccagtacctgtctag

SEQ ID NO: 261895 - DNA, 1557 bp, Artificial Sequence
  derived and/or modified sequence
ggcgcaggcagcggctgggagcgcagcggcagcggcggcagcagaagctcggctcagcggctgggggtggccgctcgaatctgccagggcacctcgctccctcgcctctggcagcgggaccctgtgggcattgaaatccaactcactcatgcttatttcctgtaatggacaaacttgatgctaatgtgagttctgaggagggtttcgggtcagtggagaaggtggtgctgctcacgtttctctcgacggttatcctgatggccatcttggggaacctgctggtgatggtggctgtgtgctgggacaggcagctcaggaaaataaaaacaaattatttcattgtatctcttgcttttgcggatctgctggtttcggtgctggtgatgccctttggtgccattgagctggttcaagacatctggatttatggggaggtgttttgtcttgttcggacatctctggacgtcctgctcacaacggcatcgatttttcacctgtgctgcatttctctggataggtattacgccatctgctgccagcctttggtctataggaacaagatgacccctctgcgcatcgcattaatgctgggaggctgctgggtcatccccacgtttatttcttttctccctataatgcaaggctggaataacattggcataattgatttgatagaaaagaggaagttcaaccagaactctaactctacgtactgtgtcttcatggtcaacaagccctacgccatcacctgctctgtggtggccttctacatcccatttctcctcatggtgctggcctattaccgcatctatgtcacagctaaggagcatgcccatcagatccagatgttacaacgggcaggagcctcctccgagagcaggcctcagtcggcagaccagcatagcactcatcgcatgaggacagagaccaaagcagccaagaccctgtgcatcatcatgggttgcttctgcctctgctgggcaccattctttgtcaccaatattgtggatcctttcatagactacactgtccctgggcaggtgtggactgctttcctctggctcggctatatcaattccgggttgaacccttttctctacgccttcttgaataagtcttttagacgtgccttcctcatcatcctctgctgtgatgatgagcgctaccgaagaccttccattctgggccagactgtcccttgttcaaccacaaccattaatggatccacacatgtactaagtggctgttcccctgtctccagcttcctcctgctcttctgcaatagaccagttcctgtctaactctgaaagtgctctgtacaccgttctgcacaggggacatcatcaggaactcgagaaactgcccatacacaatgacccagaatccctggaatcatgcttctgattgaggacatggctcacaacttagccattcattcgcattcatgtttgcatgaacaggtcaccctggcatcacttctgaacctcatcaccaccagtgaggcatcaggtagtaggggctgagagcccagaggaggtacatggaggacagtgttgg

SEQ ID NO: 261896 - DNA, 1242 bp, Artificial Sequence
  derived and/or modified sequence
taatggacaaacttgatgctaatgtgagttctgaggagggtttcgggtcagtggagaaggtggtgctgctcacgtttctctcgacggttatcctgatggccatcttggggaacctgctggtgatggtggctgtgtgctgggacaggcagctcaggaaaataaaaacaaattatttcattgtatctcttgcttttgcggatctgctggtttcggtgctggtgatgccctttggtgccattgagctggttcaagacatctggatttatggggaggtgttttgtcttgttcggacatctctggacgtcctgctcacaacggcatcgatttttcacctgtgctgcatttctctggataggtattacgccatctgctgccagcctttggtctataggaacaagatgacccctctgcgcatcgcattaatgctgggaggctgctgggtcatccccacgtttatttcttttctccctataatgcaaggctggaataacattggcataattgatttgatagaaaagaggaagttcaaccagaactctaactctacgtactgtgtcttcatggtcaacaagccctacgccatcacctgctctgtggtggccttctacatcccatttctcctcatggtgctggcctattaccgcatctatgtcacagctaaggagcatgcccatcagatccagatgttacaacgggcaggagcctcctccgagagcaggcctcagtcggcagaccagcatagcactcatcgcatgaggacagagaccaaagcagccaagaccctgtgcatcatcatgggttgcttctgcctctgctgggcaccattctttgtcaccaatattgtggatcctttcatagactacactgtccctgggcaggtgtggactgctttcctctggctcggctatatcaattccgggttgaacccttttctctacgccttcttgaataagtcttttagacgtgccttcctcatcatcctctgctgtgatgatgagcgctaccgaagaccttccattctgggccagactgtcccttgttcaaccacaaccattaatggatccacacatgtactaagtggctgttcccctgtctccagcttcctcctgctcttctgcaatagaccagttcctgtctaactctgaaagtgctctgtacaccgttctgcacaggggacatcatcaggaactcgagaaactgcccatacacaatgacccagaatccctggaatcatgcttctga

SEQ ID NO: 261897 - DNA, 1326 bp, Artificial Sequence
  derived and/or modified sequence
atggacaaacttgatgctaatgtgagttctgaggagggtttcgggtcagtggagaaggtggtgctgctcacgtttctctcgacggttatcctgatggccatcttggggaacctgctggtgatggtggctgtgtgctgggacaggcagctcaggaaaataaaaacaaattatttcattgtatctcttgcttttgcggatctgctggtttcggtgctggtgatgccctttggtgccattgagctggttcaagacatctggatttatggggaggtgttttgtcttgttcggacatctctggacgtcctgctcacaacggcatcgatttttcacctgtgctgcatttctctggataggtattacgccatctgctgccagcctttggtctataggaacaagatgacccctctgcgcatcgcattaatgctgggaggctgctgggtcatccccacgtttatttcttttctccctataatgcaaggctggaataacattggcataattgatttgatagaaaagaggaagttcaaccagaactctaactctacgtactgtgtcttcatggtcaacaagccctacgccatcacctgctctgtggtggccttctacatcccatttctcctcatggtgctggcctattaccgcatctatgtcacagctaaggagcatgcccatcagatccagatgttacaacgggcaggagcctcctccgagagcaggcctcagtcggcagaccagcatagcactcatcgcatgaggacagagaccaaagcagccaagaccctgtgcatcatcatgggttgcttctgcctctgctgggcaccattctttgtcaccaatattgtggatcctttcatagactacactgtccctgggcaggtgtggactgctttcctctggctcggctatatcaattccgggttgaacccttttctctacgccttcttgaataagtcttttagacgtgccttcctcatcatcctctgctgtgatgatgagcgctaccgaagaccttccattctgggccagactgtcccttgttcaaccacaaccattaatggatccacacatgtactaagtggctgttcccctgtctccagcttcctcctgctcttctgcaatagaccagttcctgtctaactctgaaagtgctctatttctactttaattccactgtggcctgagagcagacattgtgtaatttctattcttttacatttgttaaggtacaccgttctgcacaggggacatcatcaggaactcgagaaactgcccatacacaatgacccagaatccctggaatcatgcttctgattgaggacatggctc

SEQ ID NO: 261898 - DNA, 1137 bp, Artificial Sequence
  derived and/or modified sequence
atggacaagctggacgccaacgtgagcagcgaggagggcttcggcagcgtggagaaggtggtgctgctgaccttcctgagcaccgtgatcctgatggccatcctgggcaacctgctggtgatggtggccgtgtgctgggacagacagctgagaaagatcaagaccaactacttcatcgtgagcctggccttcgccgacctgctggtgagcgtgctggtgatgcccttcggcgccatcgagctggtgcaggacatctggatctacggcgaggtgttctgcctggtgagaaccagcctggacgtgctgctgaccaccgccagcatcttccacctgtgctgcatcagcctggacagatactacgccatctgctgccagcccctggtgtacagaaacaagatgacccccctgagaatcgccctgatgctgggcggctgctgggtgatccccaccttcatcagcttcctgcccatcatgcagggctggaacaacatcggcatcatcgacctgatcgagaagagaaagttcaaccagaacagcaacagcacctactgcgtgttcatggtgaacaagccctacgccatcacctgcagcgtggtggccttctacatccccttcctgctgatggtgctggcctactacagaatctacgtgaccgccaaggagcacgcccaccagatccagatgctgcagagagccggcgccagcagcgagagcagaccccagagcgccgaccagcacagcacccacagaatgagaaccgagaccaaggccgccaagaccctgtgcatcatcatgggctgcttctgcctgtgctgggcccccttcttcgtgaccaacatcgtggaccccttcatcgactacaccgtgcccggccaggtgtggaccgccttcctgtggctgggctacatcaacagcggcctgaaccccttcctgtacgccttcctgaacaagagcttcagaagagccttcctgatcatcctgtgctgcgacgacgagagatacagaagacccagcatcctgggccagaccgtgccctgcagcaccaccaccatcaacggcagcacccacgtgctgagcggctgcagccccgtgagcagcttcctgctgctgttctgcaacagacccgtgcccgtgtag

SEQ ID NO: 261899 - protein, 271 aa, Artificial Sequence
  derived and/or modified sequence
MGIVCAQCSFILLLSIIRARPPPFLFCPLSSQRTESPYKPVHLGLGPTDKVAAIAMARIIDLVPWDDGSTHVYASPAILLPMERQRNQLAGVKQQLYHPALPTLRHMDRDTVKACLPDEHCQSTTYCRKDEFDNAHFTLLGVPNKPLQCLDITATGQKLRNRYHEGKLAPIAPGINRVDWPCFTRAIEDWSHFVSSAGEFKLPCLRKRAEGLSGYAVRYLKPDVTQTWRYCLSQNPSLDRYGQKPLPFDSLNTFRSFGSSYSRVNYLTPWH

SEQ ID NO: 261900 - DNA, 816 bp, Artificial Sequence
  derived and/or modified sequence
atgggaatcgtgtgcgcccagtgttcgtttattctgttgcttagtattataagggccaggccgccacctttcctgttttgcccactttcaagtcaaagaaccgagagcccctacaaacccgtgcatctcggactggggcctaccgataaagtggcggctatcgctatggctcgcataatcgatctggtgccttgggatgatggatctacccacgtctacgcaagccctgcaatcctgctgccaatggagcgccaacgcaatcagctagccggagtgaaacaacaattgtatcaccccgcattaccgaccttaaggcacatggaccgcgatacggttaaggcatgtctgcccgatgagcactgccagagtaccacatattgccggaaggatgaattcgataatgcgcatttcacgctgcttggcgtgccaaataaacctttgcaatgtctggacatcactgctactggccagaagctcaggaatcgatatcatgaggggaagttagcacctattgccccaggtattaatcgcgtggactggccctgcttcactcgcgcaatagaagattggtcacactttgtaagctccgcaggtgaatttaaactgccctgcctcagaaagagggcagaaggactgtccggttatgcagtgcggtacttgaagcccgatgtaacccagacctggcgttattgcctatcacagaatccctcactagatcgctatggtcagaagccgctgccctttgactccctcaatacctttagatcttttggatcttcgtactctcgcgttaactatttaacaccatggcactag

SEQ ID NO: 261901 - DNA, 816 bp, Artificial Sequence
  derived and/or modified sequence
atgggtattgtgtgcgcgcagtgttcattcatcctcttactgtcaattatccgcgcccggcctcccccatttctgttttgccctctctccagccagcgaacagagtccccctacaagccggtacatctgggcctgggccccacagacaaagttgccgctatagcaatggctcgcattatcgacctcgtcccatgggacgacgggagtacacatgtatacgcctcaccagctatcctccttcccatggaacgacagagaaaccaactcgcaggagtgaagcaacaactgtaccatcccgccctgcctactctgcgccacatggaccgcgacacggtaaaagcctgtctccctgatgagcattgtcagtcaaccacatactgcagaaaagatgaatttgataacgcccattttacgctgctgggggtccctaataagcccctgcaatgcctggatatcacggctaccggccagaaactgagaaaccgatatcacgagggaaaattggccccaatcgcacccggaattaatagagtcgactggccatgtttcaccagagccattgaagactggtcacattttgtgtcctcggcaggagagtttaagctgccttgtttacggaagcgcgccgaaggcctctcagggtacgcggttcgctaccttaaacctgacgttacacaaacctggcggtattgtctctctcagaacccatctctcgatagatatggacagaaaccactcccattcgactccctcaacacgttccgctcttttggttcttcttattcaagagtaaactatctgactccttggcattag

SEQ ID NO: 261902 - DNA, 1538 bp, Artificial Sequence
  derived and/or modified sequence
ggttgctaaggagtgggtgcctcagaatcaggctgcaatgggcattgtctgtgcacaatgttcctttattctgctgctgtccataataagggctcgtccacctcccttcctcttctgcccattgagcagtcaaagaactgaaagtccttataagcctgtgcacctgggcctgggccctacagataaggtagctgctattgctatggcccgcatcattgacctggtgccctgggacgatggctccacacatgtgtatgcctccccggccatcctgcttcccatggagcggcagcgcaaccagctggcgggcgtgaagcagcagctctaccacccagccctgcccaccctgcgccacatggacagggacaccgtcaaggcctgccttcctgatgagcactgccagtccaccacctactgccgcaaagatgaatttgacaacgcccattttacactccttggggtccccaacaaacccctgcagtgtttggacatcaccgccacaggccagaagcttcgcaacaggtaccacgagggaaagctggcgcccatcgcgccaggcatcaaccgagtggactggccctgcttcacgcgcgccatcgaggactggtcccacttcgtgtcctcggccggggagttcaagctgccttgcctgaggaagcgagcggagggtctcagcggctacgcggtgcggtacttgaagcccgacgtgacccagacctggcggtactgcctcagccagaaccccagcctggaccgctacggacagaagcccctgcctttcgactccctgaacactttccgaagcttcggctccagctacagtcgtgtcaactacctgaccccctggcattaatctctggaaaggaggctgactcccaggctgccggacggtgccacctcaggtcccctggccagacagaggacttatggtggcaccagccatctccccaggagttcagcctaactagaaataaacctaatgctcccttagagacacacgcaattgtctctgtctgtgtgtgttgcacagcctgggagagggtcagggccacaggatgacagtatcttacccttgcccgtccccggccaactcctggaggactggtggggggttggagaaaaatgtctggtgacctggtttgagagtcagggtgtaagccgcaaggtccagccagaattgagatccaagagcaagagatgtgctccagccccttgcctgcagccccacacccaagccccctccatttcagatcctgaatttgagccctaagaagaaagggagagggctagaaagctatttttaggtgcctttttgaagctcttgtcatactggtgtgctctggggggcttccctgtgcctggggtccccctgaaggtgtgggagcaggctggggcaaggggagctggccaggcctatggccttgattcctgtgacgcaacagaatgtagagtctaaacttgcatgagatgcatgaagccactcagagaagaaagttccccgctctccaaagcaccaccaataaacatgtcatttaagc

SEQ ID NO: 261903 - DNA, 816 bp, Artificial Sequence
  derived and/or modified sequence
atgggaatagtttgcgcacagtgttcattcatattgctgctctcaataatccgcgccagaccccccccctttctcttttgccccttgagttcccagcgcacagaatctccgtacaaacctgtccacctgggtttaggacctacagacaaagtagcagccattgccatggcaagaattatcgacctggttccgtgggacgacggcagtacacatgtctacgcatcccccgcaatcctgttgccaatggaacgccaacggaatcagctagctggagtgaagcagcagctataccaccccgcacttccaacactgaggcacatggaccgcgataccgttaaggcatgtctaccagacgaacattgtcaaagtaccacttactgtcgcaaagacgagtttgacaacgcccactttaccctgctgggagtcccgaataagccacttcaatgcctcgacatcacggccactgggcagaagcttaggaaccgctatcatgaaggcaagctcgcacccatcgctcctggaattaacagagttgactggccatgtttcacgcgcgctatcgaggattggtcccatttcgtgtcatccgccggggaattcaagctgccttgtctgcgcaagcgcgctgagggtctatccggatacgcagtcagatatctcaagcctgacgtgacacaaacatggagatactgtctgtcacagaacccatccttagatagatacggccagaagcctttacctttcgatagtcttaacacctttcgcagttttggctcttcctattcccgcgtcaactacctaacaccctggcactag

SEQ ID NO: 261904 - DNA, 816 bp, Artificial Sequence
  derived and/or modified sequence
atgggcatcgtgtgcgcccagtgcagcttcatcctgctgctgagcatcatcagagccagacccccccccttcctgttctgccccctgagcagccagagaaccgagagcccctacaagcccgtgcacctgggcctgggccccaccgacaaggtggccgccatcgccatggccagaatcatcgacctggtgccctgggacgacggcagcacccacgtgtacgccagccccgccatcctgctgcccatggagagacagagaaaccagctggccggcgtgaagcagcagctgtaccaccccgccctgcccaccctgagacacatggacagagacaccgtgaaggcctgcctgcccgacgagcactgccagagcaccacctactgcagaaaggacgagttcgacaacgcccacttcaccctgctgggcgtgcccaacaagcccctgcagtgcctggacatcaccgccaccggccagaagctgagaaacagataccacgagggcaagctggcccccatcgcccccggcatcaacagagtggactggccctgcttcaccagagccatcgaggactggagccacttcgtgagcagcgccggcgagttcaagctgccctgcctgagaaagagagccgagggcctgagcggctacgccgtgagatacctgaagcccgacgtgacccagacctggagatactgcctgagccagaaccccagcctggacagatacggccagaagcccctgcccttcgacagcctgaacaccttcagaagcttcggcagcagctacagcagagtgaactacctgaccccctggcactag

SEQ ID NO: 261905 - DNA, 816 bp, Artificial Sequence
  derived and/or modified sequence
atgggtattgtatgtgcccagtgttctttcatactgttgctgtccattattagagccagaccgccacctttcctcttttgcccgttgagcagtcagcgcactgagtccccctacaagcccgtgcacttaggccttgggcccacggataaagtggcagccattgccatggcccggattatcgacctggtgccttgggacgacggatctactcatgtttacgcttctcctgcgatcttgttgcccatggagagacagagaaaccagctggccggcgtgaagcaacagctgtaccatcctgccctccccacgctaaggcatatggaccgggacaccgtgaaagcatgtctcccggatgaacattgccagtcgacaacctactgtcgcaaggatgaatttgataatgctcattttaccttgctgggggtgcctaacaaaccccttcagtgtctcgacataaccgcaaccggccagaaactgcgcaatcgataccatgagggcaaactagctccaatagccccagggatcaacagggtggattggccctgtttcactagagccatagaggattggtctcacttcgtgagctccgccggagaatttaaactgccatgtctccgaaagcgcgcggaagggctttcgggctacgccgttcggtatctgaagcctgatgttacgcagacctggcgatactgtctgtcacagaatcccagtctggatcgctacggccagaaacccctccctttcgattcactcaataccttcaggtcattcggatcctcatactcccgagtgaattatctcaccccttggcattag

SEQ ID NO: 261906 - DNA, 816 bp, Artificial Sequence
  derived and/or modified sequence
atgggcatcgtgtgtgcccagtgcagcttcatcctgctgctgagcatcatccgggcccggcccccacccttcctgttctgccccctgagcagccagaggacagagagcccctacaagcctgtgcacctgggcctgggccccacagacaaggtggccgccatcgccatggcccgcatcatcgacctggtgccctgggatgatggcagcacccacgtgtatgccagccctgccatcctgctgcccatggagcggcagaggaaccagctggccggcgtgaagcagcagctgtaccacccagccctgcccaccctgcggcacatggaccgggacacagtgaaggcctgcctgcctgatgagcactgccagagcaccacctactgcaggaaggatgaatttgacaatgcccacttcaccctgctgggcgtgcccaacaagcccctgcagtgcctggacatcacagccaccggccagaagctgaggaaccgctaccacgagggcaagctggcccccatcgcccctggcatcaacagagtggactggccctgcttcacccgggccatcgaggactggagccactttgtgagcagcgctggggagttcaagctgccctgcctgaggaagagagctgagggcctgagcggctatgctgtgcgctacctgaagccagatgtgacccagacctggagatactgcctgagccagaaccccagcctggacagatatggccagaagcccctgccctttgacagcctgaacaccttccgcagctttggcagcagctacagccgggtgaactacctgaccccctggcactag

SEQ ID NO: 261907 - DNA, 816 bp, Artificial Sequence
  derived and/or modified sequence
atgggcatcgtgtgcgcccagtgcagcttcatcctgctgctgagcattataagggccaggccccctcccttcctcttctgtcccctgtcctcacagcggacagaatcaccttataagcctgtgcacctgggtttgggccccaccgacaaggtggctgcaatcgccatggcccggatcatcgacttggtcccgtgggacgatggctctactcacgtttacgcatctccggccatacttctgcctatggagaggcagaggaaccagcttgctggagtaaagcagcaactatatcaccccgctctgcccacactgcgccatatggaccgagacacagtcaaagcctgtctccctgatgaacattgccagagcaccacctattgtaggaaagacgagttcgacaacgcacatttcaccctgcttggtgtgcccaacaagccactgcagtgcctcgacattactgccacaggacaaaaactgcggaatagatatcacgaggggaaacttgcacccattgctccggggatcaatagggtagattggccatgctttactcgggctattgaggactggtcccattttgtgtcaagtgcaggggagttcaagttaccgtgccttagaaagcgggccgaaggactgtcgggatacgccgtcaggtatctgaagccggacgtgacccagacgtggcggtattgtctgtcccagaatccatcactggatcgctacggtcagaagccactgcctttcgactcgttgaacacgttccggtcgtttggaagttcctatagtagagtcaactatctgactccttggcactag

SEQ ID NO: 261908 - RNA, 816 nt, Artificial Sequence
  derived and/or modified sequence
auggguauugugugcgcgcaguguucauucauccucuuacugucaauuauccgcgcccggccucccccauuucuguuuugcccucucuccagccagcgaacagagucccccuacaagccgguacaucugggccugggccccacagacaaaguugccgcuauagcaauggcucgcauuaucgaccucgucccaugggacgacgggaguacacauguauacgccucaccagcuauccuccuucccauggaacgacagagaaaccaacucgcaggagugaagcaacaacuguaccaucccgcccugccuacucugcgccacauggaccgcgacacgguaaaagccugucucccugaugagcauugucagucaaccacauacugcagaaaagaugaauuugauaacgcccauuuuacgcugcugggggucccuaauaagccccugcaaugccuggauaucacggcuaccggccagaaacugagaaaccgauaucacgagggaaaauuggccccaaucgcacccggaauuaauagagucgacuggccauguuucaccagagccauugaagacuggucacauuuuguguccucggcaggagaguuuaagcugccuuguuuacggaagcgcgccgaaggccucucaggguacgcgguucgcuaccuuaaaccugacguuacacaaaccuggcgguauugucucucucagaacccaucucucgauagauauggacagaaaccacucccauucgacucccucaacacguuccgcucuuuugguucuucuuauucaagaguaaacuaucugacuccuuggcauuag

SEQ ID NO: 261909 - RNA, 816 nt, Artificial Sequence
  derived and/or modified sequence
augggaauaguuugcgcacaguguucauucauauugcugcucucaauaauccgcgccagacccccccccuuucucuuuugccccuugaguucccagcgcacagaaucuccguacaaaccuguccaccuggguuuaggaccuacagacaaaguagcagccauugccauggcaagaauuaucgaccugguuccgugggacgacggcaguacacaugucuacgcaucccccgcaauccuguugccaauggaacgccaacggaaucagcuagcuggagugaagcagcagcuauaccaccccgcacuuccaacacugaggcacauggaccgcgauaccguuaaggcaugucuaccagacgaacauugucaaaguaccacuuacugucgcaaagacgaguuugacaacgcccacuuuacccugcugggagucccgaauaagccacuucaaugccucgacaucacggccacugggcagaagcuuaggaaccgcuaucaugaaggcaagcucgcacccaucgcuccuggaauuaacagaguugacuggccauguuucacgcgcgcuaucgaggauuggucccauuucgugucauccgccggggaauucaagcugccuugucugcgcaagcgcgcugagggucuauccggauacgcagucagauaucucaagccugacgugacacaaacauggagauacugucugucacagaacccauccuuagauagauacggccagaagccuuuaccuuucgauagucuuaacaccuuucgcaguuuuggcucuuccuauucccgcgucaacuaccuaacacccuggcacuag

SEQ ID NO: 261910 - DNA, 13729 bp, Artificial Sequence
  derived and/or modified sequence
ttattttttcaaatggtgtagccgccggaggtgcggtgctcagttcttggaaggggcccggatgtactgaggatgcgttacagtttcactcgaggaggcagtagtggaaaggagcagtttttggggtttgatgccataatgggaatcaggtaatcgtcggcggggaagaagaaacgctgcagaccacggcttcctcgaatcttgcgcgaaagccgccggcctcggaggagggattaatccagacccgccggggggtgttttcacatttcttcctcttcgtggctgctcctcctattaaaaccatttttggtccatggtcaatgagaatacgaggatgtacattccagaggaaaaccaccaaggttccaactatgggagcccacgccccgcccatgccaacatgaatgccaatgcggcagcggggctggcccctgagcacatccccaccccgggggctgccctgtcgtggcaggcggccatcgacgcagcccggcaggctaagctgatgggcagcgctggcaatgcgaccatctccacagtcagctccacgcagcggaagcggcagcaatatgggaaacccaagaagcagggcagcaccacggccacacgcccgccccgagccctgctctgcctgaccctgaagaaccccatccggagggcctgcatcagcattgtcgaatggaaaccatttgaaataattattttactgactatttttgccaattgtgtggccttagcgatctatattccctttccagaagatgattccaacgccaccaattccaacctggaacgagtggaatatctctttctcataatttttacggtggaagcgtttttaaaagtaatcgcctatggactcctctttcaccccaatgcctacctccgcaacggctggaacctactagattttataattgtggttgtggggctttttagtgcaattttagaacaagcaaccaaagcagatggggcaaacgctctcggagggaaaggggccggatttgatgtgaaggcgctgagggccttccgcgtgctgcgccccctgcggctggtgtccggagtcccaagtctccaggtggtcctgaattccatcatcaaggccatggtccccctgctgcacatcgccctgcttgtgctgtttgtcatcatcatctacgccatcatcggcttggagctcttcatggggaagatgcacaagacctgctacaaccaggagggcatagcagatgttccagcagaagatgacccttccccttgtgcgctggaaacgggccacgggcggcagtgccagaacggcacggtgtgcaagcccggctgggatggtcccaagcacggcatcaccaactttgacaactttgccttcgccatgctcacggtgttccagtgcatcaccatggagggctggacggacgtgctgtactgggtcaatgatgccgtaggaagggactggccctggatctattttgttacactaatcatcatagggtcattttttgtacttaacttggttctcggtgtgcttagcggagagttttccaaagagagggagaaggccaaggcccggggagatttccagaagctgcgggagaagcagcagctagaagaggatctcaaaggctacctggattggatcactcaggccgaagacatcgatcctgagaatgaggacgaaggcatggatgaggagaagccccgaaacatgagcatgcccaccagtgagaccgagtccgtcaacaccgaaaacgtggctggaggtgacatcgagggagaaaactgcggggccaggctggcccaccggatctccaagtcaaagttcagccgctactggcgccggtggaatcggttctgcagaaggaagtgccgcgccgcagtcaagtctaatgtcttctactggctggtgattttcctggtgttcctcaacacgctcaccattgcctctgagcactacaaccagcccaactggctcacagaagtccaagacacggcaaacaaggccctgctggccctgttcacggcagagatgctcctgaagatgtacagcctgggcctgcaggcctacttcgtgtccctcttcaaccgctttgactgcttcgtcgtgtgtggcggcatcctggagaccatcctggtggagaccaagatcatgtccccactgggcatctccgtgctcagatgcgtccggctgctgaggattttcaagatcacgaggtactggaactccttgagcaacctggtggcatccttgctgaactctgtgcgctccatcgcctccctgctccttctcctcttcctcttcatcatcatcttctccctcctggggatgcagctctttggaggaaagttcaactttgatgagatgcagacccggaggagcacattcgataacttcccccagtccctcctcactgtgtttcagatcctgaccggggaggactggaattcggtgatgtatgatgggatcatggcttatggcggcccctcttttccagggatgttagtctgtatttacttcatcatcctcttcatctgtggaaactatatcctactgaatgtgttcttggccattgctgtggacaacctggctgatgctgagagcctcacatctgcccaaaaggaggaggaagaggagaaggagagaaagaagctggccaggactgccagcccagagaagaaacaagagttggtggagaagccggcagtgggggaatccaaggaggagaagattgagctgaaatccatcacggctgacggagagtctccacccgccaccaagatcaacatggatgacctccagcccaatgaaaatgaggataagagcccctaccccaacccagaaactacaggagaagaggatgaggaggagccagagatgcctgtcggccctcgcccacgaccactctctgagcttcaccttaaggaaaaggcagtgcccatgccagaagccagcgcgtttttcatcttcagctctaacaacaggtttcgcctccagtgccaccgcattgtcaatgacacgatcttcaccaacctgatcctcttcttcattctgctcagcagcatttccctggctgctgaggacccggtccagcacacctccttcaggaaccatattctgttttattttgatattgtttttaccaccattttcaccattgaaattgctctgaagatcctaggcaatgcagactatgtcttcactagtatctttacattagaaattatccttaagatgactgcttatggggctttcttgcacaagggttctttctgccggaactacttcaacatcctggacctgctggtggtcagcgtgtccctcatctcctttggcatccagtccagtgcaatcaatgtcgtgaagatcttgcgagtcctgcgagtactcaggcccctgagggccatcaacagggccaaggggctaaagcatgtggttcagtgtgtgtttgtcgccatccggaccatcgggaacatcgtgattgtcaccaccctgctgcagttcatgtttgcctgcatcggggtccagctcttcaagggaaagctgtacacctgttcagacagttccaagcagacagaggcggaatgcaagggcaactacatcacgtacaaagacggggaggttgaccaccccatcatccaaccccgcagctgggagaacagcaagtttgactttgacaatgttctggcagccatgatggccctcttcaccgtctccaccttcgaagggtggccagagctgctgtaccgctccatcgactcccacacggaagacaagggccccatctacaactaccgtgtggagatctccatcttcttcatcatctacatcatcatcatcgccttcttcatgatgaacatcttcgtgggcttcgtcatcgtcacctttcaggagcagggggagcaggagtacaagaactgtgagctggacaagaaccagcgacagtgcgtggaatacgccctcaaggcccggcccctgcggaggtacatccccaagaaccagcaccagtacaaagtgtggtacgtggtcaactccacctacttcgagtacctgatgttcgtcctcatcctgctcaacaccatctgcctggccatgcagcactacggccagagctgcctgttcaaaatcgccatgaacatcctcaacatgctcttcactggcctcttcaccgtggagatgatcctgaagctcattgccttcaaacccaagggttactttagtgatccctggaatgtttttgacttcctcatcgtaattggcagcataattgacgtcattctcagtgagactaatcactatttctgtgatgcatggaatacatttgacgccttgattgttgtgggtagcattgttgatatagcaatcaccgaggtaaacccagctgaacatacccaatgctctccctctatgaacgcagaggaaaactcccgcatctccatcaccttcttccgcctgttccgggtcatgcgtctggtgaagctgctgagccgtggggagggcatccggacgctgctgtggaccttcatcaagtccttccaggccctgccctatgtggccctcctgatcgtgatgctgttcttcatctacgcggtgatcgggatgcaggtgtttgggaaaattgccctgaatgataccacagagatcaaccggaacaacaactttcagaccttcccccaggccgtgctgctcctcttcaggtgtgccaccggggaggcctggcaggacatcatgctggcctgcatgccaggcaagaagtgtgccccagagtccgagcccagcaacagcacggagggtgaaacaccctgtggtagcagctttgctgtcttctacttcatcagcttctacatgctctgtgccttcctgatcatcaacctctttgtagctgtcatcatggacaactttgactacctgacaagggactggtccatccttggtccccaccacctggatgagtttaaaagaatctgggcagagtatgaccctgaagccaagggtcgtatcaaacacctggatgtggtgaccctcctccggcggattcagccgccactaggttttgggaagctgtgccctcaccgcgtggcttgcaaacgcctggtctccatgaacatgcctctgaacagcgacgggacagtcatgttcaatgccaccctgtttgccctggtcaggacggccctgaggatcaaaacagaagggaacctagaacaagccaatgaggagctgcgggcgatcatcaagaagatctggaagcggaccagcatgaagctgctggaccaggtggtgccccctgcaggtgatgatgaggtcaccgttggcaagttctacgccacgttcctgatccaggagtacttccggaagttcaagaagcgcaaagagcagggccttgtgggcaagccctcccagaggaacgcgctgtctctgcaggctggcttgcgcacactgcatgacatcgggcctgagatccgacgggccatctctggagatctcaccgctgaggaggagctggacaaggccatgaaggaggctgtgtccgctgcttctgaagatgacatcttcaggagggccggtggcctgttcggcaaccacgtcagctactaccaaagcgacggccggagcgccttcccccagaccttcaccactcagcgcccgctgcacatcaacaaggcgggcagcagccagggcgacactgagtcgccatcccacgagaagctggtggactccaccttcaccccgagcagctactcgtccaccggctccaacgccaacatcaacaacgccaacaacaccgccctgggtcgcctccctcgccccgccggctaccccagcacggtcagcactgtggagggccacgggccccccttgtcccctgccatccgggtgcaggaggtggcgtggaagctcagctccaacagggaaaggcacgttccgatgtgtgaggatctggagctcaggagggattcaggctcagcagggactcaggctcactgccttctgctcaggaaagcaaacccctctaggtgccactcccgggagagccaggcagccatggcgggtcaggaggagacgtctcaggatgagacctatgaagtgaagatgaaccatgacacggaggcctgcagtgagcccagcctgctctccacagagatgctctcctaccaggatgacgaaaatcggcaactgacgctcccagaggaggacaagagggacatccggcaatctccgaagaggggtttcctccgctctgcctcactaggtcgaagggcctccttccacctggaatgtctgaagcgacagaaggaccgagggggagacatctctcagaagacagtcctgcccttgcatctggttcatcatcaggcattggcagtggcaggcctgagccccctcctccagagaagccattcccctgcctcattccctaggccttttgccaccccaccagccacacctggcagccgaggctggcccccacagcccgtccccaccctgcggcttgagggggtcgagtccagtgagaaactcaacagcagcttcccatccatccactgcggctcctgggctgagaccacccccggtggcgggggcagcagcgccgcccggagagtccggcccgtctccctcatggtgcccagccaggctggggccccagggaggcagttccacggcagtgccagcagcctggtggaagcggtcttgatttcagaaggactggggcagtttgctcaagatcccaagttcatcgaggtcaccacccaggagctggccgacgcctgcgacatgaccatagaggagatggagagcgcggccgacaacatcctcagcgggggcgccccacagagccccaatggcgccctcttaccctttgtgaactgcagggacgcggggcaggaccgagccgggggcgaagaggacgcgggctgtgtgcgcgcgcggggtcgaccgagtgaggaggagctccaggacagcagggtctacgtcagcagcctgtagtgggcgctgccagatgcgggcttttttttatttgtttcaatgttcctaatgggttcgtttcagaagtgcctcactgttctcgtgacctggagttaaccggaacagcgtcttcattcatttctgttgggaccagacgcggagcctgggtgcgcgagccgccctccgggaggaaggcgcccggctgcgtctgcagaggcggggagaggaggcggcgagggtcccggggcgcgaggaaggcgcctgccctctcccagctcgcaggccccgggcccggccgcgcctccgcggggagagcaccccggcttcccgcgcgccctcaccaaaaggaccctacagcaaacgggtgtctttcgactctgcttgtagaaaccatttgcacatattctgtacgagcctcgctgtctccctagagccagggccctgcggatttggagaagggagcggggcaggacttccaggaggaccccaacccggcccggagagggaggaggaggcctccaggggcgcggagctctggggatgggcgtcgggccggcagtggtgcggctcactccgtccctgcccacctgcgacgggatcccccgaccggcacgggccacgccgagctcccggccagccgccggcccgcaggcagcgcgagggaggagctgcgccgccggctccgcccaaccaggtggtgctgagcttccgctgagcgctcttttgttttgtggtttgacacttttcttgacagcatgttgcagtttcttttcggttttggttttttttaaatgttttattttgctttcccagcgggaggggaggaagaagagtgtttacaaagtcctgtagccccctcacctttctgttttcacttttgccaatgtacatcgggtttggttttcttgtattatttaaacggttgtggtttcctttttccacggaggttcaatagaagccgctgcaggagagttttaccaaccattgtgtatgcccaataatttgttatcatttccttaggtagtaacctatttttgttctggtttggttcggttatctaatggaaaggtaactggcaatgcacttgatgtggtcttgcacatgtgggtgatagagttgggttcctttttatgctgggtgtacaggtgggtttgggagagaggagcatgcgcgagagagtctccgagtgtgtgcgacgcgtgtgtgtgtggtgggttgtctgtgtgcatatgtcctgcccgtgtatatgcacccacaccatgtgcccgtgcacaccagtgactacgcagtcccccctttctggtttagctgtgggaagatctgaatctggggccgtttgaaagcaaaaacaaaccactgtctctgcttctgaaacgggaatcagtaactctttgcattttctgtcccacaagatatgcaaaaacaatgcaataatattcatttaaaaatacaattgtgagttgtgttggcattaaaactgtattttaaaaaaagacagaaatttaagggaaaaacacaagaaggcattttgcttcaatatattccgtgtaatgttttattgcattgataatgtttctgttgaagaaaccgttatacttgaattcaggtcagtttcagtatttttcaaatatttttttaaaactgaattgcaattgtgccaagcgaatataatgaattgaattaagttggttttcggattcacttcttgtatattttgctgcatgtaaagtaaatcattttgtatttggagtgtgacaagctttacctttgaactcaagtgcttttctatatgtggttgggggaaagggaacaagttttctttagtttgcacaatgagcaaaggtatcaccagtgtagtcattattctgctctccacaaacaggtttggacattactgttttgcatatcttgtgtttgcttacatttccctcaatttttccaaaatcgtttgctgggtatgtttgtaccgcctcttgctgtgagagaccaggacctattttattccagtcttcactctgtccactctgctctggtcatctgatttggtacttctccaagaacagcccttcactgtgaggtgcagggaggcgttctgatgagccctcagtcactgggccgtcatccgcatcccccatggaagaggtagctggctttcccttcccttccaccacacggaattttctctttggcttccttaggaaagtgtacactaaccgggaggataaaattaaagtcaggctgcttggagggaggggcatcctcacttccggattcttgttgctctacccaacaaggacagcaggggctcgagaaaggaactggtgaaaccctgatccatctgaaagtcaactctgcgtgctcctttctccatcccttcctcactctggagcagcctttccttcaggcttgccctaatgtttgggctgccggggagggggccaggacaagggaagaggcatccggagctcacagtgggggtgggaacagatttttgtgggggcatctctaatgctcacttatatctccctagaacatcactcttttggtgctgtgtccttcaaatgtatgtcaacagtggtggctgaaaagggactgctttggggaaaacaggacccaaccattcacccagaattgacccattaaatctcttccagtcctagtgttccctgagcccctcttggcacatatataagtaagctagaaattacaataagggacagtccattcctctatgacagcttgctggactgattcatgacaaagtggagaaatgtactcaatactccccggttaacacagtctagaaacagagtttctttatggatatccacacccaagtcatccaaactttcttgattccttttcactgccatcaaggtcctctagaaattgagtttaggtatcatcctttgaaaagttcccaagatttctaccaggaggtacacacaggcgttccctgtctagggcaggaggactatcctagcttgaccttctgatccactagaataagactggcgtatgatgcctgtcatcagaacagactggcacaagtagtgacatcaatgaaccacagcacaatcttccaagtgatgtctactctccacctaaaatggaattttccccatgaccttgtaaaacataattgtcacatcttccatacccctcctgacagcccccaagtgtcaggagaaaacagtcaggggctaagggcccaagggacttgaagaaacaacagtttaaggtctgcagtttggtcaacttaattcttgtcctccgaccagccctgcctctttcatttccagaccttggagaatttttcccagctttgattcagaaggtactagttataacccctttccttcttcttaatccaataggcctcactctcactgggaaatccactcaaaggaacaaggcaatgtctctcattctatttcccagttccaaattccaggtgcttgtctggagtgaagctacccgttactttctcccagcttttctccacccagcatgtctcctgcccatgcagctgaagacagtggggcaacctcaggagaagcagacctttccatgcccaagttcatctcctgagcaacagtgacacctagaaaatgaggactttggaagtcacccaaaagatggtggctactttatggagtcctgaagatacacagccaccactcctaaaggcaaagaaagaaaacacgaatgtaggtcagggatagagtggaaccctggtcatcggggtttttagcctcatcgtgggaaaggtggtaaaggaggatgatggcatctccatccctagaggccaagaattgaaatatcattgtcaaggattagaaacaattcagcaaagaggccacaaaaagggcctgctgactcccagaagacctctttaaaccccaggggaggcaaatacttgctgatggagtctgggccgtttccatattttaaagaagacctgcctctggggcaaatgtcagcacagagaggactgggaggagaatggaggcaagaaaagggcatattttgactccctctgtgcctcttcccagttcatggaaggatgtgttcagcttacccacccacagtgaccagtgtggtggagccgctgacatctcaaggatctatttgggaaggtgagaagagtactcattccatctgggggtgttgttccagccacatcagcctacctggtgggatgtgggggtgtctgccaccctgtcccccctctgctgatgtccctcccctcaggctgtccaggtgccacctgacacaggctgctgtgcaaagacaggcggggaagcccaaacctcactcccagggaggccctcagccgccagagtccaggttctccagaggctacgatttgaggaggttgagggggaagacaggagggaaagaaaagtcctacaactgtcaggaatggggcacctttccctgtccctaagcaaagctccctcttcccactgccctccccagccccagctccctgtcctccccaacacctagtgagaaagacggtgcgtggaagggagtcccatgggcagatgcttacacgacctctttgtgaagcctcttctgggtttaacttcattcatcaatttattcttatgtcaaagcaatgaaacttttctttctggagccagataccaatacaacaggtgaacgggtttctgccacatctctacattgacgggggatgcttgaacaacccccctcactacacagacacacaccgttaaggcacaagggctggggttgagctctagatgagggactttcctgctcctgcaagggtgagcactgtatacacagacaaggagggtgcagtagagtgactcccttggatggaagtagtaccatcagaacctactattattatgacataaattctatttacatacattgagagaatactacaatcaacactttttcctgggatgactttaagaggtttgagccacagcacctgaagtggcaaagatccatggtctttgtagggtattagagaactcttccagtcacctctgaaagcactctagatcttgcagctgagtggatgaagtgtaacaaatctgttgcacgctgagaggagtcagaattagcatttttcatgaaagttccccacgtctctactaagaatgaggaagaaaagactaagactaggtaattacacagaggcttgaaatgttacatcaccagagccaagtcctctcccttcagatcagttactggctgctacacagggacacccccaccttttcagggcatcccatgcactccacttctcaggatctaaggaatttgactttgtagggatcccagaaagggcactgtgccacttcccctggtgtgaatcagacatacattgtacattcatttctaaaattcactcatgcacctcaaaccaaggtcattatccaaaaaaaaaaaaaaaaagctctgggtggaagagtttgtaagttttaagagagggtcatttctatgtgaggaaatgcagaaatggacagaatgattcttattcactgtttgggtctggagaattcccattgtggaaatcttagagatctcaagtttattaccaagggaataaggaaaaaaaggtgagcaggcaccaggccaagcagtggctcccttgccaaggaacctgaggctgcaggtttcagggacccccttgaagaaacctctcctggccattggccaggagaaaagagaagtctctcctgtagagtcacaagagaagcaaaagagggtgggtcactgggtcctggacatagcccccaaccccaagacttcccaatatggagaaactacaccaatgtttaaaaggggaaaaggaaagaacttgtacatcaagggaagatgatttgtaaacacacagtcctgtgcagaaagatccccttcaggaggtgtctccagcatcccaaagctgtgcgcaccttctcttttcctgcctcaggccacctatgcatccagctgcagcccatacccacacctgaaatccatctcttgaatcccagccaggttatataccaccccattgccatgtcctgtcctggccagaatgcatgctgttcccccaagcctcgtgggagtgaggccatgggaaacagagatgagcatgtctggacaagtctgtgatggtagtggatgagaataacccatggcaaaacacgcacattcattaagaaatagggcgacagattccccgttggtgaagcactgaaaggtctattactctcataatattgctgttttattttaatccaccagagctaccatgcaaaactttcctcctgtgaaacgctccagataaagctcctctaatctccccttccctcatgtcctccagctcaaacccaccttcatcccccaaaccaatctgtatcatgcctgttatcagagaggcacagaaagatgggcagtgcctccgttgtcaccattccccacacccctacacacccccacaccctcccctccaggctccacgacttcacagtcttactgttgtaaatatcattgtacagtttgtaatcctcaaataatcccattgtcagaggcctcgcctgatgggccttctcaccctcgagaaaggccagggaatctagaaggggcaacccttcaaggagagcttcagggtcatctctgtgtgagacactattgtatattcctgtaagattgcatttttatctaaggaatgatgttatttaaaaaacaaacaaaaaacacaaaaaataagaattgcaaataaatttcttaacaatgtct

SEQ ID NO: 261911 - protein, 84 aa, Artificial Sequence
  derived and/or modified sequence
PELQVCVFCRNNKEAMALYTTHILKGPDGRVLCPVLRRYTCPLCGASGDNAHTIKYCPLSKVPPPPARPPPRSARDGPPGKKLR

SEQ ID NO: 261912 - protein, 292 aa, Artificial Sequence
  derived and/or modified sequence
MEAFPWAPRSPRRGRAPPPMALVPSARYVSAPGPAHPQPFSSWNDYLGLATLITKAVDGEPRFGCARGGNGGGGSPPSSSSSSCCSPHTGAGPGALGPALGPPDYDEDDDDDSDEPGSRGRYLGSALELRALELCAGPAEAGLLEERFAELSPFAGRAAAVLLGCAPAAAAAATTTSEATPREERAPAWAAEPRLHAASGAAAARLLKPELQVCVFCRNNKEAMALYTTHILKGPDGRVLCPVLRRYTCPLCGASGDNAHTIKYCPLSKVPPPPARPPPRSARDGPPGKKLR

SEQ ID NO: 261913 - DNA, 255 bp, Artificial Sequence
  derived and/or modified sequence
cccgaactccaggtgtgcgtgttttgccgtaacaacaaggaagccatggccttgtatactacacatatactgaaggggcctgacggtcgggtcctgtgccctgtgttgcgccgatatacttgcccactgtgtggagcttcgggcgataacgcccacaccataaagtattgtcctctgtcaaaggtcccaccccctcctgccaggccccccccacgttccgctagagacggtccacctggtaaaaagcttagatag

SEQ ID NO: 261914 - DNA, 879 bp, Artificial Sequence
  derived and/or modified sequence
atggaggctttcccttgggcccctcgtagtccccggcgggggcgggcgccccctcctatggcgctggtcccaagtgcaaggtatgttagcgccccaggtcccgcccacccacaaccgttcagctcatggaacgattatctcggtctggccaccttgatcacgaaggccgtggacggtgagccccgcttcggttgtgcgaggggcgggaatgggggcggcggcagccccccgagcagctctagttcttcctgctgtagcccgcacaccggagcaggccctggggccctcggacccgcccttgggccacctgactacgatgaggacgacgatgacgactccgacgaacccgggtcaagaggacgatatttggggagtgcattagaacttcgggccctcgagctatgtgcaggccccgccgaggccgggctcttggaggagcggttcgcagaactttctccttttgcgggaagagcagctgctgtcttgttaggctgtgctcctgccgcagccgccgccgccactaccacctccgaggccaccccaagggaagagcgagccccggcatgggcagctgagccgcgactgcacgcagcttcgggagctgccgccgcccggcttctgaaaccagagctgcaggtgtgtgtcttttgtcgtaataataaagaggcaatggctctgtacaccacccacattctgaaaggcccagatggaagggtgttgtgtccggtgctgcgccggtatacttgccccctctgtggcgcaagcggtgacaacgcccacacaataaagtactgcccgctgtcaaaggttcccccgccacccgcccgacctcctcctcgctccgcccgcgacggcccaccaggcaagaagcttagatag

SEQ ID NO: 261915 - DNA, 255 bp, Artificial Sequence
  derived and/or modified sequence
cctgagctgcaggtgtgtgtgttctgcaggaacaacaaggaggccatggccctgtacaccacccacatcctgaagggcccagatggccgggtgctgtgccctgtgctgcggcgctacacctgccccctgtgtggggccagcggggacaatgcccacaccatcaagtactgccccctgagcaaggtgcccccacctccagcccggcccccacccaggtctgccagagatggccccccaggcaagaagctgaggtag

SEQ ID NO: 261916 - DNA, 879 bp, Artificial Sequence
  derived and/or modified sequence
atggaggccttcccctgggcccccaggagcccccggcggggccgggcccccccacccatggccctggtgcccagcgcccgctacgtgtctgcccctggccctgcccacccccagcccttcagctcctggaatgactacctgggcctggccaccctcatcaccaaggctgtggatggagagcccaggtttggctgtgcccggggcggcaatggaggcggcggcagcccccccagcagcagcagcagcagctgctgcagcccccacactggagctggccctggggccctgggccctgccctgggccccccagactatgatgaagatgatgatgatgacagtgatgagcccggcagccggggccgctacctgggcagcgccctggagctgcgggccctggagctgtgtgccggccctgctgaggccggcctgctggaggagagatttgctgagctgagcccctttgctggccgggctgctgctgtgctgctgggctgtgccccagctgctgctgctgctgccaccaccaccagcgaggccaccccccgggaggagcgggccccagcctgggccgctgagccccggctgcatgctgccagcggggctgctgctgcccggctgctgaagccagagctgcaggtgtgtgtgttctgcaggaacaacaaggaggccatggccctgtacaccacccacatcctgaagggcccagatggccgggtgctgtgccctgtgctgcggcgctacacctgccccctgtgtggggccagcggggacaatgcccacaccatcaagtactgccccctgagcaaggtgcccccacctccagcccggcccccacccaggtctgccagagatggccccccaggcaagaagctgaggtag

SEQ ID NO: 261917 - DNA, 1108 bp, Artificial Sequence
  derived and/or modified sequence
cccgagctgcaggtgtgcgtgttctgccggaacaacaaggaggcgatggcgctctacaccacccatatcctcaagggccccgacgggcgagtgctgtgtcccgtgctgcgccgctacacgtgtcccctgtgcggcgccagcggcgacaacgcgcacaccatcaagtactgcccgctctccaaagtgccgccgccgcccgcccgcccgccgccccgcagcgccagggacggcccgcctggcaagaagctgcgctgaaggcccgggctcccggccgcccagggtcgccgccgcccctcgcaccgctaggtctgcgcaccatctcgcccccgccgtggggaggcgtgcggctcagcggtcggctcgacatgggacgtcgtcctggtggtttttgaaaagcagccgaccgtgtggagtacttccgtgctgaacgattgggactagacgctgaaatccccatttgtcttcagtttctagtttgcacatccagaacggcgaaggctgggtgtgtattccactaactgaaatatggcaacttagaggcgctgtttatttactgtatacgtcgacctattttagatgcgcatcagtatgaaattgtctcaatcttggatgtttcattttatgaatggaggcactttactaggtctagaatatttttttaaaagcctctgaactgagcttaaaactggcgattttatgaaatgtcggcaaaatgactattttattgtttgaagcgagttaatattctcagttgtctttaaaaatcagttactctaattccaggtgaagcaagccgctggtagcatcacccttatgagaagtgaaggttttgtaaactttccagtattaatttgggcgggtattccccgcttgtggcttgtttctgtcctagctggaggtgtaaaatgcacaatgtgtagcaggtagaatacagctccttatcgttctatgtaccaggtattttattactgaactagcaactagccttttccacctttaaaagttgtgccaagtcataatcatattgtgtataacttggaaatggtgctgtttaaaaaaattgtgtatttatacagtaacagtatgaattcattaatctcacctgtaa

SEQ ID NO: 261918 - DNA, 4627 bp, Artificial Sequence
  derived and/or modified sequence
ggcaggccggcgggcaggctcggcgtgtcccttccgtccggcccgcgccggcggcggggaggcggcgcgcggcccgcagcccgcccatggaggctttcccctgggcgccccgctcgccccgccgcggccgcgcccccccgcccatggcgctcgtgcccagcgcccgctacgtgagcgccccgggcccggcgcacccgcagcccttcagctcctggaacgactacctggggctcgccacgctcatcaccaaagcggtggacggcgagccgcgcttcggctgcgcccgcggtgggaacggcggcggcggctccccgccctcctcctcctcgtcgtcctgctgctccccccacacgggggccgggcctggggcgctggggccggcgctggggccgcccgactacgacgaggacgacgacgacgacagcgacgagccggggtcccggggccgctacctggggagcgcgctggaattgcgcgcgctggagctgtgcgcgggccccgccgaggccgggctgctggaggagcgcttcgccgagctgagcccgttcgcgggtcgtgccgccgccgtgctgctgggctgcgcgcccgccgccgccgccgccgccaccaccaccagcgaggcgacgccgcgcgaggagcgggccccggcgtgggcggccgagccccggctgcacgcggcctccggggcggcggccgcccggctgctgaagcccgagctgcaggtgtgcgtgttctgccggaacaacaaggaggcgatggcgctctacaccacccatatcctcaagggccccgacgggcgagtgctgtgtcccgtgctgcgccgctacacgtgtcccctgtgcggcgccagcggcgacaacgcgcacaccatcaagtactgcccgctctccaaagtgccgccgccgcccgcccgcccgccgccccgcagcgccagggacggcccgcctggcaagaagctgcgctgaaggcccgggctcccggccgcccagggtcgccgccgcccctcgcaccgctaggtctgcgcaccatctcgcccccgccgtggggaggcgtgcggctcagcggtcggctcgacatgggacgtcgtcctggtggtttttgaaaagcagccgaccgtgtggagtacttccgtgctgaacgattgggactagacgctgaaatccccatttgtcttcagtttctagtttgcacatccagaacggcgaaggctgggtgtgtattccactaactgaaatatggcaacttagaggcgctgtttatttactgtatacgtcgacctattttagatgcgcatcagtatgaaattgtctcaatcttggatgtttcattttatgaatggaggcactttactaggtctagaatatttttttaaaagcctctgaactgagcttaaaactggcgattttatgaaatgtcggcaaaatgactattttattgtttgaagcgagttaatattctcagttgtctttaaaaatcagttactctaattccaggtgaagcaagccgctggtagcatcacccttatgagaagtgaaggttttgtaaactttccagtattaatttgggcgggtattccccgcttgtggcttgtttctgtcctagctggaggtgtaaaatgcacaatgtgtagcaggtagaatacagctccttatcgttctatgtaccaggtattttattactgaactagcaactagccttttccacctttaaaagttgtgccaagtcataatcatattgtgtataacttggaaatggtgctgtttaaaaaaattgtgtatttatacagtaacagtatgaattcattaatctcacctgtaactttcctacttggcattttctctacacactcaccctcttccagttctttaaaaacgtttatgatattaagatcaaagggaggaagggaagacagcagtattaattcaccctagattactcaatttcagggttcctagtggaggaaagcccattccagctgttgcctgtcaaacaaatagaagatggatctctagctctgagctattcgtgtattaactcgtattcaagaaggttccaccgtgggctgcgtctgactttaatacaggcagtgctcaaactagaataagcactaattaaaggaattgttgggggtccttcatgtgttcccactcctactggaagacccatgtcggtttccggaaccccaccagtttacccataagcaagactaaacctgatccttgggcaaaagttcctaacccctactttaccctcccaccctcacttttaaatccaccatactgaatgccacactatggaatgcagctacctgccaagcaaggcaatagaaggcaaaaaatggaagtgaattaagatgaactcatctgaaatacacaaatgcattactatctgaagataccagcaagagtttagtctacgtgtataaggctcccagtaggatttagctaggctactagaagttagactgctttcgcattaaacagctaacttcatccacagcaaattgactcaatcaggaaccttcatttgaaggtgtgttagaggatggggtaaatacccgatagctgtctttttggtgaaagaaaaggtgcatttcaagaacttggggggcaggaggaaagcacaatgtttcttagccaggaaagacaaataatccaacgctgctagtcttaaccccagaccagagagaactgcagatctgactgggcctaaattaagtagcttaatgaaaccatgtaattacttgttctcctttcttttgctatagaaaatctaccagtttaaatgagcttcaccttctgggtgaagtttctaaggtcaacatgaatcctcttacctctctcactgctcgtgttctgccttttcaaaaggaccactatgaacagatcagcgcattctctaggccaaaagggctagccaggtggcaagatcaatttagctactttgtattttcagagtcaaattacagacggtttccaaaggtcttgagcatggggctttggcatagcctcaatatatgggagtcactgtgatgagatgtgcctaatgttaatttgatattctgacattgctattttaccagaactaagaacatattgagctggagcttcttgagggcaggagagtattggaaaaggaatccagaagaccctctccactactcaggcagccactattcatctatttttaaagtaccccattttcaggccgggtgtggtggctcatgcctgtaatcccagcactttgggaggcgaggcgggggtggatcacaaggtcaggagaccagcctggccaacatggcgaagccccgtctctactaaaaatacaaaaattagccgggtggtgtggtgggcgcctgtaatcccagctcctcaggaggctgaggcaggagaattgcttgaaaccaggaggcggaggttgcagtgagcccagatcacgccactgcactccagcctgagcaacagagcgactctgtctccaaaaaagaaaaaaagtaccccatgttcagcccctgtgccaaatttgcctaggttttccagctgacaatgaatactgggagttaaaacgcagagtattactatagttaattttctagggttctcttatgaaaagtatatgtaaacacattcatttaaaaatccttggaactcaatgtggaactttaaacattttgcaaaattacatttagagaaacccaatttttcaaagtttaagaaatatacaaagtatgacaaaattatcttcataagaacatgctgcatacttgcctagtagcaaaacaatacagggaagagtcaaaagggcttctccaactgtagaggtacagattgtcttaacctgttcttttctgtacagacttaaaatttctagtggcttttatttttctttgtattttaattttcctacaaagtcctttttggaagttgcagaattattagctttgatgagaacaacttttgtcatagatttgatttattaaaccaaaattatacatattaaaattatatcacaaatatatatgcttccagacaaagaaaagtttgttagtcctgattttctaatcgtagccactcaaggaacagtcctttcatagtaccccaagtatttcaattagacttataaaagtataagtcaatctatggtcagtgtctttggttaaaaaaaaaaaaaaacacaggcagttctttacataaaaacgtcccacacgttatagatgccagccacctcctggtagtcactatggacaactaatgagatgcaaagtcttttggaccgatgatgtctctactactggatctatctgtattaacagcaatgttactctcaatgaaactgcagaagccaccatgaacatggaagaccacctagcagatcggtgagtaggctgcttgttcagctttcctttaacacctgttggtaaatactaatgggagtagacagagttgtatggcctggacagtggaaaccaagagcaggatcgcaaagtaacagcatcagactcttctgccctcctcttgcacttgggttctgactcccagaacaaagaacttgggagaacagtacgggagactgagcagaaaggatgggtttgctgactcgccttgaaatctaactctaacgtaggcag

SEQ ID NO: 261919 - DNA, 255 bp, Artificial Sequence
  derived and/or modified sequence
cccgagctgcaggtgtgcgtgttctgccggaacaacaaggaggccatggcactctataccactcatatactgaagggcccagatggtcgtgtactgtgccctgttctgaggcgctatacttgccccttgtgtggagcctctggggacaacgctcacaccatcaagtattgccctctcagcaaggttccacctcctccagctcggcctccacctcgctccgctcgggatgggccaccaggaaagaaactacgctag

SEQ ID NO: 261920 - DNA, 879 bp, Artificial Sequence
  derived and/or modified sequence
atggaggccttcccctgggccccccggagcccccggcggggccgggctccacccccaatggccttagtgccatccgcacgttatgttagtgcgccaggccccgcccatccccaacctttttctagttggaacgactacctgggtctcgcgacactgattaccaaagccgttgacggagagccccgtttcggttgcgccagaggaggtaatggcggtggcgggtcaccaccctcgtcctccagttctagctgttgcagtccgcacacgggtgctggcccgggagcattaggcccagcgttgggcccgccagattatgacgaggatgacgatgacgatagtgatgaacctgggagcaggggcagatacctcggctccgctttagagctccgagctctggagctgtgcgccggccctgctgaggcaggactgctagaagagcgttttgccgagctttcccctttcgccgggagagccgccgccgtactgctgggctgtgcgcctgctgccgctgcagccgcgacaaccacctctgaggccacccctcgagaagagagggctccagcatgggctgcagaacctcgcctgcacgcggcatcaggggctgccgctgccaggctcctaaaacctgagctgcaggtgtgcgtgttctgcagaaataataaggaagcaatggccctgtacactacccatattctaaagggcccagacggaagggtgctttgccctgtgctgaggaggtacacttgtcccttgtgcggggcttctggtgacaatgcccacacgatcaagtattgcccacttagtaaagtacctcctccccctgcccgacctcctcctcgaagcgcccgcgacgggcctcccgggaagaagttacggtag

SEQ ID NO: 261921 - DNA, 255 bp, Artificial Sequence
  derived and/or modified sequence
cccgagcttcaagtttgcgtattttgtcgaaacaacaaggaggccatggcactatacacgactcacatcttaaagggacctgatgggcgtgtgctctgccccgtgctccggcgttacacatgcccactgtgcggagcgagcggcgacaatgcacacaccataaaatactgcccccttagcaaggtcccccctcctccagctcgccctcccccaaggagcgcacgggacggtccgcctggaaaaaaactcagatag

SEQ ID NO: 261922 - DNA, 879 bp, Artificial Sequence
  derived and/or modified sequence
atggaggcatttccctgggctcccagaagcccgaggcgtgggagggctccacctcctatggcccttgtgccaagtgctaggtatgtgagtgcaccgggtccagcccatcctcagccgttctcttcttggaatgactacctgggcctggctacattgatcactaaagctgtcgacggggaacccagattcgggtgcgctagaggagggaacggaggcggtggctcccctccctcttcctctagctcatcgtgttgctctccccacacaggagccggacccggagccctggggcctgccctcgggccacccgattacgatgaagatgatgacgacgactctgatgagccaggctctcgtggcaggtatctcggctctgcactcgagcttagagcgttagaactctgtgcagggcctgccgaagcaggtctgctggaggagagatttgcggagttaagtccctttgccggtagggctgccgcagtgctgctggggtgcgcccctgctgccgcagccgctgccacaacgacctctgaagccaccccgagggaggaaagggcacctgcctgggccgctgaacccaggctccacgctgcatcaggagctgcagctgcacgactgttaaagcctgagctgcaggtatgcgtattctgccgcaataataaagaagctatggcactgtacacaacccatattctgaaaggacccgacggacgcgtcctttgtcccgtcctgcgcagatacacctgccccctgtgcggcgcttctggagataatgcccatacaatcaagtactgtcccctttccaaagtgccaccacctccagctcgtcctcctcctcgttcggcgagggacggtcctcctggcaagaagctgaggtag

SEQ ID NO: 261923 - DNA, 255 bp, Artificial Sequence
  derived and/or modified sequence
cccgagctgcaggtgtgcgtgttctgcagaaacaacaaggaggccatggccctgtacaccacccacatcctgaagggccccgacggcagagtgctgtgccccgtgctgagaagatacacctgccccctgtgcggcgccagcggcgacaacgcccacaccatcaagtactgccccctgagcaaggtgccccccccccccgccagacccccccccagaagcgccagagacggcccccccggcaagaagctgagatag

SEQ ID NO: 261924 - DNA, 879 bp, Artificial Sequence
  derived and/or modified sequence
atggaggccttcccctgggcccccagaagccccagaagaggcagagcccccccccccatggccctggtgcccagcgccagatacgtgagcgcccccggccccgcccacccccagcccttcagcagctggaacgactacctgggcctggccaccctgatcaccaaggccgtggacggcgagcccagattcggctgcgccagaggcggcaacggcggcggcggcagcccccccagcagcagcagcagcagctgctgcagcccccacaccggcgccggccccggcgccctgggccccgccctgggcccccccgactacgacgaggacgacgacgacgacagcgacgagcccggcagcagaggcagatacctgggcagcgccctggagctgagagccctggagctgtgcgccggccccgccgaggccggcctgctggaggagagattcgccgagctgagccccttcgccggcagagccgccgccgtgctgctgggctgcgcccccgccgccgccgccgccgccaccaccaccagcgaggccacccccagagaggagagagcccccgcctgggccgccgagcccagactgcacgccgccagcggcgccgccgccgccagactgctgaagcccgagctgcaggtgtgcgtgttctgcagaaacaacaaggaggccatggccctgtacaccacccacatcctgaagggccccgacggcagagtgctgtgccccgtgctgagaagatacacctgccccctgtgcggcgccagcggcgacaacgcccacaccatcaagtactgccccctgagcaaggtgccccccccccccgccagacccccccccagaagcgccagagacggcccccccggcaagaagctgagatag

SEQ ID NO: 261925 - protein, 588 aa, Artificial Sequence
  derived and/or modified sequence
MEGDGVPWGSEPVSGPGPGGGGMIRELCRGFGRYRRYLGRLRQNLRETQKFFRDIKCSHNHTCLSSLTGGGGAERGPAGDVAETGLQAGQLSCISFPPKEEKYLQQIVDCLPCILILGQDCNVKCQLLNLLLGVQVLPTTKLGSEESCKLRRLRFTYGTQTRVSLALPGQYELVHTLVAHQGNWETIPEEDLEVQENNEDAAHVLAELEVTMHHALLQEVDVVVAPCQGLRPTVDVLGDLVNDFLPVITYALHKDELSERDEQELQEIRKYFSFPVFFFKVPKLGSEIIDSSTRRMESERSPLYRQLIDLGYLSSSHWNCGAPGQDTKAQSMLVEQSEKLRHLSTFSHQVLQTRLVDAAKALNLVHCHCLDIFINQAFDMQRDLQITPKRLEYTRKKENELYESLMNIANRKQEEMKDMIVETLNTMKEELLDDATNMEFKDVIVPENGEPITDLGFCKPEAMMSGSIVGTPIHMAPELFTGKYDNSVDVYAFGILFWYICSGSVKLPEAFERCASKDHLWNNVRRGARPERLPVFDEECWQLMEACWDGDPLKRPLLGIVQPMLQGIMNRLCKSNSEQPNRGLDDST

SEQ ID NO: 261926 - protein, 884 aa, Artificial Sequence
  derived and/or modified sequence
MEGDGVPWGSEPVSGPGPGGGGMIRELCRGFGRYRRYLGRLRQNLRETQKFFRDIKCSHNHTCLSSLTGGGGAERGPAGDVAETGLQAGQLSCISFPPKEEKYLQQIVDCLPCILILGQDCNVKCQLLNLLLGVQVLPTTKLGSEESCKLRRLRFTYGTQTRVSLALPGQYELVHTLVAHQGNWETIPEEDLEVQENNEDAAHVLAELEVTMHHALLQEVDVVVAPCQGLRPTVDVLGDLVNDFLPVITYALHKDELSERDEQELQEIRKYFSFPVFFFKVPKLGSEIIDSSTRRMESERSPLYRQLIDLGYLSSSHWNCGAPGQDTKAQSMLVEQSEKLRHLSTFSHQVLQTRLVDAAKALNLVHCHCLDIFINQAFDMQRDLQITPKRLEYTRKKENELYESLMNIANRKQEEMKDMIVETLNTMKEELLDDATNMEFKDVIVPENGEPVGTREIKCCIRQIQELIISRLNQAVANKLISSVDYLRESFVGTLERCLQSLEKSQDVSVHITSNYLKQILNAAYHVEVTFHSGSSVTRMLWEQIKQIIQRITWVSPPAITLEWKRKVAQEAIESLSASKLAKSICSQFRTRLNSSHEAFAASLRQLEAGHSGRLEKTEDLWLRVRKDHAPRLARLSLESCSLQDVLLHRKPKLGQELGRGQYGVVYLCDNWGGHFPCALKSVVPPDEKHWNDLALEFHYMRSLPKHERLVDLHGSVIDYNYGGGSSIAVLLIMERLHRDLYTGLKAGLTLETRLQIALDVVEGIRFLHSQGLVHRDIKLKNVLLDKQNRAKITDLGFCKPEAMMSGSIVGTPIHMAPELFTGARPERLPVFDEECWQLMEACWDGDPLKRPLLGIVQPMLQGIMNRLCKSNSEQPNRGLDDST

SEQ ID NO: 261927 - DNA, 1767 bp, Artificial Sequence
  derived and/or modified sequence
atggagggtgacggtgtgccatggggttctgagcctgtcagcgggcctggtccgggtggtggaggcatgatcagagaattatgcagagggttcggccgctatcggaggtacctcggccggctgcgacagaatctccgcgagacccagaagttttttcgtgacattaagtgtagccacaatcacacatgcctctctagcttgacaggtggcgggggagccgaaaggggacctgccggagacgttgcagaaacaggtcttcaggccggccagctgagctgcatctcctttccaccaaaagaagagaagtatctgcagcagattgtggattgtctcccatgtatcctgatcctcggtcaggactgtaacgtgaagtgtcagctcctgaatctgctgttaggcgtacaggtcttgcccaccaccaaactgggctcagaagaaagttgtaagctgcggagattgaggttcacctacggtacacagacgagagtttccctagctctgcccggtcagtacgaactggtgcacactctggtggcccaccaggggaactgggagacaatacccgaagaagacctggaggtgcaggaaaataatgaggacgcagcacacgtcctagccgagcttgaagtgacaatgcaccatgccctgttgcaagaggtcgatgtcgtcgtcgccccctgccagggccttagacctacggtggatgtcctgggagacctcgtgaacgacttcctccccgtgattacttatgccttacataaagacgagctttctgagcgagatgaacaggaattgcaggagataagaaagtatttttcttttccagtctttttcttcaaagtgccaaaattgggatcagagatcattgacagttccacgcggcggatggagagcgaaagatctcccctctataggcagctgattgatctgggttatctgtcctcttctcactggaattgtggagctcccggccaggacactaaggcccaaagcatgttagtagagcagagcgaaaagttgagacacttgtccacattcagccaccaggtcttgcaaacccgtttggttgacgcagctaaggcccttaatttggttcattgccattgcctcgatatttttattaatcaggcgtttgacatgcaacgcgacctgcagattaccccgaagcgtctcgaatacactcgcaagaaggagaatgagctgtacgagagcctcatgaacatagctaaccgtaagcaggaggaaatgaaagacatgatcgttgagaccttaaacactatgaaggaagagctgctagatgatgccacaaacatggagttcaaagatgtgatcgtcccagaaaatggagaaccaataacggatcttggattctgcaaacccgaagcaatgatgtccggcagcattgtggggacccctattcatatggcccctgagctgtttactgggaagtacgacaattccgtggacgtctatgccttcgggatcctgttctggtacatttgctcgggttccgttaaactgcccgaggcattcgagcgatgtgcaagcaaggatcatctgtggaacaacgtgcgccggggagccagaccagaacgactgcctgtgttcgacgaagaatgttggcagctgatggaagcatgctgggatggggacccactcaaacggcctctgctgggaatcgttcagcccatgctacaaggaatcatgaacaggttatgtaagtcaaacagcgagcagcctaaccggggcctggacgattccacttag

SEQ ID NO: 261928 - DNA, 2655 bp, Artificial Sequence
  derived and/or modified sequence
atggagggtgatggcgtaccttggggatctgagcctgtgagtggccctgggccaggcggcggtgggatgattcgggaactttgccgaggatttgggcgatataggcgctatctcggcagacttagacaaaacctgcgcgaaacacagaaattttttcgcgacatcaagtgcagccataatcacacctgtttaagtagcctgacaggaggtgggggagcagaacgaggccctgccggggacgtggcggaaaccggcctccaggctggccagctctcgtgcatttctttcccccctaaggaagaaaaatatctgcagcagatcgtcgattgtctaccatgtatcctgatcctcgggcaggattgcaacgttaagtgccagctgctgaacttgcttctgggtgtgcaggttcttcccacaaccaaattaggctcagaggagagttgtaagctccgaagattaaggtttacctacggaactcagacaagggtatcgctcgctcttcctggccaatacgagttagttcatacactagttgcacatcaggggaactgggagacgatccccgaagaggatctcgaagtccaggagaacaacgaggatgctgcccatgtccttgcagagctggaagtcacaatgcaccacgccctcctgcaagaggttgacgtagtggtggcaccttgccaaggtctccgaccgacggtagatgtgctgggggacctggttaatgattttctcccggtaattacgtatgctctccataaggatgagctgtctgagagagacgagcaggagctgcaggaaatcagaaaatatttctctttccccgtattcttttttaaggtgccgaagctgggcagtgaaataatagacagctcgacccggaggatggagagcgaaagatctcctctctacagacaactgatcgacctgggatatctcagtagctcacactggaattgtggcgctccagggcaggatactaaagcgcaatctatgctcgtggaacagtctgagaaacttagacatctcagcactttcagccaccaagttctgcagacgcgactggtggacgctgcaaaggcactgaacctcgtacactgccactgtctggatatttttataaaccaggcttttgacatgcagcgagatctgcagattacgccaaaaaggctggaatataccaggaagaaggagaacgaactgtacgagtctctgatgaatatcgctaaccggaaacaggaggaaatgaaggacatgattgtggaaacccttaacactatgaaggaggagctcctggatgatgccactaacatggaatttaaggacgtaatcgtaccggaaaacggcgagccagtcggaactcgggagattaaatgctgtatccgccagattcaggagttgatcatatcccggctgaatcaggctgtggccaataaactgatatcttctgtcgattatttaagagaatcctttgtgggaaccctggagagatgtctgcaaagcctggaaaagtcacaagatgtctcggtgcacatcaccagcaattacctaaaacagatattgaatgccgcctaccatgtggaggtcaccttccacagcggatcctcagtgacccgcatgctgtgggagcagatcaagcaaatcatccagcgcattacatgggtctcacctcctgcaattacgctggagtggaagagaaaagttgcacaggaagcaatcgaatctttaagcgcatcaaaattggccaaatccatttgtagccaatttcgcactcgtctgaattcttcgcatgaggctttcgctgcttcgctgcgacagctagaagcaggacactccgggcggctggagaaaactgaggacctgtggttaagagtgcgcaaggaccacgccccccgcctggcccggctcagcctggagtcatgctctttacaggatgttcttctgcaccggaagcccaaactgggccaagaactggggcgaggccaatatggagtggtctatttgtgcgataactgggggggacacttcccatgtgctctgaaatctgtagtcccgccagatgaaaaacattggaacgatctagctctcgaattccattacatgagaagcctgcccaaacacgagaggctggtcgacctgcacggaagcgtgattgattataattatggaggcggttcttctatagcggtgctgctaatcatggaaagacttcacagggacttgtatacaggactcaaagcaggcctgacattggagacccggctgcaaatcgcgttggacgtggtcgaggggatacgttttctgcacagccaggggctggtccacagggatattaagctcaaaaacgttctgctggacaagcagaatcgggccaagattacagacctagggttttgcaagcctgaagctatgatgtcaggaagcatcgtggggacccctatacacatggccccagagctgtttactggtgcccgcccagaacgactgcctgtgttcgacgaggaatgctggcagcttatggaggcctgctgggatggtgaccccctgaagaggccgctgctgggaatcgtccagccgatgctccaagggataatgaatcgactgtgtaaatctaattccgagcagcctaacagggggctggatgatagcacatag

SEQ ID NO: 261929 - DNA, 1767 bp, Artificial Sequence
  derived and/or modified sequence
atggagggagatggagtgccctggggcagcgagcctgtgtctggccctggccctgggggcggcggcatgatccgggagctgtgccggggcttcggccgctaccgccgctacctgggccgcctgcggcagaacctgcgggagacccagaagttcttccgggacatcaagtgcagccacaaccacacctgcctgagcagcctgaccggcggcggcggcgctgagcggggccctgctggagatgtggccgagaccggcctgcaggccggccagctgagctgcatctccttcccccccaaggaggagaagtacctgcagcagatcgtggactgcctgccctgcatcctgatcctgggccaggactgcaatgtgaagtgccagctgctgaacctgctgctgggcgtgcaggtgctgcccaccaccaagctgggcagcgaggagagctgcaagctgcggcggctgcgcttcacctacggcacccagaccagggtgtccctggccctgcccggccagtatgagctggtgcacaccctggtggcccaccagggcaactgggagaccatccctgaggaggacctggaggtgcaggagaacaatgaagatgctgcccacgtgctggccgagctggaggtgaccatgcaccacgccctgctgcaggaggtggatgtggtggtggccccctgccagggcctgcggcccaccgtggatgtgctgggggacctggtgaatgacttcctgcccgtcatcacctacgccctgcacaaggatgagctgtctgaaagagatgagcaggagctgcaggagatcaggaagtacttctccttccctgtgttcttcttcaaggtgcccaagctgggcagcgagatcatcgacagcagcaccaggaggatggagagcgagaggagccccctgtaccggcagctgattgacctgggctacctgagcagcagccactggaactgtggggcccctggccaggacaccaaggcccagagcatgctggtggagcagagcgagaagctgcggcacctgagcaccttcagccaccaggtgctgcagacccggctggtggatgctgccaaggccctgaacctggtgcactgccactgcctggacatcttcatcaaccaggcctttgacatgcagagggacctgcagatcacccccaagaggctggagtacaccaggaagaaggaaaatgagctgtatgagagcctgatgaacatcgccaacaggaagcaggaggagatgaaggacatgattgtggagaccctgaacaccatgaaggaggagctgctggatgatgccaccaacatggagttcaaggatgtgattgtgcctgaaaatggagagcccatcacagacctgggcttctgcaagccagaggccatgatgagcggcagcatcgtgggcacccccatccacatggcccctgagctgttcaccgggaagtatgacaacagcgtggatgtgtatgccttcggcatcctcttctggtacatctgcagcggctctgtgaagctgcctgaggcctttgagcgctgtgccagcaaggaccacctgtggaacaacgtgagaagaggagcccggcctgagcggctgcctgtgtttgatgaggagtgctggcagctgatggaggcctgctgggatggagaccccctgaagaggcccctgctgggcatcgtgcagcccatgctgcagggcatcatgaaccggctgtgcaagagcaacagcgagcagcccaacagaggcctggatgacagcacctag

SEQ ID NO: 261930 - DNA, 2655 bp, Artificial Sequence
  derived and/or modified sequence
atggagggagatggagtgccctggggcagcgagcctgtgtctggccctggccctgggggcggcggcatgatccgggagctgtgccggggcttcggccgctaccgccgctacctgggccgcctgcggcagaacctgcgggagacccagaagttcttccgggacatcaagtgcagccacaaccacacctgcctgagcagcctgaccggcggcggcggcgctgagcggggccctgctggagatgtggccgagaccggcctgcaggccggccagctgagctgcatctccttcccccccaaggaggagaagtacctgcagcagatcgtggactgcctgccctgcatcctgatcctgggccaggactgcaatgtgaagtgccagctgctgaacctgctgctgggcgtgcaggtgctgcccaccaccaagctgggcagcgaggagagctgcaagctgcggcggctgcgcttcacctacggcacccagaccagggtgtccctggccctgcccggccagtatgagctggtgcacaccctggtggcccaccagggcaactgggagaccatccctgaggaggacctggaggtgcaggagaacaatgaagatgctgcccacgtgctggccgagctggaggtgaccatgcaccacgccctgctgcaggaggtggatgtggtggtggccccctgccagggcctgcggcccaccgtggatgtgctgggggacctggtgaatgacttcctgcccgtcatcacctacgccctgcacaaggatgagctgtctgaaagagatgagcaggagctgcaggagatcaggaagtacttctccttccctgtgttcttcttcaaggtgcccaagctgggcagcgagatcatcgacagcagcaccaggaggatggagagcgagaggagccccctgtaccggcagctgattgacctgggctacctgagcagcagccactggaactgtggggcccctggccaggacaccaaggcccagagcatgctggtggagcagagcgagaagctgcggcacctgagcaccttcagccaccaggtgctgcagacccggctggtggatgctgccaaggccctgaacctggtgcactgccactgcctggacatcttcatcaaccaggcctttgacatgcagagggacctgcagatcacccccaagaggctggagtacaccaggaagaaggaaaatgagctgtatgagagcctgatgaacatcgccaacaggaagcaggaggagatgaaggacatgattgtggagaccctgaacaccatgaaggaggagctgctggatgatgccaccaacatggagttcaaggatgtgattgtgcctgaaaatggagagcctgtgggcacccgggagatcaagtgctgcatccggcagatccaggagctgatcatcagccggctgaaccaggccgtggccaacaagctgatcagctctgtggactacctgcgggagagctttgtgggcaccctggagcgctgcctgcagagcctggagaagagccaggatgtgtctgtgcacatcaccagcaactacctgaagcagatcctgaatgctgcctaccacgtggaggtgaccttccacagcggcagctctgtgaccaggatgctgtgggagcagatcaagcagatcatccagaggatcacctgggtgtccccaccagccatcaccctggagtggaagaggaaggtggcccaggaggccatcgagagcctgagcgccagcaagctggccaagagcatctgcagccagttccgcacccggctgaacagcagccatgaggcctttgctgccagcctgcggcagctggaggccggccacagcggccgcctggagaagacagaggacctgtggctgcgggtgaggaaggaccacgccccccggctggcccggctgagcctggagagctgcagcctgcaggatgtgctgctgcacaggaagcccaagctgggccaggagctgggccggggccagtatggagtggtgtacctgtgtgacaactggggcggccacttcccctgtgccctgaagtctgtggtgcccccagatgagaagcactggaatgacctggccctggagttccactacatgaggagcctgcccaagcatgagcggctggtggacctgcacggcagcgtcatcgactacaactacggcggcggcagcagcattgctgtgctgctgatcatggagcggctgcaccgggacctgtacacaggcctgaaggccggcctgaccctggagacccggctgcagatcgccctggatgtggtggagggcatccgcttcctgcacagccagggcctggtgcaccgggacatcaagctgaagaatgtgctgctggacaagcagaacagagccaagatcacagacctgggcttctgcaagccagaggccatgatgagcggcagcatcgtgggcacccccatccacatggcccctgagctgttcaccggggcccggcctgagcggctgcctgtgtttgatgaggagtgctggcagctgatggaggcctgctgggatggagaccccctgaagaggcccctgctgggcatcgtgcagcccatgctgcagggcatcatgaaccggctgtgcaagagcaacagcgagcagcccaacagaggcctggatgacagcacctag

SEQ ID NO: 261931 - DNA, 1767 bp, Artificial Sequence
  derived and/or modified sequence
atggagggcgacggcgtgccctggggcagcgagcccgtgagcggccccggtcctggtgggggggggatgatccgcgagctctgccgaggatttggcagatataggcgttatctaggccggctgagacaaaatctcagggagacacaaaagttcttccgcgacattaagtgcagtcataaccatacttgtttgagcagcctcaccggcggtggtggggcagagagggggccagccggagacgtagcggagacaggtcttcaggctgggcaactgagctgtatctcctttccacccaaagaggagaaatatctgcagcagatcgttgactgtctcccatgcatcctcatcctgggtcaggactgcaatgttaagtgccagcttcttaacttacttttgggggtgcaagtgcttcccaccaccaagctgggctctgaagaatcatgcaagcttcggcgattgcggtttacgtatgggacacagacccgcgtatcactggctcttccaggccagtatgagttggtgcacaccctggttgctcaccagggcaattgggagacgatccccgaagaagatctggaggtgcaggagaacaacgaggatgccgcacacgtgcttgccgaattagaagtgactatgcatcacgccctgctgcaggaggtcgacgtagttgtggccccatgtcaggggctccgccccaccgtcgatgtcctgggagatctggtcaacgacttcctgccggtgatcacctatgccttgcacaaggatgagttatctgagagagatgagcaagagctacaggagattagaaaatacttttcttttccagtctttttttttaaggtgcccaagcttggcagtgagatcattgactccagcacacgcaggatggaatctgagaggagcccactgtaccgtcaattaatcgacctcgggtacctttcaagtagccactggaactgcggcgctccgggtcaggacactaaggctcagtcaatgctggtagaacagtctgagaagctgaggcacctgtctaccttcagccatcaggtgttgcaaaccagattagtggacgcagccaaggcgctgaacctcgtacattgccactgcctggacatcttcattaaccaggctttcgacatgcaaagagaccttcaaatcactcccaaacgcctcgagtacacaaggaagaaggaaaatgagctgtacgaaagcctgatgaacatcgccaaccgaaaacaggaggagatgaaggatatgatagtggagacactaaatacaatgaaggaggaactcttggatgacgccacaaatatggagttcaaagacgtcattgtacctgaaaacggagagccaatcacagatctcgggttttgcaagcccgaggctatgatgagcggtagtattgtggggacacctatccacatggctccagagctattcacaggcaagtacgataactctgtggacgtttacgcctttgggatcctgttttggtacatctgttctggaagcgtcaagctacccgaggccttcgaaaggtgtgcgagcaaagatcacttgtggaataatgtgagacgtggcgcgagacccgagcggctccccgtgttcgacgaagagtgttggcagctaatggaagcatgttgggacggggaccccctcaagcgcccacttctcgggatcgtgcaacccatgcttcaggggatcatgaacaggctctgcaagtctaatagtgagcagccgaaccgtggacttgacgactcgacctag

SEQ ID NO: 261932 - DNA, 2655 bp, Artificial Sequence
  derived and/or modified sequence
atggagggcgacggcgtgccctggggcagcgagcccgtgagcggccccggcccggggggtggcggcatgattagagaactgtgtagggggttcggtcgataccggcgttatctcggcaggcttcgccaaaacctcagagagactcagaagttctttcgcgatataaagtgctcccacaaccatacatgcctctccagcctaactgggggagggggcgccgagagagggcccgcgggggatgtggccgagaccggactgcaggccggacagctgtcttgtatctctttcccccctaaagaggagaaatacctgcagcagattgttgactgccttccatgtatactcattctgggacaagactgtaatgtcaaatgccagctgctgaatctgttgctgggggttcaggtcttgccgacaacgaagctggggagtgaggaaagctgtaaactgcgccgactgagatttacctatggtacccagacccgcgtcagtctggcccttcctgggcagtatgagctggtccacacactcgtcgcccaccaaggtaattgggaaactatccctgaagaagatctggaggtccaggaaaataacgaggacgccgcccacgtcctggctgaactggaggtgaccatgcaccacgccctgcttcaggaggtagacgtagttgtggctccgtgccaagggctgcgtccgacagttgacgtcctgggtgacctcgtcaacgatttcctgcccgtgattacctacgcactgcataaggacgagctgagcgaacgtgacgagcaggagctgcaggagattagaaagtacttctcctttccagtgtttttttttaaagtgcctaaattgggctctgaaatcattgattcaagtacgcggcggatggagtccgaacggtctccgctataccgtcagctgatagacctcggatatctgtcatccagccactggaattgtggggcccctggccaggatactaaggctcaatcaatgctggtggagcaaagcgagaaactccgccacctgtctacgttctcgcatcaagtgctgcagacccgcctggtggatgcggcaaaggcgcttaacttggtgcactgccattgcctggatattttcatcaatcaagccttcgatatgcaacgggacttacagattacaccgaaacgcctcgagtacactcgcaagaaggagaatgagctctacgaaagtttaatgaatatcgcgaatcggaagcaggaggagatgaaagatatgatcgtggaaactctgaacactatgaaagaagagctcctggatgacgcaacaaatatggagttcaaagatgtgattgtccctgaaaacggggaacctgttggcacccgtgagatcaaatgctgcataagacagattcaggagctgatcatttctcgactgaaccaggccgttgctaacaaactgatctcctcagtcgactacctgagggaatctttcgtgggtactttagaaagatgtttgcagtcccttgaaaaatcacaggacgtctccgttcatattacttctaactacctgaagcagattctgaatgccgcttaccatgtggaagtgacatttcactcgggttctagcgttactcggatgctttgggagcagatcaagcagataattcagagaattacctgggtctccccaccagcaattaccttggagtggaagaggaaagtggcacaggaggccatcgaatctctctccgcaagcaagctcgcaaagagcatctgcagtcagttccgtacccggctcaacagttctcacgaggccttcgccgcttccctgcgacagctcgaagcagggcactctggccgtctggagaagaccgaggacctctggttgcgggtgcgcaaggaccatgctccgaggttggcccggttgagtttggagagctgcagtcttcaggatgtcctcctccaccgaaagccgaagctggggcaggagctggggaggggccagtacggtgtggtctatctgtgtgacaactggggagggcatttcccttgcgccctgaaaagtgtcgtgccgccagacgagaaacactggaatgatctcgccctggagttccactatatgaggagtttacctaaacacgagcgacttgtcgatctgcatggcagcgtaatcgattataattacggaggcggatccagcatcgccgttctgttaatcatggagcggctgcatagggatctgtatactggtttgaaagccggcttgactctcgagacccgcctgcagatcgcattagatgttgtagaaggaattaggttcctccacagccagggactcgtacatcgggacatcaagctcaaaaatgtcctcttggataagcagaatagggccaagataacggacctcggattttgcaagccggaggctatgatgagtggttcaatcgtgggcacaccgatccacatggctcctgaactttttacgggagctcgtccagagcgcctccctgtttttgatgaagaatgttggcagttgatggaagcctgctgggacggcgacccgctgaaacggccgctgctgggtatagtccaacctatgttgcagggtattatgaaccgcctgtgcaaaagcaatagtgagcaacccaaccgcggcttagatgactcaacttag

SEQ ID NO: 261933 - DNA, 1767 bp, Artificial Sequence
  derived and/or modified sequence
atggagggtgatggcgtcccttggggcagtgagccagttagtgggccaggaccaggaggcggtgggatgatcagggagctgtgccgtggctttggaaggtaccgtcgctacttgggcagactcaggcaaaacctccgtgaaacacagaaattcttccgcgatatcaagtgttcacacaatcacacctgcttgagttctttaacgggaggcggaggtgctgagcgcggaccagccggagacgtcgcagaaacggggttacaagcagggcaactaagttgcatatcattccctccaaaggaggagaaatacctgcagcagatcgtagattgtctgccatgcatccttatccttgggcaagattgcaatgttaagtgtcagctccttaacttgctactgggcgtgcaggtgctccctaccactaaactaggctctgaggagtcctgcaagctgagacgccttcgcttcacgtatggaactcagactcgcgttagcttagctctgcccggacaatatgaactcgtgcacactctggttgcccaccaaggaaattgggaaacaatccctgaggaggatctagaagtccaagagaataatgaggatgcagcccacgtgctggcagagttggaagtaactatgcaccacgcactgttgcaagaggtggacgtggtggtcgcaccttgtcagggactgagacctacggtggatgtgctcggcgacctggttaacgatttcctgcccgtcatcacgtatgccctccacaaggacgagctcagtgagcgcgatgaacaagagctgcaagagattcgcaagtattttagctttcctgtgtttttctttaaggtgcctaaactaggctccgagatcatagattccagcacccgcagaatggagtctgagcgctccccactatatcggcagctgatcgacctgggctatctgagtagttcccactggaactgtggagccccaggacaagatacaaaagcccaaagtatgctagtggaacagagtgagaagctgcggcatctgagtacttttagccaccaggtactccagacacgcctcgtcgatgcagccaaagccctgaacctcgtccattgtcactgtcttgacatcttcatcaaccaggcttttgatatgcaacgcgacctgcagataactccaaagcggctcgaatacacgaggaagaaagaaaacgagctgtatgagtcactgatgaatattgccaatagaaagcaagaagagatgaaagacatgatcgtcgagacactgaatacaatgaaggaggaactgctggacgatgccaccaatatggagttcaaggatgtcatcgtgccagagaacggcgaacctatcaccgatttggggttctgtaaacctgaagccatgatgagcggttcaatcgtgggaacacctatccatatggccccagagttattcaccggtaagtatgacaattccgtagatgtttacgcattcgggattttgttttggtacatctgctctggctccgtgaaacttcctgaagctttcgaaagatgtgctagcaaggaccatctgtggaacaatgttcggaggggggctcgacctgaacgtttaccagtttttgatgaagagtgttggcagctgatggaggcctgctgggatggtgacccactaaaacgtccactcctcgggatcgttcaacccatgctgcagggcatcatgaaccggctctgcaaaagtaatagcgagcagcctaatcgaggcctcgacgactctacctag

SEQ ID NO: 261934 - DNA, 2655 bp, Artificial Sequence
  derived and/or modified sequence
atggaaggcgacggcgtaccctgggggagcgagccggtcagcggacccggtcccggtggcggaggtatgatccgtgagctgtgtcgaggtttcggtcggtatagaaggtatcttggtaggttgagacagaacctgagggaaacacagaagtttttccgagatatcaagtgctcccacaatcacacctgccttagtagcttaaccgggggtggcggtgccgagagaggaccagctggggatgtagctgagaccgggctgcaggcaggacaactgagctgcatcagcttccctcctaaggaggaaaaatacttacagcagattgtggactgcttaccctgtatactgatcctgggacaggactgcaatgtgaaatgccagctcctaaatctcctgctgggagtccaggtattaccaacaactaagctcggctctgaggagtcatgtaaactgcgcaggctgcggttcacatacggcacacagacacgcgttagccttgcgctgccgggtcagtacgagctggtgcatacacttgtggcccaccaagggaactgggagaccatccccgaggaagatctcgaagtccaggagaataacgaggacgctgcacatgtcttggctgaacttgaggttactatgcaccacgctctgcttcaggaggtcgacgttgtggtggccccatgtcaaggtttaagacccactgtagacgtcctgggcgatcttgtgaatgactttctacccgttatcacgtacgcccttcacaaggatgaactgagcgagagagatgaacaggaactacaggagatacgcaaatacttctcatttccagttttcttctttaaagtgcccaagttgggctccgagatcattgattctagtaccaggaggatggagtccgagcgctcaccactgtatcgacagctgattgatctcggatatctgtcgtcctcacactggaactgcggagctcccggtcaggacaccaaagcacagtcaatgctcgtcgaacaatcagagaaactcagacacctgagtaccttttcccaccaagtgttgcagacccgcctagtggacgcagcgaaagctctcaatcttgtgcactgtcactgccttgatattttcatcaatcaagccttcgatatgcagcgggatctccagattacaccaaaaagactggagtatactaggaaaaaggagaatgagctctatgaatcgttaatgaatatcgccaacaggaaacaggaagagatgaaggatatgatcgtggagactctgaacacaatgaaggaggagctactggacgacgcgaccaacatggaatttaaagatgtcattgtcccagaaaatggcgaaccggtggggactcgagagattaagtgttgcattcggcagatacaggaacttatcataagtagactgaatcaagccgtggccaataagctgatctcgagtgtggattatttacgggagagctttgttgggacactggagcgatgtctccagtctctcgagaagtcgcaggacgtttccgtacatattaccagcaattacttgaagcaaattctgaatgccgcttaccatgttgaggtgaccttccatagcggttcttcagttacacgcatgctgtgggaacagattaaacaaattattcaacgcattacatgggtctcaccgccagctatcacactcgagtggaagagaaaggttgcgcaggaggcaattgagtcgctctccgcaagtaagctagcaaagtccatctgttctcaatttcgcaccagattaaattctagccatgaagcctttgctgccagcctgcgccaactggaggccggacactctgggagactggagaaaacggaagatctgtggctgcgagtgcgtaaagaccacgcacctagactggcacgcctcagccttgagtcctgctcacttcaggacgtattactgcatcgtaagcccaagcttggccaggagctgggccgaggccagtacggagtggtgtatctctgtgataactggggcggtcactttccatgcgccctgaagagtgtggtgccgccagacgagaagcattggaacgacctcgcgttagaatttcattacatgcggtccctgccaaaacatgaacggctggtggatttgcacggttctgttatagattacaattacgggggaggatccagcatcgcggtccttctgataatggagcgtttacacagggatctttataccggactgaaagccggattaacactcgaaacccgcctgcagatcgccctcgatgtcgtggaagggatccgctttctgcatagccaggggctcgtgcaccgagatattaaacttaagaatgtgcttctggacaaacaaaaccgggctaagatcacagacttaggcttttgcaaacctgaagcaatgatgagtgggagcatcgtgggcactcctatacatatggcacccgagctgttcacgggagcccgacctgagagactgcccgtatttgatgaagaatgctggcaactgatggaggcgtgttgggacggtgatccactgaagcgcccactgctgggcatcgtccagccgatgctccaaggtattatgaacaggctttgcaagtccaacagtgagcagccaaacagaggcctggacgacagcacctag

SEQ ID NO: 261935 - DNA, 1767 bp, Artificial Sequence
  derived and/or modified sequence
atggagggcgacggcgtgccctggggcagcgagcccgtgagcggccccggccccggcggcggcggcatgatcagagagctgtgcagaggcttcggcagatacagaagatacctgggcagactgagacagaacctgagagagacccagaagttcttcagagacatcaagtgcagccacaaccacacctgcctgagcagcctgaccggcggcggcggcgccgagagaggccccgccggcgacgtggccgagaccggcctgcaggccggccagctgagctgcatcagcttcccccccaaggaggagaagtacctgcagcagatcgtggactgcctgccctgcatcctgatcctgggccaggactgcaacgtgaagtgccagctgctgaacctgctgctgggcgtgcaggtgctgcccaccaccaagctgggcagcgaggagagctgcaagctgagaagactgagattcacctacggcacccagaccagagtgagcctggccctgcccggccagtacgagctggtgcacaccctggtggcccaccagggcaactgggagaccatccccgaggaggacctggaggtgcaggagaacaacgaggacgccgcccacgtgctggccgagctggaggtgaccatgcaccacgccctgctgcaggaggtggacgtggtggtggccccctgccagggcctgagacccaccgtggacgtgctgggcgacctggtgaacgacttcctgcccgtgatcacctacgccctgcacaaggacgagctgagcgagagagacgagcaggagctgcaggagatcagaaagtacttcagcttccccgtgttcttcttcaaggtgcccaagctgggcagcgagatcatcgacagcagcaccagaagaatggagagcgagagaagccccctgtacagacagctgatcgacctgggctacctgagcagcagccactggaactgcggcgcccccggccaggacaccaaggcccagagcatgctggtggagcagagcgagaagctgagacacctgagcaccttcagccaccaggtgctgcagaccagactggtggacgccgccaaggccctgaacctggtgcactgccactgcctggacatcttcatcaaccaggccttcgacatgcagagagacctgcagatcacccccaagagactggagtacaccagaaagaaggagaacgagctgtacgagagcctgatgaacatcgccaacagaaagcaggaggagatgaaggacatgatcgtggagaccctgaacaccatgaaggaggagctgctggacgacgccaccaacatggagttcaaggacgtgatcgtgcccgagaacggcgagcccatcaccgacctgggcttctgcaagcccgaggccatgatgagcggcagcatcgtgggcacccccatccacatggcccccgagctgttcaccggcaagtacgacaacagcgtggacgtgtacgccttcggcatcctgttctggtacatctgcagcggcagcgtgaagctgcccgaggccttcgagagatgcgccagcaaggaccacctgtggaacaacgtgagaagaggcgccagacccgagagactgcccgtgttcgacgaggagtgctggcagctgatggaggcctgctgggacggcgaccccctgaagagacccctgctgggcatcgtgcagcccatgctgcagggcatcatgaacagactgtgcaagagcaacagcgagcagcccaacagaggcctggacgacagcacctag

SEQ ID NO: 261936 - DNA, 2655 bp, Artificial Sequence
  derived and/or modified sequence
atggagggcgacggcgtgccctggggcagcgagcccgtgagcggccccggccccggcggcggcggcatgatcagagagctgtgcagaggcttcggcagatacagaagatacctgggcagactgagacagaacctgagagagacccagaagttcttcagagacatcaagtgcagccacaaccacacctgcctgagcagcctgaccggcggcggcggcgccgagagaggccccgccggcgacgtggccgagaccggcctgcaggccggccagctgagctgcatcagcttcccccccaaggaggagaagtacctgcagcagatcgtggactgcctgccctgcatcctgatcctgggccaggactgcaacgtgaagtgccagctgctgaacctgctgctgggcgtgcaggtgctgcccaccaccaagctgggcagcgaggagagctgcaagctgagaagactgagattcacctacggcacccagaccagagtgagcctggccctgcccggccagtacgagctggtgcacaccctggtggcccaccagggcaactgggagaccatccccgaggaggacctggaggtgcaggagaacaacgaggacgccgcccacgtgctggccgagctggaggtgaccatgcaccacgccctgctgcaggaggtggacgtggtggtggccccctgccagggcctgagacccaccgtggacgtgctgggcgacctggtgaacgacttcctgcccgtgatcacctacgccctgcacaaggacgagctgagcgagagagacgagcaggagctgcaggagatcagaaagtacttcagcttccccgtgttcttcttcaaggtgcccaagctgggcagcgagatcatcgacagcagcaccagaagaatggagagcgagagaagccccctgtacagacagctgatcgacctgggctacctgagcagcagccactggaactgcggcgcccccggccaggacaccaaggcccagagcatgctggtggagcagagcgagaagctgagacacctgagcaccttcagccaccaggtgctgcagaccagactggtggacgccgccaaggccctgaacctggtgcactgccactgcctggacatcttcatcaaccaggccttcgacatgcagagagacctgcagatcacccccaagagactggagtacaccagaaagaaggagaacgagctgtacgagagcctgatgaacatcgccaacagaaagcaggaggagatgaaggacatgatcgtggagaccctgaacaccatgaaggaggagctgctggacgacgccaccaacatggagttcaaggacgtgatcgtgcccgagaacggcgagcccgtgggcaccagagagatcaagtgctgcatcagacagatccaggagctgatcatcagcagactgaaccaggccgtggccaacaagctgatcagcagcgtggactacctgagagagagcttcgtgggcaccctggagagatgcctgcagagcctggagaagagccaggacgtgagcgtgcacatcaccagcaactacctgaagcagatcctgaacgccgcctaccacgtggaggtgaccttccacagcggcagcagcgtgaccagaatgctgtgggagcagatcaagcagatcatccagagaatcacctgggtgagcccccccgccatcaccctggagtggaagagaaaggtggcccaggaggccatcgagagcctgagcgccagcaagctggccaagagcatctgcagccagttcagaaccagactgaacagcagccacgaggccttcgccgccagcctgagacagctggaggccggccacagcggcagactggagaagaccgaggacctgtggctgagagtgagaaaggaccacgcccccagactggccagactgagcctggagagctgcagcctgcaggacgtgctgctgcacagaaagcccaagctgggccaggagctgggcagaggccagtacggcgtggtgtacctgtgcgacaactggggcggccacttcccctgcgccctgaagagcgtggtgccccccgacgagaagcactggaacgacctggccctggagttccactacatgagaagcctgcccaagcacgagagactggtggacctgcacggcagcgtgatcgactacaactacggcggcggcagcagcatcgccgtgctgctgatcatggagagactgcacagagacctgtacaccggcctgaaggccggcctgaccctggagaccagactgcagatcgccctggacgtggtggagggcatcagattcctgcacagccagggcctggtgcacagagacatcaagctgaagaacgtgctgctggacaagcagaacagagccaagatcaccgacctgggcttctgcaagcccgaggccatgatgagcggcagcatcgtgggcacccccatccacatggcccccgagctgttcaccggcgccagacccgagagactgcccgtgttcgacgaggagtgctggcagctgatggaggcctgctgggacggcgaccccctgaagagacccctgctgggcatcgtgcagcccatgctgcagggcatcatgaacagactgtgcaagagcaacagcgagcagcccaacagaggcctggacgacagcacctag

SEQ ID NO: 261937 - DNA, 6885 bp, Artificial Sequence
  derived and/or modified sequence
ggggaggagggaggccgggcctgcggccggggaccgagccgcaaagacagagcgggcagaggcgatggagggcgacggggtgccatggggcagcgagcccgtctcgggtcccggccccggcggcggcggaatgatccgcgagctgtgccggggcttcggccgctaccgccgctacctgggacggctgcgacagaacctgcgcgagacccagaagttcttccgcgacatcaagtgctcccacaaccacacttgtctctcctccctcacgggcggcggcggggccgagcgcggccctgcaggcgatgtcgccgaaaccgggctgcaggcgggccaactgagctgcatttccttcccacctaaggaagagaagtacctccagcagattgtggactgcctcccttgcatactgatcctcggccaggattgtaacgtcaagtgccagctgttgaatctgctgttgggggtgcaggtgcttcccaccaccaagctgggcagtgaggagagctgtaagcttcggcgcctccgcttcacctatgggactcagactcgggtcagcctggcgctccctggacagtatgaactagtgcacacgctggttgctcatcagggcaactgggagaccatccctgaggaggatctggaggtccaagagaacaatgaggatgctgctcatgttttagcggaactggaggtaacgatgcaccatgctctcttacaggaagtggacgttgtggtagcaccatgccaaggcctccggcccacagtggatgttctgggtgacttggtgaatgatttcttgcctgtgataacctatgcactccacaaagatgaactctctgagagggatgagcaagagcttcaggaaatccgaaagtatttctcctttcctgtattctttttcaaagtgccgaaactgggctcggagataatagactcctcaaccaggagaatggagagcgaaagatcaccgctttatcgccagctaattgacctgggctatctgagcagcagtcactggaactgtggggctcctggccaggatactaaagctcagagcatgttggtggaacagagtgaaaagctgagacacttgagcacattttctcaccaggtgttacagactcgcctggtggatgcagccaaggccctgaacctggtgcactgccactgccttgacatctttattaaccaggcatttgacatgcagcgggacctgcagatcactcccaaacgtctggaatatactcgaaaaaaggagaatgagttgtatgaatcattgatgaatattgccaaccgaaagcaggaggaaatgaaggatatgattgttgagacacttaataccatgaaggaggaacttctggatgatgctactaacatggagtttaaagacgtcattgtccctgagaatggagaaccaatcactgacttaggattctgcaagccagaggccatgatgtcaggcagcattgtggggacaccaatccatatggcccctgaacttttcacagggaagtacgataattccgtggatgtctacgcttttggaattcttttctggtatatctgctcaggctctgtcaagctccctgaggcatttgagaggtgtgctagcaaagaccatctctggaacaatgtgcggaggggggctcgcccagaacgtcttcctgtgtttgatgaggagtgctggcagttgatggaagcctgttgggatggcgaccccttgaagaggcctctcttgggcattgtccagcccatgctccagggcatcatgaatcggctctgcaagtccaattctgagcagccaaacagaggactagatgattctacttgaaagcaaagacctttctctttcactctctagttatttccttccccctcaccttttggccatggggagaatttgacatttattcactataggacacactcccaagggaactggtgcttgctgggaaacttggaaccttcccaggcagggatgactcctggacagtgaagagttgaatgactgagcatattcagcagctcactgaagcgccaagctatccctttagcaaaaaagtgtctcagatgtgtaaaagctgaggaatgtggtgttctggcttcacaaatgaaaaggaggcagatgttaccattgtcttttcactgtatatacttctaagacagcaagcgggacactgcagtggcaatagtgttaaaaaatctcattctcatgatttttggctctagctaggaatagtttagtcaggactcagaaaatttgagcttagttctgggattatgaaaacatggggacaaaaacaataacttgtggatgtctggttcctgctgtctgcagccaggtatctcaggttgcaatggtcagaagtcccagtgagggagctagaaacagagctatctgttcctcatagtgccagtgtgtttacatttataggaccacatatccctggtttctgggggagggtttcactgttacatcaccaagaggccctgaaaagaggaaaaaaaaaaaaaaagaggccaggcatggtggctcacgcctgtaatctcagcactttgggaggctgaggcgggcggatcacaaggtccagagttcaagagcagcctggccaacatggtgaaaccccgtctctactaaagatacaaaaaattagccgggcgtggtggtgcatgcctgtaatccaagatactcaggaggctgaggcaggagaatcgcttgaacctgggaggcggaggttgcagtgagccgagatcatgccattgcactccagcctgggcgacagagtgagactctgtctcaaaaaaaaaaaaaaaatagaatgtgtatgcatatatttgtgtgtatatgtatatatgtgtgtgtgtctatatctctatctatatagacatacacacaggagttattggatttagagttactgctaaccccagaacagaatctgttcttttacctttgagtcttttcttttgtttacctcttttcatctcaaagtgggaaagctccagataacatggtacttaggagtgagtgtctaagcaaaaccaacccaatgcgaagtatttgggtgagaactgagaggtgggagatgattggaggccatggcctatgtacaaacatactggaagaaaaccagcttgtttttaaaacttaacacaatcagaaatttttctttttgtgtttgaatctaacacactgacgtttggaaaacttgatcaatgagcttttaaccacgatttctcccgcaatttgttccttctttttacctttttaaaaatctgttagaagaaaaaaagcagcagacgaaagagaaaaaccctcctctggtagttctgtgtgtgcccctcacccctgtgtgctagtgtctgggaagtttccctgaaaggtgggaggcgggtgggtggtcttttggagggttcctcatgaagtgtgcttgaggaaagaaattctgattctaggcagaggaaggggaacaatttaaatattggtgcatctcagatgcacttgacttcaagccttcctcaaccaaactggtccattagattccgaaaaacaggtagacgaggaagtagacagtggaagtgagtagtctccctccatctgcctaatccccaataactgtggtctggcccctgtgttcagcccgagagtttgtaaaacaggtccccaggtaggtgtataagatgagttgcaaattagccgggcatgctggcacgcaccagtaatcccagctacttgggaggctgaggcaggagaatcacttgaacccgggaggcagaggtcatggtgagccgagatcacgccactgcactccagcctgggcaacagagcgagactctatctcaaaaaaaaacaaaaaaaaaaacaaaaaacaaagatgagtcgcacatctgctgctgggattttctagggttgtctatgacagaatgaccatcttttaaatattaatggagtataaatggagtctataatgggtctttcatataacttttaactctttggctatcctgggctctgatcatgatatgtttgagcatagtagctccctaaactcttggagcctttcagaaattccatgtagtgctaataacctttttacttgcaaatgataaagtaactgactcagtgtctttgggctctgcaggctttagccttgttttggtaggatgttcagtatattctcagaatttttaccacctatttagctatacttcaagtactctattctctgcactaacttactgtccttctgggaactatgatggggcttcaagggagtcaggtgtcaagaaaggaggggtaagtactctctacttgctggaaaatcattgtaagtctgttgtgtatgaaattttaggaaaagtcttatatagttccctttccagactgttttcttttgactctaactataatcataagtctgtgcttccattatgaaggtcacattcctagcattcttgggaagtattagctcatactctcattcacatatgggaggttagatttttttcctctacccagagtccctttttagtttaccccacggcttagtttgctgtcagataccagttctctagcagattccccaacagttttttccccagtggggagggtggaagggagggactgatataagtaaggagatgagtagttgtgttacagttcattttctttaaaaaaaagtattttgagaaaaggtgcaaaatattcttgaaagtctctaggccagccaaagtccacatatggatatttggggatgttatttaaatactcagcaggctgagtgcaggtatacgtgtgtatagagtgtgtatactttgcttttgttttataacattgtcagctaattttggctttgttctttggcatccattcttattataagtgatggaatgccatgaaatgtactgtattgtatattacttgggaggacactaggttttcaaagaagtctggcagcacttgggttatagagggctcagcatgaccaaagtcctaaagattttacctcccagctttggttgtatgtgttcccaagtggtgaggtgagattgtggctggaggaagaaaaaggatggcatgaaagaatgacccttattgtggtctgtccttctaatcaacataattagggcagcttaccccaacatgaaaatgatgacctggccatttttaatggccagagcttgaagtctggtctctcattttgtttcagaaatgagtgagaggccttcctgcagagcagtcaggagaaatggtggagcctggggccctggaatggctgaccctgtgcctagagagctgatggcaagggctgtctggcatggctcatttgggtggggtttccccaggcataccttagttccctgatcctctgcaaagagtagctcattgactgagcaagcgcttcaggaggactgtgctggttgttcccagaccaaagagagtcacttttgactccatcaacttcaaggggacagagcctaggcagcagattctcctaatttttaacactaaaattcaaggaagcagtggaggaaagaatgcattactaccacagatagaaataggggactcatagaactctcgactagtacctgtcagctctcaaatgcattcttgtgtctttgcttgagctgccaaagaagggtcacaaagtgttcttcctcatggaagaagtgcctcggggttgcagggctgcaaagtgacaactgcactgaatgacactttattttttggctttggcttattatttagcactgggaggcccaggggaattggtgattacagtagcactttgggaagttaaagccccctttgggcttgctttggagagatgatggcatgcttggtattccatttggataatcaggaagcctccctagtccatccatattgtgtcagagtgggattaacaaccctggaagagtccactgccaaaagagtagttgctttcctggaatttccaaagcttttggattttctggatcaagtaacccactttttaaaacctgaggtcaggagttcgagaccagcctggtaacatggtgaaaccccgtctctattaaaaatagaaaaaattagccaggcatggtggcgggcacctatagtcccagctactcaggaggctgaggtaggagaattgcttgaacccaggagacagaggctgcattgagccaagatcacaccactgcactccagcctgggcagcagagcaagactccatctcaaaaaaaaaaaaaagaaaaagaaaaagaaggttaatccttcagttatggaggtgggatgaatagagcttgtttgatgttaaagtgggtaaggagggagtggccttgagacacttgtattccaaactctcctggaggtttccagtagcactactgttcctaaaagggtttcatttttaacttcatctgttttgttaacatccagtccaattgaggtgatctcagaggtgcatcaggacatctagcactggggaggccaccttgcccagatagttgaaaagaaaattggtctgggcagcctgttgtcttttgtcttcatgtaatgttttttctttgttttaaaggactaatgtttattacagtgttaaataaaagtgtaagatactaagtgtgtagaataaaagtgcaataacaaaagacaatgactttggcacacacttcagtctttatcctctctcctttcttgtgctacctggctctttccataatattgttacagcaggaccgtcttaattgtgtgcattttgaagagatgcgactctgggttaatcttcattagtgtaatattgaagggttgggtttggttttatagagtattctgtatacttgttgggatacacaaataccagatgtgctgtataataaagatcacattaacgtttt

SEQ ID NO: 261938 - DNA, 7739 bp, Artificial Sequence
  derived and/or modified sequence
ccgagccgcaaagacagagcgggcagaggcgatggagggcgacggggtgccatggggcagcgagcccgtctcgggtcccggccccggcggcggcggaatgatccgcgagctgtgccggggcttcggccgctaccgccgctacctgggacggctgcgacagaacctgcgcgagacccagaagttcttccgcgacatcaagtgctcccacaaccacacttgtctctcctccctcacgggcggcggcggggccgagcgcggccctgcaggcgatgtcgccgaaaccgggctgcaggcgggccaactgagctgcatttccttcccacctaaggaagagaagtacctccagcagattgtggactgcctcccttgcatactgatcctcggccaggattgtaacgtcaagtgccagctgttgaatctgctgttgggggtgcaggtgcttcccaccaccaagctgggcagtgaggagagctgtaagcttcggcgcctccgcttcacctatgggactcagactcgggtcagcctggcgctccctggacagtatgaactagtgcacacgctggttgctcatcagggcaactgggagaccatccctgaggaggatctggaggtccaagagaacaatgaggatgctgctcatgttttagcggaactggaggtaacgatgcaccatgctctcttacaggaagtggacgttgtggtagcaccatgccaaggcctccggcccacagtggatgttctgggtgacttggtgaatgatttcttgcctgtgataacctatgcactccacaaagatgaactctctgagagggatgagcaagagcttcaggaaatccgaaagtatttctcctttcctgtattctttttcaaagtgccgaaactgggctcggagataatagactcctcaaccaggagaatggagagcgaaagatcaccgctttatcgccagctaattgacctgggctatctgagcagcagtcactggaactgtggggctcctggccaggatactaaagctcagagcatgttggtggaacagagtgaaaagctgagacacttgagcacattttctcaccaggtgttacagactcgcctggtggatgcagccaaggccctgaacctggtgcactgccactgccttgacatctttattaaccaggcatttgacatgcagcgggacctgcagatcactcccaaacgtctggaatatactcgaaaaaaggagaatgagttgtatgaatcattgatgaatattgccaaccgaaagcaggaggaaatgaaggatatgattgttgagacacttaataccatgaaggaggaacttctggatgatgctactaacatggagtttaaagacgtcattgtccctgagaatggagaaccagtaggcaccagagagatcaaatgctgcatccgacagatccaggaactcatcatctcccgacttaatcaggcagtggctaataagctgatcagctcagtggattacctgagggaaagcttcgtcggaaccctggaacgatgtctgcagagcctggagaagtctcaggatgtctcagttcacatcaccagtaattatctcaaacagatcttaaatgctgcctatcatgttgaagtcacgtttcactcagggtcgtcagttacaaggatgctatgggagcaaatcaaacagatcatccagcgcatcacatgggtgagcccacctgccatcactctggaatggaagaggaaggtggcccaggaagccattgagagcctcagcgcctccaaattggctaagagcatttgcagccaattccggactcggctcaatagttcccacgaggcttttgcagcctccttgcggcagctggaagctggccactcaggccggttagagaaaacggaagatctatggctgagggttcggaaagatcatgctccccgcctggcccgcctttctctggaaagctgttctttacaggatgtcttgcttcatcgtaaacctaaactgggacaggaactgggccggggccagtatggtgtggtatacctgtgtgacaactggggaggacacttcccttgtgccctcaaatcagttgtccctccagatgagaagcactggaatgatctggctttggaatttcactatatgaggtctctgccgaagcatgagcgattggtggatctccatggttcagtcattgactacaactatggtggtggctccagcattgctgtgctcctcattatggagcggctacaccgggatctctacacagggctgaaggctgggctgaccctggagacacgtttgcagatagcactagatgtggtggagggaatccgcttcctgcacagccagggacttgtccatcgtgatatcaaactgaaaaatgtgctgctggataagcagaaccgtgccaagatcactgacttaggattctgcaagccagaggccatgatgtcaggcagcattgtggggacaccaatccatatggcccctgaacttttcacaggggctcgcccagaacgtcttcctgtgtttgatgaggagtgctggcagttgatggaagcctgttgggatggcgaccccttgaagaggcctctcttgggcattgtccagcccatgctccagggcatcatgaatcggctctgcaagtccaattctgagcagccaaacagaggactagatgattctacttgaaagcaaagacctttctctttcactctctagttatttccttccccctcaccttttggccatggggagaatttgacatttattcactataggacacactcccaagggaactggtgcttgctgggaaacttggaaccttcccaggcagggatgactcctggacagtgaagagttgaatgactgagcatattcagcagctcactgaagcgccaagctatccctttagcaaaaaagtgtctcagatgtgtaaaagctgaggaatgtggtgttctggcttcacaaatgaaaaggaggcagatgttaccattgtcttttcactgtatatacttctaagacagcaagcgggacactgcagtggcaatagtgttaaaaaatctcattctcatgatttttggctctagctaggaatagtttagtcaggactcagaaaatttgagcttagttctgggattatgaaaacatggggacaaaaacaataacttgtggatgtctggttcctgctgtctgcagccaggtatctcaggttgcaatggtcagaagtcccagtgagggagctagaaacagagctatctgttcctcatagtgccagtgtgtttacatttataggaccacatatccctggtttctgggggagggtttcactgttacatcaccaagaggccctgaaaagaggaaaaaaaaaaaaaaagaggccaggcatggtggctcacgcctgtaatctcagcactttgggaggctgaggcgggcggatcacaaggtccagagttcaagagcagcctggccaacatggtgaaaccccgtctctactaaagatacaaaaaattagccgggcgtggtggtgcatgcctgtaatccaagatactcaggaggctgaggcaggagaatcgcttgaacctgggaggcggaggttgcagtgagccgagatcatgccattgcactccagcctgggcgacagagtgagactctgtctcaaaaaaaaaaaaaaaatagaatgtgtatgcatatatttgtgtgtatatgtatatatgtgtgtgtgtctatatctctatctatatagacatacacacaggagttattggatttagagttactgctaaccccagaacagaatctgttcttttacctttgagtcttttcttttgtttacctcttttcatctcaaagtgggaaagctccagataacatggtacttaggagtgagtgtctaagcaaaaccaacccaatgcgaagtatttgggtgagaactgagaggtgggagatgattggaggccatggcctatgtacaaacatactggaagaaaaccagcttgtttttaaaacttaacacaatcagaaatttttctttttgtgtttgaatctaacacactgacgtttggaaaacttgatcaatgagcttttaaccacgatttctcccgcaatttgttccttctttttacctttttaaaaatctgttagaagaaaaaaagcagcagacgaaagagaaaaaccctcctctggtagttctgtgtgtgcccctcacccctgtgtgctagtgtctgggaagtttccctgaaaggtgggaggcgggtgggtggtcttttggagggttcctcatgaagtgtgcttgaggaaagaaattctgattctaggcagaggaaggggaacaatttaaatattggtgcatctcagatgcacttgacttcaagccttcctcaaccaaactggtccattagattccgaaaaacaggtagacgaggaagtagacagtggaagtgagtagtctccctccatctgcctaatccccaataactgtggtctggcccctgtgttcagcccgagagtttgtaaaacaggtccccaggtaggtgtataagatgagttgcaaattagccgggcatgctggcacgcaccagtaatcccagctacttgggaggctgaggcaggagaatcacttgaacccgggaggcagaggtcatggtgagccgagatcacgccactgcactccagcctgggcaacagagcgagactctatctcaaaaaaaaacaaaaaaaaaaacaaaaaacaaagatgagtcgcacatctgctgctgggattttctagggttgtctatgacagaatgaccatcttttaaatattaatggagtataaatggagtctataatgggtctttcatataacttttaactctttggctatcctgggctctgatcatgatatgtttgagcatagtagctccctaaactcttggagcctttcagaaattccatgtagtgctaataacctttttacttgcaaatgataaagtaactgactcagtgtctttgggctctgcaggctttagccttgttttggtaggatgttcagtatattctcagaatttttaccacctatttagctatacttcaagtactctattctctgcactaacttactgtccttctgggaactatgatggggcttcaagggagtcaggtgtcaagaaaggaggggtaagtactctctacttgctggaaaatcattgtaagtctgttgtgtatgaaattttaggaaaagtcttatatagttccctttccagactgttttcttttgactctaactataatcataagtctgtgcttccattatgaaggtcacattcctagcattcttgggaagtattagctcatactctcattcacatatgggaggttagatttttttcctctacccagagtccctttttagtttaccccacggcttagtttgctgtcagataccagttctctagcagattccccaacagttttttccccagtggggagggtggaagggagggactgatataagtaaggagatgagtagttgtgttacagttcattttctttaaaaaaaagtattttgagaaaaggtgcaaaatattcttgaaagtctctaggccagccaaagtccacatatggatatttggggatgttatttaaatactcagcaggctgagtgcaggtatacgtgtgtatagagtgtgtatactttgcttttgttttataacattgtcagctaattttggctttgttctttggcatccattcttattataagtgatggaatgccatgaaatgtactgtattgtatattacttgggaggacactaggttttcaaagaagtctggcagcacttgggttatagagggctcagcatgaccaaagtcctaaagattttacctcccagctttggttgtatgtgttcccaagtggtgaggtgagattgtggctggaggaagaaaaaggatggcatgaaagaatgacccttattgtggtctgtccttctaatcaacataattagggcagcttaccccaacatgaaaatgatgacctggccatttttaatggccagagcttgaagtctggtctctcattttgtttcagaaatgagtgagaggccttcctgcagagcagtcaggagaaatggtggagcctggggccctggaatggctgaccctgtgcctagagagctgatggcaagggctgtctggcatggctcatttgggtggggtttccccaggcataccttagttccctgatcctctgcaaagagtagctcattgactgagcaagcgcttcaggaggactgtgctggttgttcccagaccaaagagagtcacttttgactccatcaacttcaaggggacagagcctaggcagcagattctcctaatttttaacactaaaattcaaggaagcagtggaggaaagaatgcattactaccacagatagaaataggggactcatagaactctcgactagtacctgtcagctctcaaatgcattcttgtgtctttgcttgagctgccaaagaagggtcacaaagtgttcttcctcatggaagaagtgcctcggggttgcagggctgcaaagtgacaactgcactgaatgacactttattttttggctttggcttattatttagcactgggaggcccaggggaattggtgattacagtagcactttgggaagttaaagccccctttgggcttgctttggagagatgatggcatgcttggtattccatttggataatcaggaagcctccctagtccatccatattgtgtcagagtgggattaacaaccctggaagagtccactgccaaaagagtagttgctttcctggaatttccaaagcttttggattttctggatcaagtaacccactttttaaaacctgaggtcaggagttcgagaccagcctggtaacatggtgaaaccccgtctctattaaaaatagaaaaaattagccaggcatggtggcgggcacctatagtcccagctactcaggaggctgaggtaggagaattgcttgaacccaggagacagaggctgcattgagccaagatcacaccactgcactccagcctgggcagcagagcaagactccatctcaaaaaaaaaaaaaagaaaaagaaaaagaaggttaatccttcagttatggaggtgggatgaatagagcttgtttgatgttaaagtgggtaaggagggagtggccttgagacacttgtattccaaactctcctggaggtttccagtagcactactgttcctaaaagggtttcatttttaacttcatctgttttgttaacatccagtccaattgaggtgatctcagaggtgcatcaggacatctagcactggggaggccaccttgcccagatagttgaaaagaaaattggtctgggcagcctgttgtcttttgtcttcatgtaatgttttttctttgttttaaaggactaatgtttattacagtgttaaataaaagtgtaagatactaagtgtgtagaataaaagtgcaataacaaaagacaatgactttggcacacacttcagtctttatcctctctcctttcttgtgctacctggctctttccataatattgttacagcaggaccgtcttaattgtgtgcattttgaagagatgcgactctgggttaatcttcattagtgtaatattgaagggttgggtttggttttatagagtattctgtatacttgttgggatacacaaataccagatgtgctgtataataaagatcacattaacgttt

SEQ ID NO: 261939 - protein, 229 aa, Artificial Sequence
  derived and/or modified sequence
MSSQELVTLNVGGKIFTTRFSTIKQFPASRLARMLDGRDQEFKMVGGQIFVDRDGDLFSFILDFLRTHQLLLPTEFSDYLRLQREALFYELRSLVDLLNPYLLQPRPALVEVHFLSRNTQAFFRVFGSCSKTIEMLTGRITVFTEQPSAPTWNGNFFPPQMTLLPLPPQRPSYHDLVFQCGSDSTTDNQTGVRLVCNGVISAHHNLRLWGSSDSPASASRVAGITGMFL

SEQ ID NO: 261940 - DNA, 690 bp, Artificial Sequence
  derived and/or modified sequence
atgagcagccaggagctggtgaccctgaacgtgggcggcaagatcttcaccaccagattcagcaccatcaagcagttccccgccagcagactggccagaatgctggacggcagagaccaggagttcaagatggtgggcggccagatcttcgtggacagagacggcgacctgttcagcttcatcctggacttcctgagaacccaccagctgctgctgcccaccgagttcagcgactacctgagactgcagagagaggccctgttctacgagctgagaagcctggtggacctgctgaacccctacctgctgcagcccagacccgccctggtggaggtgcacttcctgagcagaaacacccaggccttcttcagagtgttcggcagctgcagcaagaccatcgagatgctgaccggcagaatcaccgtgttcaccgagcagcccagcgcccccacctggaacggcaacttcttccccccccagatgaccctgctgcccctgcccccccagagacccagctaccacgacctggtgttccagtgcggcagcgacagcaccaccgacaaccagaccggcgtgagactggtgtgcaacggcgtgatcagcgcccaccacaacctgagactgtggggcagcagcgacagccccgccagcgccagcagagtggccggcatcaccggcatgttcctgtag

SEQ ID NO: 261941 - DNA, 690 bp, Artificial Sequence
  derived and/or modified sequence
atgtctagccaggagctggtgacgttgaacgtcggtggaaaaattttcacaactaggttcagcaccatcaaacagttcccagcctctcgattggcacgcatgttggacggacgagaccaggagttcaaaatggtggggggccagatctttgtcgaccgtgacggcgatctgttcagctttattctcgacttcctgaggacccaccagctgctgctgcctaccgaattcagcgactacctgaggcttcagcgcgaggctctattctatgagttaagatccctagtcgacttgctcaacccttatttgctgcagccaagaccagcgttggtggaggtgcactttttgagtcgtaacacccaagccttctttagagtttttggaagttgttcgaagacaatcgagatgttgactggacggattaccgttttcactgagcagccttccgccccaacctggaatggaaatttttttccaccgcaaatgaccctactgcctctgccacctcaaagaccgtcataccatgacttagtgtttcagtgcggatctgactctaccaccgataatcagacaggtgtgcgcctcgtatgcaacggggtgatttcagctcaccataatttaagactgtggggatctagcgactcacccgcctccgcgtcaagagtggcaggaatcactgggatgttcttgtag

SEQ ID NO: 261942 - DNA, 690 bp, Artificial Sequence
  derived and/or modified sequence
atgagcagccaggagctggtgaccctgaatgtgggcggcaagatcttcaccacccgcttcagcaccatcaagcagtttcctgccagccggctggccaggatgctggatggccgggaccaggagttcaagatggtgggcggccagatctttgtggacagagatggagacctcttctccttcatcctggacttcctgcggacccaccagctgctgctgcccacagagttcagtgactacctgcggctgcagcgggaggccctcttctatgagctgcggagcctggtggacctgctgaacccctacctgctgcagcccaggcctgccctggtggaggtgcacttcctgagcaggaacacccaggccttcttccgggtgtttggcagctgcagcaagaccatcgagatgctgaccggccgcatcaccgtcttcacagagcagcccagcgcccccacctggaatggaaacttcttccccccccagatgaccctgctgcccctgcccccccagaggcccagctaccatgacctggtgttccagtgtggcagtgacagcaccacagacaaccagacaggagtgcggctggtgtgcaatggagtcatcagcgcccaccacaacctgcggctgtggggcagcagtgacagccctgccagcgccagccgggtggccggcatcaccggcatgttcctgtag

SEQ ID NO: 261943 - DNA, 690 bp, Artificial Sequence
  derived and/or modified sequence
atgagcagccaggagctggtgaccctgaacgtgggcggcaagatcttcacgacaagattcagcaccattaagcagttccccgcctccagactggctcggatgctcgatggcagggaccaggaattcaaaatggtaggtggccaaatctttgtagatagggatggagatctgttttcttttattttagactttctaaggactcatcagttgcttcttccaacagagttctctgactatttgaggctgcagcgagaggccctgttctacgaactccgctcgttggtggatctgctcaatccctatctattgcagccgcgccccgcgctcgtggaggtgcatttcctgtcccggaacacgcaggcattcttccgcgtctttgggtcatgtagcaaaacaattgaaatgcttactggcaggatcacagtgttcaccgagcagccttccgccccaacatggaacggtaattttttccccccccagatgaccttgctgccattgcctccccagaggccgagctatcacgacctcgtattccaatgcggaagtgatagcacaacagataaccaaaccggggtgcgtctggtttgcaatggtgtgatatctgcacatcataaccttcgcttatgggggtcctctgatagtcctgcttcagcttctagggttgctgggattacaggcatgttcctgtag

SEQ ID NO: 261944 - DNA, 1623 bp, Artificial Sequence
  derived and/or modified sequence
agttcctcatctgttgctttttcattttgtatactgcaagttcccaggcaactcgaatttgcaaacacagccatggatacactatttaccttacagtagtttcctgggaatctaagtctggtttttgttattcttccctcccctccactgcataatcatgtataactagcaacatttatggttataggttgatttcctaagtgtggctgatggtagcctctagtttgaagtgagggaagaatgagtagtcaggaactggtcactttgaatgtgggagggaagatattcacgacaaggttttctacgataaagcagtttcctgcttctcgtttggcacgcatgttagatggcagagaccaagaattcaagatggttggtggccagatttttgtagacagagatggtgatttgtttagtttcatcttagattttttgagaactcaccagcttttattacccactgaattttcagactatcttaggcttcagagagaggctcttttctatgaacttcgttctctagttgatctcttaaacccatacctgctacagccaagacctgctcttgtggaggtacatttcctaagccggaacactcaagcttttttcagggtgtttggctcttgcagcaaaacaattgagatgctaacagggaggattacagtgtttacagaacaaccttcagcgccgacctggaatggtaactttttccctcctcagatgaccttacttccactgcctccacaaagaccttcttaccatgacctggttttccagtgtggttctgacagcactactgataaccaaactggagtcaggctggtatgcaatggcgtgatctcggctcaccacaacctccgcctctggggttcaagtgattctcctgcctcagcctcccgagtagctgggattacaggtatgtttctataaaacctgataaccgaaaattggccaacggaacaaatgtcctcggcttactgattgacactttattaaaggaaggctttcatttggtcagcactagaacagtatcttctgaagacaaaactgaatgctatagctttgaaaggataaaaagccctgaagtgctcatcacgaatgaaacaccaaaaccagagactatcatcataccagagcaatctcagataaagaaatgaagttgtctatcctcttttaaagagaaattgccatttttcttgtttcattacgtatttagggcatacatgttagccaaatctacactcagcctaactcttggcttcatctgctgccatgccgtctctgggcaaccaggccccaactgtgcttaagccataatgcctgctgctctctagacaactccatgtacttggtgctttggtatatgttctaccttcaatacatctttccctttctcttcttcatgaatgcttatgagccgagattgcgccactgcacactagcttgggtgacagaggaagactgtctcaaaaaaaaaaaaattgatcaaactgatggataccctaagtaccctgacttgatcattacaccttctatgcatgcaacaaaatgccacgtgtaccccataaatatgtagaaatattatatgtaaataaatagttgggccttccgtattttcccact

SEQ ID NO: 261945 - DNA, 690 bp, Artificial Sequence
  derived and/or modified sequence
atgtcctctcaggagctcgttacgctgaacgtgggcggtaaaatcttcacaacacgattcagcaccattaaacagttcccggctagccgcttggcaagaatgttggatgggcgagaccaggaattcaagatggtgggtggccaaatcttcgtggaccgcgatggtgaccttttttcttttatcttggactttctgcggacgcatcagttgcttcttcccacggagttcagcgactatttgcggctccagcgagaggccctgttctatgaacttagatcgctcgtagacctcctgaacccttacctccttcagcctcggccagcccttgtagaagtccattttctgtcccgtaatactcaggcattcttcagagtcttcggttcctgctccaagaccatcgagatgctcacaggccgtatcaccgttttcacagaacaaccttccgccccaacctggaacggaaacttctttcctcctcagatgacacttctcccgctgcctccacaaaggccatcttaccacgacctcgtcttccagtgcggatctgacagcacgaccgataaccagaccggcgtccggctggtttgcaatggagtcatcagcgctcaccacaacttgagactgtggggatccagtgatagccctgcttctgcctctagggtggccggaattacgggaatgttcctatag

SEQ ID NO: 261946 - protein, 242 aa, Artificial Sequence
  derived and/or modified sequence
MGLLECCARCLVGAPFASLVATGLCFFGVALFCGCGHEALTGTEKLIETYFSKNYQDYEYLINVIHAFQYVIYGTASFFFLYGALLLAEGFYTTGAVRQIFGDYKTTICGKGLSATFVGITYALTVVWLLVFACSAVPVYIYFNTWTTCQSIAFPSKTSASIGSLCADARMYGVLPWNAFPGKVCGSNLLSICKTAEFQMTFHLFIAAFVGAAATLVSLLTFMIAATYNFAVLKLMGRGTKF

SEQ ID NO: 261947 - protein, 100 aa, Artificial Sequence
  derived and/or modified sequence
MGLLECCARCLVGAPFASLVATGLCFFGVALFCGCGHEALTGTEKLIETYFSKNYQDYEYLINVIHAFQYVIYGTASFFFLYGALLLAEGFYTTGAVRQI

SEQ ID NO: 261948 - protein, 112 aa, Artificial Sequence
  derived and/or modified sequence
MGLLECCARCLVGAPFASLVATGLCFFGVALFCGCGHEALTGTEKLIETYFSKNYQDYEYLINVIHAFQYVIYGTASFFFLYGALLLAEGFYTTGAVRQIFGDYKTTICGKG

SEQ ID NO: 261949 - DNA, 729 bp, Artificial Sequence
  derived and/or modified sequence
atgggcctcttagaatgttgcgctaggtgcctcgtgggcgcccccttcgcctcacttgttgcgactgggctttgtttcttcggcgtcgccttattctgcggatgtgggcatgaggcactaaccggtactgaaaaactgatcgaaacctatttcagcaagaattatcaggactatgagtatcttattaatgttatccatgcttttcagtacgtaatctatggcacggcttcattcttcttcctttacggtgccctacttcttgcagagggcttttacacaaccggggccgtgcggcagattttcggcgactataaaacaaccatttgtggtaagggactgtccgccactttcgtgggtattacctatgctctcaccgtagtgtggttactggtgttcgcgtgcagtgcggtgccggtatacatctatttcaacacttggacaacctgtcaaagcattgctttccctagtaaaactagcgccagtatcggaagtctctgcgctgacgctaggatgtacggagtcttgccatggaacgctttccccggaaaggtgtgtggctccaatctgctttccatttgtaagactgccgagttccagatgaccttccacctgttcattgctgcatttgtaggagctgcagctacgttggtgtccttgctgacattcatgatcgccgccacctataattttgctgtgctcaaactcatgggtcgcggaactaaattctag

SEQ ID NO: 261950 - DNA, 303 bp, Artificial Sequence
  derived and/or modified sequence
atgggattactggaatgctgcgcccgttgtctcgtgggggcgccttttgcaagcctggtggcgacaggtttatgtttcttcggcgtggccttgttttgtggctgcggccacgaggccctcactggcacggaaaagctgatagaaacttacttttccaaaaattaccaagactatgaatatctgatcaacgttatacatgcattccagtacgtgatttacggcacagccagcttcttcttcctatacggggccctcttacttgccgaaggattttatactactggggcagtgcggcagatctag

SEQ ID NO: 261951 - DNA, 339 bp, Artificial Sequence
  derived and/or modified sequence
atgggcttgctcgaatgctgcgcaaggtgtctggtcggtgccccctttgcttccctggtcgctacgggcctttgtttctttggggtagccctgttctgcggttgtggccacgaagctctcactgggacagagaagctgattgaaacgtatttctccaagaactaccaggactacgaatacctgatcaacgtgattcacgcattccagtacgttatttacgggactgcatccttcttctttctttacggagccctgctgctggcagagggcttctataccactggcgctgtgagacaaatctttggagactacaaaaccacaatttgcggaaaggggtag

SEQ ID NO: 261952 - DNA, 729 bp, Artificial Sequence
  derived and/or modified sequence
atgggcctgctggagtgctgtgcccgctgcctggtgggcgccccctttgccagcctggtggccaccggcctgtgcttctttggagtggccctcttctgtggctgcggccacgaggccctgactggaacagagaagctgattgagacctacttcagcaagaactaccaggactatgagtacctgatcaacgtcatccacgccttccagtatgtgatctatggaacagccagcttcttcttcctgtatggagccctgctgctggccgagggcttctacaccaccggggctgtgcggcagatctttggagactacaagaccaccatctgtgggaagggcctgagcgccacctttgtgggcatcacctacgccctgactgtggtgtggctgctggtgtttgcctgcagcgctgtgcctgtgtacatctacttcaacacctggaccacctgccagagcatcgccttccccagcaagaccagcgccagcatcggcagcctgtgtgctgatgccaggatgtatggagtgctgccctggaatgccttccctgggaaggtgtgtggcagcaacctgctgagcatctgcaagacagctgagttccagatgaccttccacctgttcatcgccgcctttgtgggcgctgctgccaccctggtgtccctgctgaccttcatgattgctgccacctacaactttgctgtgctgaagctgatgggccggggcaccaagttctag

SEQ ID NO: 261953 - DNA, 303 bp, Artificial Sequence
  derived and/or modified sequence
atgggcctgctggagtgctgtgcccgctgcctggtgggcgccccctttgccagcctggtggccaccggcctgtgcttctttggagtggccctcttctgtggctgcggccacgaggccctgactggaacagagaagctgattgagacctacttcagcaagaactaccaggactatgagtacctgatcaacgtcatccacgccttccagtatgtgatctatggaacagccagcttcttcttcctgtatggagccctgctgctggccgagggcttctacaccaccggggctgtgcggcagatctag

SEQ ID NO: 261954 - DNA, 339 bp, Artificial Sequence
  derived and/or modified sequence
atgggcctgctggagtgctgtgcccgctgcctggtgggcgccccctttgccagcctggtggccaccggcctgtgcttctttggagtggccctcttctgtggctgcggccacgaggccctgactggaacagagaagctgattgagacctacttcagcaagaactaccaggactatgagtacctgatcaacgtcatccacgccttccagtatgtgatctatggaacagccagcttcttcttcctgtatggagccctgctgctggccgagggcttctacaccaccggggctgtgcggcagatctttggagactacaagaccaccatctgtgggaaaggatag

SEQ ID NO: 261955 - DNA, 729 bp, Artificial Sequence
  derived and/or modified sequence
atgggcctgctggagtgctgcgcccggtgcctggtgggcgccccctttgcttcactcgtggctactggcctgtgtttttttggggttgctctgttctgcgggtgcggacacgaagccctgacagggacggagaaactgatcgaaacctacttttcaaagaattaccaagactatgagtatttgatcaacgttatccatgcttttcagtacgttatctacggaacagcctcatttttctttctctatggagccctcctcctggccgaggggttctatactacaggtgctgtgcgacagattttcggggactataagaccacaatttgtggcaaaggactgagtgccacatttgtggggatcacctatgctctaactgtggtttggcttctggtgttcgcatgtagtgccgtgccagtttacatttactttaacacttggacaacctgccagtccatcgctttcccctccaaaaccagcgcaagcatcggaagcttatgcgcagatgcccggatgtacggtgttctcccgtggaatgcgttcccaggaaaggtgtgcggtagtaacctgctttcaatctgtaagacggcggaattccagatgacatttcacctgttcatcgccgcattcgtgggggccgccgccacactggtgagtctgctgaccttcatgattgccgctacttacaacttcgcagtcctaaagcttatgggccggggtaccaaattctag

SEQ ID NO: 261956 - DNA, 303 bp, Artificial Sequence
  derived and/or modified sequence
atgggcctgctggagtgctgcgcccggtgcctggtgggcgcccccttcgcttcactggtagcaaccggcctttgcttctttggggttgcgctgttttgtggttgcggccacgaagctctgaccggcactgagaaattgattgaaacttatttttcaaagaattatcaagactatgagtatttaatcaatgtaatccacgcctttcagtacgtaatctatggcactgcatcatttttctttctgtatggtgccctcctgttggctgaagggttttatacaacaggggctgtacgccagatctag

SEQ ID NO: 261957 - DNA, 339 bp, Artificial Sequence
  derived and/or modified sequence
atgggcctgctggagtgctgcgcccggtgcctggtgggcgcccccttcgccagcttggtcgccacaggcctatgcttcttcggcgtggccctgttttgcggatgtggacatgaggccctgaccggaaccgagaagctaatcgagacgtatttttctaagaattaccaggactatgagtatctcatcaatgtgattcacgcttttcagtacgtaatctacgggaccgccagcttcttcttcctgtatggcgcgctgctcttggccgaaggcttctacacaacaggtgctgtgcgccaaatattcggcgactacaagacaactatctgtggcaagggatag

SEQ ID NO: 261958 - DNA, 729 bp, Artificial Sequence
  derived and/or modified sequence
atggggctgcttgagtgctgcgccagatgtctcgtgggcgcacctttcgcctctctcgtagctacaggtctgtgtttctttggggtggcgcttttttgtggttgtggccatgaggccctcactgggacagagaagcttatcgagacatatttcagcaaaaattaccaggattacgaatatttgattaacgtgattcatgcatttcaatatgtcatttatgggaccgctagtttcttcttcctgtacggagcgctcctgttggccgaggggttttacactacaggagccgtgcgccagatatttggagattacaaaacaacaatatgtggtaagggcctgtccgccaccttcgtgggcattacctacgcacttacagtcgtgtggctcctggtctttgcctgtagcgcggttccagtgtatatctacttcaacacgtggaccacttgtcagagcatcgcttttccatctaagacctctgcttcaatcgggtctttgtgcgcagacgcgaggatgtacggtgtgctgccctggaacgcctttccaggcaaagtatgcggctcaaacttactgtcgatctgcaaaactgcggaatttcagatgacgtttcacctgttcatcgctgcctttgtcggggctgctgcaactctcgtgtccctgctcaccttcatgatagccgcaacctataactttgcagtacttaaactcatggggagaggtactaaattttag

SEQ ID NO: 261959 - DNA, 303 bp, Artificial Sequence
  derived and/or modified sequence
atgggcttacttgagtgttgtgcccgatgcttggttggggctccctttgcctctctggtggcaacagggctgtgcttttttggggtagccctgttttgtgggtgcggccatgaggcccttacaggcacggagaagttgatcgagacttactttagtaagaattaccaagattacgagtacctgattaacgtaatacacgccttccagtatgtgatctacggaacagctagcttctttttcctgtacggcgctttactgctggccgaagggttctatactaccggcgctgtgcggcaaatttag

SEQ ID NO: 261960 - DNA, 339 bp, Artificial Sequence
  derived and/or modified sequence
atgggtctcctggaatgctgtgcccgatgtctcgtgggcgcaccttttgccagcctggtggctaccgggctgtgttttttcggcgtggcgctgttctgcggttgtgggcacgaagcactgaccggtactgagaagttaatcgagacttacttctcaaagaattaccaagactatgagtacctgattaacgtgattcacgccttccaatacgttatttatggaacagcatcattctttttcttatacggagcgttactactggctgagggattttacactacaggagcagtgaggcaaattttcggagattacaagactacaatctgcggcaaggggtag

SEQ ID NO: 261961 - DNA, 2897 bp, Artificial Sequence
  derived and/or modified sequence
caggagaagaggacaaagatactcagagagaaaaagtaaaagaccgaagaaggaggctggagagaccaggatccttccagctgaacaaagtcagccacaaagcagactagccagccggctacaattggagtcagagtcccaaagacatgggcttgttagagtgctgtgcaagatgtctggtaggggccccctttgcttccctggtggccactggattgtgtttctttggggtggcactgttctgtggctgtggacatgaagccctcactggcacagaaaagctaattgagacctatttctccaaaaactaccaagactatgagtatctcatcaatgtgatccatgccttccagtatgtcatctatggaactgcctctttcttcttcctttatggggccctcctgctggctgagggcttctacaccaccggcgcagtcaggcagatctttggcgactacaagaccaccatctgcggcaagggcctgagcgcaacgtttgtgggcatcacctatgccctgaccgttgtgtggctcctggtgtttgcctgctctgctgtgcctgtgtacatttacttcaacacctggaccacctgccagtctattgccttccccagcaagacctctgccagtataggcagtctctgtgctgatgccagaatgtatggtgttctcccatggaatgctttccctggcaaggtttgtggctccaaccttctgtccatctgcaaaacagctgagttccaaatgaccttccacctgtttattgctgcatttgtgggggctgcagctacactggtttccctgctcaccttcatgattgctgccacttacaactttgccgtccttaaactcatgggccgaggcaccaagttctgatcccccgtagaaatccccctttctctaatagcgaggctctaaccacacagcctacaatgctgcgtctcccatcttaactctttgcctttgccaccaactggccctcttcttacttgatgagtgtaacaagaaaggagagtcttgcagtgattaaggtctctctttggactctcccctcttatgtacctcttttagtcattttgcttcatagctggttcctgctagaaatgggaaatgcctaagaagatgacttcccaactgcaagtcacaaaggaatggaggctctaattgaattttcaagcatctcctgaggatcagaaagtaatttcttctcaaagggtacttccactgatggaaacaaagtggaaggaaagatgctcaggtacagagaaggaatgtctttggtcctcttgccatctataggggccaaatatattctctttggtgtacaaaatggaattcattctggtctctctattaccactgaagatagaagaaaaaagaatgtcagaaaaacaataagagcgtttgcccaaatctgcctattgcagctgggagaagggggtcaaagcaaggatctttcacccacagaaagagagcactgaccccgatggcgatggactactgaagccctaactcagccaaccttacttacagcataagggagcgtagaatctgtgtagacgaagggggcatctggccttacacctcgttagggaagagaaacagggtgttgtcagcatcttctcactcccttctccttgataacagctaccatgacaaccctgtggtttccaaggagctgagaatagaaggaaactagcttacatgagaacagactggcctgaggagcagcagttgctggtggctaatggtgtaacctgagatggccctctggtagacacaggatagataactctttggatagcatgtctttttttctgttaattagttgtgtactctggcctctgtcatatcttcacaatggtgctcatttcatgggggtattatccattcagtcatcgtaggtgatttgaaggtcttgatttgttttagaatgatgcacatttcatgtattccagtttgtttattacttatttggggttgcatcagaaatgtctggagaataattctttgattatgactgttttttaaactaggaaaattggacattaagcatcacaaatgatattaaaaattggctagttgaatctattgggattttctacaagtattctgcctttgcagaaacagatttggtgaatttgaatctcaatttgagtaatctgatcgttctttctagctaatggaaaatgattttacttagcaatgttatcttggtgtgttaagagttaggtttaacataaaggttattttctcctgatatagatcacataacagaatgcaccagtcatcagctattcagttggtaagcttccaggaaaaaggacaggcagaaagagtttgagacctgaatagctcccagatttcagtcttttcctgtttttgttaactttgggttaaaaaaaaaaaaagtctgattggttttaattgaaggaaagatttgtactacagttcttttgttgtaaagagttgtgttgttcttttcccccaaagtggtttcagcaatatttaaggagatgtaagagctttacaaaaagacacttgatacttgttttcaaaccagtatacaagataagcttccaggctgcatagaaggaggagagggaaaatgttttgtaagaaaccaatcaagataaaggacagtgaagtaatccgtaccttgtgttttgttttgatttaataacataacaaataaccaacccttccctgaaaacctcacatgcatacatacacatatatacacacacaaagagagttaatcaactgaaagtgtttccttcatttctgatatagaattgcaattttaacacacataaaggataaacttttagaaacttatcttacaaagtgtattttataaaattaaagaaaataaaattaagaatgttctcaatcaaa

SEQ ID NO: 261962 - DNA, 587 bp, Artificial Sequence
  derived and/or modified sequence
acttcatggcttctcacgcttgtgctgcatatcccacaccaattagacccaaggatcagttggaagtttccaggacatcttcattttatttccaccctcaatccacatttccagatgtctctgcagcaaagcgaaattccaggagaagaggacaaagatactcagagagaaaaagtaaaagaccgaagaaggaggctggagagaccaggatccttccagctgaacaaagtcagccacaaagcagactagccagccggctacaattggagtcagagtcccaaagacatgggcttgttagagtgctgtgcaagatgtctggtaggggccccctttgcttccctggtggccactggattgtgtttctttggggtggcactgttctgtggctgtggacatgaagccctcactggcacagaaaagctaattgagacctatttctccaaaaactaccaagactatgagtatctcatcaatgtgatccatgccttccagtatgtcatctatggaactgcctctttcttcttcctttatggggccctcctgctggctgagggcttctacaccaccggcgcagtcaggcagatctt

SEQ ID NO: 261963 - DNA, 608 bp, Artificial Sequence
  derived and/or modified sequence
agatgtctctgcagcaaagcgaaattccaggcaagccttagggaaaaaaggaaaaacaaagaaaatgaaacaattggcagtgaaaggcagaaagagaagatggagcccttagagaagggagtatccctgagagaagaggacaaagatactcagagagaaaaagtaaaagaccgaagaaggaggctggagagaccaggatccttccagctgaacaaagtcagccacaaagcagactagccagccggctacaattggagtcagagtcccaaagacatgggcttgttagagtgctgtgcaagatgtctggtaggggccccctttgcttccctggtggccactggattgtgtttctttggggtggcactgttctgtggctgtggacatgaagccctcactggcacagaaaagctaattgagacctatttctccaaaaactaccaagactatgagtatctcatcaatgtgatccatgccttccagtatgtcatctatggaactgcctctttcttcttcctttatggggccctcctgctggctgagggcttctacaccaccggcgcagtcaggcagatctttggcgactacaagaccaccatctgcggcaaggg

SEQ ID NO: 261964 - DNA, 729 bp, Artificial Sequence
  derived and/or modified sequence
atgggcctgctggagtgctgcgccagatgcctggtgggcgcccccttcgccagcctggtggccaccggcctgtgcttcttcggcgtggccctgttctgcggctgcggccacgaggccctgaccggcaccgagaagctgatcgagacctacttcagcaagaactaccaggactacgagtacctgatcaacgtgatccacgccttccagtacgtgatctacggcaccgccagcttcttcttcctgtacggcgccctgctgctggccgagggcttctacaccaccggcgccgtgagacagatcttcggcgactacaagaccaccatctgcggcaagggcctgagcgccaccttcgtgggcatcacctacgccctgaccgtggtgtggctgctggtgttcgcctgcagcgccgtgcccgtgtacatctacttcaacacctggaccacctgccagagcatcgccttccccagcaagaccagcgccagcatcggcagcctgtgcgccgacgccagaatgtacggcgtgctgccctggaacgccttccccggcaaggtgtgcggcagcaacctgctgagcatctgcaagaccgccgagttccagatgaccttccacctgttcatcgccgccttcgtgggcgccgccgccaccctggtgagcctgctgaccttcatgatcgccgccacctacaacttcgccgtgctgaagctgatgggcagaggcaccaagttctag

SEQ ID NO: 261965 - DNA, 303 bp, Artificial Sequence
  derived and/or modified sequence
atgggcctgctggagtgctgcgccagatgcctggtgggcgcccccttcgccagcctggtggccaccggcctgtgcttcttcggcgtggccctgttctgcggctgcggccacgaggccctgaccggcaccgagaagctgatcgagacctacttcagcaagaactaccaggactacgagtacctgatcaacgtgatccacgccttccagtacgtgatctacggcaccgccagcttcttcttcctgtacggcgccctgctgctggccgagggcttctacaccaccggcgccgtgagacagatctag

SEQ ID NO: 261966 - DNA, 339 bp, Artificial Sequence
  derived and/or modified sequence
atgggcctgctggagtgctgcgccagatgcctggtgggcgcccccttcgccagcctggtggccaccggcctgtgcttcttcggcgtggccctgttctgcggctgcggccacgaggccctgaccggcaccgagaagctgatcgagacctacttcagcaagaactaccaggactacgagtacctgatcaacgtgatccacgccttccagtacgtgatctacggcaccgccagcttcttcttcctgtacggcgccctgctgctggccgagggcttctacaccaccggcgccgtgagacagatcttcggcgactacaagaccaccatctgcggcaagggctag

SEQ ID NO: 261967 - protein, 273 aa, Artificial Sequence
  derived and/or modified sequence
MALLVRVLRNQTSISQWVPVCSRLIPVSPTQGQGDRALSRTSQWPQMSQSRACGGSEQIPGIDIQLNRKYHTTRKLSTTKDSPQPVEEKVGAFTKIIEAMGFTGPLKYSKWKIKIAALRMYTSCVEKTDFEEFFLRCQMPDTFNSWFLITLLHVWMCLVRMKQEGRSGKYMCRIIVHFMWEDVQQRGRVMGGILSDDHGLAAALWRTFFNRKCEDPRHLELLVEYVRKQIQYLDSMNGEDLLLTGEVSWRPLVEKNPQSILKPHSPTYNDEGL

SEQ ID NO: 261968 - DNA, 822 bp, Artificial Sequence
  derived and/or modified sequence
atggccctgctggtgagagtgctgagaaaccagaccagcatcagccagtgggtgcccgtgtgcagcagactgatccccgtgagccccacccagggccagggcgacagagccctgagcagaaccagccagtggccccagatgagccagagcagagcctgcggcggcagcgagcagatccccggcatcgacatccagctgaacagaaagtaccacaccaccagaaagctgagcaccaccaaggacagcccccagcccgtggaggagaaggtgggcgccttcaccaagatcatcgaggccatgggcttcaccggccccctgaagtacagcaagtggaagatcaagatcgccgccctgagaatgtacaccagctgcgtggagaagaccgacttcgaggagttcttcctgagatgccagatgcccgacaccttcaacagctggttcctgatcaccctgctgcacgtgtggatgtgcctggtgagaatgaagcaggagggcagaagcggcaagtacatgtgcagaatcatcgtgcacttcatgtgggaggacgtgcagcagagaggcagagtgatgggcggcatcctgagcgacgaccacggcctggccgccgccctgtggagaaccttcttcaacagaaagtgcgaggaccccagacacctggagctgctggtggagtacgtgagaaagcagatccagtacctggacagcatgaacggcgaggacctgctgctgaccggcgaggtgagctggagacccctggtggagaagaacccccagagcatcctgaagccccacagccccacctacaacgacgagggcctgtag

SEQ ID NO: 261969 - DNA, 447 bp, Artificial Sequence
  derived and/or modified sequence
atggccctgctggtgagagtgctgagaaaccagaccagcatcagccagtgggtgcccgtgtgcagcagactgatccccgtgagccccacccagggccagggcgacagagccctgagcagaaccagccagtggccccagatgagccagagcagagcctgcggcggcagcgagcagatccccggcatcgacatccagctgaacagaaagtaccacaccaccagaaagctgagcaccaccaaggacagcccccagcccgtggaggagaaggtgggcgccttcaccaagatcatcgaggccatgggcttcaccggccccctgaagtacagcaagtgggacgtgagcagccccaacgaggccggcagacccgagtgggaggtgcacgtgagctaccacagcagcttctacgtgggcggctgcagcgccgccagacagagccacggcggctag

SEQ ID NO: 261970 - DNA, 822 bp, Artificial Sequence
  derived and/or modified sequence
atggctctgttggtacgcgtgctgcggaatcaaacaagcatctcccagtgggtacctgtctgctcccggctgatccccgtgagccccacgcaggggcagggcgaccgcgccttaagtcgaacttcacagtggcctcagatgagccagtccagggcttgcggtggttccgagcagatccccgggattgacatacaactcaacagaaagtaccacacaactagaaaactttccactacgaaagacagccctcaacctgtggaggaaaaggtgggggcttttacaaaaattatcgaggcaatggggttcaccggtcctcttaaatactccaagtggaagatcaaaatcgccgctctgcgaatgtacacctcttgcgttgaaaagaccgacttcgaggaatttttcctccggtgtcagatgcctgatacattcaactcttggtttctgatcaccttgctccatgtatggatgtgcttggtacggatgaagcaagaagggagaagcgggaagtatatgtgccgcattatagttcactttatgtgggaggacgtgcaacaacgtggcagagtgatgggaggcatcctttccgacgaccatggcctggctgcagccctatggcggaccttcttcaacagaaagtgtgaggatccacggcacttagaattgctcgtggagtacgtgcggaagcaaatccagtatctagattctatgaatggtgaggacttgctactgacaggagaggtctcctggcgtccactggtagaaaagaacccccagagcattctaaagccccattctccaacctacaacgatgagggcctgtag

SEQ ID NO: 261971 - DNA, 447 bp, Artificial Sequence
  derived and/or modified sequence
atggcactgctagtgcgggttctccggaatcagaccagcatcagccagtgggtaccagtctgctcacggctcattccggtgtcacctacccagggacagggtgacagagccctaagccggaccagtcagtggccacaaatgtcacagtctcgcgcctgtggaggctccgagcagatcccggggatcgatatacagctgaaccgtaagtatcatacgaccagaaagctgagcacaacaaaagattcaccacagccggtcgaggagaaggtgggcgcctttaccaaaatcatcgaggcgatgggtttcacgggaccacttaaatatagcaagtgggacgtgtcatctcctaatgaagctggcagaccagagtgggaggtccacgtgagttaccatagtagtttctacgtgggtggctgctccgccgctaggcagtcacatggcggatag

SEQ ID NO: 261972 - DNA, 822 bp, Artificial Sequence
  derived and/or modified sequence
atggccctgctggtgcgggtgctgaggaaccagaccagcatcagccagtgggtgcctgtgtgcagccgcctcatccctgtgagccccacccagggccagggcgaccgggccctgagcaggaccagccagtggccccagatgagccagagccgggcctgtggcggcagcgagcagatccctggcatcgacatccagctgaacaggaagtaccacaccaccaggaagctgagcaccaccaaggacagcccccagcctgtggaggagaaggtgggcgccttcaccaagatcatcgaggccatgggcttcaccggccccctgaagtacagcaagtggaagatcaagattgctgccctgaggatgtacaccagctgtgtggagaagacagactttgaggagttcttcctgcgctgccagatgccagacaccttcaacagctggttcctgatcaccctgctgcacgtgtggatgtgcctggtgaggatgaagcaggagggccgcagcggcaagtacatgtgccgcatcatcgtgcacttcatgtgggaggatgtgcagcagaggggccgggtgatgggcggcatcctgagtgatgaccacggcctggccgccgccctgtggaggaccttcttcaacagaaaatgtgaggaccccaggcacctggagctgctggtggagtatgtgaggaagcagatccagtacctggacagcatgaatggagaggacctgctgctgaccggggaggtgtcctggaggcccctggtggagaagaacccccagagcatcctgaagccccacagccccacctacaatgatgagggcctgtag

SEQ ID NO: 261973 - DNA, 447 bp, Artificial Sequence
  derived and/or modified sequence
atggccctgctggtgcgggtgctgaggaaccagaccagcatcagccagtgggtgcctgtgtgcagccgcctcatccctgtgagccccacccagggccagggcgaccgggccctgagcaggaccagccagtggccccagatgagccagagccgggcctgtggcggcagcgagcagatccctggcatcgacatccagctgaacaggaagtaccacaccaccaggaagctgagcaccaccaaggacagcccccagcctgtggaggagaaggtgggcgccttcaccaagatcatcgaggccatgggcttcaccggccccctgaagtacagcaagtgggatgtgagcagccccaatgaagctggccggcctgagtgggaggtgcacgtgtcctaccacagcagcttctacgtgggcggctgcagcgctgcccggcagagccacggcggctag

SEQ ID NO: 261974 - DNA, 822 bp, Artificial Sequence
  derived and/or modified sequence
atggccctgctggtgcgggtgctgcggaaccagaccagcatcagccagtgggtacccgtctgttccaggctgatcccagtcagccccacccagggccaaggggatagagctctgtcgcggacttctcagtggccccagatgagccaatccagggcctgcggaggttctgaacaaattccgggcatcgacatccaactgaatagaaagtaccacacgacgcggaaactttccactactaaagactcaccccagcccgttgaggagaaggtgggtgcgttcaccaagatcatagaggctatgggatttactggtcctctgaagtatagtaaatggaagatcaagatcgccgcgcttagaatgtatacatcatgtgtggagaagaccgacttcgaagaattcttccttaggtgccagatgccagacacctttaatagctggtttctcatcaccctccttcatgtgtggatgtgtctggtgagaatgaagcaagagggtcggagtgggaagtatatgtgccgcatcatcgtgcacttcatgtgggaggatgtgcagcagcgcggtcgggttatgggtggaattctttccgacgatcacgggctggctgctgcactctggagaactttcttcaatcgcaagtgtgaggacccaaggcacttggagctgctcgtggaatacgtgcggaaacaaatccagtacttggacagcatgaacggcgaggaccttctgctgaccggagaagtttcctggaggccactggttgaaaagaacccccagtccatattaaagcctcattcccctacttacaatgacgagggtctgtag

SEQ ID NO: 261975 - DNA, 447 bp, Artificial Sequence
  derived and/or modified sequence
atggccctgctggtgcgggtgctgcggaaccagaccagcatcagccagtgggtgccggtgtgttcccggctgatccccgtcagcccgacccagggacagggagaccgagccctatctcggacctctcagtggccacagatgagccaatcccgggcttgtggtggatcggaacagattccaggcatagatatccagctgaaccgaaagtaccacaccaccaggaaactctccacaaccaaagattcaccccagccggtggaagaaaaggtaggcgcattcacaaaaattatcgaggccatggggtttactggaccactgaagtacagcaagtgggacgtcagttcacccaacgaggccggacgacctgaatgggaggtgcacgtctcctaccactccagtttctatgtgggtggatgctccgcagcacggcagagccatggcggctag

SEQ ID NO: 261976 - DNA, 822 bp, Artificial Sequence
  derived and/or modified sequence
atggctttgttggtgagggtacttcgtaatcagaccagtatcagccagtgggttcctgtgtgcagcagactgattccagtgagtcccacacagggtcagggtgacagggccctgtcacggaccagccagtggccccagatgagccaatctcgcgcatgcggcggtagcgagcaaatccccggaatagacattcagctgaatcggaaataccacacaacccggaagctcagcactactaaggactctccacagcctgtggaagaaaaggtgggggcattcaccaaaatcatcgaagctatgggttttaccggccctctgaaatattcgaaatggaagatcaagatcgccgcattaagaatgtacacatcctgcgtggagaaaacggacttcgaggagttcttcctgagatgccaaatgccagatacctttaattcctggttcctcattacgcttcttcatgtctggatgtgcctcgtaaggatgaagcaggagggccgatctggaaagtacatgtgccggatcattgtacatttcatgtgggaggatgtgcaacaacgcggtagggtgatgggaggaattctctcggacgaccacggactggcggcagcgctttggaggacattcttcaaccggaaatgtgaggaccccagacatctcgagctcctcgtggaatacgttaggaagcaaattcagtatttggatagcatgaatggggaagatttactactcacgggagaagtcagttggaggcccttagtggagaagaatccccagtctatcctaaagcctcactcgccaacgtataatgacgaaggtctctag

SEQ ID NO: 261977 - DNA, 447 bp, Artificial Sequence
  derived and/or modified sequence
atggccctgctcgtcagagtgctccgaaatcagaccagcatcagccagtgggtgcccgtgtgcagtcgtttaattcccgttagtccaacacaggggcagggtgatcgggctctgagccggacaagtcaatggcctcagatgtcgcagtctcgcgcttgtgggggttccgagcagatcccaggcattgacatccagctgaaccgaaaataccacacaacaagaaagctctcgactactaaggacagtcctcagcccgttgaggagaaggtgggtgccttcactaaaatcatagaggccatgggctttaccggacccctaaagtatagtaagtgggacgtgagtagtcctaacgaggcaggtagacccgagtgggaagtgcacgtgagttaccacagtagtttctacgtcgggggttgttccgctgccagacagagccatggaggctag

SEQ ID NO: 261978 - DNA, 2201 bp, Artificial Sequence
  derived and/or modified sequence
attgaggaacatggcgttgctggtgcgagtccttaggaaccagactagcatttctcagtgggttccagtatgcagccgattgatacctgtgtctcctacccaaggacagggggacagggctctgtctcgcacttcccagtggccccagatgagccagtcccgagcatgtggtggatcagaacagattcctggaatagacatacagctgaataggaagtatcacaccacacgtaagctttctactaccaaagattccccacagcctgttgaggagaaggttggtgctttcacaaagataatagaagccatgggattcacgggacctttgaaatacagtaaatggaagattaagattgcggccctgcgcatgtatactagctgtgtggagaaaactgacttcgaggaattctttctaaggtgtcagatgcctgatacattcaattcatggtttcttataaccctactccacgtctggatgtgtctagtccgaatgaagcaggaaggccggagtgggaagtacatgtgtcgtatcatagttcattttatgtgggaggatgttcagcagcgcggcagagtcatgggggggatcctttcagatgatcatgggctggccgctgccctctggagaaccttcttcaaccggaaatgtgaagaccctcgacatcttgaattgctggtagagtatgtgaggaaacagatacagtacctggactccatgaacggggaggatctgcttctgacaggggaggtgagctggcgccctctagtggagaagaatcctcagagcatcctgaagccccattctccgacttacaacgacgagggactttgatgggctgggccctccgcacggcccgccagctggcttcgaggaacctccaggagagaagtgcctgttggtccaggaccctgcagaaagtggcctgaactgacctctgaacagcatctgtcaaatacctggccccatttgtgttgagtttcctcttagtgtgcccaggagtctgatctgctggggtacagggctgggagaacccctagctctcccggggtgtcctctcccttaggggaagccccgagtgagagtcccccagcacacactccccaaccccctccagcaactacatgtgactgatagcttttcccaaaggccaaggaagggatggtgtaggttcaaaagggaaaccccccagggcctgctgtggcctaggagcagattgtaatgctgccgagtccggtcggtgaccacgcgttgtccctcggctttcagccatggggttgagttggccattaaaagaaacagagacttctctctgccatggcccttctttattccagggacttagaaacttgcctgagatggtggacgcagtaatgagggcaccgcgcagctcagttagagacggagaaagggaagaggctgggatggtctctgctgctcttgcctctagttcatggagatgtgtctctgttcaggccaagatacagccagccaggcctgtcgtctgggacccaggaggcctctgatgaccaagggctttcacatcctaagtcatttggaaggaggccttgagaacaaagtcacctttgtcactcccagtgaactgaatgaggaacatgctgtctcctgtcttggcctcccctttcatgagatactggggagaagagaacattcctcctggcttagttgtagcagacccagacctgtgcccagctttggtcccccttcccaacttctgaagcacgtgctgcagagccaccttggtctgagcacctgaggaccagcccctcctccctcagtgcgggtcatctcttgggggattttcttaaagtgaagaaagggggtggggaaccatattgcccctccctcccccatcaaacttccttcatttaacttgctataaaatgagtcatataaagaaactctatatgggtgaggtatatcccacttctgtgaaaacattacaaatcaaaccgcttctctcagtttatttaagatgcttttgttgcgagcggagctctagagtgaagcctcctgtgtgtgtgtgagataataacaccttgtaactcattacagctgggcactatttacataaaccagagctgagccaggcaggaatttgctgattaatttatttttaatggagtgaagtataccatgcaccaaaataaactttactgtgtgtacctaactgctcctggaa

SEQ ID NO: 261979 - DNA, 1001 bp, Artificial Sequence
  derived and/or modified sequence
attgaggaacatggcgttgctggtgcgagtccttaggaaccagactagcatttctcagtgggttccagtatgcagccgattgatacctgtgtctcctacccaaggacagggggacagggctctgtctcgcacttcccagtggccccagatgagccagtcccgagcatgtggtggatcagaacagattcctggaatagacatacagctgaataggaagtatcacaccacacgtaagctttctactaccaaagattccccacagcctgttgaggagaaggttggtgctttcacaaagataatagaagccatgggattcacgggacctttgaaatacagtaaatgggatgtgtctagtccgaatgaagcaggaaggccggagtgggaagtacatgtgtcgtatcatagttcattttatgtgggaggatgttcagcagcgcggcagagtcatgggggttaatccctatatcctgaagaagaacatgatcctcatgacaaatcatttctatgcagcgatcttgggatatgatgaggggatcctttcagatgatcatgggctggccgctgccctctggagaaccttcttcaaccggaaatgtgaagaccctcgacatcttgaattgctggtagagtatgtgaggaaacaggtgagtgaccctttccctcccctcccaagtcctggcaacagtgggtcctcctcttgggctttcaggggatcatgagaggtggagttaccaaggaccagcctgagagaattctgaccagatcacatcagcactagacgctgaagaaggagcgccttctgtatgtccaaccatgaactgggccagggagcgggaaatgggaagagagagagaaagaggcatcgagtagtctcctgccctcaggaactttgagtcattcattcactgtgcacctcattgcctactgtgcgcccagtgctatgctagcagctgggcccacagagtcctggcagatatgagcacgtggtgtagtagcagctg

SEQ ID NO: 261980 - protein, 950 aa, Artificial Sequence
  derived and/or modified sequence
MTWRMGPRFTMLLAMWLVCGSEPHPHATIRGSHGGRKVPLVSPDSSRPARFLRHTGRSRGIERSTLEEPNLQPLQRRRSVPVLRLARPTEPPARSDINGAAVRPEQRPAARGSPREMIRDEGSSARSRMLRFPSGSSSPNILASFAGKNRVWVISAPHASEGYYRLMMSLLKDDVYCELAERHIQQIVLFHQAGEEGGKVRRITSEGQILEQPLDPSLIPKLMSFLKLEKGKFGMVLLKKTLQVEERYPYPVRLEAMYEVIDQGPIRRIEKIRQKGFVQKCKASGVEGQVVAEGNDGGGGAGRPSLGSEKKKEDPRRAQVPPTRESRVKVLRKLAATAPALPQPPSTPRATTLPPAPATTVTRSTSRAVTVAARPMTTTAFPTTQRPWTPSPSHRPPTTTEVITARRPSVSENLYPPSRKDQHRERPQTTRRPSKATSLESFTNAPPTTISEPSTRAAGPGRFRDNRMDRREHGHRDPNVVPGPPKPAKEKPPKKKAQDKILSNEYEEKYDLSRPTASQLEDELQVGNVPLKKAKESKKHEKLEKPEKEKKKKMKNENADKLLKSEKQMKKSEKKSKQEKEKSKKKKGGKTEQDGYQKPTNKHFTQSPKKSVADLLGSFEGKRRLLLITAPKAENNMYVQQRDEYLESFCKMATRKISVITIFGPVNNSTMKIDHFQLDNEKPMRVVDDEDLVDQRLISELRKEYGMTYNDFFMVLTDVDLRVKQYYEVPITMKSVFDLIDTFQSRIKDMEKQKKEGIVCKEDKKQSLENFLSRFRWRRRLLVISAPNDEDWAYSQQLSALSGQACNFGLRHITILKLLGVGEEVGGVLELFPINGSSVVEREDVPAHLVKDIRNYFQVSPEYFSMLLVGKDGNVKSWYPSPMWSMVIVYDLIDSMQLRRQEMAIQQSLGMRCPEDEYAGYGYHSYHQGYQDGYQDDYRHHESYHHGYPY

SEQ ID NO: 261981 - protein, 551 aa, Artificial Sequence
  derived and/or modified sequence
MTWRMGPRFTMLLAMWLVCGSEPHPHATIRGSHGGRKVPLVSPDSSRPARFLRHTGRSRGIERSTLEEPNLQPLQRRRSVPVLRLARPSRFRDNRMDRREHGHRDPNVVPGPPKPAKEKPPKKKAQDKILSNEYEEKYDLSRPTASQLEDELQVGNVPLKKAKESKKHEKLEKPEKEKKKKMKNENADKLLKSEKQMKKSEKKSKQEKEKSKKKKGGKTEQDGYQKPTNKHFTQSPKKSVADLLGSFEGKRRLLLITAPKAENNMYVQQRDEYLESFCKMATRKISVITIFGPVNNSTMKIDHFQLDNEKPMRVVDDEDLVDQRLISELRKEYGMTYNDFFMVLTDVDLRVKQYYEVPITMKSVFDLIDTFQSRIKDMEKQKKEGIVCKEDKKQSLENFLSRFRWRRRLLVISAPNDEDWAYSQQLSALSGQACNFGSSVVEREDVPAHLVKDIRNYFQVSPEYFSMLLVGKDGNVKSWYPSPMWSMVIVYDLIDSMQLRRQEMAIQQSLGMRCPEDEYAGYGYHSYHQGYQDGYQDDYRHHESYHHGYPY

SEQ ID NO: 261982 - DNA, 2853 bp, Artificial Sequence
  derived and/or modified sequence
atgacttggcgcatgggacctcgttttacgatgctgctcgccatgtggctcgtttgtggctccgagccccatcctcacgctactatacgcggaagtcacggaggcagaaaggttcccctggtatcgcccgactcaagccgcccagctcgattcctgagacacaccgggaggagccgagggatcgagcggtctaccctggaggagcccaatctgcagccgcttcagaggcgtcggtccgtcccagtgcttaggttggccagaccgaccgaacccccagcacgctctgatatcaacggcgcagctgtccgacccgagcagcgccctgctgcacgtggatccccgcgagaaatgatcagggatgaagggagcagtgcacgatcaaggatgctgaggttcccatctggatccagctctcccaatattctggccagctttgcaggaaaaaacagggtgtgggtgataagcgctcctcatgccagtgaaggatactatcggctgatgatgagcctgctaaaagatgatgtgtattgcgagctggctgaaagacacatccagcagatagtattgttccatcaagctggagaggagggcggaaaagtcaggcgcatcacctctgagggccagattctggagcagcctctcgaccctagcctcatcccgaaactaatgagcttcctcaagcttgaaaagggtaaattcgggatggtgctcctcaagaaaacgcttcaggtcgaagaaagatatccctaccctgtccgactggaggcaatgtatgaggtcattgatcagggacctatcaggcgtattgagaaaatacgacagaagggcttcgtgcaaaaatgcaaagcctccggcgtggaagggcaggtggttgctgaaggaaatgacggtgggggtggtgctggccgtcctagccttggctctgagaaaaagaaagaagatccacgcagggctcaagttccaccaacacgcgaatctcgagtgaaggtgctgcgtaagttagctgctaccgcgccagcactgcctcaaccgccttccacaccccgagccaccaccctcccccctgccccagccaccacagtaacccggtctacttcccgggctgtaaccgtcgctgccaggcctatgactacgacagccttccctactacccaacgaccctggactccttctccctcacaccgcccacctaccacaaccgaagtgattacagctcggagaccctccgtgtcagagaatttgtatccccctagccgtaaggaccagcacagggagagaccccagaccacccgaaggccatcaaaggcaacctccctggaaagctttacgaatgcaccccctactaccatcagcgagccatccacgcgcgcagctggcccaggacgatttagggataaccggatggatagaagggagcacggtcaccgagaccccaacgtggtgccaggtccacccaaaccagcaaaggaaaagccaccgaagaagaaagcccaggacaagatcctgagcaacgagtatgaagaaaagtacgatctgagccgcccaactgcgtcccaactggaagacgagttacaggtggggaacgtgcctctgaaaaaggctaaagaaagcaaaaaacacgaaaaactcgaaaaacccgaaaaagagaagaagaagaaaatgaaaaatgaaaatgcggacaaactgctgaagtccgagaaacaaatgaaaaagagcgagaaaaagtcaaaacaggaaaaggagaagtcaaagaaaaagaagggcggtaaaaccgaacaggatgggtaccagaaacctaccaataagcactttacccaatccccaaagaaaagcgtcgcagatctgcttggctcttttgaggggaagagacgcctgttactaatcaccgctcctaaggccgaaaataatatgtatgttcagcagcgcgacgagtatctcgaatcgttttgcaaaatggctacccgcaagatttccgtcattacgatatttggacccgtgaacaattcgacaatgaaaattgatcattttcagctcgacaatgaaaagcctatgcgggtggtggatgatgaagacctggtggaccaacgactcatctccgagctgcgcaaagagtatgggatgacctataacgactttttcatggtgctaaccgacgtggacctgcgagtcaagcaatattacgaagtcccgatcactatgaagagcgtcttcgatttaatagatactttccagtcacgtatcaaggatatggaaaagcaaaagaaagaaggcatagtatgcaaggaggacaaaaaacagtcacttgagaattttctctctagatttcggtggcgtcggaggcttctggtcatctctgcacctaatgacgaggactgggcctactcacagcaactgtccgctctaagcgggcaagcctgtaacttcggcctgcgacacattacaattctgaaactactcggggtcggcgaggaagtcggaggggtgctcgaactgtttcccattaacggaagcagcgttgtcgaaagggaagatgtgcccgcacacctggtaaaagatatccgcaactattttcaagtcagcccagaatacttctccatgttactggttggaaaagatggaaatgtgaagtcgtggtaccctagcccaatgtggagtatggttattgtctatgacctgattgattccatgcagctcagacgtcaggaaatggcaatccagcagtccttgggtatgcggtgtcccgaggatgaatacgccggatacggttaccattcctatcatcagggctatcaggacggataccaagacgactaccggcaccacgagtcctaccatcacggctatccctactag

SEQ ID NO: 261983 - DNA, 1656 bp, Artificial Sequence
  derived and/or modified sequence
atgacgtggaggatggggcctagattcacaatgctgctggccatgtggctagtctgcggatctgaaccccacccacacgccaccatccggggttcccatggcggacgcaaagttccactggtatcacccgatagctccaggccagccaggtttctgagacatacaggcagatcaaggggaatcgagcgctcaaccttggaggagccaaacctgcaaccactgcagagaagacggtctgtcccagtgctgaggttagccaggccgtctagattcagagacaatcgaatggatagacgagagcacggtcatagggaccctaacgtcgtgcccggtcctccaaagcctgccaaagagaaacctcccaagaagaaagcccaggacaagattctgagtaatgagtatgaggaaaagtacgatttgtctaggcctaccgcctcacagcttgaggacgagctacaagtggggaacgttcccctaaaaaaagccaaggagtcaaagaagcacgagaaactcgagaagccagagaaagagaagaaaaagaagatgaaaaacgaaaacgcagacaaactacttaagtccgagaaacaaatgaagaaatctgaaaaaaagtccaagcaggagaaagagaagagcaaaaagaaaaaggggggtaagacagagcaagacgggtaccaaaagcctaccaataaacatttcactcagtctcctaagaagagtgttgcagacctcctgggaagttttgaagggaagcggaggctactcctgatcactgcgccaaaagcggagaacaacatgtacgtgcagcagcgcgacgagtaccttgagagcttctgcaagatggctactcggaaaatctccgtgatcaccatcttcggtccagtcaacaacagtacgatgaagattgaccattttcaacttgataatgaaaagcccatgcgagtggtggatgacgaggacctggtggatcaaagactaatcagtgaactccggaaggagtatggaatgacttacaacgacttctttatggtgctcaccgatgtggaccttcgcgtaaaacagtattatgaggtgcccatcacgatgaaatccgtgtttgacctcatcgacacattccagtccaggattaaggacatggagaaacagaaaaaagagggcattgtctgtaaggaggacaagaagcagtcactcgaaaatttcctatcaaggttccgctggaggagacggcttcttgtgatatcggcccctaacgatgaagattgggcctattcccagcagttatccgcgctgtctggacaagcatgtaatttcgggagctctgtggtggaaagggaagatgtgcccgctcacctggttaaagacataagaaattatttccaggttagccctgagtacttttccatgttgttggtgggaaaggacggaaatgttaagagttggtaccccagtcccatgtggagcatggtgattgtgtatgatttgattgactctatgcagttgcgcagacaggagatggcaatacagcagagtctgggtatgagatgtcctgaggacgagtacgcaggctatgggtaccactcatatcatcagggataccaggacggttaccaagatgattatcggcatcacgagagttatcatcatggctatccatactag

SEQ ID NO: 261984 - DNA, 2853 bp, Artificial Sequence
  derived and/or modified sequence
atgacctggcgtatgggcccccgtttcaccatgttacttgccatgtggctggtgtgtgggtccgagccccatccccatgccacgatacggggcagccatggcggaaggaaggtgcctttagtgagccccgacagctcacgcccagcaaggtttctgcgccacaccggcaggagtcgggggatcgaacggtcaacattggaagagcccaacctgcaacccctacagcgccggagaagcgttcccgtcctcagactggctagaccaactgaaccccccgcccgatcagacatcaacggcgcagccgtacggcctgaacaacggccagctgctagagggagtccgagggaaatgattagagacgagggtagcagtgctcggagcagaatgttgcgatttccctccggcagttcaagtcctaatatcctcgccagttttgccggcaagaaccgggtctgggtgattagcgctccgcatgcctcagaagggtattaccgcctcatgatgagtcttctgaaggatgatgtctattgtgaattggccgaaagacatatccagcagatcgttttatttcatcaagcgggagaggaagggggtaaagtgaggcgcattaccagtgaaggccagattctagagcagcctctcgacccatcgttgatccctaaattgatgagctttcttaagttggaaaaaggaaaatttggcatggtcctgctgaagaaaaccctgcaggtggaagaacggtacccataccccgtgaggttagaagcaatgtatgaagtgatcgatcaggggcccattaggagaatcgagaagatccgccaaaaggggttcgtgcaaaaatgtaaagcctcaggcgttgaaggacaggtggtggccgaagggaacgacggcggcggcggagcagggcgcccctcacttgggagcgagaagaagaaagaagacccccggagagcacaggtcccccctactcgcgagagtcgcgtcaaagtcctgcggaaattggccgccactgctcccgcactccctcagccaccttctaccccccgcgccactacactgccccctgcccctgctactaccgttacacggagcacaagcagagctgttacggtcgccgcacgccccatgaccactaccgctttccccacaacacagagaccatggactccatcaccctcccacaggcctccaacaaccaccgaagtgattaccgcaaggcggccaagcgttagcgagaacttgtacccaccatctcgtaaagaccagcatagggagaggccccagaccacacggaggccaagcaaggccacctcactggaaagttttaccaatgcccctccaactacaatcagtgagccaagcacccgtgccgccgggcctggaaggtttcgcgataacaggatggaccgccgcgaacacggccaccgggacccaaacgttgtgcccggccctcccaaacctgccaaagaaaagccacccaagaagaaagctcaggacaaaatcctcagcaacgaatacgaggaaaagtatgatctttcaagacctacagcctctcagttggaggatgaacttcaggtgggcaacgttccccttaagaaggccaaggagtccaagaagcacgaaaagttggagaaacctgagaaagaaaagaagaaaaagatgaaaaacgagaacgccgacaaactgctgaagagtgagaagcagatgaaaaaatcagagaaaaagtccaagcaggaaaaggaaaagagcaagaaaaagaagggcggcaagacagaacaggacggttaccagaagcctactaataaacattttacccagagcccaaagaagtctgttgccgacctgctgggcagctttgaggggaagcgccgactgctgctgatcacagctcctaaagcggaaaataacatgtacgttcagcaacgcgatgagtacctagaatccttctgtaagatggccacaagaaagatatctgtcatcacaattttcggacctgtaaataactccacaatgaagattgatcatttccagctggacaacgagaaacctatgagggtcgtagatgacgaggacttggtcgatcagaggcttatctccgaactaagaaaggagtacggcatgacctataacgattttttcatggtacttaccgacgtggacttgcgcgtgaaacagtactacgaggtgccaatcacaatgaagtctgtgttcgatcttattgacacgttccagagccggattaaagatatggaaaagcaaaagaaggaggggatcgtttgtaaagaggacaagaaacagtcactagagaattttctgagcaggtttagatggaggcgtcgtctcctcgttatctctgccccaaacgacgaagactgggcttattcccagcagttaagtgccttatctggccaggcctgtaacttcggtctccgacatataaccattctcaaactgctcggggtgggggaagaagtgggcggagttttggagctgttccccatcaatggttctagcgtcgtggaaagagaggacgtgcctgcccatcttgttaaggacatcagaaattatttccaagtgtcccctgagtatttttcaatgctgcttgtgggcaaagatggaaatgtgaaaagctggtatcccagcccaatgtggtcgatggtgatcgtgtacgatctaatcgactctatgcagctgcgtagacaggagatggctatccagcagtcactgggaatgaggtgtcccgaagacgaatacgccggatatggttatcacagttaccaccagggctaccaggatggctatcaggacgattacaggcaccatgaatcctaccatcatggctacccatactag

SEQ ID NO: 261985 - DNA, 1656 bp, Artificial Sequence
  derived and/or modified sequence
atgacttggcgcatgggccctcgcttcacaatgcttctcgctatgtggctcgtatgtggatcggagcctcacccccatgcaacaatcagaggcagccatgggggcaggaaggtgcctctggtttctcccgattcaagcaggccagcccgatttctccggcacaccggccgtagccgtgggattgaacgttccaccttagaggaacccaacctccaacctctccagaggcggagatcagtacctgtgctgagactggcaagacccagcagattcagggataaccggatggacaggagggaacacggacaccgagatcccaacgtagtccccgggcctcccaaaccagctaaagaaaagccgcctaaaaagaaggcccaagataagattctgagcaatgaatacgaggaaaaatacgacctgtcaagacccacagcctcacagctggaggacgagttgcaggtgggaaacgttcccctgaaaaaagccaaagaatccaaaaagcatgagaagctggaaaagccagaaaaggagaagaagaagaagatgaagaatgaaaatgcagacaaactcctgaagagtgaaaaacagatgaaaaagtcagaaaaaaagtctaaacaggagaaggagaagtcaaaaaagaagaagggcggcaaaactgaacaggatggctatcaaaaacccacaaataaacattttacacagagtcctaagaagtcagtggcagacctcctggggagcttcgagggaaaaaggcggttacttctcatcacagcgcccaaagcagaaaataacatgtatgtccaacagagggatgagtacctggaaagcttctgcaaaatggccaccagaaagatctctgtcatcacaatcttcggccccgttaataattccacaatgaagatcgatcactttcagctggataacgagaaacccatgcgtgtggtcgacgacgaggatctggtcgaccagcggctgatttcggaactacgcaaagagtatggtatgacatataacgacttctttatggtactaactgatgtcgacttgagggtgaaacagtactatgaggtgcctatcaccatgaagagtgtgttcgatctcatcgacacgtttcagagtagaatcaaagacatggagaagcagaaaaaggaagggatcgtttgtaaagaggataagaaacagagccttgagaatttccttagcagattcagatggcgccgaagactacttgtgatctcagccccaaacgatgaagactgggcctatagtcagcagctgtcagcactgtctggccaggcgtgcaatttcgggtccagcgtggtggaaagagaagacgtacctgctcatttggtgaaggatatcaggaattattttcaggtgtctcctgaatattttagtatgttgctcgtcggcaaagacggaaacgtgaaaagctggtatccaagccctatgtggtctatggtgattgtctatgatttaatagattccatgcagttgcgcagacaggaaatggctattcaacagtcattaggcatgcggtgccccgaagatgagtatgcaggctatggatatcacagctatcaccaggggtatcaagacggctaccaggacgactatcgccatcacgagagctatcatcatggttatccttactag

SEQ ID NO: 261986 - DNA, 3557 bp, Artificial Sequence
  derived and/or modified sequence
gagaattttctccttccaaagtacagtgtaagaacagactggaagagaagttaccccgatgacttggtttggaaggggttaaggcaccagtcatcctcttctaaagtgatttatgatgatgtgtggagtttaaaaactttaccccaccccaaagaacagccttctcactcctcactgagtccactctgaacgtgctaaaatgggaaggaggcggtgttttgctgatctgttaaattcttagtgaagtttccttgatttccagtggctgctgttgtttgagtttggtttggagcaaaactgaggtagtcctaacatttctgggactgaatccaggcaagagaaagaagaaaaagaagaagaaaaagaggaggaaaaagtggattacacaatgacatggagaatgggaccccgtttcactatgctgttggccatgtggctagtgtgtggatcagaaccccacccccatgccactattagaggcagccacggaggacggaaagtgcctttggtttctccggacagcagtaggccagctcggtttctgaggcacactgggaggtctcgcggaattgagagatccactctggaggaaccaaaccttcagcctctccagagaaggaggagtgtgcccgtgttgagactagctcgcccaacagagccgccagcccgctcggacatcaatggggccgccgtgagacctgagcaaagaccagcagccaggggctctccgcgtgagatgatcagagatgaggggtcctcagctcggtcaagaatgttgcgtttcccttcggggtccagctctcccaacatccttgccagctttgcagggaagaacagagtatgggtcatctcagcccctcatgcctcggaaggctactaccgcctcatgatgagcctgctgaaggacgatgtgtactgtgagctggcggagaggcacatccaacagattgtgctcttccaccaggcaggtgaggaaggaggcaaggtgagaaggatcaccagcgagggccagatcctggagcagcccctggaccctagcctcatccctaagctgatgagcttcctgaagctggagaagggcaagtttggcatggtgctgctgaagaagacgctgcaggtggaggagcgctatccatatcccgttaggctggaagccatgtacgaggtcatcgaccaaggccccatccgtaggatcgagaagatcaggcagaagggctttgtccagaaatgtaaggcctctggtgtagagggccaggtggtggcggaggggaatgacggtggagggggagcaggaaggccaagcctgggcagcgagaagaagaaagaggacccaaggagagcacaagtcccaccaaccagagagagtcgggtgaaggtcctgagaaaactggccgccactgcaccagctttgccccaacctccctcaacccccagagccaccacccttcctcctgccccagccacaacagtgactcggtccacgtcccgggcggtaacagttgctgcaagacctatgaccaccactgcctttcccaccacgcagaggccctggaccccctcaccctcccacaggccccctacaaccactgaggtgatcactgccaggagaccctcagtttcagagaatctttaccctccatcccggaaggatcagcacagggagaggccacagacaaccaggaggcccagcaaggccaccagcttggagagcttcacaaatgcccctcccaccaccatctcagaacccagcacaagggctgctggcccaggccgtttccgggacaaccgcatggacaggcgggaacatggccaccgagacccaaatgtggtgccaggtcctcccaagccagcaaaggagaaacctcccaaaaagaaggcccaggacaaaattcttagtaatgagtatgaggagaagtatgacctcagccggcctactgcctctcagctggaggacgagctgcaggtggggaatgttccccttaaaaaagcaaaggagtctaaaaagcatgaaaagcttgagaaaccagagaaggagaagaaaaaaaagatgaagaatgagaacgcagacaagttacttaagagtgaaaagcaaatgaagaagtctgagaaaaagagcaagcaagagaaagagaagagcaagaagaaaaaaggaggtaaaacagaacaggatggctatcagaaacccaccaacaaacacttcacgcagagtcccaagaagtcagtggccgacctgctggggtcctttgaaggcaaacgaagactccttctgatcactgctcccaaggctgagaacaatatgtatgtgcaacaacgtgatgaatatctggaaagtttctgcaagatggctaccaggaaaatctctgtgatcaccatcttcggccctgtcaacaacagcaccatgaaaatcgaccactttcagctagataatgagaagcccatgcgagtggtggatgatgaagacttggtagaccagcgtctcatcagcgagctgaggaaagagtacggaatgacctacaatgacttcttcatggtgctaacagatgtggatctgagagtcaagcaatactatgaggtaccaataacaatgaagtctgtgtttgatctgatcgatactttccagtcccgaatcaaagatatggagaagcagaagaaggagggcattgtttgcaaagaggacaaaaagcagtccctggagaacttcctatccaggttccggtggaggaggaggttgctggtgatctctgctcctaacgatgaagactgggcctattcacagcagctctctgccctcagtggtcaggcgtgcaattttggtctgcgccacataaccattctgaagcttttaggcgttggagaggaagttgggggagtgttagaactgttcccaattaatgggagctctgttgttgagcgagaagacgtaccagcccatttggtgaaagacattcgtaactattttcaagtgagcccggagtacttctccatgcttctagtcggaaaagacggaaatgtcaaatcctggtatccttccccaatgtggtccatggtgattgtgtacgatttaattgattcgatgcaacttcggagacaggaaatggcgattcagcagtcactggggatgcgctgcccagaagatgagtatgcaggctatggttaccatagttaccaccaaggataccaggatggttaccaggatgactaccgtcatcatgagagttatcaccatggatacccttactgagcagaaatatgtaaccttagactcagccagtttcctctgcagctgctaaaactacatgtggccagctccattcttccacactgcgtactacatttcctgcctttttctttcagtgtttttctaagactaaataaatagcaaactttcacctattcatgagttattattgaaacctcaaatcataaagacatttaaaagaattgtttttctaactggaggggctctagtgctaaataatagtactgaaaattgatattattttccttttcttatatgaaggaccttatttggcatataaaattttataaaatatgta

SEQ ID NO: 261987 - DNA, 2038 bp, Artificial Sequence
  derived and/or modified sequence
agccttctcactcctcactgagtccactctgaacgtgctaaaatgggaaggaggcggtgttttgctgatctgttaaattcttagtgaagtttccttgatttccagtggctgctgttgtttgagtttggtttggagcaaaactgaggtagtcctaacatttctgggactgaatccaggcaagagaaagaagaaaaagaagaagaaaaagaggaggaaaaagtggattacacaatgacatggagaatgggaccccgtttcactatgctgttggccatgtggctagtgtgtggatcagaaccccacccccatgccactattagaggcagccacggaggacggaaagtgcctttggtttctccggacagcagtaggccagctcggtttctgaggcacactgggaggtctcgcggaattgagagatccactctggaggaaccaaaccttcagcctctccagagaaggaggagtgtgcccgtgttgagactagctcgcccaagccgtttccgggacaaccgcatggacaggcgggaacatggccaccgagacccaaatgtggtgccaggtcctcccaagccagcaaaggagaaacctcccaaaaagaaggcccaggacaaaattcttagtaatgagtatgaggagaagtatgacctcagccggcctactgcctctcagctggaggacgagctgcaggtggggaatgttccccttaaaaaagcaaaggagtctaaaaagcatgaaaagcttgagaaaccagagaaggagaagaaaaaaaagatgaagaatgagaacgcagacaagttacttaagagtgaaaagcaaatgaagaagtctgagaaaaagagcaagcaagagaaagagaagagcaagaagaaaaaaggaggtaaaacagaacaggatggctatcagaaacccaccaacaaacacttcacgcagagtcccaagaagtcagtggccgacctgctggggtcctttgaaggcaaacgaagactccttctgatcactgctcccaaggctgagaacaatatgtatgtgcaacaacgtgatgaatatctggaaagtttctgcaagatggctaccaggaaaatctctgtgatcaccatcttcggccctgtcaacaacagcaccatgaaaatcgaccactttcagctagataatgagaagcccatgcgagtggtggatgatgaagacttggtagaccagcgtctcatcagcgagctgaggaaagagtacggaatgacctacaatgacttcttcatggtgctaacagatgtggatctgagagtcaagcaatactatgaggtaccaataacaatgaagtctgtgtttgatctgatcgatactttccagtcccgaatcaaagatatggagaagcagaagaaggagggcattgtttgcaaagaggacaaaaagcagtccctggagaacttcctatccaggttccggtggaggaggaggttgctggtgatctctgctcctaacgatgaagactgggcctattcacagcagctctctgccctcagtggtcaggcgtgcaattttgggagctctgttgttgagcgagaagacgtaccagcccatttggtgaaagacattcgtaactattttcaagtgagcccggagtacttctccatgcttctagtcggaaaagacggaaatgtcaaatcctggtatccttccccaatgtggtccatggtgattgtgtacgatttaattgattcgatgcaacttcggagacaggaaatggcgattcagcagtcactggggatgcgctgcccagaagatgagtatgcaggctatggttaccatagttaccaccaaggataccaggatggttaccaggatgactaccgtcatcatgagagttatcaccatggatacccttactgagcagaaatatgtaaccttagactcagccagtttcctctgcagctgctaaaactacatgtggccagctccattcttccacactgcgtactacatttcctgcctttttctttcagtgtttttctaagactaaataaatagcaaactttcacct

SEQ ID NO: 261988 - DNA, 2853 bp, Artificial Sequence
  derived and/or modified sequence
atgacgtggcggatgggaccacgttttactatgttactggccatgtggttggtatgcggctccgaaccccaccctcatgccaccatacgcggctcccatggtggcagaaaagtccccctcgtatcacctgattcctcaaggccggcgcgctttttgcgccacacaggcaggtcccgcggcattgaacggtccactctggaagaacctaatttacagccgctgcagcgtcgacgatcagtaccagtgcttagattagcgagaccaaccgaaccccctgccagatcagacatcaatggagcagccgtaaggcccgaacagaggccagctgcccgcggatcccccagagaaatgattagagacgagggatcatccgcgcggtctagaatgctgcggttcccttcagggagttcatcgcctaacattctcgcatcattcgctggtaagaatcgcgtctgggttatcagcgccccacacgcttcggagggttattacaggttgatgatgtctctgctaaaagacgacgtgtactgcgagctggctgaacgtcatattcaacagattgttctatttcaccaggcaggagaagagggaggtaaggtgcgccgaatcacaagcgagggccagatacttgagcagccattggatccgtccctaattcccaagctcatgtcatttctgaaactggagaaaggaaaattcggcatggtgttgctaaagaaaactttgcaggtggaggaaagatatccatatcccgtgagactggaagccatgtatgaggtcatagaccagggccctataagaaggatagaaaaaatacgccagaagggttttgtgcagaagtgtaaggcgtcaggagttgaaggtcaggtagtcgccgaaggtaatgacggcgggggaggtgcagggcgcccctcacttgggagcgagaagaagaaagaagacccccggagagcacaggtcccccctactcgcgagagtcgcgtcaaagtcctgcggaaattggccgccactgctcccgcactccctcagccaccttctaccccccgcgccactacactgccccctgcccctgctactaccgttacacggagcacaagcagagctgttacggtcgccgcacgccccatgaccactaccgctttccccacaacacagagaccatggactccatcaccctcccacaggcctccaacaaccaccgaagtcatcacagcccgccgcccatctgtgtctgagaatttatatcctccctcacggaaggatcaacaccgggagcgtccacaaaccacacgtcgtccctcaaaagctaccagcctcgagagtttcaccaacgccccccctaccaccatcagcgagccgtccacaagagccgccggcccgggcaggtttcgcgacaataggatggaccgccgtgagcatgggcaccgagatccgaacgttgtcccaggtcccccaaaaccagctaaagagaaacccccaaaaaaaaaagcccaggataagatcctgtccaacgaatatgaagagaaatacgacctatcacggcccaccgcttcccagctcgaagatgaactgcaggttggaaatgtccctctgaaaaaggctaaggaatctaaaaagcacgagaagctggaaaaacctgagaaagagaagaaaaaaaagatgaaaaatgagaacgcagataaactcctcaagagtgagaagcagatgaagaagagtgaaaagaaaagtaagcaagagaaggagaagtcaaagaagaagaaaggcggaaaaaccgagcaagatggttatcaaaagcctaccaataagcatttcacccagtcccccaaaaaaagcgtggcagacctcctgggcagttttgaaggaaagcgtcgcctcctcctgatcaccgcacctaaggctgaaaacaatatgtatgtgcaacagcgcgatgagtatctcgaatcgttttgcaagatggccaccagaaagattagtgtcatcaccatctttggccctgtgaataactctaccatgaagatcgaccatttccaactggataatgaaaaaccaatgcgggtcgtggacgatgaggatttggtcgaccagcggctaattagcgaactgagaaaagaatatggcatgacatataatgatttcttcatggtactgacagatgttgatctgcgagtcaaacagtactacgaagttcccattaccatgaagtctgtatttgatttgattgatacctttcagtctcgtattaaagacatggaaaaacagaaaaaagagggtattgtttgcaaagaagacaagaaacaatccctggagaattttttgtcccgatttagatggagaagaaggcttcttgtgatttcagctcctaatgacgaggattgggcttatagccagcagctgtcagcattgtcaggacaagcttgcaacttcggcttgcgtcacatcacgatactaaagctgctaggagttggtgaggaagttggcggagtccttgagctattccccatcaatggttcctccgtagtcgagcgcgaagatgttccagcacacctggtaaaagatatcagaaactacttccaggtcagcccagaatacttttccatgctcttggtcggtaaggatggcaatgtcaagagctggtacccgtcaccaatgtggagcatggtgattgtgtatgaccttattgatagcatgcagttacgccgccaggaaatggccattcaacaatccctgggtatgcgctgtcccgaggatgaatacgccggttacggttaccattcttatcaccaggggtatcaggacggatatcaggatgattacagacaccatgaaagttaccaccacgggtatccatactag

SEQ ID NO: 261989 - DNA, 1656 bp, Artificial Sequence
  derived and/or modified sequence
atgacgtggcgcatgggtcctagattcaccatgctactcgccatgtggttagtttgcggaagtgaacctcatcctcatgccacaatccgtggatcccacggtggaagaaaggtcccattagtgtcccccgatagttcccgtcccgccagattccttagacataccggccgaagtagaggtattgagcgctccaccctggaagaaccgaatttacaacccttacagcgaagacgatctgttcctgtacttcgcctggcacgtccatcccgatttagagacaacaggatggacaggagggagcacggccacagggaccctaatgttgtacctggcccacccaaacctgcaaaagaaaaacccccgaaaaagaaagcgcaggataagatattatctaatgaatatgaagaaaaatacgacctgagcagacccaccgcctcccaactagaggacgaactacaagtaggtaacgtaccactgaagaaggcaaaagaaagtaaaaagcatgagaagctggagaagccagaaaaggagaagaagaaaaagatgaagaacgaaaacgctgacaagctgcttaagtcagaaaaacaaatgaaaaagagcgaaaagaaatctaaacaggagaaagagaagtctaagaagaaaaagggaggaaagacagagcaggacgggtatcagaagcccaccaataaacacttcacccagagcccaaaaaaatcagtagctgacctgttaggaagtttcgaaggtaagagacgcctattgctgatcacagcccctaaagctgaaaacaacatgtacgtgcagcaacgtgacgagtacttggaaagcttctgtaaaatggccacaagaaaaatctcagtcatcactatcttcggacctgttaacaatagcaccatgaaaattgatcactttcaattggacaatgaaaaacctatgagagttgttgacgatgaagatctggtggaccagcgcctaattagcgaactccggaaagagtacggaatgacttataatgacttttttatggtgctgactgatgttgacctaagagtcaaacagtactacgaagtccccattaccatgaagtcggtgtttgatttgattgacactttccagtcccgcatcaaagatatggagaagcagaagaaggaagggatcgtatgtaaggaagataagaagcaatccttagaaaactttctgtccaggtttcggtggcgtcgacggttactggttatatctgctcctaacgatgaggattgggcgtattcacagcagctgagcgcactgagcggacaggcatgcaattttggtagctctgtggtcgagagggaagacgtgcctgcacacctggtaaaggatattagaaactatttccaagtgtcccctgagtatttttctatgctacttgtaggaaaggatggcaatgtcaagtcttggtacccgtccccaatgtggagcatggtaatagtatacgatttgatagattctatgcagctgcgcagacaggagatggcaatccaacagagtctgggaatgagatgccctgaagacgaatatgctggttatggctaccacagttaccaccagggttaccaggatggatatcaggatgactaccgacaccatgaatcataccatcacggatatccttactag

SEQ ID NO: 261990 - DNA, 4664 bp, Artificial Sequence
  derived and/or modified sequence
gaacagactggaagagaagttaccccgatgacttggtttggaaggggttaaggcaccagtcatcctcttctaaagtgatttatgatgatgtgtggagtttaaaaactttaccccaccccaaagaacagccttctcactcctcactgagtccactctgaacgtgctaaaatgggaaggaggcggtgttttgctgatctgttaaattcttagtgaagtttccttgatttccagtggctgctgttgtttgagtttggtttggagcaaaactgaggtagtcctaacatttctgggactgaatccaggcaagagaaagaagaaaaagaagaagaaaaagaggaggaaaaaggtagggagaaataaagggaggagagaagcacagtgaaagaaaaaaaaagtcccttttcgacatcacattcctgtgttttccctcagcctggaaaacatattaatcccagtgcttttacgcccggaaacaaagagactaagccagactatgggggaaagggagataagaaggatcctggaactttaaagagggaaagagtgagattcagaaatcgccaggactggactttaagggacgtcctgtgtcagcacaagggactggcacacacagacacacgagaccgaggagaaactgcagacaaatggagatacaaagacttagaaggacagctcctttcacctcatcctacttgtccagaaggtaaaaagacacagccagaaagaaaaggcatcggctcagctctcagatcaggacaggctgtggatctgtggcggtactctgaaagctggagctgcagcacaccccttttgtattgctcaccctcggtaaagagagagagggctgggaggaaaagtagttcatctaggaaactgtcctgggaaccaaacttctgatttcttttgcaaccctctgcattccatctctatgagccaccattggattacacaatgacatggagaatgggaccccgtttcactatgctgttggccatgtggctagtgtgtggatcagaaccccacccccatgccactattagaggcagccacggaggacggaaagtgcctttggtttctccggacagcagtaggccagctcggtttctgaggcacactgggaggtctcgcggaattgagagatccactctggaggaaccaaaccttcagcctctccagagaaggaggagtgtgcccgtgttgagactagctcgcccaacagagccgccagcccgctcggacatcaatggggccgccgtgagacctgagcaaagaccagcagccaggggctctccgcgtgagatgatcagagatgaggggtcctcagctcggtcaagaatgttgcgtttcccttcggggtccagctctcccaacatccttgccagctttgcagggaagaacagagtatgggtcatctcagcccctcatgcctcggaaggctactaccgcctcatgatgagcctgctgaaggacgatgtgtactgtgagctggcggagaggcacatccaacagattgtgctcttccaccaggcaggtgaggaaggaggcaaggtgagaaggatcaccagcgagggccagatcctggagcagcccctggaccctagcctcatccctaagctgatgagcttcctgaagctggagaagggcaagtttggcatggtgctgctgaagaagacgctgcaggtggaggagcgctatccatatcccgttaggctggaagccatgtacgaggtcatcgaccaaggccccatccgtaggatcgagaagatcaggcagaagggctttgtccagaaatgtaaggcctctggtgtagagggccaggtggtggcggaggggaatgacggtggagggggagcaggaaggccaagcctgggcagcgagaagaagaaagaggacccaaggagagcacaagtcccaccaaccagagagagtcgggtgaaggtcctgagaaaactggccgccactgcaccagctttgccccaacctccctcaacccccagagccaccacccttcctcctgccccagccacaacagtgactcggtccacgtcccgggcggtaacagttgctgcaagacctatgaccaccactgcctttcccaccacgcagaggccctggaccccctcaccctcccacaggccccctacaaccactgaggtgatcactgccaggagaccctcagtttcagagaatctttaccctccatcccggaaggatcagcacagggagaggccacagacaaccaggaggcccagcaaggccaccagcttggagagcttcacaaatgcccctcccaccaccatctcagaacccagcacaagggctgctggcccaggccgtttccgggacaaccgcatggacaggcgggaacatggccaccgagacccaaatgtggtgccaggtcctcccaagccagcaaaggagaaacctcccaaaaagaaggcccaggacaaaattcttagtaatgagtatgaggagaagtatgacctcagccggcctactgcctctcagctggaggacgagctgcaggtggggaatgttccccttaaaaaagcaaaggagtctaaaaagcatgaaaagcttgagaaaccagagaaggagaagaaaaaaaagatgaagaatgagaacgcagacaagttacttaagagtgaaaagcaaatgaagaagtctgagaaaaagagcaagcaagagaaagagaagagcaagaagaaaaaaggaggtaaaacagaacaggatggctatcagaaacccaccaacaaacacttcacgcagagtcccaagaagtcagtggccgacctgctggggtcctttgaaggcaaacgaagactccttctgatcactgctcccaaggctgagaacaatatgtatgtgcaacaacgtgatgaatatctggaaagtttctgcaagatggctaccaggaaaatctctgtgatcaccatcttcggccctgtcaacaacagcaccatgaaaatcgaccactttcagctagataatgagaagcccatgcgagtggtggatgatgaagacttggtagaccagcgtctcatcagcgagctgaggaaagagtacggaatgacctacaatgacttcttcatggtgctaacagatgtggatctgagagtcaagcaatactatgaggtaccaataacaatgaagtctgtgtttgatctgatcgatactttccagtcccgaatcaaagatatggagaagcagaagaaggagggcattgtttgcaaagaggacaaaaagcagtccctggagaacttcctatccaggttccggtggaggaggaggttgctggtgatctctgctcctaacgatgaagactgggcctattcacagcagctctctgccctcagtggtcaggcgtgcaattttggtctgcgccacataaccattctgaagcttttaggcgttggagaggaagttgggggagtgttagaactgttcccaattaatgggagctctgttgttgagcgagaagacgtaccagcccatttggtgaaagacattcgtaactattttcaagtgagcccggagtacttctccatgcttctagtcggaaaagacggaaatgtcaaatcctggtatccttccccaatgtggtccatggtgattgtgtacgatttaattgattcgatgcaacttcggagacaggaaatggcgattcagcagtcactggggatgcgctgcccagaagatgagtatgcaggctatggttaccatagttaccaccaaggataccaggatggttaccaggatgactaccgtcatcatgagagttatcaccatggatacccttactgagcagaaatatgtaaccttagactcagccagtttcctctgcagctgctaaaactacatgtggccagctccattcttccacactgcgtactacatttcctgcctttttctttcagtgtttttctaagactaaataaatagcaaactttcacctattcatgagttattattgaaacctcaaatcataaagacatttaaaagaattgtttttctaactggaggggctctagtgctaaataatagtactgaaaattgatattattttccttttcttatatgaaggaccttatttggcatataaaattttataaaatatgtatttaaagctttttcttattttttgtattaattggtaagtgaaaactctgttaaagatcacaccacaatgttttcaagaaacatctgaaaagataaaacaaagaacaaataacttataatacttacttaaattgacactttttgaaatgccagtctgaaaataattaagatatctctgctttgtatgagtttcttttatgaaacttgataccacgggagtccagtaatattggccacaaaagccagagaaagtaccaagcccagctttgttatcatagccacttcctgccctgcttctgttatttttagtgttttttcagatataaatcggggtccaggaaatcctcaccagaatctggcactgcagccaaaggcgatacttccagagttctagtaggctgctatggaatttctggcatgaaaattcttgacccctcacactttaccccctgtacagcacaggcataccatggagatattacaggatcagttccagaccaccataataaagtggatatcgcaataaagtgagtcacacaaaa

SEQ ID NO: 261991 - DNA, 2853 bp, Artificial Sequence
  derived and/or modified sequence
atgacctggagaatgggccccagattcaccatgctgctggccatgtggctggtgtgcggcagcgagccccacccccacgccaccatcagaggcagccacggcggcagaaaggtgcccctggtgagccccgacagcagcagacccgccagattcctgagacacaccggcagaagcagaggcatcgagagaagcaccctggaggagcccaacctgcagcccctgcagagaagaagaagcgtgcccgtgctgagactggccagacccaccgagccccccgccagaagcgacatcaacggcgccgccgtgagacccgagcagagacccgccgccagaggcagccccagagagatgatcagagacgagggcagcagcgccagaagcagaatgctgagattccccagcggcagcagcagccccaacatcctggccagcttcgccggcaagaacagagtgtgggtgatcagcgccccccacgccagcgagggctactacagactgatgatgagcctgctgaaggacgacgtgtactgcgagctggccgagagacacatccagcagatcgtgctgttccaccaggccggcgaggagggcggcaaggtgagaagaatcaccagcgagggccagatcctggagcagcccctggaccccagcctgatccccaagctgatgagcttcctgaagctggagaagggcaagttcggcatggtgctgctgaagaagaccctgcaggtggaggagagatacccctaccccgtgagactggaggccatgtacgaggtgatcgaccagggccccatcagaagaatcgagaagatcagacagaagggcttcgtgcagaagtgcaaggccagcggcgtggagggccaggtggtggccgagggcaacgacggcggcggcggcgccggcagacccagcctgggcagcgagaagaagaaggaggaccccagaagagcccaggtgccccccaccagagagagcagagtgaaggtgctgagaaagctggccgccaccgcccccgccctgccccagccccccagcacccccagagccaccaccctgccccccgcccccgccaccaccgtgaccagaagcaccagcagagccgtgaccgtggccgccagacccatgaccaccaccgccttccccaccacccagagaccctggacccccagccccagccacagaccccccaccaccaccgaggtgatcaccgccagaagacccagcgtgagcgagaacctgtacccccccagcagaaaggaccagcacagagagagaccccagaccaccagaagacccagcaaggccaccagcctggagagcttcaccaacgccccccccaccaccatcagcgagcccagcaccagagccgccggccccggcagattcagagacaacagaatggacagaagagagcacggccacagagaccccaacgtggtgcccggcccccccaagcccgccaaggagaagccccccaagaagaaggcccaggacaagatcctgagcaacgagtacgaggagaagtacgacctgagcagacccaccgccagccagctggaggacgagctgcaggtgggcaacgtgcccctgaagaaggccaaggagagcaagaagcacgagaagctggagaagcccgagaaggagaagaagaagaagatgaagaacgagaacgccgacaagctgctgaagagcgagaagcagatgaagaagagcgagaagaagagcaagcaggagaaggagaagagcaagaagaagaagggcggcaagaccgagcaggacggctaccagaagcccaccaacaagcacttcacccagagccccaagaagagcgtggccgacctgctgggcagcttcgagggcaagagaagactgctgctgatcaccgcccccaaggccgagaacaacatgtacgtgcagcagagagacgagtacctggagagcttctgcaagatggccaccagaaagatcagcgtgatcaccatcttcggccccgtgaacaacagcaccatgaagatcgaccacttccagctggacaacgagaagcccatgagagtggtggacgacgaggacctggtggaccagagactgatcagcgagctgagaaaggagtacggcatgacctacaacgacttcttcatggtgctgaccgacgtggacctgagagtgaagcagtactacgaggtgcccatcaccatgaagagcgtgttcgacctgatcgacaccttccagagcagaatcaaggacatggagaagcagaagaaggagggcatcgtgtgcaaggaggacaagaagcagagcctggagaacttcctgagcagattcagatggagaagaagactgctggtgatcagcgcccccaacgacgaggactgggcctacagccagcagctgagcgccctgagcggccaggcctgcaacttcggcctgagacacatcaccatcctgaagctgctgggcgtgggcgaggaggtgggcggcgtgctggagctgttccccatcaacggcagcagcgtggtggagagagaggacgtgcccgcccacctggtgaaggacatcagaaactacttccaggtgagccccgagtacttcagcatgctgctggtgggcaaggacggcaacgtgaagagctggtaccccagccccatgtggagcatggtgatcgtgtacgacctgatcgacagcatgcagctgagaagacaggagatggccatccagcagagcctgggcatgagatgccccgaggacgagtacgccggctacggctaccacagctaccaccagggctaccaggacggctaccaggacgactacagacaccacgagagctaccaccacggctacccctactag

SEQ ID NO: 261992 - DNA, 1656 bp, Artificial Sequence
  derived and/or modified sequence
atgacctggagaatgggccccagattcaccatgctgctggccatgtggctggtgtgcggcagcgagccccacccccacgccaccatcagaggcagccacggcggcagaaaggtgcccctggtgagccccgacagcagcagacccgccagattcctgagacacaccggcagaagcagaggcatcgagagaagcaccctggaggagcccaacctgcagcccctgcagagaagaagaagcgtgcccgtgctgagactggccagacccagcagattcagagacaacagaatggacagaagagagcacggccacagagaccccaacgtggtgcccggcccccccaagcccgccaaggagaagccccccaagaagaaggcccaggacaagatcctgagcaacgagtacgaggagaagtacgacctgagcagacccaccgccagccagctggaggacgagctgcaggtgggcaacgtgcccctgaagaaggccaaggagagcaagaagcacgagaagctggagaagcccgagaaggagaagaagaagaagatgaagaacgagaacgccgacaagctgctgaagagcgagaagcagatgaagaagagcgagaagaagagcaagcaggagaaggagaagagcaagaagaagaagggcggcaagaccgagcaggacggctaccagaagcccaccaacaagcacttcacccagagccccaagaagagcgtggccgacctgctgggcagcttcgagggcaagagaagactgctgctgatcaccgcccccaaggccgagaacaacatgtacgtgcagcagagagacgagtacctggagagcttctgcaagatggccaccagaaagatcagcgtgatcaccatcttcggccccgtgaacaacagcaccatgaagatcgaccacttccagctggacaacgagaagcccatgagagtggtggacgacgaggacctggtggaccagagactgatcagcgagctgagaaaggagtacggcatgacctacaacgacttcttcatggtgctgaccgacgtggacctgagagtgaagcagtactacgaggtgcccatcaccatgaagagcgtgttcgacctgatcgacaccttccagagcagaatcaaggacatggagaagcagaagaaggagggcatcgtgtgcaaggaggacaagaagcagagcctggagaacttcctgagcagattcagatggagaagaagactgctggtgatcagcgcccccaacgacgaggactgggcctacagccagcagctgagcgccctgagcggccaggcctgcaacttcggcagcagcgtggtggagagagaggacgtgcccgcccacctggtgaaggacatcagaaactacttccaggtgagccccgagtacttcagcatgctgctggtgggcaaggacggcaacgtgaagagctggtaccccagccccatgtggagcatggtgatcgtgtacgacctgatcgacagcatgcagctgagaagacaggagatggccatccagcagagcctgggcatgagatgccccgaggacgagtacgccggctacggctaccacagctaccaccagggctaccaggacggctaccaggacgactacagacaccacgagagctaccaccacggctacccctactag

SEQ ID NO: 261993 - DNA, 2853 bp, Artificial Sequence
  derived and/or modified sequence
atgacttggcggatggggccccggtttacaatgctgctcgccatgtggctggtgtgtggatctgagcctcacccgcacgccaccattagggggtctcacggtggaaggaaggtcccgctcgtcagccccgatagctccagacccgcccgcttccttaggcacaccggacgatctcgtgggatcgaacgatccacacttgaggaaccaaatctccagcccctgcagcggaggaggtctgttcctgttctaaggctggctagacctaccgaacccccagccagaagcgacatcaacggcgccgctgtgcgtcctgagcagagacccgccgcacgcggaagcccaagagagatgatcagggacgagggctcatccgcgcggagccgcatgctccggttcccttccggcagctcttcaccaaatatactcgcctctttcgcaggcaagaaccgggtttgggtgatatccgcaccccatgcaagcgaggggtattaccgcttaatgatgagcctgctcaaggatgacgtgtactgcgaacttgctgagcgccatattcagcagatagtgctgttccatcaggcgggggaggaaggaggaaaggttagaaggatcacctccgagggccagatcctggagcagcctctggaccctagcttaattccaaagctcatgtccttcctgaagctggagaagggtaaattcggaatggtgctccttaaaaagaccctgcaggtggaggagcgctacccctacccagtccggcttgaggctatgtacgaagtcattgaccagggcccgatccgacggatcgaaaagataaggcaaaagggatttgttcaaaaatgcaaggcctctggcgttgaaggtcaggtggttgccgagggcaatgacggggggggtggcgctggccggccatcacttgggtccgaaaagaaaaaggaggaccctcggagggcacaggttcctcctacacgcgagtcccgcgtgaaagtgctgagaaaactcgcagccactgcccccgcactacctcagcctcccagcacccctcgcgctactacattgcccccagcacctgcgaccacagtaacgcggtctaccagccgcgccgtgacagtagcagcccgccctatgacaaccacagccttccctacgacgcagaggccctggaccccgagcccctcccacagacctcctaccactacggaagtgataacagcgcgccgtcctagcgtgtccgagaacctctaccccccaagtcgcaaggatcagcatcgggagagaccacagaccacccggagaccttctaaggccacatcactggagagcttcacgaatgccccaccaactacgatctctgagcccagtacaagagctgcaggacctgggaggtttcgcgataaccggatggaccgacgggaacatggccatcgtgatcctaacgtcgtaccagggcccccaaaacccgctaaagagaaaccgcccaaaaagaaggcacaggacaaaatcttgagtaacgagtacgaggagaaatacgacctgtcaaggcctaccgccagtcagttggaagatgaattgcaggtggggaacgtccctctaaaaaaggctaaagagtccaaaaagcatgagaaactggaaaagcccgaaaaagaaaagaaaaagaaaatgaagaatgagaatgcggataaactattgaagagcgaaaaacaaatgaaaaagtcggagaaaaaatctaagcaggagaaggaaaagagcaagaaaaagaagggcggaaagacagagcaagacggctaccagaagcctacaaataagcacttcacccaatctccaaaaaagagtgttgctgatctgctcgggagcttcgagggcaaaagacgccttctgctgattacagctcccaaagctgagaataacatgtacgttcagcagagagacgagtatctcgaatctttttgtaagatggccacgagaaagatctcagtcatcactatctttgggccagttaataacagtactatgaagatcgatcacttccagttagacaatgagaagcctatgagagtggtggacgatgaggacctagtcgatcaaagactcatctccgagctgagaaaagagtacggcatgacctacaatgacttcttcatggtcctgaccgatgtggacttgagggtcaagcagtattatgaggtgcccattacaatgaaaagcgtgttcgacttgatcgacaccttccagagccgtattaaggacatggagaagcagaagaaagagggcattgtctgtaaagaggacaagaaacagtcccttgaaaatttcctcagcaggttccgatggcggcgaagacttctcgtgatctcggcacccaatgacgaggattgggcttactcccagcagctgtccgccctctctgggcaggcatgtaatttcgggcttcggcacattaccatactgaaactccttggggtaggggaagaagtcgggggcgttctcgaactctttcccatcaatgggagctccgtggtggagcgggaagatgttcctgcccatttagtgaaagacatacggaattacttccaggtatctccagagtacttcagcatgctgttagtgggtaaagatgggaatgttaaatcgtggtatcccagccccatgtggtccatggtgatcgtgtacgacctgatcgactccatgcaactcaggcggcaagagatggctatccagcagtccctgggcatgagatgcccagaggatgaatacgctggatacggatatcacagttaccatcagggataccaggatggctatcaggacgattaccggcatcacgagtcctaccatcatggctacccctactag

SEQ ID NO: 261994 - DNA, 1656 bp, Artificial Sequence
  derived and/or modified sequence
atgacctggagaatgggccctcggttcaccatgctgctggcgatgtggcttgtttgtggttccgagccccatccccacgctacaattagagggtctcatggcgggagaaaggtccctctggtcagtcccgatagctcacgacccgctaggtttcttaggcacactggcaggtccaggggcattgaaagatcaaccctggaagaaccgaacctgcaacctctccaaagacggaggtcagtcccagttttacgcctcgcgcggcccagcagattccgagacaatcgcatggacagaagggaacatgggcatcgggaccccaacgtcgttcccggcccccctaaacccgccaaagaaaaacctccgaagaaaaaagctcaggacaaaatactctctaatgaatacgaagagaagtacgacttgagtcggcctacagccagccagctcgaggacgaacttcaggtggggaatgtgccactgaagaaagcaaaagaaagtaagaagcacgaaaaactggaaaaacctgagaaagagaaaaaaaagaagatgaagaacgagaatgcagataagctgctaaaatcagagaaacagatgaagaaatcggagaagaagtccaaacaggaaaaagaaaagtccaagaagaagaaagggggaaaaacggaacaggacggctatcaaaagcctactaacaaacacttcacccagtcacccaagaagtctgtcgccgatttactcggttcttttgagggcaaacggcgtttgcttctcatcacagccccaaaggcggagaacaatatgtatgtgcagcagcgcgacgaatatctggaaagcttttgcaaaatggcaacacgaaaaatctcagttatcaccatattcggacccgtcaacaatagcacaatgaagattgaccacttccagctggacaacgaaaaacccatgagagtcgtggacgacgaggatctcgttgaccaacggttgatttccgaactccgaaaggagtatgggatgacatacaatgatttctttatggtgcttactgacgtagatttgagagttaagcaatattacgaggtacccatcacgatgaagagcgtgttcgatctgatcgatacctttcagagccgtattaaagatatggaaaaacagaagaaagaggggatagtgtgcaaagaggataaaaaacagagccttgagaactttctgtctcgattcagatggaggaggagattgcttgtgatcagtgcacccaatgatgaagattgggcatacagtcagcaactgagcgctctttctggccaggcatgcaactttggttctagcgtcgtggagagagaggacgtccccgcacacctcgtgaaggacatccgcaattatttccaggtttcacctgagtattttagcatgctgctggtcggaaaggatggtaatgtgaaatcctggtaccctagcccaatgtggagcatggtgatcgtttacgacctcatcgattctatgcagctgaggcgccaggagatggcaattcaacaaagtcttgggatgcgttgtccagaagacgaatatgctggatacggctaccattcttatcaccaggggtaccaggacggctatcaggacgattaccgtcaccacgaatcatatcatcatgggtacccatactag

SEQ ID NO: 261995 - DNA, 2853 bp, Artificial Sequence
  derived and/or modified sequence
atgacctggaggatgggcccccgcttcaccatgctgctggccatgtggctggtgtgtggcagcgagccccacccccacgccaccatccggggcagccatggaggcaggaaggtgcccctggtgtccccagacagcagcaggcctgcccgcttcctgcggcacacaggccgcagccggggcatcgagaggagcaccctggaggagcccaacctgcagcccctgcagaggagaagatctgtgcctgtgctgcggctggcccggcccacagagcccccagcccggagtgacatcaacggggctgctgtgcggcctgagcagaggcctgctgcccggggcagcccccgggagatgatcagagatgagggcagcagcgcccggagcaggatgctgcgcttccccagcggcagcagcagccccaacatcctggccagctttgctgggaagaacagagtgtgggtgatcagcgccccccacgccagcgagggctactaccgcctgatgatgagcctgctgaaggatgatgtgtactgtgagctggccgagcggcacatccagcagatcgtgctcttccaccaggccggggaggagggcggcaaggtgcggcgcatcaccagcgagggccagatcctggagcagcccctggaccccagcctcatccccaagctgatgtccttcctgaagctggagaagggcaagtttggcatggtgctgctgaagaagaccctgcaggtggaggagcgctacccctaccctgtgcggctggaggccatgtatgaggtgattgaccagggccccatcagaagaattgagaagatccggcagaagggctttgtgcagaagtgcaaggccagcggcgtggagggccaggtggtggccgagggcaatgatggcggcggcggggccggccggcccagcctgggcagcgagaagaagaaggaggacccccggcgggcccaggtgccccccacccgggagagccgggtgaaggtgctgaggaagctggccgccacagccccagccctgccccagccccccagcaccccccgggccaccaccctgcccccagccccagccaccaccgtgaccaggagcaccagcagagctgtgacagtggccgcccggcccatgaccaccacagccttccccaccacccagaggccctggacccccagccccagccaccggccccccaccaccacagaggtgatcacagcccggcggcccagcgtgtctgagaacctgtacccacccagcaggaaggaccagcaccgggagcggccccagaccacccggcggcccagcaaggccaccagcctggagagcttcaccaatgccccacccaccaccatcagcgagcccagcaccagggctgctggccctggccgcttccgggacaacaggatggaccggcgggagcacggccaccgggaccccaacgtggtgcccggcccccccaagccagccaaggagaagccacccaagaagaaggcccaggacaagatcctgagcaatgaatatgaggagaagtatgacctgagccggcccacagccagccagctggaggatgagctgcaggtgggcaatgtgcccctgaagaaggccaaggagagcaagaagcatgagaagctggagaagccagagaaggagaagaagaagaagatgaagaatgaaaatgctgacaagctgctgaagtctgagaagcagatgaagaagtctgagaagaagagcaagcaggagaaggagaagagcaagaagaagaagggcggcaagacagagcaggacggctaccagaagcccaccaacaagcacttcacccagagccccaagaagtctgtggccgacctgctgggcagctttgagggcaagaggcggctgctgctgatcacagcccccaaggccgagaacaacatgtatgtgcagcagagagatgagtacctggagagcttctgcaagatggccaccaggaagatcagcgtcatcaccatctttggacctgtgaacaacagcaccatgaagattgaccacttccagctggacaatgagaagcccatgagggtggtggatgatgaggacctggtggaccagaggctcatcagcgagctgaggaaggagtatggcatgacctacaatgacttcttcatggtgctgacagatgtggacctgcgggtgaagcagtactatgaggtgcccatcaccatgaagtctgtgtttgacctgattgacaccttccagagccgcatcaaggacatggagaagcagaagaaggagggcatcgtgtgcaaggaggacaagaagcagagcctggagaacttcctgagccgcttccgctggaggcggcggctgctggtgatcagcgccccaaatgatgaggactgggcctacagccagcagctgagcgccctgagcggccaggcctgcaactttggcctgcggcacatcaccatcctgaagctgctgggcgtgggggaggaggtgggcggcgtgctggagctgttccccatcaatggcagctctgtggtggagagagaagatgtgcctgcccacctggtgaaggacatccggaactacttccaggtgtccccagagtacttctccatgctgctggtgggcaaggatggaaatgtgaagtcctggtaccccagccccatgtggagcatggtgattgtgtatgacctgattgacagcatgcagctgcggcggcaggagatggccatccagcagagcctgggcatgcgctgcccagaagatgaatatgccggctacggctaccacagctaccaccagggctaccaggacggctaccaggatgactaccgccaccacgagagctaccaccacggctacccctactag

SEQ ID NO: 261996 - DNA, 1656 bp, Artificial Sequence
  derived and/or modified sequence
atgacctggaggatgggcccccgcttcaccatgctgctggccatgtggctggtgtgtggcagcgagccccacccccacgccaccatccggggcagccatggaggcaggaaggtgcccctggtgtccccagacagcagcaggcctgcccgcttcctgcggcacacaggccgcagccggggcatcgagaggagcaccctggaggagcccaacctgcagcccctgcagaggagaagatctgtgcctgtgctgcggctggcccggcccagccgcttccgggacaacaggatggaccggcgggagcacggccaccgggaccccaacgtggtgcccggcccccccaagccagccaaggagaagccacccaagaagaaggcccaggacaagatcctgagcaatgaatatgaggagaagtatgacctgagccggcccacagccagccagctggaggatgagctgcaggtgggcaatgtgcccctgaagaaggccaaggagagcaagaagcatgagaagctggagaagccagagaaggagaagaagaagaagatgaagaatgaaaatgctgacaagctgctgaagtctgagaagcagatgaagaagtctgagaagaagagcaagcaggagaaggagaagagcaagaagaagaagggcggcaagacagagcaggacggctaccagaagcccaccaacaagcacttcacccagagccccaagaagtctgtggccgacctgctgggcagctttgagggcaagaggcggctgctgctgatcacagcccccaaggccgagaacaacatgtatgtgcagcagagagatgagtacctggagagcttctgcaagatggccaccaggaagatcagcgtcatcaccatctttggacctgtgaacaacagcaccatgaagattgaccacttccagctggacaatgagaagcccatgagggtggtggatgatgaggacctggtggaccagaggctcatcagcgagctgaggaaggagtatggcatgacctacaatgacttcttcatggtgctgacagatgtggacctgcgggtgaagcagtactatgaggtgcccatcaccatgaagtctgtgtttgacctgattgacaccttccagagccgcatcaaggacatggagaagcagaagaaggagggcatcgtgtgcaaggaggacaagaagcagagcctggagaacttcctgagccgcttccgctggaggcggcggctgctggtgatcagcgccccaaatgatgaggactgggcctacagccagcagctgagcgccctgagcggccaggcctgcaactttggcagctctgtggtggagcgggaggatgtgcctgcccacctggtgaaggacatccggaactacttccaggtgtccccagagtacttctccatgctgctggtgggcaaggatggaaatgtgaagtcctggtaccccagccccatgtggagcatggtgattgtgtatgacctgattgacagcatgcagctgcggcggcaggagatggccatccagcagagcctgggcatgcgctgcccagaagatgaatatgccggctacggctaccacagctaccaccagggctaccaggacggctaccaggatgactaccgccaccacgagagctaccaccacggctacccctactag

SEQ ID NO: 261997 - DNA, 2853 bp, Artificial Sequence
  derived and/or modified sequence
atgacctggcggatgggcccccggttcaccatgctgctggccatgtggctggtatgtgggtctgagccccatccacacgcaactatcaggggcagtcatggaggccgcaaggtgccattggtctcccctgacagttctagacccgcgaggtttttacgacacaccggacgctcccggggtatcgagcgctccacactggaggagcctaatctgcagcccctgcaaaggcgacgtagtgtgccagtgctacgactcgcccggccaaccgagccacctgcccgcagtgacataaatggtgccgccgttaggccggagcagcggcccgccgcccgcgggtcgccacgggagatgattagggatgaggggagcagcgccagatctcggatgttgaggttcccctccggctcctcctccccaaacattctggcctcattcgctggcaagaacagggtctgggtgatttccgcacctcacgcgagcgagggatattaccggctaatgatgtccctccttaaagacgacgtgtactgtgaattagcagagcgtcacatccagcagatcgtattgtttcaccaagccggggaggagggggggaaagtgaggcggatcacgtcagaaggacagatcctcgaacagccactggacccctctttgatacccaagctgatgtcttttctgaagctggagaaaggcaagttcggaatggtcctgctcaagaagacacttcaggtcgaagaacggtatccatatcccgtcagacttgaagccatgtatgaagtcattgatcaaggaccaataagaaggatcgagaaaataagacaaaagggattcgttcagaagtgtaaggcctccggagtggagggccaggtggtcgctgagggtaacgacggcggaggaggggctggccgtcccagcctcggctctgagaaaaaaaaagaagatccccggagggcacaggtaccccccactagagagagccgagttaaagtgctgcgtaagctagcggccaccgcccccgctttaccacaacctccaagtacacccagggctacaacactccccccagctcccgcgactaccgttactcgatccacctcgagggccgtcacagtggcggccagacccatgacgaccacggctttcccgactacgcagcgtccttggacgccgtccccctcccacaggcccccgaccaccactgaggtcattaccgcacgccggccttctgtttctgaaaacttatatcctcctagcagaaaagatcagcaccgggagagaccccagaccacccggcgcccatctaaggccaccagcctagaatcctttactaacgctccccctacaacgatctcggaaccttcaaccagagcagctgggccaggtcgcttccgcgacaacaggatggatcggcgcgaacacggacacagagatcccaatgtggttcccggtccacccaagcccgctaaagagaaacctcccaaaaaaaaagcccaagataaaatcctgtctaatgagtatgaagagaagtacgacttgagccgccccaccgcatcacagctggaggacgagctgcaggtcggcaatgtgccgctgaaaaaggcaaaggagtccaaaaagcacgaaaagcttgaaaagccggagaaggaaaaaaagaaaaagatgaagaacgaaaatgcagacaagctgctgaaatcagaaaaacagatgaagaaatctgagaagaagagcaaacaggaaaaagagaaaagtaagaagaaaaagggaggcaagaccgagcaggacggatatcagaagcccaccaacaaacactttacccaatcccccaagaagtctgttgccgacctactgggttcgtttgaggggaaaaggcgtctcctgctgatcacagctccaaaagccgaaaataatatgtacgtgcaacagcgcgatgagtacctggaatcgttctgcaagatggctaccaggaaaatcagcgttattaccatctttggacccgtgaataattccacgatgaagattgaccactttcagctggacaacgagaagcccatgcgggttgttgacgatgaggacttggttgatcagagattaatttccgagttgaggaaggaatacggtatgacgtataatgacttttttatggtactcacagacgtggacctgcgggtaaaacagtactacgaggttcccatcactatgaagagtgtattcgatctgatagatacatttcagagcagaataaaagatatggaaaaacagaagaaagagggaattgtctgtaaagaagataagaagcagtccctcgaaaatttcctgagtaggttccggtggaggcgacgactgctagtcatttcggccccgaatgacgaagactgggcctatagtcagcaactgagtgctctcagtggccaggcttgcaatttcggcctacggcacatcacaatcctgaaacttttgggagtgggggaggaagtcggtggagtgctggaactcttccccatcaatggaagctccgtggtggagcgggaagatgtgcccgctcatttggtcaaggatatccgcaattatttccaggtctccccagagtacttttcgatgctgttggttggcaaggacggcaatgttaagtcgtggtatccctcccccatgtggtctatggtgatcgtctacgatctgatcgactctatgcagctcagacggcaggaaatggctattcagcagtccctgggaatgcggtgccccgaggatgagtatgccggatatgggtaccattcatatcatcaaggttaccaagatggttatcaggacgattacagacaccacgagagctaccatcacggttacccctactag

SEQ ID NO: 261998 - DNA, 1656 bp, Artificial Sequence
  derived and/or modified sequence
atgacctggcggatgggcccccggttcaccatgctgctggccatgtggctggtctgcggcagcgagccccacccccatgccaccatacgcgggagtcatggcgggaggaaggtgcctctggtgtcccccgatagctctcggcctgcgcgatttctacgacatactggcaggtctcgaggtattgaaaggtcaaccctggaggaacccaacctccaacctctacagagacgcaggagtgtgcctgtgcttcgcctggcccgaccaagcaggttccgggataaccgcatggacagacgcgaacacggtcatcgtgacccaaatgtggtgccgggccctcccaaacctgccaaagagaaaccaccaaagaagaaggctcaggacaaaatactgagcaatgaatatgaggaaaaatatgacctcagtcgcccgactgcctcgcagctggaagatgaacttcaagtgggaaacgttcctctgaagaaggcaaaggagtccaaaaaacacgaaaaactggaaaagcccgaaaaggagaagaaaaaaaagatgaagaatgagaacgctgataaactactcaagagtgagaagcaaatgaaaaaaagcgaaaagaagagcaagcaggagaaggaaaagagtaaaaaaaagaaaggggggaagacagaacaggacgggtatcagaagccgactaataaacattttacgcagtcgcctaaaaagtccgtggcggatctgcttggttcatttgaaggcaagcgaaggttgctcttaatcacagcccccaaagcggagaataatatgtacgttcagcagcgagacgaatatctggagtcattctgtaagatggctacacgtaagatttccgtcataactatttttggtccagtgaacaactctaccatgaagatcgatcattttcagctcgataatgaaaagcccatgagggtcgtcgacgacgaggacttggtggaccagcggcttatatccgaattaaggaaggaatacgggatgacctacaatgatttctttatggtcctcaccgacgtcgacctgagggttaagcagtactacgaagtgcccatcacaatgaagagtgtgttcgacttaatagatactttccagtctaggattaaggacatggagaaacagaaaaaggaaggcatcgtatgcaaagaggataaaaagcaatctttggaaaattttctgtctagattccggtggcgtagacggctactcgtgatctcggcgcctaatgacgaggactgggcctacagtcagcaactgtcggccctgtcagggcaggcttgcaactttggctctagcgtggtggagagagaggacgtgcccgcccaccttgtcaaagatattcgcaattactttcaggtttcacctgagtattttagcatgctattggttggaaaggacggaaacgtcaaaagctggtacccttcaccaatgtggtcgatggtgatagtgtatgatctcattgatagcatgcagctaaggcgacaggaaatggccatccagcagtctctcggcatgcgctgtcctgaggatgaatatgcagggtatggttaccactcttatcatcagggctatcaagatggctaccaggacgactacagacaccacgaaagctaccaccacggctacccatattag

SEQ ID NO: 261999 - DNA, 2853 bp, Artificial Sequence
  derived and/or modified sequence
atgacatggcgaatgggcccgaggtttacgatgctgctggccatgtggctcgtatgtggttctgagccccatccccacgccaccatcagggggtctcacgggggcagaaaagttcccttagtgagcccagattcatctcggcccgcccggtttttgcggcataccggcaggagcagaggcattgaacgctcaaccctggaggagcctaacctgcagcctctccagcgaaggcggagcgtgccggtccttaggctagcaagacccacagagccgccagctaggtcagacatcaacggagcggccgtgagaccagaacaaaggcccgccgcgagaggaagtcccagggaaatgatcagggacgagggcagttccgccagaagccgtatgctgcgtttcccttcgggaagcagtagtcctaatatcctggcaagcttcgccggtaaaaaccgggtctgggttatctcagctccccatgcttctgaaggttactatcgattgatgatgtccctgctcaaagacgatgtgtactgcgaactagccgagaggcacattcaacagatcgtcctcttccaccaggctggggaagagggcgggaaggtgcggcggatcacttccgagggacagatcctagaacagcctctcgatccttcactgatccctaaactcatgtctttcctgaagctcgagaagggcaagtttgggatggtcctccttaagaagacactgcaggttgaggagcggtacccataccctgtgagactcgaagccatgtacgaggtcattgaccaggggcccataagacggattgagaaaattcggcaaaagggtttcgtacagaaatgtaaggccagtggcgtagagggtcaggtggtggccgagggaaatgatgggggcggaggagcaggcaggccctccctgggtagtgagaagaaaaaggaggatcccaggagggctcaggtgccccccacacgggaatcaagggtgaaggtcctgcgaaaattagccgccactgcccccgctttaccacagcctccctctacacctagggccaccaccttgcctcccgcccctgcaaccacggttacacgctccacgtctcgtgctgtcacggtggccgcccgtcccatgactacaaccgcattcccaactacacagcgcccgtggacccctagtccttctcaccgaccccccaccaccactgaagtgatcacagcccggagaccatctgtcagtgaaaatttatatccaccgtccagaaaagatcagcacagggagaggccccaaacgacgcgaagacctagcaaggcaaccagtctcgagagctttacaaatgctccccctactaccatcagcgaacctagcaccagggccgcgggccccggcagattcagggataatcgtatggatcggcgagagcatggacatagagatcctaatgtggtacccggccctcctaaaccagctaaagagaaacctccaaaaaaaaaggcccaggataaaatcttgagcaacgagtacgaggagaagtacgacttgagtcgccccaccgcaagccaattggaggacgagctgcaggtggggaacgtgcctttgaagaaggcaaaagagtccaagaagcacgaaaaactcgagaagccagaaaaagaaaaaaaaaaaaaaatgaagaacgaaaacgccgataagctgttgaagagcgagaaacagatgaaaaagtccgagaaaaagtcgaagcaagagaaagaaaaatcaaagaaaaagaaaggaggcaagacagaacaagacggctaccagaaacctacaaataaacatttcacacagagccctaagaagtcagttgcagatctgctgggttccttcgaaggtaagcgccgcttactgctgattactgctcccaaggccgagaataacatgtacgtgcagcagagggatgagtacctcgaaagtttttgtaagatggctaccagaaagatttcagtcataactatttttggccctgtaaacaactccacaatgaagatcgaccatttccagctggataacgagaagcccatgcgggtggtggacgatgaagatcttgttgaccagcgactcatctctgagctcaggaaagaatacggaatgacttacaacgatttttttatggtgctgaccgatgtcgatttgcgcgtcaagcagtactatgaggtcccaattaccatgaaaagtgtctttgacttgatcgatacctttcagagcaggattaaagatatggagaagcagaagaaggagggcatcgtatgtaaggaggataaaaagcagagtctcgagaactttcttagcaggtttaggtggaggcgcagactgttggttataagcgcccccaatgacgaagactgggcatattcgcagcagctttcagccctgtccggccaggcatgcaatttcggcctccgtcacatcacgatcttgaagctgctgggcgttggagaggaggttggcggagtactggagctgttcccaattaatgggtctagtgttgttgagcgagaggacgtgcctgcccacctggtaaaagacataaggaattacttccaagtgagtcccgaatacttcagtatgttattggtcggtaaggatggcaacgtgaagtcctggtatccatctccgatgtggtctatggttatcgtgtacgaccttattgactctatgcagctgaggcgccaggagatggctatccaacagagtctcggcatgcggtgccctgaagacgagtacgcagggtacggctatcactcttatcaccagggttaccaggatggatatcaagatgactatcggcatcatgagtcttaccatcatggctatccatactag

SEQ ID NO: 262000 - DNA, 2853 bp, Artificial Sequence
  derived and/or modified sequence
atgacctggcggatgggcccccggttcaccatgctgctggccatgtggctggtgtgtggctccgagcctcatccccacgccaccatccgtgggagccacggcggcagaaaagtgccactggtgtctcctgatagttctcgccccgcaagattcctgaggcacactgggagaagtaggggtatcgagagaagtacacttgaggaacccaacttgcagcctctgcagcgtaggagaagtgttccagtactgcgcttagcgagacctaccgaacctcctgcaaggtctgatatcaacggtgcagcagtgcggccagagcagcgtcccgccgctcggggttccccacgggaaatgatcagggatgagggcagttcggcccgcagcagaatgctgcgcttccccagtggaagcagttcccctaacatattggccagtttcgccggaaaaaaccgcgtatgggtcatttctgccccgcacgcatccgagggttactaccggctgatgatgagcttgctgaaggatgacgtatactgcgagctcgccgaaaggcacattcagcagatcgtgctgttccaccaggcaggagaagagggggggaaggtcagaaggatcaccagtgagggccaaattttagagcagcctctggatccttccctgatacctaaactcatgtccttcctcaagctcgagaagggtaagtttgggatggttctgttgaagaaaacattacaggtagaggaaagatatccctatcctgtgcgtctcgaagctatgtatgaagttatcgaccagggacccatccgccgcatagagaagatcaggcagaaggggttcgttcagaaatgcaaggctagtggagtggaagggcaggtcgtagcggagggcaacgacggtggggggggcgccggtcggccctcgcttggttcagagaagaagaaggaagaccccaggcgtgcacaggtgccccccacccgagagagtcgtgtgaaggtcctgagaaagcttgccgctacagctcccgcactcccacaaccaccctccacgccacgggccacgactttgcctcctgcgcccgctacgaccgtgaccagaagcacctcccgggctgtgaccgtcgccgccagacctatgaccaccacggctttcccaactactcaaaggccctggactccaagtccttcccaccggcctccaactactactgaggtcattacagctcgcaggccaagcgtgagtgaaaacctgtatcctccttcacgcaaggatcagcacagagaacgcccccagaccacccgccggccatcaaaggccacgagtctggagtccttcaccaacgctccaccgacaaccatctctgaaccatcaactagagccgccgggcctggtaggtttagagacaacaggatggacagaagagagcacggtcaccgcgacccaaatgtggttcccggaccccccaagcccgctaaggagaagccccctaaaaaaaaagcccaggacaagattctctcaaacgagtacgaagagaagtatgatttatctcgtcccactgcctcccagctcgaggacgaacttcaagttgggaatgtgccacttaagaaagctaaagagtctaaaaagcatgagaagctggagaaacccgagaaggagaagaagaaaaagatgaagaatgagaacgctgacaagctccttaaaagcgagaaacaaatgaagaagagcgaaaagaaaagtaagcaggaaaaagaaaagtccaagaagaagaagggagggaagacggaacaagacggataccagaagccgacgaataaacatttcactcagagcccaaaaaagagcgtggccgatctactcgggagttttgaggggaaacgccggctcctcctgatcaccgctcccaaggctgagaataatatgtacgtccagcagcgtgacgaatacttagaatccttttgcaaaatggctacccgcaaaatttccgtgattactatttttggaccggtcaacaattctacaatgaagattgatcattttcagctggacaatgagaagccaatgagagtggtagatgatgaggatttagttgaccagcgcctgatctctgaactaaggaaagagtacggcatgacctataacgacttttttatggtgctcaccgatgttgatcttcgtgtgaagcagtactacgaggtccctataaccatgaaaagtgtttttgatctcatcgacacttttcagagtcgcatcaaagacatggagaagcagaagaaagagggaatcgtttgtaaggaggataaaaagcagagtctggagaactttctctccagatttcgatggcggcgcaggctcctagtaattagtgcgcctaacgatgaggattgggcctactctcaacagctgtcggccttgagcggccaagcatgcaactttgggcttcggcacataacgatcctgaagctactgggcgtaggcgaggaggttgggggagttctggaactgttcccaattaatgggtcctctgtcgttgagagagaggatgttcccgctcatctggtgaaggatatcagaaattatttccaggtgtctccagagtattttagtatgctcctggtggggaaggatggcaatgttaaatcatggtacccgagccctatgtggtctatggtaatcgtgtatgacctgatagactctatgcagctcagacggcaggaaatggctatacagcaatcacttggcatgcgttgccccgaggatgaatacgcaggatatggatatcactcctaccatcagggctatcaggatggatatcaagatgattatcggcatcacgagagttaccatcatggctatccctactag

SEQ ID NO: 262001 - DNA, 2853 bp, Artificial Sequence
  derived and/or modified sequence
atgacctggcgcatgggcccacgctttaccatgctcctcgccatgtggctcgtgtgtgggagcgagccacaccctcacgctactatcagaggttcccatggaggtagaaaggtgccgctcgtgagtcctgatagttctagaccagccaggttcttgcggcataccgggcgttctcgcggtatagaacgatccactttagaggagcctaacctgcaaccactgcagcgaagaaggtccgtacccgtgcttagacttgcaagaccgaccgagccgccagcccgttcagatattaacggcgcagccgtcagacctgagcagaggcctgcagccagaggcagccctagagagatgatacgggacgagggtagctctgccaggtctcggatgttgcgatttccctcgggatcatcctccccaaacattttagctagcttcgccggtaaaaaccgagtctgggtgatatcagcccctcacgcatctgagggatactataggctgatgatgtcactattgaaggacgatgtctattgcgagctcgcggaaagacacatacagcagatcgtgctgtttcatcaggccggagaagagggcggtaaagttagaagaattacctctgagggacaaattctcgagcagccactggatccaagcttgatacccaaactgatgagctttttgaagcttgagaaggggaagttcggcatggtattgctcaagaagactttgcaggtagaagaacgatacccataccccgttcggttggaggcaatgtacgaagtgatcgatcagggcccaataaggaggatcgagaagattcgacagaaaggcttcgtacagaagtgcaaggcgagtggggtcgaggggcaggtggtggcagagggaaacgatgggggaggcggagccggacgaccatcgctgggttctgagaaaaagaaggaagatccacgaagagctcaggttcccccaacaagagaaagtcgtgtcaaagtcttgaggaagttggccgcaaccgctcccgctctacctcaacccccttcaactccccgtgcaactaccctgccgcctgcacctgccactacagtgacccgctctacctcgagagccgtcaccgtggcagccagaccaatgacgacaacagcttttcccacgactcaacggccttggacaccatccccatcccaccgtcctccaactacaaccgaagttattaccgctcgcagacccagcgtatctgagaacctttatccacctagtcgcaaagatcaacatagagagcggcctcagacaacccggaggccatctaaagcaacgtctttggagtccttcaccaacgcccctccaacaaccatctcagaaccaagcacgagggccgctggaccaggcaggtttcgtgacaaccgcatggatcggcgtgaacacggccaccgggatcctaatgtggtgcctggtccccctaagccagccaaagaaaagccacctaaaaagaaggcacaggataagatcttatcaaacgagtatgaggaaaagtacgacctgagtaggcccacagcctcacaactggaggatgagctgcaagtagggaatgtgcccttaaagaaggccaaagaaagtaaaaagcacgaaaagttggaaaagccggagaaagaaaagaagaaaaaaatgaagaatgaaaatgccgacaagctgctcaaatccgaaaagcaaatgaagaaaagcgagaaaaagtcgaagcaggaaaaggaaaaaagcaaaaagaaaaaggggggtaagacggagcaagacggataccaaaaaccgacaaataagcattttacccagtctcctaaaaaaagcgtagccgatctgttaggatctttcgaaggaaaaagacgcctgctcttgattacagctccaaaagctgaaaacaatatgtacgtgcagcagagagatgaatacctagagtccttttgcaaaatggctactcgaaaaatcagcgtgatcaccatttttggtccagtgaataattcaacgatgaagatcgaccactttcagctggacaacgaaaagcctatgagggtggtggacgacgaggatctcgtggatcagaggttgatctcagagctacgcaaggagtatgggatgacatacaacgacttctttatggtgttgacggatgttgatctgcgggttaagcagtattacgaagtgccaataacaatgaaatcagtgttcgacctgatcgacacctttcagtcaaggataaaggatatggagaagcagaaaaaggagggcatcgtgtgcaaagaggataaaaaacagtccctggaaaacttcctcagcagattccggtggcggagaaggctgctggtgatctctgctcccaacgacgaggactgggcttattctcagcagctgtctgcgttgtctggccaggcttgtaacttcgggctgagacacattaccatactgaagctcctaggagttggcgaggaagtcggcggtgtgttggaattgttcccgattaatgggagctccgtggttgaaagggaggatgtgccagcacatttagtgaaagatatccggaattattttcaggttagccctgagtatttctccatgctcctcgtcggcaaggatggcaatgtgaaatcatggtacccctcaccgatgtggtccatggtcatcgtgtacgacctcattgatagtatgcagctacgcaggcaggagatggccatccaacaatcattagggatgcgttgcccagaggatgagtatgcagggtatggataccactcttatcaccaagggtaccaggacgggtaccaggacgactaccggcatcacgaatcctaccaccacggatacccttattag

SEQ ID NO: 262002 - DNA, 2853 bp, Artificial Sequence
  derived and/or modified sequence
atgacttggcgtatgggtccgaggtttacaatgctcttggctatgtggctggtgtgtggttcagagccccacccacacgctacaattaggggctcccatgggggacgcaaggtgcctctcgtgagcccagactcatccaggcccgcccgcttcctacggcatacaggccgctccaggggaattgagcgctcgaccttagaggaaccgaacctccagccactgcagcggaggaggagtgtaccagtgctgagactggccagaccaaccgagccacccgctcgctccgacatcaacggtgccgcagttcggcctgaacagaggcccgctgctcgcggcagtccgagagagatgattcgagacgaagggagtagcgcccgaagtcggatgcttaggtttccatctgggtcaagtagccccaatatcttggcgtctttcgcaggcaagaaccgggtgtgggtgattagcgcaccacacgcttccgagggctactacagattgatgatgagcttgctgaaagacgatgtttactgcgaacttgctgaaagacatatccagcagatagtgctgttccaccaagctggcgaggaaggaggaaaggtgaggaggattacgagcgagggccaaattcttgaacaaccgctggatccttctctgatccctaaattgatgtcgtttttaaagctggagaaaggaaaatttggcatggtgttgctcaagaagaccctgcaggttgaggaaagatatccctaccctgtccgccttgaggcgatgtatgaggtgattgatcaggggccaattcggcgaattgaaaagatacgccaaaaaggattcgtgcaaaagtgtaaggcctccggggtcgagggccaggtagttgccgaagggaatgatgggggcggcggggccggacgcccatccctaggatccgagaaaaagaaggaagaccccagaagggcacaggtgcccccgacaagagagagcagagttaaggtgctgaggaagcttgcggctactgcccctgccttgcctcaacccccttcgacaccccgcgccacgaccctaccaccggcccccgctaccactgttaccaggtctacctccagggctgtcacagttgccgctcgcccaatgacgacaaccgcgttcccaacaacccaaaggccctggactccatctccgagccacaggcctccgacaacaacagaggttatcactgccaggcggccctcagtaagcgagaacttatatccccccagccgcaaggaccagcaccgcgagcgtccgcaaactaccagaaggcctagtaaggctaccagtcttgaaagttttactaatgctccccccactacaatatctgagccttcgacgcgggcggcagggcctggcaggttccgggacaacagaatggaccgcagggaacatgggcaccgagatcccaatgtggtcccaggcccccccaagcccgcaaaggaaaagccacccaagaagaaagcgcaggacaagattttatctaatgagtatgaagaaaagtatgacctgagccgtcctactgcctctcagctggaagatgaactgcaggtgggcaacgtcccgctcaagaaggcaaaagagtccaaaaagcacgaaaagctggagaaacccgagaaagagaagaagaagaaaatgaagaacgagaacgcagataaattactaaagagcgagaaacagatgaagaaaagcgaaaagaaaagtaagcaggagaaggaaaaatcaaagaagaagaaagggggaaaaactgaacaggatggctaccaaaaaccaactaataaacattttactcagtccccaaagaagtccgttgctgacctactcggttcatttgaaggcaaaaggagactgctgttgataaccgccccaaaagcggagaataacatgtatgttcagcagagggatgagtaccttgagagtttttgtaagatggccaccaggaaaattagcgtcatcacgatatttggccctgtgaataactcaacgatgaagatagaccactttcaactcgacaacgaaaagccaatgagggttgtcgatgatgaagacttagtcgatcagagacttatatctgaacttcggaaggaatacggaatgacttacaacgatttttttatggtgctaacagatgtggatctcagggtcaaacagtattacgaagtgcccataaccatgaaatctgttttcgatctcatcgatacgttccagagccggatcaaggatatggagaagcaaaagaaggagggaatcgtgtgtaaggaggataagaaacagagcctggaaaacttcctgagtcgtttcaggtggcggcgccgtctgcttgtcattagcgcccccaacgacgaagattgggcatacagccaacagttgtccgccctgtcgggtcaggcatgcaatttcggccttcgccacattacaattcttaagctgctaggcgtgggagaagaggtgggcggggtgctggaactattcccaatcaacgggtccagtgtggttgagagggaagacgtgcctgcccatcttgtcaaagatatccgcaattatttccaagtaagcccggaatacttctctatgctactcgtcgggaaagatggaaacgtgaaatcttggtatcctagcccaatgtggtcgatggttattgtgtacgatttaatcgattcaatgcagctgcgccggcaggaaatggccatacaacaatcgcttgggatgcggtgcccagaagacgagtacgccgggtacggctaccattcataccaccaaggctaccaagacgggtatcaggatgactatcgccatcacgagagctaccaccatggatatccttactag

SEQ ID NO: 262003 - DNA, 2853 bp, Artificial Sequence
  derived and/or modified sequence
atgacctggcgaatgggccctagatttacaatgctgcttgcgatgtggcttgtgtgtggatcagaaccccacccccacgccaccattagaggtagtcacggaggacgcaaagtcccccttgtctcccccgactcgtctagacctgccagattccttcgccacactgggcgctcaagagggattgagcggagcacattagaggagcctaaccttcaacctctgcaaagacggagaagcgtacctgtgttgcgtctcgccaggcctacagagcccccagcccggtccgacatcaacggtgctgccgtacgcccagagcagagacctgctgccaggggcagtccaagagagatgattagagatgaggggtcatccgcgagaagtagaatgttgagatttccttccggatctagctcaccaaacattctggcctcattcgccggaaaaaatcgggtatgggttattagcgctcctcacgcttccgaagggtactaccggctaatgatgtcccttttaaaagatgacgtatactgtgaacttgccgagcgccacatccaacagattgtcctcttccatcaggctggcgaggagggagggaaagtaagacgcattactagtgaagggcagatcctggaacagccactggacccctccctaattcctaagctgatgtctttcctcaagctggaaaaaggcaaatttggaatggtcctgcttaaaaagacactccaggtggaagaacgttatccctatcccgtaagattggaggccatgtatgaagtgatagatcagggtcctatcaggagaatcgagaagatcagacagaaaggattcgtgcaaaagtgtaaagcctcgggagtcgagggccaggtggtagctgaaggcaacgatggtggaggaggagccggccggccctccctcggatccgagaaaaagaaagaggacccaagacgagcacaagtacctcccacccgagagagccgtgtcaaggtgttacgaaagctcgccgctaccgcgcccgcccttccacagcccccttctacaccgcgagccacaacattaccccccgcccctgccactacagtgacccgatccacttcccgagctgtcaccgtggcagctagaccaatgacaacaactgccttccccacaacgcaacgaccgtggacacccagtccatcacaccgacctcctaccacgacagaagtaattacagcgcgacgaccttcagtgtccgagaacctataccccccttcaaggaaggatcagcatagagaaaggccccaaactaccagacgccctagcaaggccacatcgctggaatcatttactaatgccccaccaacaactatcagcgagccatccaccagagctgccggaccaggaaggtttcgggacaacagaatggatcggcgcgagcatggccacagagacccaaatgtcgtccccggcccccctaaacccgcaaaagagaaaccacctaagaaaaaggctcaagataaaattttatctaatgagtatgaagaaaagtatgacctgagccgtcctactgcctctcagctggaagatgaactgcaggtgggcaacgtcccgctcaagaaggcaaaagagtccaaaaagcacgaaaagctggagaaacccgagaaagagaagaagaagaaaatgaagaacgagaacgcagataaattactaaagagcgagaaacagatgaagaaaagcgaaaagaaaagtaagcaggagaaggaaaaatcaaagaagaagaaagggggaaaaactgaacaggatggctaccaaaaaccaactaacaaacactttacccagagccctaagaaatcagtggcggatctgttgggctccttcgaaggcaaacgacgcctgttactaatcaccgctcccaaagcagaaaataatatgtatgtgcagcagcgggatgagtatctagagtctttctgtaagatggcaaccagaaaaatttcagtaatcaccatctttggccccgtcaataattctaccatgaagatagaccactttcagcttgacaacgaaaaaccgatgagggtcgtggacgacgaagatctggttgatcaacgcctaatatccgagcttaggaaagaatacggtatgacatataatgatttctttatggtcctgaccgatgtagatctgagagtgaaacaatattacgaggtaccgatcactatgaagtctgtgtttgatctgattgacacctttcagtccagaattaaagacatggagaaacaaaaaaaggaaggaattgtatgcaaagaggataagaaacaaagcttagaaaactttctgtcgagatttcggtggcggcggcggttactggttatttctgcccccaacgatgaagactgggcatatagtcaacagttgagtgcattgtcaggtcaagcctgcaatttcggactgaggcacatcactatcctcaagctgctgggggtaggagaggaagtgggaggcgttttagaactttttccaattaacgggtcctcagtcgtcgaacgcgaagatgttccagcacatctggtgaaggatataagaaactactttcaggtctccccggagtactttagcatgttacttgttggaaaagacggaaatgtcaagagctggtacccaagtccaatgtggtccatggtgattgtctacgacctgattgacagtatgcagcttagaagacaagaaatggccatacaacaaagcctcggaatgagatgccccgaagatgagtacgcagggtatgggtaccatagttatcatcagggataccaggacggctaccaggacgactatcggcaccatgaatcatatcatcacggatacccctactag

SEQ ID NO: 262004 - RNA, 2853 nt, Artificial Sequence
  derived and/or modified sequence
augaccuggcguaugggcccccguuucaccauguuacuugccauguggcugguguguggguccgagccccauccccaugccacgauacggggcagccauggcggaaggaaggugccuuuagugagccccgacagcucacgcccagcaagguuucugcgccacaccggcaggagucgggggaucgaacggucaacauuggaagagcccaaccugcaaccccuacagcgccggagaagcguucccguccucagacuggcuagaccaacugaaccccccgcccgaucagacaucaacggcgcagccguacggccugaacaacggccagcugcuagagggaguccgagggaaaugauuagagacgaggguagcagugcucggagcagaauguugcgauuucccuccggcaguucaaguccuaauauccucgccaguuuugccggcaagaaccgggucugggugauuagcgcuccgcaugccucagaaggguauuaccgccucaugaugagucuucugaaggaugaugucuauugugaauuggccgaaagacauauccagcagaucguuuuauuucaucaagcgggagaggaaggggguaaagugaggcgcauuaccagugaaggccagauucuagagcagccucucgacccaucguugaucccuaaauugaugagcuuucuuaaguuggaaaaaggaaaauuuggcaugguccugcugaagaaaacccugcagguggaagaacgguacccauaccccgugagguuagaagcaauguaugaagugaucgaucaggggcccauuaggagaaucgagaagauccgccaaaagggguucgugcaaaaauguaaagccucaggcguugaaggacaggugguggccgaagggaacgacggcggcggcggagcagggcgccccucacuugggagcgagaagaagaaagaagacccccggagagcacagguccccccuacucgcgagagucgcgucaaaguccugcggaaauuggccgccacugcucccgcacucccucagccaccuucuaccccccgcgccacuacacugcccccugccccugcuacuaccguuacacggagcacaagcagagcuguuacggucgccgcacgccccaugaccacuaccgcuuuccccacaacacagagaccauggacuccaucacccucccacaggccuccaacaaccaccgaagugauuaccgcaaggcggccaagcguuagcgagaacuuguacccaccaucucguaaagaccagcauagggagaggccccagaccacacggaggccaagcaaggccaccucacuggaaaguuuuaccaaugccccuccaacuacaaucagugagccaagcacccgugccgccgggccuggaagguuucgcgauaacaggauggaccgccgcgaacacggccaccgggacccaaacguugugcccggcccucccaaaccugccaaagaaaagccacccaagaagaaagcucaggacaaaauccucagcaacgaauacgaggaaaaguaugaucuuucaagaccuacagccucucaguuggaggaugaacuucaggugggcaacguuccccuuaagaaggccaaggaguccaagaagcacgaaaaguuggagaaaccugagaaagaaaagaagaaaaagaugaaaaacgagaacgccgacaaacugcugaagagugagaagcagaugaaaaaaucagagaaaaaguccaagcaggaaaaggaaaagagcaagaaaaagaagggcggcaagacagaacaggacgguuaccagaagccuacuaauaaacauuuuacccagagcccaaagaagucuguugccgaccugcugggcagcuuugaggggaagcgccgacugcugcugaucacagcuccuaaagcggaaaauaacauguacguucagcaacgcgaugaguaccuagaauccuucuguaagauggccacaagaaagauaucugucaucacaauuuucggaccuguaaauaacuccacaaugaagauugaucauuuccagcuggacaacgagaaaccuaugagggucguagaugacgaggacuuggucgaucagaggcuuaucuccgaacuaagaaaggaguacggcaugaccuauaacgauuuuuucaugguacuuaccgacguggacuugcgcgugaaacaguacuacgaggugccaaucacaaugaagucuguguucgaucuuauugacacguuccagagccggauuaaagauauggaaaagcaaaagaaggaggggaucguuuguaaagaggacaagaaacagucacuagagaauuuucugagcagguuuagauggaggcgucgucuccucguuaucucugccccaaacgacgaagacugggcuuauucccagcaguuaagugccuuaucuggccaggccuguaacuucggucuccgacauauaaccauucucaaacugcucggggugggggaagaagugggcggaguuuuggagcuguuccccaucaaugguucuagcgucguggaaagagaggacgugccugcccaucuuguuaaggacaucagaaauuauuuccaaguguccccugaguauuuuucaaugcugcuugugggcaaagauggaaaugugaaaagcugguaucccagcccaauguggucgauggugaucguguacgaucuaaucgacucuaugcagcugcguagacaggagauggcuauccagcagucacugggaaugaggugucccgaagacgaauacgccggauaugguuaucacaguuaccaccagggcuaccaggauggcuaucaggacgauuacaggcaccaugaauccuaccaucauggcuacccauacuag

SEQ ID NO: 262005 - RNA, 1656 nt, Artificial Sequence
  derived and/or modified sequence
augacuuggcgcaugggcccucgcuucacaaugcuucucgcuauguggcucguauguggaucggagccucacccccaugcaacaaucagaggcagccaugggggcaggaaggugccucugguuucucccgauucaagcaggccagcccgauuucuccggcacaccggccguagccgugggauugaacguuccaccuuagaggaacccaaccuccaaccucuccagaggcggagaucaguaccugugcugagacuggcaagacccagcagauucagggauaaccggauggacaggagggaacacggacaccgagaucccaacguaguccccgggccucccaaaccagcuaaagaaaagccgccuaaaaagaaggcccaagauaagauucugagcaaugaauacgaggaaaaauacgaccugucaagacccacagccucacagcuggaggacgaguugcaggugggaaacguuccccugaaaaaagccaaagaauccaaaaagcaugagaagcuggaaaagccagaaaaggagaagaagaagaagaugaagaaugaaaaugcagacaaacuccugaagagugaaaaacagaugaaaaagucagaaaaaaagucuaaacaggagaaggagaagucaaaaaagaagaagggcggcaaaacugaacaggauggcuaucaaaaacccacaaauaaacauuuuacacagaguccuaagaagucaguggcagaccuccuggggagcuucgagggaaaaaggcgguuacuucucaucacagcgcccaaagcagaaaauaacauguauguccaacagagggaugaguaccuggaaagcuucugcaaaauggccaccagaaagaucucugucaucacaaucuucggccccguuaauaauuccacaaugaagaucgaucacuuucagcuggauaacgagaaacccaugcguguggucgacgacgaggaucuggucgaccagcggcugauuucggaacuacgcaaagaguaugguaugacauauaacgacuucuuuaugguacuaacugaugucgacuugagggugaaacaguacuaugaggugccuaucaccaugaagaguguguucgaucucaucgacacguuucagaguagaaucaaagacauggagaagcagaaaaaggaagggaucguuuguaaagaggauaagaaacagagccuugagaauuuccuuagcagauucagauggcgccgaagacuacuugugaucucagccccaaacgaugaagacugggccuauagucagcagcugucagcacugucuggccaggcgugcaauuucggguccagcgugguggaaagagaagacguaccugcucauuuggugaaggauaucaggaauuauuuucaggugucuccugaauauuuuaguauguugcucgucggcaaagacggaaacgugaaaagcugguauccaagcccuauguggucuauggugauugucuaugauuuaauagauuccaugcaguugcgcagacaggaaauggcuauucaacagucauuaggcaugcggugccccgaagaugaguaugcaggcuauggauaucacagcuaucaccagggguaucaagacggcuaccaggacgacuaucgccaucacgagagcuaucaucaugguuauccuuacuag

SEQ ID NO: 262006 - RNA, 2853 nt, Artificial Sequence
  derived and/or modified sequence
augacguggcggaugggaccacguuuuacuauguuacuggccaugugguugguaugcggcuccgaaccccacccucaugccaccauacgcggcucccaugguggcagaaaagucccccucguaucaccugauuccucaaggccggcgcgcuuuuugcgccacacaggcaggucccgcggcauugaacgguccacucuggaagaaccuaauuuacagccgcugcagcgucgacgaucaguaccagugcuuagauuagcgagaccaaccgaacccccugccagaucagacaucaauggagcagccguaaggcccgaacagaggccagcugcccgcggaucccccagagaaaugauuagagacgagggaucauccgcgcggucuagaaugcugcgguucccuucagggaguucaucgccuaacauucucgcaucauucgcugguaagaaucgcgucuggguuaucagcgccccacacgcuucggaggguuauuacagguugaugaugucucugcuaaaagacgacguguacugcgagcuggcugaacgucauauucaacagauuguucuauuucaccaggcaggagaagagggagguaaggugcgccgaaucacaagcgagggccagauacuugagcagccauuggauccgucccuaauucccaagcucaugucauuucugaaacuggagaaaggaaaauucggcaugguguugcuaaagaaaacuuugcagguggaggaaagauauccauaucccgugagacuggaagccauguaugaggucauagaccagggcccuauaagaaggauagaaaaaauacgccagaaggguuuugugcagaaguguaaggcgucaggaguugaaggucagguagucgccgaagguaaugacggcgggggaggugcagggcgccccucacuugggagcgagaagaagaaagaagacccccggagagcacagguccccccuacucgcgagagucgcgucaaaguccugcggaaauuggccgccacugcucccgcacucccucagccaccuucuaccccccgcgccacuacacugcccccugccccugcuacuaccguuacacggagcacaagcagagcuguuacggucgccgcacgccccaugaccacuaccgcuuuccccacaacacagagaccauggacuccaucacccucccacaggccuccaacaaccaccgaagucaucacagcccgccgcccaucugugucugagaauuuauauccucccucacggaaggaucaacaccgggagcguccacaaaccacacgucgucccucaaaagcuaccagccucgagaguuucaccaacgcccccccuaccaccaucagcgagccguccacaagagccgccggcccgggcagguuucgcgacaauaggauggaccgccgugagcaugggcaccgagauccgaacguugucccaggucccccaaaaccagcuaaagagaaacccccaaaaaaaaaagcccaggauaagauccuguccaacgaauaugaagagaaauacgaccuaucacggcccaccgcuucccagcucgaagaugaacugcagguuggaaaugucccucugaaaaaggcuaaggaaucuaaaaagcacgagaagcuggaaaaaccugagaaagagaagaaaaaaaagaugaaaaaugagaacgcagauaaacuccucaagagugagaagcagaugaagaagagugaaaagaaaaguaagcaagagaaggagaagucaaagaagaagaaaggcggaaaaaccgagcaagaugguuaucaaaagccuaccaauaagcauuucacccagucccccaaaaaaagcguggcagaccuccugggcaguuuugaaggaaagcgucgccuccuccugaucaccgcaccuaaggcugaaaacaauauguaugugcaacagcgcgaugaguaucucgaaucguuuugcaagauggccaccagaaagauuagugucaucaccaucuuuggcccugugaauaacucuaccaugaagaucgaccauuuccaacuggauaaugaaaaaccaaugcgggucguggacgaugaggauuuggucgaccagcggcuaauuagcgaacugagaaaagaauauggcaugacauauaaugauuucuucaugguacugacagauguugaucugcgagucaaacaguacuacgaaguucccauuaccaugaagucuguauuugauuugauugauaccuuucagucucguauuaaagacauggaaaaacagaaaaaagaggguauuguuugcaaagaagacaagaaacaaucccuggagaauuuuuugucccgauuuagauggagaagaaggcuucuugugauuucagcuccuaaugacgaggauugggcuuauagccagcagcugucagcauugucaggacaagcuugcaacuucggcuugcgucacaucacgauacuaaagcugcuaggaguuggugaggaaguuggcggaguccuugagcuauuccccaucaaugguuccuccguagucgagcgcgaagauguuccagcacaccugguaaaagauaucagaaacuacuuccaggucagcccagaauacuuuuccaugcucuuggucgguaaggauggcaaugucaagagcugguacccgucaccaauguggagcauggugauuguguaugaccuuauugauagcaugcaguuacgccgccaggaaauggccauucaacaaucccuggguaugcgcugucccgaggaugaauacgccgguuacgguuaccauucuuaucaccagggguaucaggacggauaucaggaugauuacagacaccaugaaaguuaccaccacggguauccauacuag

SEQ ID NO: 262007 - RNA, 1656 nt, Artificial Sequence
  derived and/or modified sequence
augacguggcgcauggguccuagauucaccaugcuacucgccaugugguuaguuugcggaagugaaccucauccucaugccacaauccguggaucccacgguggaagaaaggucccauuagugucccccgauaguucccgucccgccagauuccuuagacauaccggccgaaguagagguauugagcgcuccacccuggaagaaccgaauuuacaacccuuacagcgaagacgaucuguuccuguacuucgccuggcacguccaucccgauuuagagacaacaggauggacaggagggagcacggccacagggacccuaauguuguaccuggcccacccaaaccugcaaaagaaaaacccccgaaaaagaaagcgcaggauaagauauuaucuaaugaauaugaagaaaaauacgaccugagcagacccaccgccucccaacuagaggacgaacuacaaguagguaacguaccacugaagaaggcaaaagaaaguaaaaagcaugagaagcuggagaagccagaaaaggagaagaagaaaaagaugaagaacgaaaacgcugacaagcugcuuaagucagaaaaacaaaugaaaaagagcgaaaagaaaucuaaacaggagaaagagaagucuaagaagaaaaagggaggaaagacagagcaggacggguaucagaagcccaccaauaaacacuucacccagagcccaaaaaaaucaguagcugaccuguuaggaaguuucgaagguaagagacgccuauugcugaucacagccccuaaagcugaaaacaacauguacgugcagcaacgugacgaguacuuggaaagcuucuguaaaauggccacaagaaaaaucucagucaucacuaucuucggaccuguuaacaauagcaccaugaaaauugaucacuuucaauuggacaaugaaaaaccuaugagaguuguugacgaugaagaucugguggaccagcgccuaauuagcgaacuccggaaagaguacggaaugacuuauaaugacuuuuuuauggugcugacugauguugaccuaagagucaaacaguacuacgaaguccccauuaccaugaagucgguguuugauuugauugacacuuuccagucccgcaucaaagauauggagaagcagaagaaggaagggaucguauguaaggaagauaagaagcaauccuuagaaaacuuucuguccagguuucgguggcgucgacgguuacugguuauaucugcuccuaacgaugaggauugggcguauucacagcagcugagcgcacugagcggacaggcaugcaauuuugguagcucuguggucgagagggaagacgugccugcacaccugguaaaggauauuagaaacuauuuccaaguguccccugaguauuuuucuaugcuacuuguaggaaaggauggcaaugucaagucuugguacccguccccaauguggagcaugguaauaguauacgauuugauagauucuaugcagcugcgcagacaggagauggcaauccaacagagucugggaaugagaugcccugaagacgaauaugcugguuauggcuaccacaguuaccaccaggguuaccaggauggauaucaggaugacuaccgacaccaugaaucauaccaucacggauauccuuacuag

SEQ ID NO: 262008 - protein, 1406 aa, Artificial Sequence
  derived and/or modified sequence
MALKNINYLLIFYLSFSLLIYIKNSFCNKNNTRCLSNSCQNNSTCKDFSKDNDCSCSDTANNLDKDCDNMKDPCFSNPCQGSATCVNTPGERSFLCKCPPGYSGTICETTIGSCGKNSCQHGGICHQDPIYPVCICPAGYAGRFCEIDHDECASSPCQNGAVCQDGIDGYSCFCVPGYQGRHCDLEVDECASDPCKNEATCLNEIGRYTCICPHNYSGVNCELEIDECWSQPCLNGATCQDALGAYFCDCAPGFLGDHCELNTDECASQPCLHGGLCVDGENRYSCNCTGSGFTGTHCETLMPLCWSKPCHNNATCEDSVDNYTCHCWPGYTGAQCEIDLNECNSNPCQSNGECVELSSEKQYGRITGLPSSFSYHEASGYVCICQPGFTGIHCEEDVNECSSNPCQNGGTCENLPGNYTCHCPFDNLSRTFYGGRDCSDILLGCTHQQCLNNGTCIPHFQDGQHGFSCLCPSGYTGSLCEIATTLSFEGDGFLWVKSGSVTTKGSVCNIALRFQTVQPMALLLFRSNRDVFVKLELLSGYIHLSIQVNNQSKVLLFISHNTSDGEWHFVEVIFAEAVTLTLIDDSCKEKCIAKAPTPLESDQSICAFQNSFLGGLPVGMTSNGVALLNFYNMPSTPSFVGCLQDIKIDWNHITLENISSGSSLNVKAGCVRKDWCESQPCQSRGRCINLWLSYQCDCHRPYEGPNCLREYVAGRFGQDDSTGYVIFTLDESYGDTISLSMFVRTLQPSGLLLALENSTYQYIRVWLERGRLAMLTPNSPKLVVKFVLNDGNVHLISLKIKPYKIELYQSSQNLGFISASTWKIEKGDVIYIGGLPDKQETELNGGFFKGCIQDVRLNNQNLEFFPNPTNNASLNPVLVNVTQGCAGDNSCKSNPCHNGGVCHSRWDDFSCSCPALTSGKACEEVQWCGFSPCPHGAQCQPVLQGFECIANAVFNGQSGQILFRSNGNITRELTNITFGFRTRDANVIILHAEKEPEFLNISIQDSRLFFQLQSGNSFYMLSLTSLQSVNDGTWHEVTLSMTDPLSQTSRWQMEVDNETPFVTSTIATGSLNFLKDNTDIYVGDRAIDNIKGLQGCLSTIEIGGIYLSYFENVHGFINKPQEEQFLKISTNSVVTGCLQLNVCNSNPCLHGGNCEDIYSSYHCSCPLGWSGKHCELNIDECFSNPCIHGNCSDRVAAYHCTCEPGYTGVNCEVDIDNCQSHQCANGATCISHTNGYSCLCFGNFTGKFCRQSRLPSTVCGNEKTNLTCYNGGNCTEFQTELKCMCRPGFTGEWCEKDIDECASDPCVNGGLCQDLLNKFQCLCDVAFAGERCEVDLADDLISDIFTTIGSVTVALLLILLLAIVASVVTSNKRATQGTYSPSRQEKEGSRVEMWNLMPPPAMERLI

SEQ ID NO: 262009 - DNA, 4221 bp, Artificial Sequence
  derived and/or modified sequence
atggcgctgaaaaacataaactacctgctgattttctacctttccttttcgctgctcatctatatcaagaattctttctgcaataagaacaacactaggtgtctatcaaattcttgccagaacaattctacctgtaaagacttctctaaagacaatgactgctcttgctctgacactgcaaataacctcgataaagattgcgataatatgaaggatccttgcttttctaacccatgccaggggagcgcaacatgtgtgaatacccctggcgagcgcagttttctttgcaagtgtcctccgggctatagtgggactatttgtgagactactataggaagctgcgggaagaacagctgccagcacggtggcatatgccaccaggaccctatttatccagtatgtatctgtcccgctggctacgcaggacggttttgtgagatcgaccacgacgagtgcgcctcaagtccttgccagaacggagcagtgtgtcaggacggaatcgatggctacagttgcttctgcgtgcctggttaccagggtaggcactgtgacctggaggttgatgagtgtgcaagcgacccttgcaaaaacgaggccacctgtctgaacgagattggacggtatacgtgcatatgtcctcataattacagtggcgtgaattgcgaactggaaatagatgagtgctggagtcaaccgtgcctgaacggggctacctgccaggacgctctgggagcttacttctgtgactgcgctcctggcttcctcggcgatcattgtgaactaaacactgacgaatgcgctagccagccctgtctgcacggaggtctgtgtgttgacggcgagaaccggtactcttgcaattgtactggaagcggctttaccggcacgcattgtgaaacactgatgcccttgtgctggtccaaaccgtgccacaataacgctacttgcgaggattccgtggacaattacacttgccactgctggcctgggtacacaggtgcccagtgtgaaattgacctcaacgagtgcaattctaatccctgtcagagcaacggagaatgcgtggaactttcttccgagaagcagtacgggcgcatcactggactaccatccagctttagctatcacgaggcatccgggtacgtatgtatttgtcaaccaggcttcactggaatccattgcgaagaggatgtgaacgagtgtagcagtaacccctgccagaatgggggaacgtgcgagaatctccccggaaactatacatgtcactgccctttcgataacctcagccggaccttttatggtgggagagattgttccgatatccttttggggtgtacccaccagcagtgcttgaacaacggcacctgtatacctcactttcaggacggacagcatgggtttagctgcctatgcccctcaggctacaccggaagcttgtgcgagattgcgaccaccctttcctttgagggggacgggttcctttgggtaaaatcgggcagcgtcacgactaagggctcagtgtgcaacattgctctgcggttccaaacagtgcagcccatggcactgcttcttttccggtcaaatcgcgacgtatttgtcaagctggaactattgtcgggctacatccacttgagcattcaagttaataaccagagtaaagtccttttgttcatctcacataatactagtgacggtgaatggcacttcgttgaggtcatattcgcagaagcagtgacccttacgcttatcgacgactcgtgtaaggaaaaatgtattgccaaggccccaaccccattggaatccgaccaatcgatctgcgctttccagaacagcttcctagggggccttccggtggggatgacaagtaatggagtggccctgctgaacttctacaatatgcccagcactccctcctttgttggatgcctgcaggacatcaagattgattggaaccacataactctcgagaatattagctctgggtcaagccttaatgtgaaggcgggatgcgtgaggaaagactggtgcgaaagtcagccttgccagagccggggtcgctgtatcaacctatggttatcatatcagtgcgattgtcatcgtccatatgagggccctaattgcctgcgagaatatgtggctggcagatttggccaggacgactcaactggctacgtgatctttactttggatgagtcctacggagacacaatctccttatcaatgtttgtccgcaccctgcagccatcaggcctgttactggcactcgagaacagcacctatcagtatatacgggtctggctagagcgggggcgactggcaatgctgacacccaatagtccgaagctagtggtgaaattcgtgcttaacgatggaaacgtgcaccttatctcattgaagataaagccctacaaaattgagttgtaccaaagcagccagaaccttgggttcatttcagcaagcacctggaagattgaaaaaggtgatgtgatatacattggaggtttacccgacaaacaggagaccgagttgaatggaggcttcttcaaagggtgcattcaagacgtccgccttaacaatcagaacctggaattcttccctaatcccacgaacaatgcatctcttaacccggtgcttgtgaacgtgacgcagggatgcgctggggacaattcctgcaaaagcaacccttgccacaatggtggcgtctgtcactccaggtgggatgacttcagctgcagttgcccggcattaacaagtggaaaggcttgcgaggaagtgcaatggtgtggctttagcccatgtccgcatggagcacagtgtcagcctgtcctgcagggctttgaatgcatcgccaatgcggtgttcaacggccagtctggacagatcttgttccggtcaaatggcaacattactagggaacttacaaacattaccttcggttttagaacccgcgacgcaaacgtgatcatcttgcacgcggaaaaggaacctgagttcctgaatatctctattcaggattcacggctgttcttccagctgcagtctggtaattccttttacatgctcagtttgactagtcttcaatctgtcaacgatgggacctggcacgaagttaccctctcaatgacagaccctctttcccagaccagtcgttggcagatggaagttgacaatgagacccccttcgtgacaagcaccatcgcgacggggagtctcaactttctgaaggataacaccgacatctatgtgggcgaccgtgccatcgataacattaagggcctccagggttgcctgtcaactatcgaaattggcggtatatatctcagctatttcgaaaacgtccatggtttcattaataaacctcaggaggagcagtttctgaagatcagtaccaatagtgtcgtgaccggatgcctccagctgaatgtatgcaactcaaacccctgcctgcatggaggcaactgtgaagacatctacagtagctatcactgcagctgtccacttggctggagcggtaaacactgtgagctgaatattgacgagtgtttctctaacccatgcatccacggcaactgcagcgacagagtggcagcatatcactgtacatgtgagccaggttatactggtgtgaactgtgaggtggacatcgataattgccagagtcatcagtgtgctaacggcgctacttgcatttctcacactaacgggtactcatgcctctgttttgggaactttaccgggaaattttgtagacagtcgaggctcccctccacagtatgcggaaacgagaagaccaatttaacctgttacaatggtggaaactgtaccgagtttcagactgagctaaagtgcatgtgtagaccgggattcaccggcgaatggtgcgaaaaagatatagacgagtgtgcatcggacccctgcgtcaacggaggcctgtgtcaagacctgttgaataagtttcaatgtctgtgcgatgtggcgttcgccggagagaggtgcgaggtggacctggctgatgatttgatctccgatatttttaccaccattggctcagtcactgttgctctcctgctcatactcctgctcgccatcgtagctagcgtggtgacgtcaaacaagagagcaacccaaggtacgtactctccctctcggcaggagaaagaagggtcccgtgtggaaatgtggaatctcatgcctcctcccgccatggaaaggttgatttag

SEQ ID NO: 262010 - DNA, 4221 bp, Artificial Sequence
  derived and/or modified sequence
atggccctgaagaacatcaactacctgctgatcttctacctgtccttcagcctgctgatctacatcaagaacagcttctgcaacaagaacaacacccgctgcctgagcaacagctgccagaacaacagcacctgcaaggacttcagcaaggacaatgactgcagctgcagcgacacagccaacaacctggacaaggactgtgacaacatgaaggacccctgcttcagcaacccctgccagggcagcgccacctgtgtgaacaccccaggagagaggagcttcctgtgcaagtgccccccaggctacagcggcaccatctgtgagaccaccatcggcagctgtgggaagaacagctgccagcacggcggcatctgccaccaggaccccatctaccctgtgtgcatctgcccagctggctacgccggccgcttctgtgaaattgaccatgatgaatgtgccagcagcccctgccagaatggagctgtgtgccaggacggcattgatggctacagctgcttctgtgtgcccggctaccagggccgccactgtgacctggaggtggatgaatgtgccagtgacccctgcaagaatgaggccacctgcctgaatgaaattggccgctacacctgcatctgcccccacaactacagcggcgtgaactgtgagctggagattgatgagtgctggagccagccctgcctgaatggagccacctgccaggatgccctgggcgcctacttctgtgactgtgcccctggcttcctgggggaccactgtgagctgaacacagatgaatgtgccagccagccctgcctgcatggaggcctgtgtgtggatggagaaaatcgctacagctgcaactgcaccggcagcggcttcaccggcacccactgtgagaccctgatgcccctgtgctggagcaagccctgccacaacaatgccacctgtgaagattctgtggacaactacacctgccactgctggccaggctacaccggggcccagtgtgaaattgacctgaatgaatgcaacagcaacccctgccagagcaatggagaatgtgtggagctgagcagcgagaagcagtatggccgcatcaccggcctgcccagcagcttctcctaccacgaggccagcggctacgtgtgcatctgccagcccggcttcaccggcatccactgtgaggaggatgtgaatgaatgtagcagcaacccctgccagaatggaggcacctgtgagaacctgcccggcaactacacctgccactgcccctttgacaacctgagcaggaccttctatggaggccgggactgcagcgacatcctgctgggctgcacccaccagcagtgcctgaacaacggcacctgcatcccccacttccaggacggccagcacggcttcagctgcctgtgccccagcggctacacaggcagcctgtgtgagatcgccaccaccctgagctttgaaggagatggcttcctgtgggtgaagagcggctctgtgaccaccaagggctctgtgtgcaacatcgccctgcgcttccagacagtgcagcccatggccctgctgctcttccgcagcaacagagatgtgtttgtgaagctggagctgctgagcggctacatccacctgagcatccaggtgaacaaccagagcaaggtgctgctcttcatcagccacaacaccagtgatggagagtggcactttgtggaggtgatctttgctgaggccgtgaccctgaccctgattgatgacagctgcaaggagaagtgcatcgccaaggcccccacccccctggagagtgaccagagcatctgtgccttccagaacagcttcctgggcggcctgcctgtgggcatgaccagcaatggagtggccctgctgaacttctacaacatgcccagcacccccagctttgtgggctgcctgcaggacatcaagattgactggaaccacatcaccctggagaacatcagcagcggcagcagcctgaatgtgaaggccggctgtgtgaggaaggactggtgtgagagccagccctgccagagccggggccgctgcatcaacctgtggctgagctaccagtgtgactgccaccggccctatgagggccccaactgcctgcgggagtatgtggccggccgcttcggccaggatgacagcacaggctacgtgatcttcaccctggatgagagctatggagacaccatcagcctgtccatgtttgtgaggaccctgcagcccagcggcctgctgctggccctggagaacagcacctaccagtacatccgggtgtggctggagcggggccgcctggccatgctgacccccaacagccccaagctggtggtgaagtttgtgctgaatgatggaaatgtgcacctgatcagcctgaagatcaagccctacaagattgagctgtaccagagcagccagaacctgggcttcatcagcgccagcacctggaagattgagaagggagatgtgatctacatcggcggcctgcctgacaagcaggagacagagctgaatggaggcttcttcaagggctgcatccaggatgtgcggctgaacaaccagaacctggagttcttccccaaccccaccaacaatgccagcctgaaccctgtgctggtgaatgtgacccagggctgtgccggggacaacagctgcaagagcaacccctgccacaacggcggcgtgtgccacagccgctgggatgacttcagctgcagctgcccagccctgaccagcggcaaggcctgtgaggaggtgcagtggtgtggcttcagcccctgcccccatggagcccagtgccagcctgtgctgcagggctttgaatgtattgccaatgctgtgttcaacggccagagcggccagatcctcttccgcagcaatggaaacatcacccgggagctgaccaacatcaccttcggcttccgcaccagagatgccaacgtcatcatcctgcacgccgagaaggagcctgagttcctgaacatcagcatccaggacagccgcctcttcttccagctgcagagcggcaacagcttctacatgctgagcctgaccagcctgcagagcgtgaatgatggcacctggcatgaggtgaccctgtccatgacagaccccctgagccagaccagccgctggcagatggaggtggacaatgagaccccatttgtgaccagcaccatcgccaccggcagcctgaacttcctgaaggacaacacagacatctacgtgggggaccgggccatcgacaacatcaagggcctgcagggctgcctgagcaccatcgagatcggcggcatctacctgagctactttgaaaatgtgcacggcttcatcaacaagccccaggaggagcagttcctgaagatcagcaccaacagcgtggtgacaggctgcctgcagctgaatgtgtgcaacagcaacccctgcctgcacggcggcaactgtgaggacatctacagcagctaccactgcagctgccccctgggctggagcggcaagcactgtgagctgaacattgatgagtgcttcagcaacccctgcatccacggcaactgcagcgacagagtggccgcctaccactgcacctgtgagcccggctacacaggagtgaactgtgaggtggacatcgacaactgccagagccaccagtgtgccaatggagccacctgcatcagccacaccaacggctacagctgcctgtgctttggaaacttcaccgggaagttctgccggcagagccggctgcccagcacagtgtgtggaaatgagaagaccaacctgacctgctacaacggcggcaactgcacagagttccagacagagctgaagtgcatgtgcaggcctggcttcaccggggagtggtgtgagaaggacattgatgaatgtgccagtgacccctgtgtgaatggaggcctgtgccaggacctgctgaacaagttccagtgcctgtgtgatgtggcctttgctggggagcgctgtgaggtggacctggctgatgacctgatcagtgacatcttcaccaccatcggctctgtgacagtggccctgctgctgatcctgctgctggccatcgtggcctctgtggtgaccagcaacaagagggccacccagggcacctacagccccagccggcaggagaaggagggcagccgggtggagatgtggaacctgatgcctcctccagccatggagcggctcatctag

SEQ ID NO: 262011 - DNA, 4221 bp, Artificial Sequence
  derived and/or modified sequence
atggccctgaagaacatcaactacctgctgatcttctacctgagctttagtttattgatatacataaagaattccttctgtaataagaataatacccgctgcctgtctaattcatgccagaacaattcaacgtgcaaagattttagcaaggataatgactgctcctgtagcgacacagctaataacctggataaggattgcgataacatgaaggacccatgcttcagtaacccctgccaggggagtgccacctgtgtgaatacaccaggtgaaagatcctttctttgcaaatgtcctcctggctatagcggtacaatctgcgaaacaacgatcggcagctgcgggaaaaactcttgccagcacggaggtatctgccaccaagaccctatataccccgtctgtatatgtcctgcgggctacgctggtaggttctgcgagatagatcacgacgagtgcgccagtagcccatgccagaacggcgcggtctgtcaggatggcattgacggttactcctgtttttgcgtgccaggctatcaaggaagacattgcgatctggaagtcgacgaatgtgcttctgatccgtgcaaaaacgaggccacatgtcttaatgagatcggacggtacacatgcatctgtccccataattactctggggtgaattgcgagctggaaatcgacgaatgctggtcccaaccatgtctcaacggcgccacgtgccaagatgcccttggcgcttatttctgtgattgtgcgcccggattcttgggggaccactgtgagctcaataccgatgagtgcgctagccagccctgcctgcatggaggcctgtgtgtcgacggtgagaatagatactcatgcaactgtactgggtccggcttcaccggcactcactgcgagactcttatgcccttgtgttggtcgaagccttgtcataataatgcaacttgcgaggacagcgtagataactacacttgtcactgttggcctggctataccggagcccaatgtgagatcgacttgaacgagtgtaatagtaacccctgccagtccaacggtgaatgcgtagaattgtcaagcgaaaagcagtatggtcgtattacgggattaccatctagtttttcataccacgaagcttccggatatgtatgtatatgccaacccggcttcactgggatccattgtgaagaagatgtgaacgaatgctcctctaacccttgccagaatggcggcacctgcgagaacctgcccggaaactatacctgccattgtccattcgataatctgagtcggaccttctatggcgggagagattgcagcgatattctcttaggttgcactcaccagcagtgcctgaataacggcacttgcattcctcatttccaggacggacaacatggcttttcttgtctctgcccaagtggctacaccggaagcttgtgtgagatcgccactactctgtcattcgagggggatggattcctatgggtgaaatcgggctccgtgactaccaaaggttctgtgtgcaacattgccctccgttttcagactgtccagcctatggccttactactgttccgcagcaaccgggacgtgtttgtgaagctggagctgcttagcgggtacatacacctttccatccaagtgaataatcagtcgaaggttctgctcttcatttcccacaacacgagcgacggggagtggcacttcgtcgaggtgatctttgccgaggctgttacacttaccctgattgatgacagctgcaaggagaaatgtatagccaaagccccaacccctttggagtctgatcaaagcatttgtgcattccagaattcatttctaggtgggctgccggtaggtatgactagcaatggagtcgcactgctcaatttttacaatatgccatctacaccatctttcgtggggtgcctgcaggatatcaaaatcgattggaatcacatcacactggagaacataagcagtggtagctccttaaacgtcaaggcaggctgcgtgcggaaagactggtgcgagagccagccctgtcaaagtcgaggccgttgcatcaacttgtggttgtcctatcagtgtgactgccatcggccttacgaggggccgaactgtctgcgtgagtacgtcgccggcaggttcgggcaggatgactccaccggctacgtgattttcacccttgacgagagctatggggataccatctccctgagcatgttcgtgcgcactctgcaacctagcggacttctgctagccctggaaaacagtacctatcagtacatcagggtgtggctggaacgagggaggctggcgatgctgacccccaattctcctaagctggtggtcaagtttgttctcaacgacgggaacgtccacttaatctcgctgaagattaagccgtacaaaatagaactttatcaaagctcacagaaccttggcttcatcagtgcgtccacttggaagatagaaaaaggggatgtgatctatatcggcgggctcccggacaagcaagaaacagagctgaacggcggtttctttaaggggtgtattcaagatgtccgcctaaacaatcagaacctggaatttttccccaacccaaccaacaatgcctcgctgaatcctgtgcttgtcaacgtgacacagggttgcgcgggggataactcctgtaaaagcaacccgtgccacaacggcggtgtatgccactctcggtgggacgacttcagctgctcatgccccgcccttacatccgggaaggcctgtgaggaggtccaatggtgcgggttctctccttgtccccatggcgctcagtgtcagccagtattgcaaggattcgaatgtattgccaacgctgtattcaatgggcagtccggacagattctgtttcgttctaacggcaatattacccgggagctaacaaacatcactttcggattcaggacccgcgatgctaatgtgattatcctgcacgccgagaaagagcccgagtttctgaacataagcatccaggattctagacttttcttccagttgcagagtggcaacagcttttacatgctgtccctcaccagtctccaaagcgtgaatgatggaacatggcacgaggtgaccttgagcatgactgatccgttgtcacagacctcaagatggcaaatggaggttgataacgagacaccatttgtcacaagcaccattgcgaccggatctctcaactttttgaaggataacacagacatctacgtcggggatagagcgattgacaacattaaggggctgcagggctgtctttcaacaattgaaatcggtggtatttacctgtcttatttcgaaaacgtccatggcttcattaataagccccaagaggagcagttcctgaaaatctcaaccaatagcgtggtgacaggctgcctacaacttaatgtctgtaactctaacccttgccttcacggtggaaattgtgaagacatttactccagctaccactgtagttgcccgctgggctggagcggtaagcactgcgagctgaacatcgacgagtgctttagcaatccctgtattcacggcaattgcagtgaccgggtcgccgcatatcattgtacatgtgaacccggatacactggagtgaattgtgaagtggacattgacaattgccaatcacatcagtgcgccaatggcgcgacttgcatttcacacactaatgggtattcatgcctctgtttcggtaacttcacaggaaagttttgtcgccagtccagactgccatctactgtgtgcggaaacgaaaaaactaacttaacttgctataacggaggcaattgtaccgagtttcagactgagctgaagtgcatgtgccgaccaggatttaccggcgaatggtgtgagaaggacatcgatgagtgtgcttctgacccatgcgtgaatggcgggctgtgtcaggacttactcaacaaattccagtgtctgtgtgacgtggctttcgccggtgaaagatgcgaagtggacctggcagacgacctcatatccgatatattcactaccatcggatccgttaccgtcgctttgctgcttattctgctgctggctattgtggcctcagttgtgacatcaaacaaaagagccacccagggaacatatagccccagtagacaagagaaggaggggtccagagttgaaatgtggaatttgatgccaccgcctgccatggaaaggttgatctag

SEQ ID NO: 262012 - DNA, 4221 bp, Artificial Sequence
  derived and/or modified sequence
atggcactcaagaatatcaattatctgctgatattctacctgtctttctctctcctgatatatatcaaaaactctttttgcaacaaaaacaatacacggtgtttgtctaactcatgtcagaataatagcacctgcaaggacttctctaaagataatgactgctcttgctccgacaccgccaacaaccttgacaaagactgtgataatatgaaagatccttgttttagcaacccttgtcagggctccgcgacctgcgtgaacaccccaggtgagagatctttcctctgtaaatgccctccaggatactcagggaccatctgcgagactaccatagggtcctgtgggaagaacagctgccaacatggcggtatctgccaccaggatcccatctatccagtatgcatttgcccagctgggtatgcaggtcgcttttgtgaaatcgaccacgatgagtgtgccagcagtccttgtcagaatggggcagtctgtcaggatggtattgatggatatagctgtttttgcgtgcccggttaccagggtcgccattgtgacttggaagtcgacgaatgcgcctctgacccatgtaaaaacgaagccacctgtctgaatgagataggccgttacacatgcatctgcccgcataattacagcggggtgaactgcgagctggagattgatgaatgctggtctcagccctgtctcaatggcgcaacctgccaggacgcacttggagcctatttctgcgattgcgctcccggattcttaggtgatcactgcgagctgaatactgacgagtgtgcgagccaaccatgcctgcatggtggtctgtgcgtggacggggaaaataggtactcctgcaattgtactggttcaggcttcacaggcacacactgtgaaactctgatgccgctgtgctggtctaaaccttgtcataataatgccacctgcgaggactcagtcgataattacacgtgtcattgttggcccggatacactggcgctcagtgcgagatagatctcaatgagtgtaactccaacccatgccagtccaatggcgaatgcgtcgaactttcctcagaaaaacagtatggaagaatcactgggctcccatccagttttagctatcatgaagccagtgggtacgtgtgcatatgccagcccggattcaccggcattcactgcgaagaagatgtcaatgaatgctcgagtaatccgtgtcaaaacgggggaacatgcgaaaatctcccaggcaattacacatgccattgtcctttcgataatcttagcaggacattctacggcggaagagactgcagcgatattctactgggctgcacccaccagcaatgccttaacaatggtacctgtatacctcactttcaggacggacagcacggattttcatgtctctgccccagcgggtacacaggcagtctctgcgagatcgcaacaaccttaagcttcgaaggagacgggtttctgtgggtcaagtcaggtagcgtaacgaccaaaggatctgtatgtaatatcgcccttagattccaaaccgttcagccaatggccttgctgctctttagatccaatagggacgtgtttgtcaagctcgagttactctcaggatacatacacttatcaatacaggtgaataatcaatctaaggtgttgctgttcatatcccataatacatcagatggcgaatggcacttcgtagaagtcattttcgcggaagccgtgactctgaccctaattgatgacagttgtaaggagaagtgcatcgctaaggcacctacccccctggagtctgatcagtctatttgtgcctttcagaactctttcttgggtggattgccagttggaatgacatctaacggggtggccctattgaacttttataatatgccatcgacaccctcctttgtcggctgtttacaggatattaagatcgactggaaccatatcaccctggaaaatataagctccggcagctccctgaacgtcaaggccggatgcgtcagaaaagactggtgcgaatctcagccctgtcagtcccgaggcaggtgtatcaacttgtggctgagctatcagtgcgactgccacagaccctatgaaggcccaaactgtctccgagaatatgtggccggtaggtttggccaagacgattcaaccggttatgtgattttcacccttgatgagagttatggagacaccattagcctcagcatgttcgttaggactctccaacccagtggtctgttattggccctggagaactccacctatcagtacattcgagtgtggttggaacgcggacgcctcgccatgctcactccaaacagccctaaactcgtggtcaagttcgtcttgaacgacggaaacgtgcaccttatttcgcttaaaatcaaaccatataagatcgagctgtatcagtcatcacaaaaccttggtttcatctctgccagtacctggaagatcgaaaagggcgacgtaatctatattggcggactcccagacaaacaagaaaccgagctgaacggcggattttttaaagggtgcattcaggacgtgaggctcaataatcaaaacttggaatttttcccaaatccgaccaataacgcttccctgaaccccgtcctagtgaatgtgacccagggctgtgccggtgataatagctgcaaatcaaacccttgccacaacggaggagtgtgccattcccgctgggacgacttttcttgttcctgtccagcactgacgtcaggcaaggcatgcgaagaagtccagtggtgcggcttctccccctgccctcatggggctcagtgccagccagtgctccagggcttcgagtgcatcgctaacgccgttttcaatggacaatcagggcaaattttgttccgttccaatggtaacatcacaagggagctgaccaacataacatttgggttcagaacacgggacgcaaacgttatcatcctgcacgctgagaaagaaccagaattcttaaatatcagtattcaggacagccgcctgtttttccagttgcagagtggaaattcattttacatgttatcactcacatccctccagtctgtcaatgacgggacctggcatgaggtcaccctctccatgaccgatcctctgtctcagacgtcaaggtggcaaatggaagtcgataacgaaacccctttcgtcacatcaaccatcgctaccggtagccttaattttctgaaggacaatacagacatatatgtgggggaccgtgccatagataacatcaagggcctgcagggttgcctgtccaccatagagatcggaggcatttacctgtcatatttcgagaacgtgcacgggtttataaataaaccacaggaggagcagttcttgaaaatttcaaccaattcggtggtcaccggctgtctccagctgaatgtgtgtaacagcaatccctgcttgcatggaggcaactgtgaggatatttattcatcataccactgctcatgtcctttaggctggtccggcaagcactgcgaattaaacatcgatgaatgcttcagtaacccatgtatacacgggaactgctccgatcgggtggcagcctatcattgtacatgcgagcccggttatacaggagtgaattgcgaagtggacatcgataactgtcagtctcatcagtgcgccaacggcgcaacctgcatctcacatacaaatggctatagctgcctttgctttggcaattttactgggaaattttgccgccagtctcgcctgccgtcaacagtgtgtggaaacgaaaagactaacctcacgtgttataatggaggtaactgcacagaatttcagaccgagctcaagtgcatgtgtaggccgggttttacaggagagtggtgcgagaaagacatcgacgaatgcgcgtccgatccatgtgtgaatggaggtctctgtcaggacctgctgaacaagtttcagtgcctctgcgatgtggccttcgctggggagcgctgcgaagttgacctcgctgatgatttaatctctgacatcttcaccactatcggatccgtgactgtggcattgctgctcatactgttactggccatagtcgcgtccgtggtcaccagcaataagcgcgcaacacagggaacctactctcccagcagacaggagaaggagggctctagagtggagatgtggaacctcatgcccccaccagcaatggagcgcctcatatag

SEQ ID NO: 262013 - DNA, 4932 bp, Artificial Sequence
  derived and/or modified sequence
tgtaagtagggtgggacagagatggcacctgggggttctgaggcacccgctcctctctgagacagacagggatcaggagccggactgggaccagaccaccagcaacacaccagaggatgttctctaaataagaccatggcacttaagaacattaactaccttctcatcttctacctcagtttctcactgcttatctacataaaaaattccttttgcaataaaaacaacaccaggtgcctctcaaattcttgccaaaacaattctacatgcaaagatttttcaaaagacaatgattgttcttgttcagacacagccaataatttggacaaagactgtgacaacatgaaagacccttgcttctccaatccctgtcaaggaagtgccacttgtgtgaacaccccaggagaaaggagctttctgtgcaaatgtcctcctgggtacagtgggacaatctgtgaaactaccattggttcctgtggcaagaactcctgccaacatggaggtatttgccatcaggaccctatttatcctgtctgcatctgccctgctggatatgctggaagattctgtgagatagatcacgatgagtgtgcttccagcccttgccaaaatggggccgtgtgccaggatggaattgatggttactcctgcttctgtgtcccaggatatcaaggcagacactgcgacttggaagtggatgaatgtgcttcagatccctgcaagaacgaggctacatgcctcaatgaaataggaagatatacttgtatctgtccccacaattattctggtgtaaactgtgaattggaaattgacgaatgttggtcccagccttgtttaaatggtgcaacttgtcaggatgctctgggggcctatttctgcgactgtgcccctggattcctgggggatcactgtgaactcaacactgatgagtgtgccagtcaaccttgtctccatggagggctgtgtgtggatggagaaaacagatatagctgtaactgcacgggtagtggattcacagggacacactgtgagaccttgatgcctctttgttggtcaaaaccttgtcacaataatgctacatgtgaggacagtgttgacaattacacttgtcactgctggcctggatacacaggtgcccagtgtgagatcgacctcaatgaatgcaatagtaacccctgccagtccaatggggaatgtgtggagctgtcctcagagaaacaatatggacgcatcactggactgccttcttctttcagctaccatgaagcctcaggttatgtctgtatctgtcagcctggattcacaggaatccactgcgaagaagacgtcaatgaatgttcttcaaacccttgccaaaatggtggtacttgtgagaacttgcctgggaattatacttgccattgcccatttgataacctttctagaactttttatggaggaagggactgttctgatattctcctgggctgtacccatcagcaatgtctaaataatggaacatgcatccctcacttccaagatggccagcatggattcagctgcctatgtccatctggctacaccgggtccctgtgtgaaatcgcaaccacactttcatttgagggcgatggcttcctgtgggtcaaaagtggctcagtgacaaccaagggctcagtttgtaacatagccctcaggtttcagactgttcagccaatggctcttctacttttccgaagcaacagggatgtgtttgtgaagctggagctgctaagtggctacattcacttatcaattcaggtcaataatcagtcaaaggtgcttctgttcatttcccacaacaccagcgatggagagtggcatttcgtggaggtaatatttgcagaggctgtgacccttaccttaatcgacgactcctgtaaggagaaatgcatcgcgaaagctcctactccacttgaaagtgatcaatcaatatgtgcttttcagaactcctttttgggtggtttaccagtgggaatgaccagcaatggtgttgctctgcttaacttctataatatgccatccacaccttcgtttgtaggctgtctccaagacattaaaattgattggaatcacattaccctggagaacatctcgtctggctcatcattaaatgtcaaggcaggctgtgtgagaaaggattggtgtgaaagccaaccttgtcaaagcagaggacgctgcatcaacttgtggctgagttaccagtgtgactgccacaggccctatgaaggccccaactgtctgagagagtatgtggcaggcagatttggccaggatgactccactggttatgtcatctttactcttgatgagagctatggagacaccatcagcctctccatgtttgtccgaacgcttcaaccatcaggcttacttctagctttggaaaacagcacttatcaatatatccgtgtctggctagagcgcggcagactagcaatgctgactccaaactctcccaaattagtagtaaaatttgttcttaatgatggaaatgtccacttgatatctttgaaaatcaagccatataaaattgaactgtatcagtcttcacaaaacctaggatttatttctgcttctacgtggaaaatcgaaaagggagatgtcatctacattggtggcctacctgacaagcaagagactgaacttaatggtggattcttcaaaggctgtatccaagatgtaagactaaacaaccaaaatctggaattctttccaaatccaacaaacaatgcatctctcaatccagttcttgtcaatgtaacccaaggctgtgctggagacaacagctgcaagtccaacccctgtcacaatggaggtgtttgccattcccggtgggatgacttctcctgttcctgtcctgccctcacaagtgggaaagcctgtgaggaggttcagtggtgtggattcagcccgtgtcctcacggagcccagtgccagccggtgcttcaaggatttgaatgtattgcaaatgctgtttttaatggacaaagcggtcaaatattattcagaagcaatgggaatattaccagagaactcaccaatatcacatttggtttcagaacaagggatgcaaatgtaataatattgcatgcagaaaaagagcctgaatttcttaatattagcattcaagattccagattattctttcaattgcaaagtggcaacagcttttatatgctaagtctgacaagtttgcagtcagtgaatgatggcacatggcacgaagtgaccctttccatgacagacccactgtcccagacctccaggtggcaaatggaagtggacaacgaaacaccttttgtgaccagcacaattgctactggaagcctcaactttttgaaggataatacagatatttatgtgggagacagagctattgacaatataaagggcctgcaagggtgtctaagtacaatagaaatcggaggcatttatctctcttactttgaaaatgttcatggtttcattaataaacctcaggaagagcaatttctcaaaatctctaccaattcagtggtcactggctgtttgcagttaaatgtctgcaactccaacccctgtttgcatggaggaaactgtgaagacatctatagctcttatcattgctcctgtcccttgggatggtcagggaaacactgtgaactcaacatcgatgaatgcttttcaaacccctgtatccatggcaactgctctgacagagttgcagcctaccactgcacatgtgagcctggatacactggtgtgaactgtgaagtggatatagacaactgccagagtcaccagtgtgcaaatggagccacctgcattagtcatactaatggctattcttgcctctgttttggaaattttacaggaaaattttgcagacagagcagattaccctcaacagtctgtgggaatgagaagacaaatctcacttgctacaatggaggcaactgcacagagttccagactgaattaaaatgtatgtgccggccaggttttactggagaatggtgtgaaaaggacattgatgagtgtgcctctgatccgtgtgtcaatggaggtctgtgccaggacttactcaacaaattccagtgcctctgtgatgttgcctttgctggcgagcgctgcgaggtggacttggcagatgacttgatctccgacattttcaccactattggctcagtgactgtcgccttgttactgatcctcttgctggccattgttgcttctgttgtcacctccaacaaaagggcaactcagggaacctacagccccagccgtcaggagaaggagggctcccgagtggaaatgtggaacttgatgccaccccctgcaatggagagactgatttaggagcattgtgtcccttcgagatggggatccacacactgtgaatgtgatgactgtacttcaggtatctctgacatacctgacaatgttaatctgcaactgggattacactggaactacaggaatgattcctttgaccaccttaaaaactttcacagtggttccgctcgacaccattgttttattatattatatcagccaattgcaaaaaaagtctgtgccagtaatttcagccttataattagcaaaaacatcttccagagaataaagtcttctgtggctttagtggctatcactgaaactctttcctcttttcaacctgggaacaaattttagttttcattttaggtttctgtactttctgtagtttctgtgtaaactgccatatgtttacatggaaactacaggaaaaaattggctacatttctcacttctcctatcatgtggtcaaagttattgttgtataccagcgatgggatgtatacttttgtccttcattcatggattcagagaaagctctgggaatgacttatggtccaaaaaagtgacccaatggcaacaaataaaaattgaaatgca

SEQ ID NO: 262014 - DNA, 1031 bp, Artificial Sequence
  derived and/or modified sequence
gaaaaggacattgatgagtgtgcctctgatccgtgtgtcaatggaggtctgtgccaggacttactcaacaaattccagtgcctctgtgatgttgcctttgctggcgagcgctgcgaggtggactactgagtggtaccagcttgctctggttggtcttcattcctgagtagttccattgtcctgaatatttatttgcctttgctatagaattcgcatcccaatgatttcaatctttccagttggcagatgacttgatctccgacattttcaccactattggctcagtgactgtcgccttgttactgatcctcttgctggccattgttgcttctgttgtcacctccaacaaaagggcaactcagggaacctacagccccagccgtcaggagaaggagggctcccgagtggaaatgtggaacttgatgccaccccctgcaatggagagactgatttaggagcattgtgtcccttcgagatggggatccacacactgtgaatgtgatgactgtacttcaggtatctctgacatacctgacaatgttaatctgcaactgggattacactggaactacaggaatgattcctttgaccaccttaaaaactttcacagtggttccgctcgacaccattgttttattatattatatcagccaattgcaaaaaaagtctgtgccagtaatttcagccttataattagcaaaaacatcttccagagaataaagtcttctgtggctttagtggctatcactgaaactctttcctcttttcaacctgggaacaaattttagttttcattttaggtttctgtactttctgtagtttctgtgtaaactgccatatgtttacatggaaactacaggaaaaaattggctacatttctcacttctcctatcatgtggtcaaagttattgttgtataccagcgatgggatgtatacttttgtccttcattcatggattcagagaaagctctgggaatgacttatggtccaaaaaagtgacccaatggcaacaaataaaaattgaaatgca

SEQ ID NO: 262015 - DNA, 4221 bp, Artificial Sequence
  derived and/or modified sequence
atggccctgaagaacatcaactacctgctgatcttctacctgagcttcagcctgctgatctacatcaagaacagcttctgcaacaagaacaacaccagatgcctgagcaacagctgccagaacaacagcacctgcaaggacttcagcaaggacaacgactgcagctgcagcgacaccgccaacaacctggacaaggactgcgacaacatgaaggacccctgcttcagcaacccctgccagggcagcgccacctgcgtgaacacccccggcgagagaagcttcctgtgcaagtgcccccccggctacagcggcaccatctgcgagaccaccatcggcagctgcggcaagaacagctgccagcacggcggcatctgccaccaggaccccatctaccccgtgtgcatctgccccgccggctacgccggcagattctgcgagatcgaccacgacgagtgcgccagcagcccctgccagaacggcgccgtgtgccaggacggcatcgacggctacagctgcttctgcgtgcccggctaccagggcagacactgcgacctggaggtggacgagtgcgccagcgacccctgcaagaacgaggccacctgcctgaacgagatcggcagatacacctgcatctgcccccacaactacagcggcgtgaactgcgagctggagatcgacgagtgctggagccagccctgcctgaacggcgccacctgccaggacgccctgggcgcctacttctgcgactgcgcccccggcttcctgggcgaccactgcgagctgaacaccgacgagtgcgccagccagccctgcctgcacggcggcctgtgcgtggacggcgagaacagatacagctgcaactgcaccggcagcggcttcaccggcacccactgcgagaccctgatgcccctgtgctggagcaagccctgccacaacaacgccacctgcgaggacagcgtggacaactacacctgccactgctggcccggctacaccggcgcccagtgcgagatcgacctgaacgagtgcaacagcaacccctgccagagcaacggcgagtgcgtggagctgagcagcgagaagcagtacggcagaatcaccggcctgcccagcagcttcagctaccacgaggccagcggctacgtgtgcatctgccagcccggcttcaccggcatccactgcgaggaggacgtgaacgagtgcagcagcaacccctgccagaacggcggcacctgcgagaacctgcccggcaactacacctgccactgccccttcgacaacctgagcagaaccttctacggcggcagagactgcagcgacatcctgctgggctgcacccaccagcagtgcctgaacaacggcacctgcatcccccacttccaggacggccagcacggcttcagctgcctgtgccccagcggctacaccggcagcctgtgcgagatcgccaccaccctgagcttcgagggcgacggcttcctgtgggtgaagagcggcagcgtgaccaccaagggcagcgtgtgcaacatcgccctgagattccagaccgtgcagcccatggccctgctgctgttcagaagcaacagagacgtgttcgtgaagctggagctgctgagcggctacatccacctgagcatccaggtgaacaaccagagcaaggtgctgctgttcatcagccacaacaccagcgacggcgagtggcacttcgtggaggtgatcttcgccgaggccgtgaccctgaccctgatcgacgacagctgcaaggagaagtgcatcgccaaggcccccacccccctggagagcgaccagagcatctgcgccttccagaacagcttcctgggcggcctgcccgtgggcatgaccagcaacggcgtggccctgctgaacttctacaacatgcccagcacccccagcttcgtgggctgcctgcaggacatcaagatcgactggaaccacatcaccctggagaacatcagcagcggcagcagcctgaacgtgaaggccggctgcgtgagaaaggactggtgcgagagccagccctgccagagcagaggcagatgcatcaacctgtggctgagctaccagtgcgactgccacagaccctacgagggccccaactgcctgagagagtacgtggccggcagattcggccaggacgacagcaccggctacgtgatcttcaccctggacgagagctacggcgacaccatcagcctgagcatgttcgtgagaaccctgcagcccagcggcctgctgctggccctggagaacagcacctaccagtacatcagagtgtggctggagagaggcagactggccatgctgacccccaacagccccaagctggtggtgaagttcgtgctgaacgacggcaacgtgcacctgatcagcctgaagatcaagccctacaagatcgagctgtaccagagcagccagaacctgggcttcatcagcgccagcacctggaagatcgagaagggcgacgtgatctacatcggcggcctgcccgacaagcaggagaccgagctgaacggcggcttcttcaagggctgcatccaggacgtgagactgaacaaccagaacctggagttcttccccaaccccaccaacaacgccagcctgaaccccgtgctggtgaacgtgacccagggctgcgccggcgacaacagctgcaagagcaacccctgccacaacggcggcgtgtgccacagcagatgggacgacttcagctgcagctgccccgccctgaccagcggcaaggcctgcgaggaggtgcagtggtgcggcttcagcccctgcccccacggcgcccagtgccagcccgtgctgcagggcttcgagtgcatcgccaacgccgtgttcaacggccagagcggccagatcctgttcagaagcaacggcaacatcaccagagagctgaccaacatcaccttcggcttcagaaccagagacgccaacgtgatcatcctgcacgccgagaaggagcccgagttcctgaacatcagcatccaggacagcagactgttcttccagctgcagagcggcaacagcttctacatgctgagcctgaccagcctgcagagcgtgaacgacggcacctggcacgaggtgaccctgagcatgaccgaccccctgagccagaccagcagatggcagatggaggtggacaacgagacccccttcgtgaccagcaccatcgccaccggcagcctgaacttcctgaaggacaacaccgacatctacgtgggcgacagagccatcgacaacatcaagggcctgcagggctgcctgagcaccatcgagatcggcggcatctacctgagctacttcgagaacgtgcacggcttcatcaacaagccccaggaggagcagttcctgaagatcagcaccaacagcgtggtgaccggctgcctgcagctgaacgtgtgcaacagcaacccctgcctgcacggcggcaactgcgaggacatctacagcagctaccactgcagctgccccctgggctggagcggcaagcactgcgagctgaacatcgacgagtgcttcagcaacccctgcatccacggcaactgcagcgacagagtggccgcctaccactgcacctgcgagcccggctacaccggcgtgaactgcgaggtggacatcgacaactgccagagccaccagtgcgccaacggcgccacctgcatcagccacaccaacggctacagctgcctgtgcttcggcaacttcaccggcaagttctgcagacagagcagactgcccagcaccgtgtgcggcaacgagaagaccaacctgacctgctacaacggcggcaactgcaccgagttccagaccgagctgaagtgcatgtgcagacccggcttcaccggcgagtggtgcgagaaggacatcgacgagtgcgccagcgacccctgcgtgaacggcggcctgtgccaggacctgctgaacaagttccagtgcctgtgcgacgtggccttcgccggcgagagatgcgaggtggacctggccgacgacctgatcagcgacatcttcaccaccatcggcagcgtgaccgtggccctgctgctgatcctgctgctggccatcgtggccagcgtggtgaccagcaacaagagagccacccagggcacctacagccccagcagacaggagaaggagggcagcagagtggagatgtggaacctgatgcccccccccgccatggagagactgatctag

SEQ ID NO: 262016 - protein, 107 aa, Artificial Sequence
  derived and/or modified sequence
MDAILNYRSEDTEDYYTLLGCDELSSVEQILAEFKVRALECHPDKHPENPKAVETFQKLQKAKEILTNEESRARYDHWRRSQMSMPFQQWEALNDSVKTVGFSLGAT

SEQ ID NO: 262017 - DNA, 324 bp, Artificial Sequence
  derived and/or modified sequence
atggacgccatcctgaactacagaagcgaggacaccgaggactactacaccctgctgggctgcgacgagctgagcagcgtggagcagatcctggccgagttcaaggtgagagccctggagtgccaccccgacaagcaccccgagaaccccaaggccgtggagaccttccagaagctgcagaaggccaaggagatcctgaccaacgaggagagcagagccagatacgaccactggagaagaagccagatgagcatgcccttccagcagtgggaggccctgaacgacagcgtgaagaccgtgggcttcagcctgggcgccacctag

SEQ ID NO: 262018 - DNA, 324 bp, Artificial Sequence
  derived and/or modified sequence
atggatgcaattcttaattacaggagtgaagacaccgaggattattatactcttctgggatgcgatgagctgtctagcgtggaacagatactcgcagagtttaaggttcgggcactggaatgtcaccctgacaagcatcctgagaacccaaaggctgtggaaacgttccaaaaactgcagaaagctaaagagatcctgactaacgaggagagcagagccaggtatgaccattggaggcggtctcaaatgtcgatgcctttccaacagtgggaggcattaaatgattcagtgaaaaccgttgggttctctttgggcgcaacatag

SEQ ID NO: 262019 - DNA, 698 bp, Artificial Sequence
  derived and/or modified sequence
cagatttaaagagtttcttcctgttaattcgaagctcactgtgcctcttgtttccgagggaagaaggactgattaagtcatctaaatggatgcaatactgaattacaggtcagaagatactgaagattactacacattactgggatgtgatgaactatcttcggttgaacaaatcctggcagaatttaaagtcagagctctggaatgtcacccagacaagcatcctgaaaaccccaaagctgtggagacttttcagaaactgcagaaggcaaaggagattctgaccaatgaagagagtcgagcccgctatgaccactggcgaaggagccagatgtcgatgccattccagcagtgggaagctttgaatgactcagtgaagacggtgggtttctcgctgggtgcgacgtgaatttgtgaagctcaggatgcccatggattagactcatgtagtagcttaaagagtcattaggcgataggagggagaaaaccaagaagttagcagagtctggatataattcagtgtccgtaaatcccatgaagagaagctcatcagaataaaggcaatgaatttgtgccagaagagcctgtgactacatttctttcaatctctttggctgtttgtttcagtatacacactccctgttattgcttactattttatgagctctaataaatgtacttctcaagttgctcatgaa

SEQ ID NO: 262020 - DNA, 324 bp, Artificial Sequence
  derived and/or modified sequence
atggatgccatcctgaactacagaagtgaggacacagaggactactacaccctgctgggctgtgatgagctgagctctgtggagcagatcctggccgagttcaaggtgcgggccctggagtgccacccagacaagcaccctgagaaccccaaggctgtggagaccttccagaagctgcagaaggccaaggagatcctgaccaatgaggagagccgggcccgctatgaccactggaggaggagccagatgtccatgcccttccagcagtgggaggccctgaatgacagcgtgaagacagtgggcttcagcctgggcgccacctag

SEQ ID NO: 262021 - DNA, 324 bp, Artificial Sequence
  derived and/or modified sequence
atggacgccatcctgaactaccggagcgaggacaccgaggactactataccctattggggtgcgatgagctgtcgagtgttgaacagatactggccgagttcaaggtcagggcattggagtgccaccccgacaagcatccggagaaccccaaagctgtggagactttccagaagcttcagaaagcaaaggagatcctgactaacgaggagtctagggctcgctatgatcactggcgccgctcccagatgtcaatgccctttcagcagtgggaggcactgaacgattcagttaaaaccgtcgggttctcgttaggggctacctag

SEQ ID NO: 262022 - DNA, 324 bp, Artificial Sequence
  derived and/or modified sequence
atggatgcaatcctgaactataggtcagaggacaccgaggattattacacccttttgggatgtgacgaactgtccagcgtggagcaaatcctcgccgaattcaaagtcagggccctcgaatgtcaccctgacaaacatcctgaaaatccaaaagctgtcgaaacgttccagaaactgcagaaggccaaggaaatcctcacaaatgaagagagcagggccagatacgatcattggcgacgcagtcagatgagcatgccttttcagcaatgggaggcacttaatgacagcgtgaagaccgtcgggttctcccttggcgcaacatag

SEQ ID NO: 262023 - protein, 555 aa, Artificial Sequence
  derived and/or modified sequence
MDMFPLTWVFLALYFSRHQVRGQPDPPCGGRLNSKDAGYITSPGYPQDYPSHQNCEWIVYAPEPNQKIVLNFNPHFEIEKHDCKYDFIEIRDGDSESADLLGKHCGNIAPPTIISSGSMLYIRFTSDYARQGAGFSLRYEIFKTGSEDCSKNFTSPNGTIESPGFPEKYPHNLDCTFTILAKPKMEIILQFLIFDLEHDPLQVGEGDCKYDWLDIWDGIPHVGPLIGKYCGTKTPSELRSSTGILSLTFHTDMAVAKDGFSARYYLVHQEPLENFQCNVPLGMESGRIANEQISASSTYSDGRWTPQQSRLHGDDNGWTPNLDSNKEYLQVDLRFLTMLTAIATQGAISRETQNGYYVKSYKLEVSTNGEDWMVYRHGKNHKVFQANNDATEVVLNKLHAPLLTRFVRIRPQTWHSGIALRLELFGCRVTDAPCSNMLGMLSGLIADSQISASSTQEYLWSPSAARLVSSRSGWFPRIPQAQPGEEWLQVDLGTPKTVKGVIIQGARGGDSITAVEARAFVRKFKVSYSLNGKDWEYIQDPRTQQPKVGCSWRPL

SEQ ID NO: 262024 - DNA, 300 bp, Artificial Sequence
  derived and/or modified sequence
atggacatgttccccctgacctgggtgttcctggccctgtacttcagcagacaccaggtgagaggccagcccgaccccccctgcggcggcagactgaacagcaaggacgccggctacatcaccagccccggctacccccaggactaccccagccaccagaactgcgagtggatcgtgtacgcccccgagcccaaccagaagatcgtgctgaacttcaacccccacttcgagatcgagaagcacgactgcaacctgctgagcgcctggaagatcagcctgaccagcagaagcttcgcctag

SEQ ID NO: 262025 - DNA, 1668 bp, Artificial Sequence
  derived and/or modified sequence
atggacatgttccccctgacctgggtgttcctggccctgtacttcagcagacaccaggtgagaggccagcccgaccccccctgcggcggcagactgaacagcaaggacgccggctacatcaccagccccggctacccccaggactaccccagccaccagaactgcgagtggatcgtgtacgcccccgagcccaaccagaagatcgtgctgaacttcaacccccacttcgagatcgagaagcacgactgcaagtacgacttcatcgagatcagagacggcgacagcgagagcgccgacctgctgggcaagcactgcggcaacatcgccccccccaccatcatcagcagcggcagcatgctgtacatcagattcaccagcgactacgccagacagggcgccggcttcagcctgagatacgagatcttcaagaccggcagcgaggactgcagcaagaacttcaccagccccaacggcaccatcgagagccccggcttccccgagaagtacccccacaacctggactgcaccttcaccatcctggccaagcccaagatggagatcatcctgcagttcctgatcttcgacctggagcacgaccccctgcaggtgggcgagggcgactgcaagtacgactggctggacatctgggacggcatcccccacgtgggccccctgatcggcaagtactgcggcaccaagacccccagcgagctgagaagcagcaccggcatcctgagcctgaccttccacaccgacatggccgtggccaaggacggcttcagcgccagatactacctggtgcaccaggagcccctggagaacttccagtgcaacgtgcccctgggcatggagagcggcagaatcgccaacgagcagatcagcgccagcagcacctacagcgacggcagatggaccccccagcagagcagactgcacggcgacgacaacggctggacccccaacctggacagcaacaaggagtacctgcaggtggacctgagattcctgaccatgctgaccgccatcgccacccagggcgccatcagcagagagacccagaacggctactacgtgaagagctacaagctggaggtgagcaccaacggcgaggactggatggtgtacagacacggcaagaaccacaaggtgttccaggccaacaacgacgccaccgaggtggtgctgaacaagctgcacgcccccctgctgaccagattcgtgagaatcagaccccagacctggcacagcggcatcgccctgagactggagctgttcggctgcagagtgaccgacgccccctgcagcaacatgctgggcatgctgagcggcctgatcgccgacagccagatcagcgccagcagcacccaggagtacctgtggagccccagcgccgccagactggtgagcagcagaagcggctggttccccagaatcccccaggcccagcccggcgaggagtggctgcaggtggacctgggcacccccaagaccgtgaagggcgtgatcatccagggcgccagaggcggcgacagcatcaccgccgtggaggccagagccttcgtgagaaagttcaaggtgagctacagcctgaacggcaaggactgggagtacatccaggaccccagaacccagcagcccaaggtgggctgcagctggagacccctgtag

SEQ ID NO: 262026 - DNA, 309 bp, Artificial Sequence
  derived and/or modified sequence
atggacatgttccccctgacctgggtgttcctggccctgtacttcagcagacaccaggtgagaggccagcccgaccccccctgcggcggcagactgaacagcaaggacgccggctacatcaccagccccggctacccccaggactaccccagccaccagaactgcgagtggatcgtgtacgcccccgagcccaaccagaagatcgtgctgaacttcaacccccacttcgagatcgagaagcacgactgcaagtacgacttcatcgagatcagagacggcgacagcgagagcgccgacctgctgggctag

SEQ ID NO: 262027 - DNA, 300 bp, Artificial Sequence
  derived and/or modified sequence
atggacatgtttccactcacatgggtgttcctcgccctgtattttagtaggcaccaggtgcggggccagccagaccctccatgcggtggccgattgaattccaaagacgctggttacataacctctcctgggtatccccaggactaccctagccatcagaattgtgagtggatcgtgtacgcacctgagcccaatcagaaaattgttttaaacttcaacccacactttgagattgagaaacatgactgtaacctgttgtctgcgtggaaaatcagcctgacatctaggtccttcgcatag

SEQ ID NO: 262028 - DNA, 1668 bp, Artificial Sequence
  derived and/or modified sequence
atggatatgttcccattgacctgggttttcttagccctgtatttctcccgccaccaggttaggggacagcccgacccaccgtgtggcggaagactgaatagcaaagatgccggctacattacctctcccggctacccccaggattacccgtcccaccagaattgcgaatggatagtgtacgccccagagccaaatcagaagattgtgctgaacttcaatccgcacttcgaaattgagaaacacgattgtaagtacgacttcatagaaattagagatggcgacagcgagtccgcggacttgctgggcaagcattgtggaaacatcgctccaccaaccattatcagctccggaagtatgttgtacattagatttaccagcgactatgcccggcaaggcgccggttttagtctgcgctatgaaatttttaagactgggtcagaggactgctcaaaaaacttcacaagtcccaacggtaccatcgagtccccgggctttccagaaaaatacccacataatcttgactgcacattcacgattctcgccaagcctaaaatggagatcatactgcagtttctaatttttgatctggagcatgatccgctccaggtcggtgagggggactgcaagtacgattggctggacatatgggacgggattccgcacgtaggtccgctgattgggaaatattgtgggactaagactccaagcgagctcaggtcttcaacaggaatattgtcacttactttccataccgacatggccgtggcaaaggacggtttctcggctcggtactacctcgttcaccaggaacccctcgagaatttccaatgtaatgtgccactggggatggaaagcgggaggatagcaaacgagcagatctccgccagcagtacttactcagacggtaggtggacaccacagcagagtcggctgcacggcgatgataatgggtggactccaaatttggactccaataaggagtatttgcaggtcgaccttcggttcctgaccatgctgacagccattgccacacagggcgcaatttctcgggagactcagaatggatactacgtgaagagttacaaactcgaggtttcaactaatggagaagactggatggtttaccggcacggtaagaaccacaaagtttttcaggctaataacgacgccaccgaagtggtattaaacaaactgcatgcccctctgctcaccaggtttgtccggattcgccctcagacatggcacagtgggattgccctgagactggaactgtttggttgtagagttacggatgcaccatgctccaacatgcttggcatgttaagcgggttaatagccgactcgcagatctcggcctcctccacccaggaatacttatggtctccaagcgctgcccgccttgtgagtagcaggtcaggatggttccccagaataccccaggcacagcctggcgaagagtggctccaggtagatttagggacacctaagacggtgaagggcgttatcattcagggtgcacgagggggagattctataaccgcagtagaagctagagcatttgttaggaaattcaaggtatcatatagcctgaatggcaaggattgggaatacatccaggacccccggacacagcaaccgaaggttggctgttcttggaggcctttgtag

SEQ ID NO: 262029 - DNA, 1668 bp, Artificial Sequence
  derived and/or modified sequence
atggacatgttcccactgacctgggtgtttcttgctttgtacttttcccgccaccaggtacgtggccagcccgatcccccctgtggggggcgcctgaacagcaaggatgctggttatatcacctctccaggctaccctcaagactatccgtctcatcagaattgcgagtggatcgtatacgcacccgaaccgaaccagaaaattgtactgaactttaatccgcactttgagatcgaaaaacatgactgcaaatacgactttatcgaaatcagagatggagactctgagtcggcagatttactcgggaagcactgcggaaatattgccccgcctactatcatcagctctggatcaatgttgtacatcagattcacctccgactatgcgcgccagggcgctggatttagtctacgctacgaaatttttaagaccggtagtgaggactgcagcaagaattttacaagccctaacgggacgatcgagtcccctggatttccggagaaatatccccataacttggattgcacattcactatcttagcaaaacccaaaatggagatcatcctgcagtttctgatcttcgacctggaacacgaccccctgcaggtgggcgagggggattgcaagtacgattggctggacatctgggatggaattccccacgtcggtccacttatcgggaagtattgcggaaccaaaaccccctcggaactgcgctcctctaccggaattttgtccctgactttccacactgacatggctgttgcaaaagatggattctctgccaggtactacctggttcatcaggagcccctggaaaactttcagtgtaatgtgccccttggaatggagagcggacggatagccaatgaacaaattagcgcctcgtctacttactcggatggtcgatggacgcctcagcagtctcgtctgcatggtgatgataacggttggacaccgaacttggactcaaacaaagaatacctgcaggtagatctgaggttcctgaccatgttgaccgcaatagccacccaaggtgccatctctcgagaaactcagaacggctattacgtgaagtcatacaaactcgaggtgagcaccaatggtgaggattggatggtgtaccgtcacgggaaaaatcacaaggtgttccaggcaaacaacgacgccacagaggtggtgctgaataaactacatgctccgctgttaacaaggttcgtgcgtatacgaccccagacgtggcactctggaattgccttaaggctggagcttttcggatgtagagtcacggatgccccttgttctaatatgctgggaatgttgtcgggccttatcgccgactcccagataagcgcctctagcactcaagaatatttgtggtctccctccgccgctcgcttggtgtcttctcgctccggctggtttccacgaataccacaggcacagcccggagaggagtggctgcaagtggatctgggcactccaaagacagtgaagggagtgatcatacaaggcgctcgcggtggcgactccattactgcggtggaggctagagcattcgtgagaaagtttaaagtcagctactcactgaatgggaaggattgggagtacattcaagatccgagaacccagcagcctaaggtcggctgctcatggaggccactatag

SEQ ID NO: 262030 - DNA, 309 bp, Artificial Sequence
  derived and/or modified sequence
atggatatgtttccactgacctgggtattcctggccctgtatttttctcgacaccaagttagagggcaacccgatcccccctgtggcggacgccttaacagcaaagacgctggctatattaccagccccggctacccacaggattatccgagccatcagaactgcgagtggatcgtttacgctcctgagccaaatcaaaagattgtgctcaacttcaatcctcattttgaaatcgagaagcacgactgcaaatatgacttcatcgagatcagggatggtgatagtgaaagtgctgacctgctgggttag

SEQ ID NO: 262031 - DNA, 300 bp, Artificial Sequence
  derived and/or modified sequence
atggacatgttccccctgacctgggtgttcctggccctgtacttcagccgccaccaggtgcggggccagcctgaccccccctgtggcggccgcctgaacagcaaggatgctggctacatcaccagccctggctacccccaggactaccccagccaccagaactgtgagtggatcgtgtatgcccctgagcccaaccagaagatcgtgctgaacttcaacccccactttgaaattgagaagcatgactgcaacctgctgagcgcctggaagatcagcctgaccagccgcagctttgcctag

SEQ ID NO: 262032 - DNA, 1668 bp, Artificial Sequence
  derived and/or modified sequence
atggacatgttccccctgacctgggtgttcctggccctgtacttcagccgccaccaggtgcggggccagcctgaccccccctgtggcggccgcctgaacagcaaggatgctggctacatcaccagccctggctacccccaggactaccccagccaccagaactgtgagtggatcgtgtatgcccctgagcccaaccagaagatcgtgctgaacttcaacccccactttgaaattgagaagcatgactgcaagtatgacttcatcgagatcagagatggagacagcgagagcgctgacctgctgggcaagcactgcggcaacatcgccccacccaccatcatcagcagcggctccatgctgtacatccgcttcaccagtgactatgcccggcagggcgccggcttcagcctgcgctatgagatcttcaagacaggcagcgaggactgcagcaagaacttcaccagccccaacggcaccatcgagagccctggcttccctgagaagtacccccacaacctggactgcaccttcaccatcctggccaagcccaagatggagatcatcctgcagttcctgatctttgacctggagcatgaccccctgcaggtgggggagggggactgcaagtatgactggctggacatctgggatggcatcccccacgtgggccccctcatcggcaagtactgcggcaccaagacccccagcgagctgcggagcagcacaggcatcctgagcctgaccttccacacagacatggctgtggccaaggatggcttcagcgcccgctactacctggtgcaccaggagcccctggagaacttccagtgcaatgtgcccctgggcatggagagcggccgcatcgccaatgagcagatcagcgccagcagcacctacagtgatggccgctggaccccccagcagagccggctgcatggagatgacaatggctggacccccaacctggacagcaacaaggagtacctgcaggtggacctgcgcttcctgaccatgctgacagccatcgccacccagggcgccatcagccgggagacccagaatggctactacgtgaagagctacaagctggaggtgtccaccaacggggaggactggatggtgtacagacatggcaagaaccacaaggtgttccaggccaacaatgatgccacagaggtggtgctgaacaagctgcacgcccccctgctgaccaggtttgtgcgcatccggccccagacctggcacagcggcatcgccctgcggctggagctgtttggctgccgggtgacagatgccccctgcagcaacatgctgggcatgctgagcggcctgattgctgacagccagatcagcgccagcagcacccaggagtacctgtggagccccagcgctgcccggctggtgagcagccgcagcggctggttcccccgcatcccccaggcccagcctggagaggagtggctgcaggtggacctgggcacccccaagacagtgaagggcgtcatcatccagggcgcccggggcggggacagcatcacagctgtggaggcccgggcctttgtgaggaagttcaaggtgtcctacagcctgaatggcaaggactgggagtacatccaggaccccaggacccagcagcccaaggtgggctgctcctggaggcccctgtag

SEQ ID NO: 262033 - DNA, 309 bp, Artificial Sequence
  derived and/or modified sequence
atggacatgttccccctgacctgggtgttcctggccctgtacttcagccgccaccaggtgcggggccagcctgaccccccctgtggcggccgcctgaacagcaaggatgctggctacatcaccagccctggctacccccaggactaccccagccaccagaactgtgagtggatcgtgtatgcccctgagcccaaccagaagatcgtgctgaacttcaacccccactttgaaattgagaagcatgactgcaagtatgacttcatcgagatcagagatggagacagcgagagcgctgacctgctgggctag

SEQ ID NO: 262034 - DNA, 300 bp, Artificial Sequence
  derived and/or modified sequence
atggacatgttccccctgacctgggtgttcctggccctgtacttctcccgacatcaggtacgcgggcagccagatcctccctgcggcggccggttaaatagcaaggacgctggctacataacatcacccggctatccccaggactatccctcccatcagaattgtgaatggattgtgtacgcacccgagccaaatcagaagattgtactgaatttcaatcctcattttgagatcgaaaaacatgattgtaacttgctgtccgcatggaagatctccctgacgtcacgcagctttgcttag

SEQ ID NO: 262035 - DNA, 1668 bp, Artificial Sequence
  derived and/or modified sequence
atggacatgttccccctgacctgggtgttcctggccctgtacttctccagacaccaggtgcgaggtcagcctgatccaccctgcggagggcgcctcaactctaaggatgccggctatataacctcacccggctatccacaggattacccaagtcaccagaattgcgaatggattgtgtatgcccccgaaccgaatcaaaagattgtcctgaactttaatccccacttcgagattgagaagcatgattgtaagtacgattttattgaaattagggatggggactccgaaagtgctgatctactgggcaagcattgcggcaatattgctcctcccaccatcatctccagtgggagtatgctgtacattcgtttcaccagcgactatgctcggcagggcgctggcttttcactccgctacgagattttcaagactggttctgaggattgctctaagaacttcacctccccaaacggtaccatcgagagccccggatttcctgagaagtacccacacaatttagattgcacttttactatccttgccaaaccaaaaatggagatcatcctgcagtttctcatctttgatctggagcatgaccctctgcaggtgggagagggcgactgtaaatacgattggcttgatatatgggacggaatcccacatgtgggccccctcatagggaagtattgtgggaccaagacgccttctgagctacgctcctccaccggaatattgagcctgacctttcatacggacatggcagtggccaaggacggcttctctgcacgctactacctcgttcaccaagagccccttgaaaatttccagtgcaacgttcctctcggcatggaaagcggtaggatcgctaatgaacaaattagtgcaagctcaacatattctgatgggcgttggaccccccagcaaagtaggctacacggcgacgataatggctggacccccaatttggattccaacaaagagtacctacaggtggatctaaggtttcttaccatgctgactgccatcgctactcagggcgcaatttctcgggagacacagaacggatactatgtcaagtcctacaagctcgaggtttccactaacggcgaagattggatggtgtatcggcatggcaaaaaccataaggtgtttcaggccaataacgatgccactgaagtggtgctaaacaagctgcatgcccctctgctgacccgcttcgtgcgaattcgcccacagacgtggcacagtggtattgccttgcgcctggagttgtttgggtgcagggtgacagacgctccgtgtagtaacatgctgggaatgctttcaggacttatcgccgacagtcagatctctgctagctccacccaggaatacctttggagtccatccgccgccaggttggtgtccagccgcagcgggtggttccctcggatcccacaagcacagcctggggaggagtggctgcaggttgacctggggacgcctaagactgttaaaggggtcatcattcagggcgccagagggggggatagcatcacagcagtggaagcccgagctttcgtaagaaaattcaaagtgtcttactcccttaacgggaaagattgggagtacattcaagaccccaggactcagcagcctaaagtggggtgcagctggcgcccactgtag

SEQ ID NO: 262036 - DNA, 1668 bp, Artificial Sequence
  derived and/or modified sequence
atggacatgttccccctgacctgggtgttcctggccctgtacttctccaggcatcaggtgagaggacagccagatccaccctgcggtggtagactgaatagcaaggatgctggatatataacatctccaggctatccccaggattaccccagccaccagaactgtgaatggatcgtgtacgcacctgaaccgaatcagaaaatcgtcttgaattttaatccccacttcgagatcgaaaaacacgattgtaagtatgacttcatagagattcgtgatggcgacagcgaatcggccgatctgctcgggaagcattgtggcaacatcgctccacccaccattatatcaagcggctctatgctatatattcgatttacctccgactatgcgaggcagggcgccggttttagtctacgctacgagatctttaagacaggtagcgaggattgcagcaaaaactttacttcccctaatggaacaatcgagtctcccggctttcccgagaagtaccctcacaatcttgattgtacattcactatcctcgcgaagccaaagatggagataatcctccagtttctcatattcgatctcgaacacgatcctcttcaagtcggggaaggggattgtaaatatgattggctggatatctgggatgggatccctcatgttggaccacttattgggaaatactgtgggactaaaactccctctgaacttcgatccagtaccggcatcctgtcactcacctttcacacggatatggccgtggccaaagacgggttttctgccagatattaccttgtgcaccaggaaccactggaaaattttcagtgcaacgtgcccctggggatggaatccggaagaatcgccaatgaacagatcagcgcctcaagtacctactctgacgggaggtggaccccacagcagagtcggttgcacggggatgataacgggtggactccaaacctcgacagcaataaggagtacctgcaggtggatttaagatttttgacaatgctgacagccatcgcaacccaaggtgctatcagtagagagacacaaaacggctactacgtcaaatcctataagctggaggtttcaactaacggtgaagactggatggtatacagacatggaaaaaatcacaaggtttttcaggccaacaacgacgctactgaagtggtccttaataagctgcatgcaccacttttgacccgctttgtgcggattcggcctcagacttggcattcaggaatcgccctaaggcttgagctgtttgggtgtcgggtcacagacgcaccctgttccaatatgttaggaatgctgtcagggcttatcgcggacagccagatttccgcctctagtactcaggaatacttatggtctccctctgccgctcgcttagtaagctcccgaagcggctggttcccgcgtatcccccaggcgcaaccgggcgaggaatggcttcaagtggacctggggacacccaagactgtgaagggtgtgattatacagggtgcccgcggtggggattctatcactgcagtagaagcccgggcctttgtgcgcaaattcaaggtgagttattcgctaaatggcaaagactgggagtatattcaggacccccggacacagcagcctaaagttggctgtagttggagaccactgtag

SEQ ID NO: 262037 - DNA, 309 bp, Artificial Sequence
  derived and/or modified sequence
atggacatgttccccctgacctgggtgttcctggccctgtacttcagcagacatcaggtgcgaggccaaccggaccctccgtgcggcggacggctgaattccaaagacgctggctatattactagccctggctacccccaggactatccctcacatcagaattgtgagtggatcgtatatgccccggaacccaatcagaagattgtgctgaactttaaccctcatttcgaaatagaaaagcatgactgcaagtacgactttatcgagattagggatggtgatagtgagtcagcagatctgctcgggtag

SEQ ID NO: 262038 - DNA, 1551 bp, Artificial Sequence
  derived and/or modified sequence
gcagagcatgtttgggacataacaaaggatctgagtagtaaacaccgtacgccacccaactcctcttgtaacgccatcgcgcgtggcattgtgttgggttctgcgtgtgtggcatcggagtcgtggaatttagggggaacaaggcttttccccccgtccccccggggtctcccttgggtgggggcgacacggccaaggcggcgcgccctgggggtgcccgggggcgcttcttccccagggcgttacgcaccggcggcccggcgcggaggagctactctcctcctggtgaggtggaaattccagcaagaatagaggtgaagacaagccaccaggactcaggagggaaacgctgaccattagaaacctctgcataagacgttgtaaggaggaaaataaaagagagaaaaacacaaagatttaaacaagaaacctacgaacccagctctggaaagagccaccttctccaaaatggatatgtttcctctcacctgggttttcttagccctctacttttcaagacaccaagtgagaggccaaccagacccaccgtgcggaggtcgtttgaattccaaagatgctggctatatcacctctcccggttacccccaggactacccctcccaccagaactgcgagtggattgtttacgcccccgaacccaaccagaagattgtcctcaacttcaaccctcactttgaaatcgagaagcacgactgcaacttgctgtctgcttggaaaatttcactcacaagccgcagctttgcctgactcagtgcaatccaaggccaccatctctggtgaacttcccttgactcctccctccagccacttgcagaaatgcaaatcctgggcacccacaggctgtttgggggcctgtatagaagctgtgggcagaaaccagaggccactgtggtactgctggactcctgcagccaaaggacaaaagggcgagactacgggccgtctgggcaaacagagagaagccactttattccctgtggagtggaggatgctaggatgttgctgctccggcagacagaggcctttcgcttgagtcatcagccaacagactgaatgttatggttttagaaacccatacacaaagttgagtggttttttccatttctaaaatttaaaatgtatgtatttttaaaacacccacctgcatgtaatacacagcttgttcaggagttctcaaacagccccagcacccaccccatcccagaggctcaaccaaataaaaccaaaaccaggaggctgggtccttttaagcactggtaatttctacctgtaattccagccctttgggaggccgaggcaggcaggtcacctgaggtcaggagttcgagaccagcctggtcaacatggtgaaaccccgtctctactaaaaatacaaaaaaaattagccaagcttggtggtgcgtgcctgtaatctcagctactctggaggctgaggcaggagaatcacttgaacctgggaggcagaggctgcagtgagctgagattgtgccactgcactccggcctgggtgaaagagtgagactctgtctc

SEQ ID NO: 262039 - DNA, 2577 bp, Artificial Sequence
  derived and/or modified sequence
cagagatcgcgagcgaggcaccagcctgcagccggcccccagcacatcctcagccgcacagacactcggcgaggtggaggtgagggcgggcgccagcgaactcggagaggggctcgctcactcccaggcgatcccagccgccaccgccgccgcaccagcagcagcaacagcagcagcagcttccttcctcagactcccctcgagaggctggccaagcgggtgtagccgttgggggaggctcccgccgggggaacccggcgaggacaagagcagggcggccgccttccactcgggctgtccggcggcggctgcctccgcccgtgtgtccgtcaagggtgccgcgggatgtgtgtcagtttacgcctctgagatcacacagctgcctgggggccgtgtgatgcccaaggcaagtcttggttttaattattattattatcattattgttacgcttggctttcgggaaatactcgtgatatttgtaggataaaggaaatgacactttgaggaactggagagaacatatatgcgttttgtttttaagaggaaaaccgtgttctcttcccggcttgttccctctttgctgatttcaggagctactctcctcctggtgaggtggaaattccagcaagaatagaggtgaagacaagccaccaggactcaggagggaaacgctgaccattagaaacctctgcataagacgttgtaaggaggaaaataaaagagagaaaaacacaaagatttaaacaagaaacctacgaacccagctctggaaagagccaccttctccaaaatggatatgtttcctctcacctgggttttcttagccctctacttttcaagacaccaagtgagaggccaaccagacccaccgtgcggaggtcgtttgaattccaaagatgctggctatatcacctctcccggttacccccaggactacccctcccaccagaactgcgagtggattgtttacgcccccgaacccaaccagaagattgtcctcaacttcaaccctcactttgaaatcgagaagcacgactgcaagtatgactttatcgagattcgggatggggacagtgaatccgcagacctcctgggcaaacactgtgggaacatcgccccgcccaccatcatctcctcgggctccatgctctacatcaggttcacctccgactacgcccggcagggggcaggcttctctctgcgctacgagatcttcaagacaggctctgaagattgctcaaaaaacttcacaagccccaacgggaccatcgaatctcctgggtttcctgagaagtatccacacaacttggactgcacctttaccatcctggccaaacccaagatggagatcatcctgcagttcctgatctttgacctggagcatgaccctttgcaggtgggagagggggactgcaagtacgattggctggacatctgggatggcattccacatgttggccccctgattggcaagtactgtgggaccaaaacaccctctgaacttcgttcatcgacggggatcctctccctgacctttcacacggacatggcggtggccaaggatggcttctctgcgcgttactacctggtccaccaagagccactagagaactttcagtgcaatgttcctctgggcatggagtctggccggattgctaatgaacagatcagtgcctcatctacctactctgatgggaggtggacccctcaacaaagccggctccatggtgatgacaatggctggacccccaacttggattccaacaaggagtatctccaggtggacctgcgctttttaaccatgctcacggccatcgcaacacagggagcgatttccagggaaacacagaatggctactatgtcaaatcctacaagctggaagtcagcactaatggagaggactggatggtgtaccggcatggcaaaaaccacaaggtatttcaagccaacaacgatgcaactgaggtggttctgaacaagctccacgctccactgctgacaaggtttgttagaatccgccctcagacctggcactcaggtatcgccctccggctggagctcttcggctgccgggtcacagatgctccctgctccaacatgctggggatgctctcaggcctcattgcagactcccagatctccgcctcttccacccaggaatacctctggagccccagtgcagcccgcctggttagcagccgctcgggctggttccctcgaatccctcaggcccagcccggtgaggagtggcttcaggtagatctgggaacacccaagacagtgaaaggtgtcatcatccagggagcccgcggaggagacagtatcactgctgtggaagccagagcatttgtgcgcaagttcaaagtctcctacagcctaaacggcaaggactgggaatacattcaggaccccaggacccagcagccaaaggtaggctgttcttggaggcctctgtaacgttaccctcaacagggaggctaagtgtggtacagggagttgagactgatgatgtcccatctaaacagtcgtcatccaactcctgaaatccaataaaacaaatatcgtttgagagatt

SEQ ID NO: 262040 - DNA, 2386 bp, Artificial Sequence
  derived and/or modified sequence
cgcgagcgaggcaccagcctgcagccggcccccagcacatcctcagccgcacagacactcggcgaggtggaggtgagggcgggcgccagcgaactcggagaggggctcgctcactcccaggcgatcccagccgccaccgccgccgcaccagcagcagcaacagcagcagcagcttccttcctcagactcccctcgagaggctggccaagcgggtgtagccgttgggggaggctcccgccgggggaacccggcgaggacaagagcagggcggccgccttccactcgggctgtccggcggcggctgcctccgcccgtgtgtccgtcaagggtgccgcgggatgtgtgtcagtttacgcctctgagatcacacagctgcctgggggccgtgtgatgcccaaggagctactctcctcctggtgaggtggaaattccagcaagaatagaggtgaagacaagccaccaggactcaggagggaaacgctgaccattagaaacctctgcataagacgttgtaaggaggaaaataaaagagagaaaaacacaaagatttaaacaagaaacctacgaacccagctctggaaagagccaccttctccaaaatggatatgtttcctctcacctgggttttcttagccctctacttttcaagacaccaagtgagaggccaaccagacccaccgtgcggaggtcgtttgaattccaaagatgctggctatatcacctctcccggttacccccaggactacccctcccaccagaactgcgagtggattgtttacgcccccgaacccaaccagaagattgtcctcaacttcaaccctcactttgaaatcgagaagcacgactgcaagtatgactttatcgagattcgggatggggacagtgaatccgcagacctcctgggcaaacactgtgggaacatcgccccgcccaccatcatctcctcgggctccatgctctacatcaggttcacctccgactacgcccggcagggggcaggcttctctctgcgctacgagatcttcaagacaggctctgaagattgctcaaaaaacttcacaagccccaacgggaccatcgaatctcctgggtttcctgagaagtatccacacaacttggactgcacctttaccatcctggccaaacccaagatggagatcatcctgcagttcctgatctttgacctggagcatgaccctttgcaggtgggagagggggactgcaagtacgattggctggacatctgggatggcattccacatgttggccccctgattggcaagtactgtgggaccaaaacaccctctgaacttcgttcatcgacggggatcctctccctgacctttcacacggacatggcggtggccaaggatggcttctctgcgcgttactacctggtccaccaagagccactagagaactttcagtgcaatgttcctctgggcatggagtctggccggattgctaatgaacagatcagtgcctcatctacctactctgatgggaggtggacccctcaacaaagccggctccatggtgatgacaatggctggacccccaacttggattccaacaaggagtatctccaggtggacctgcgctttttaaccatgctcacggccatcgcaacacagggagcgatttccagggaaacacagaatggctactatgtcaaatcctacaagctggaagtcagcactaatggagaggactggatggtgtaccggcatggcaaaaaccacaaggtatttcaagccaacaacgatgcaactgaggtggttctgaacaagctccacgctccactgctgacaaggtttgttagaatccgccctcagacctggcactcaggtatcgccctccggctggagctcttcggctgccgggtcacagatgctccctgctccaacatgctggggatgctctcaggcctcattgcagactcccagatctccgcctcttccacccaggaatacctctggagccccagtgcagcccgcctggttagcagccgctcgggctggttccctcgaatccctcaggcccagcccggtgaggagtggcttcaggtagatctgggaacacccaagacagtgaaaggtgtcatcatccagggagcccgcggaggagacagtatcactgctgtggaagccagagcatttgtgcgcaagttcaaagtctcctacagcctaaacggcaaggactgggaatacattcaggaccccaggacccagcagccaaaggtaggctgttcttggaggcctctgtaacgttaccctcaacagggaggctaagtgtggtacagggagttgagactgatgatgtcccatctaaacagtcgtcatccaactcctgaaatccaataaaacaaatatcgtttgagagatta

SEQ ID NO: 262041 - DNA, 583 bp, Artificial Sequence
  derived and/or modified sequence
agagatcgcgagcgaggcaccagcctgcagccggcccccagcacatcctcagccgcacagacactcggcgaggtggaggagctactctcctcctggtgaggtggaaattccagcaagaatagaggtgaagacaagccaccaggactcaggagggaaacgctgaccattagaaacctctgcataagacgttgtaaggaggaaaataaaagagagaaaaacacaaagatttaaacaagaaacctacgaacccagctctggaaagagccaccttctccaaaatggatatgtttcctctcacctgggttttcttagccctctacttttcaagacaccaagtgagaggccaaccagacccaccgtgcggaggtcgtttgaattccaaagatgctggctatatcacctctcccggttacccccaggactacccctcccaccagaactgcgagtggattgtttacgcccccgaacccaaccagaagattgtcctcaacttcaaccctcactttgaaatcgagaagcacgactgcaagtatgactttatcgagattcgggatggggacagtgaatccgcagacctcctggg

SEQ ID NO: 262042 - DNA, 300 bp, Artificial Sequence
  derived and/or modified sequence
atggatatgttcccattgacgtgggtcttcctcgcgctgtacttctcaaggcatcaagtaagaggacagcctgatcctccctgcggagggaggctaaactcaaaagacgcaggctacatcacaagcccagggtacccccaggattatccatctcatcagaactgcgaatggatcgtgtatgcgcctgaacccaaccagaagattgtgcttaattttaacccacattttgagatcgagaaacacgactgcaacctgctgagcgcctggaagatcagcctcacttcacgctccttcgcctag

SEQ ID NO: 262043 - DNA, 1668 bp, Artificial Sequence
  derived and/or modified sequence
atggacatgtttccgttaacgtgggtttttctggctctctacttctcgcgtcaccaggtacgaggacaaccagatccaccttgtggcggtcggctgaactcaaaagacgctgggtatattacgtcacccggttatccccaggactatcccagtcatcaaaactgtgaatggatcgtgtacgcccctgaaccaaatcagaaaatcgtgctgaatttcaatcctcactttgaaattgaaaaacacgactgtaaatatgacttcatcgagattcgagacggcgattccgagtccgctgatctcctgggaaagcactgtggcaatatcgctcctcccaccatcatcagtagcggcagcatgttgtacatccgctttacctccgactacgcacgtcagggagccggattttctctaaggtacgaaatcttcaaaactggcagcgaagattgctcgaaaaactttaccagccctaacgggactattgagtcacccggatttccagaaaaatacccccacaatctggactgcactttcaccattttggctaagcccaagatggagataatccttcaattcctcatcttcgatctggaacacgatccattacaagtcggcgaaggcgattgcaagtacgattggctggacatctgggatgggatcccacacgtggggcctctgattggaaagtactgcggaacgaagaccccgtcagaactgcggagtagtacagggatcctgagtctcacttttcacacagatatggccgtggctaaagacgggttctccgccagatattatttggtccaccaagaacccctagaaaacttccagtgtaatgtgcctcttggtatggagtctgggagaattgccaacgagcagatatcggcctctagtacttacagtgacggcaggtggactcctcaacagtctcggctgcatggagatgataacggttggactccaaatctcgatagtaacaaggagtacttacaggtcgatctacgctttttgactatgctcaccgccatcgctacacagggagctatcagcagggagacacaaaatggatactatgtgaagtcgtacaaactggaggttagcacgaacggcgaggattggatggtttaccggcatggcaagaatcacaaagtgtttcaagcaaataacgatgcaactgaagtggtactgaacaaactgcatgctcccttgttgacaaggtttgttagaattaggccccagacgtggcactcgggcatagcgctccggctcgagctcttcggctgtcgcgtcacggacgccccttgcagcaacatgcttggtatgctgagcgggctcatagccgattcacagataagcgcctcctccacgcaggagtacctgtggtctccttccgctgcacgcctggtgagctcaagaagtggctggtttcctcgcatacctcaagctcagccaggtgaagaatggctgcaagtggacctaggcacccctaaaaccgttaagggggtcatcattcagggcgcacggggaggggacagcattaccgctgttgaagctagagcctttgtccggaagtttaaggtgagctatagtttgaacggcaaggattgggaatacatccaggacccccgaactcaacagccaaaggtggggtgtagctggagaccattgtag

SEQ ID NO: 262044 - DNA, 1668 bp, Artificial Sequence
  derived and/or modified sequence
atggacatgttccccctcacatgggtgtttctcgccctatatttctcacgccaccaagtgcggggacaacccgacccaccttgtgggggaaggttgaactccaaagatgcgggttatattacttccccgggatatccgcaggattacccaagccatcagaactgtgaatggatcgtgtatgctccagaacccaatcagaagattgtgcttaatttcaacccccactttgaaatcgagaaacatgactgcaagtatgactttatcgaaattcgcgacggagattcagaaagtgcggatctgctcgggaaacactgtggtaacatcgccccacctacaattatcagcagcggatccatgctgtatattaggttcacctccgactatgctaggcagggtgccggattctctttgcggtacgagatcttcaagaccggcagcgaagattgctcaaagaacttcacaagccccaacggtacaattgaatcacctggattccccgagaagtacccacacaatctcgactgtactttcacgatactggcgaagcctaaaatggagatcattctgcagtttctgatatttgaccttgaacacgaccctctccaggtcggagagggggattgtaagtacgattggctggacatttgggacggtattccacacgtggggcctctgataggaaaatactgtggcacgaaaacaccttccgaactgcgatcaagcactggcattctttccctaacgttccacacggatatggccgtcgcaaaagatggattcagcgccaggtactacctagtacaccaagaaccactggagaactttcagtgcaacgtgcccctcggaatggaaagcgggaggatagccaatgagcagatcagcgcttcctccacatacagcgatgggaggtggacaccccaacagagcagactgcacggggatgataatgggtggacgccaaacctggacagtaacaaggaatatttgcaggtggatttgaggttcttgaccatgttgacagccattgctactcagggcgcaatttcaagggagacgcagaatggctactacgttaagtcctataaactagaggtgtccaccaatggagaggactggatggtataccggcacggtaaaaaccacaaagtgtttcaggcaaataatgacgctacggaggtggtgctcaacaaactacacgccccactgttgaccagatttgtccgtatccggcctcagacctggcactccgggattgcgctgaggttagagctgttcggatgcagggtgactgatgctccgtgctccaacatgttaggtatgctgagcggtcttatagccgacagccaaatatccgccagctctactcaggaatatctctggtccccatccgctgccaggctggtttcatctagatcgggttggtttccccgtatcccacaggcacagccaggcgaggaatggctgcaggtggatttgggaaccccaaagaccgtgaagggggtgatcattcagggcgctagagggggagacagtatcactgcagttgaggcacgggctttcgtgagaaaattcaaggtcagttattctttgaacggcaaggactgggagtacatccaggatcccaggacccagcaacctaaagtgggctgctcttggaggcctctgtag

SEQ ID NO: 262045 - DNA, 309 bp, Artificial Sequence
  derived and/or modified sequence
atggatatgtttcccctgacttgggtgttcctggccctgtatttctcgcggcaccaggtgcggggtcagccagacccaccttgcggagggcgtctgaactccaaagacgccggttatattacatctccgggttatccccaggattacccgagccaccagaactgtgaatggattgtctatgcccctgagcccaaccagaagatcgtgctgaacttcaacccacactttgagatagagaaacacgactgcaagtacgattttatagagatccgagacggcgattctgagtcagccgacctccttgggtag

SEQ ID NO: 262046 - protein, 931 aa, Artificial Sequence
  derived and/or modified sequence
MDMFPLTWVFLALYFSRHQVRGQPDPPCGGRLNSKDAGYITSPGYPQDYPSHQNCEWIVYAPEPNQKIVLNFNPHFEIEKHDCKYDFIEIRDGDSESADLLGKHCGNIAPPTIISSGSMLYIRFTSDYARQGAGFSLRYEIFKTGSEDCSKNFTSPNGTIESPGFPEKYPHNLDCTFTILAKPKMEIILQFLIFDLEHDPLQVGEGDCKYDWLDIWDGIPHVGPLIGKYCGTKTPSELRSSTGILSLTFHTDMAVAKDGFSARYYLVHQEPLENFQCNVPLGMESGRIANEQISASSTYSDGRWTPQQSRLHGDDNGWTPNLDSNKEYLQVDLRFLTMLTAIATQGAISRETQNGYYVKSYKLEVSTNGEDWMVYRHGKNHKVFQANNDATEVVLNKLHAPLLTRFVRIRPQTWHSGIALRLELFGCRVTDAPCSNMLGMLSGLIADSQISASSTQEYLWSPSAARLVSSRSGWFPRIPQAQPGEEWLQVDLGTPKTVKGVIIQGARGGDSITAVEARAFVRKFKVSYSLNGKDWEYIQDPRTQQPKLFEGNMHYDTPDIRRFDPIPAQYVRVYPERWSPAGIGMRLEVLGCDWTDSKPTVETLGPTVKSEETTTPYPTEEEATECGENCSFEDDKDLQLPSGFNCNFDFLEEPCGWMYDHAKWLRTTWASSSSPNDRTFPDDRNFLRLQSDSQREGQYARLISPPVHLPRSPVCMEFQYQATGGRGVALQVVREASQESKLLWVIREDQGGEWKHGRIILPSYDMEYQIVFEGVIGKGRSGEIAIDDIRISTDVPLENCMEPISAFAGENFKVDIPEIHEREGYEDEIDDEYEVDWSNSSSATSGSGAPSTDKEKSWLYTLDPILITIIAMSSLGVLLGATCAGLLLYCTCSYSGLSSRSCTTLENYNFELYDGLKHKVKMNHQKCCSEA

SEQ ID NO: 262047 - DNA, 2796 bp, Artificial Sequence
  derived and/or modified sequence
atggacatgttccccctgacctgggtgttcctggccctgtacttcagcagacaccaggtgagaggccagcccgaccccccctgcggcggcagactgaacagcaaggacgccggctacatcaccagccccggctacccccaggactaccccagccaccagaactgcgagtggatcgtgtacgcccccgagcccaaccagaagatcgtgctgaacttcaacccccacttcgagatcgagaagcacgactgcaagtacgacttcatcgagatcagagacggcgacagcgagagcgccgacctgctgggcaagcactgcggcaacatcgccccccccaccatcatcagcagcggcagcatgctgtacatcagattcaccagcgactacgccagacagggcgccggcttcagcctgagatacgagatcttcaagaccggcagcgaggactgcagcaagaacttcaccagccccaacggcaccatcgagagccccggcttccccgagaagtacccccacaacctggactgcaccttcaccatcctggccaagcccaagatggagatcatcctgcagttcctgatcttcgacctggagcacgaccccctgcaggtgggcgagggcgactgcaagtacgactggctggacatctgggacggcatcccccacgtgggccccctgatcggcaagtactgcggcaccaagacccccagcgagctgagaagcagcaccggcatcctgagcctgaccttccacaccgacatggccgtggccaaggacggcttcagcgccagatactacctggtgcaccaggagcccctggagaacttccagtgcaacgtgcccctgggcatggagagcggcagaatcgccaacgagcagatcagcgccagcagcacctacagcgacggcagatggaccccccagcagagcagactgcacggcgacgacaacggctggacccccaacctggacagcaacaaggagtacctgcaggtggacctgagattcctgaccatgctgaccgccatcgccacccagggcgccatcagcagagagacccagaacggctactacgtgaagagctacaagctggaggtgagcaccaacggcgaggactggatggtgtacagacacggcaagaaccacaaggtgttccaggccaacaacgacgccaccgaggtggtgctgaacaagctgcacgcccccctgctgaccagattcgtgagaatcagaccccagacctggcacagcggcatcgccctgagactggagctgttcggctgcagagtgaccgacgccccctgcagcaacatgctgggcatgctgagcggcctgatcgccgacagccagatcagcgccagcagcacccaggagtacctgtggagccccagcgccgccagactggtgagcagcagaagcggctggttccccagaatcccccaggcccagcccggcgaggagtggctgcaggtggacctgggcacccccaagaccgtgaagggcgtgatcatccagggcgccagaggcggcgacagcatcaccgccgtggaggccagagccttcgtgagaaagttcaaggtgagctacagcctgaacggcaaggactgggagtacatccaggaccccagaacccagcagcccaagctgttcgagggcaacatgcactacgacacccccgacatcagaagattcgaccccatccccgcccagtacgtgagagtgtaccccgagagatggagccccgccggcatcggcatgagactggaggtgctgggctgcgactggaccgacagcaagcccaccgtggagaccctgggccccaccgtgaagagcgaggagaccaccaccccctaccccaccgaggaggaggccaccgagtgcggcgagaactgcagcttcgaggacgacaaggacctgcagctgcccagcggcttcaactgcaacttcgacttcctggaggagccctgcggctggatgtacgaccacgccaagtggctgagaaccacctgggccagcagcagcagccccaacgacagaaccttccccgacgacagaaacttcctgagactgcagagcgacagccagagagagggccagtacgccagactgatcagcccccccgtgcacctgcccagaagccccgtgtgcatggagttccagtaccaggccaccggcggcagaggcgtggccctgcaggtggtgagagaggccagccaggagagcaagctgctgtgggtgatcagagaggaccagggcggcgagtggaagcacggcagaatcatcctgcccagctacgacatggagtaccagatcgtgttcgagggcgtgatcggcaagggcagaagcggcgagatcgccatcgacgacatcagaatcagcaccgacgtgcccctggagaactgcatggagcccatcagcgccttcgccggcgagaacttcaaggtggacatccccgagatccacgagagagagggctacgaggacgagatcgacgacgagtacgaggtggactggagcaacagcagcagcgccaccagcggcagcggcgcccccagcaccgacaaggagaagagctggctgtacaccctggaccccatcctgatcaccatcatcgccatgagcagcctgggcgtgctgctgggcgccacctgcgccggcctgctgctgtactgcacctgcagctacagcggcctgagcagcagaagctgcaccaccctggagaactacaacttcgagctgtacgacggcctgaagcacaaggtgaagatgaaccaccagaagtgctgcagcgaggcctag

SEQ ID NO: 262048 - DNA, 2796 bp, Artificial Sequence
  derived and/or modified sequence
atggacatgttcccgttaacgtgggtctttcttgcgctctacttctccaggcatcaagtgcggggccagcccgaccctccttgcggaggacgactaaattctaaggatgcagggtatattactagtcccggctatccacaggattatccgagccaccagaactgcgaatggatagtgtacgcaccagaacccaatcagaaaattgtcctgaattttaatccacattttgaaatagagaagcacgattgcaagtacgactttatcgagatacgggacggtgacagtgaatcagcagatttactcggtaaacactgtggcaatatagctcccccgaccatcatctcatccggttctatgttgtatatcaggttcaccagcgactatgcgcgccagggcgccgggttctcactgaggtacgaaatcttcaagaccggctctgaagattgctccaagaactttacttctccaaatggaacaattgaatcaccagggttccctgagaagtatccccataacttagattgtacgtttacgatccttgccaaacccaagatggagattattctgcagttcctaatttttgatcttgagcacgatcctttacaggtgggggagggagactgtaagtacgattggctcgacatctgggacgggattccccatgtgggacccttgatcggaaagtactgcggcacgaaaactccttctgagttgcgttcttctacaggaatcctgtctttaactttccatacggacatggcagtagccaaagatggctttagcgcgcgatactatctagtgcaccaagagcccctggaaaactttcagtgtaacgtcccccttggcatggaatccgggcgcatagccaatgagcaaatcagtgcttcttcgacctactccgacggaagatggaccccccagcagtccaggctgcacggtgacgataacggctggacacccaatctagactcgaataaggagtatctccaggtcgacctgcgcttcttgacaatgctcacagcgattgccacacaaggtgccatctctagagagacacagaatggatactacgtgaaaagctacaaactggaagtgagtaccaatggcgaagattggatggtttacagacatggaaaaaaccataaagtgttccaggccaataacgacgctactgaagtggtactgaacaaactgcacgcacctcttcttaccagattcgtgagaatccgccctcagacttggcattccgggatcgcgctgaggctcgagctcttcggctgccgagttactgatgccccctgctcaaatatgctgggtatgctttctggcctcatagccgatagtcagataagcgctagttcgacccaagaatatctgtggtcaccttccgcagcccggctcgtgagctcccggtcgggctggttccctcgcattcctcaggcccaaccgggcgaagagtggctgcaagtagatttagggaccccaaagaccgtcaagggagttataattcaaggtgcacgcgggggcgactccatcactgcggtagaagcacgcgccttcgtgagaaaatttaaggtgagctatagccttaatggcaaagactgggagtatatccaggatccacggacgcaacagcccaaactcttcgagggaaacatgcattacgacactcctgacattcgccggtttgatcccattccagctcagtatgtgagagtgtaccccgaacgttggtcacccgctggcataggcatgagactggaagttttggggtgtgactggacagattcgaaacctacagttgaaaccctgggaccgaccgtgaaaagtgaagagacaacaactccatatcctaccgaggaagaagcaaccgagtgcggcgaaaattgctctttcgaggacgataaggacttacagctgccatcagggttcaactgtaacttcgactttctggaggagccttgcggctggatgtatgaccacgccaaatggcttaggactacatgggccagctccagcagtcccaatgatagaacttttcctgacgatcgtaattttctcaggctgcaaagcgattcccaacgcgagggccaatatgcaagattgatcagcccacctgtccatctgccaagatccccagtgtgcatggaattccagtatcaggctaccggtgggagaggcgtagccctgcaagttgttagagaggcatcccaggagagtaaactcctatgggtgatccgggaggatcagggcggtgaatggaaacatgggcgcatcatcctcccttcctacgacatggagtatcagattgtgtttgagggtgtaatcgggaaggggcgatcaggagagatagctattgacgatataagaataagcactgatgtgcccctcgaaaactgtatggaacccatttccgcttttgccggagagaatttcaaggtggacatacccgagatccacgagcgcgagggctatgaagatgaaatagacgatgagtacgaagtcgattggtccaatagctcaagcgcaacctccggatcgggggcacccagtactgacaaagagaaatcctggctgtatacacttgatcccattttaataacaataatcgccatgagctctctgggcgttcttctgggagccacatgcgcgggacttctactatattgtacctgttcatactctggcttgtcgtcccggagctgcacaactctggaaaattacaactttgagttatacgacggcctaaagcataaagtgaagatgaaccaccagaagtgttgtagcgaagcttag

SEQ ID NO: 262049 - DNA, 2796 bp, Artificial Sequence
  derived and/or modified sequence
atggacatgttccccctgacctgggtgttcctggccctgtacttcagccgccaccaggtgcggggccagcctgaccccccctgtggcggccgcctgaacagcaaggatgctggctacatcaccagccctggctacccccaggactaccccagccaccagaactgtgagtggatcgtgtatgcccctgagcccaaccagaagatcgtgctgaacttcaacccccactttgaaattgagaagcatgactgcaagtatgacttcatcgagatcagagatggagacagcgagagcgctgacctgctgggcaagcactgcggcaacatcgccccacccaccatcatcagcagcggctccatgctgtacatccgcttcaccagtgactatgcccggcagggcgccggcttcagcctgcgctatgagatcttcaagacaggcagcgaggactgcagcaagaacttcaccagccccaacggcaccatcgagagccctggcttccctgagaagtacccccacaacctggactgcaccttcaccatcctggccaagcccaagatggagatcatcctgcagttcctgatctttgacctggagcatgaccccctgcaggtgggggagggggactgcaagtatgactggctggacatctgggatggcatcccccacgtgggccccctcatcggcaagtactgcggcaccaagacccccagcgagctgcggagcagcacaggcatcctgagcctgaccttccacacagacatggctgtggccaaggatggcttcagcgcccgctactacctggtgcaccaggagcccctggagaacttccagtgcaatgtgcccctgggcatggagagcggccgcatcgccaatgagcagatcagcgccagcagcacctacagtgatggccgctggaccccccagcagagccggctgcatggagatgacaatggctggacccccaacctggacagcaacaaggagtacctgcaggtggacctgcgcttcctgaccatgctgacagccatcgccacccagggcgccatcagccgggagacccagaatggctactacgtgaagagctacaagctggaggtgtccaccaacggggaggactggatggtgtacagacatggcaagaaccacaaggtgttccaggccaacaatgatgccacagaggtggtgctgaacaagctgcacgcccccctgctgaccaggtttgtgcgcatccggccccagacctggcacagcggcatcgccctgcggctggagctgtttggctgccgggtgacagatgccccctgcagcaacatgctgggcatgctgagcggcctgattgctgacagccagatcagcgccagcagcacccaggagtacctgtggagccccagcgctgcccggctggtgagcagccgcagcggctggttcccccgcatcccccaggcccagcctggagaggagtggctgcaggtggacctgggcacccccaagacagtgaagggcgtcatcatccagggcgcccggggcggggacagcatcacagctgtggaggcccgggcctttgtgaggaagttcaaggtgtcctacagcctgaatggcaaggactgggagtacatccaggaccccaggacccagcagcccaagctgtttgagggcaacatgcactatgacaccccagacatcagaagatttgaccccatcccagcccagtatgtgcgggtgtacccagagcgctggagccctgctggcatcggcatgaggctggaggtgctgggctgtgactggacagacagcaagcccaccgtggagaccctgggccccaccgtgaagtctgaggagaccaccaccccctaccccacagaggaggaggccacagaatgtggggagaactgcagctttgaagatgacaaggacctgcagctgcccagcggcttcaactgcaactttgacttcctggaggagccctgtggctggatgtatgaccacgccaagtggctgcggaccacctgggccagcagcagcagccccaatgacaggaccttcccagatgacaggaacttcctgcggctgcagagcgacagccagcgggagggccagtatgcccggctcatcagcccccctgtgcacctgcccaggagccctgtgtgcatggagttccagtaccaggccactggaggccggggcgtggccctgcaggtggtgcgggaggccagccaggagagcaagctgctgtgggtgatccgggaggaccagggcggggagtggaagcacggccgcatcatcctgcccagctatgacatggagtaccagatcgtgtttgagggcgtcatcggcaagggccgctctggagagatcgccattgatgacatccgcatcagcacagatgtgcccctggagaactgcatggagcccatcagcgcctttgctggggagaacttcaaggtggacatccctgagatccacgagcgggagggctatgaagatgaaattgatgatgaatatgaggtggactggagcaacagcagcagcgccaccagcggcagcggggcccccagcacagacaaggagaagtcctggctgtacaccctggaccccatcctgatcaccatcatcgccatgagcagcctgggcgtgctgctgggcgccacctgtgccggcctgctgctgtactgcacctgcagctacagcggcctgagcagccgcagctgcaccaccctggagaactacaactttgagctgtatgatggcctgaagcacaaggtgaagatgaaccaccagaagtgctgcagcgaggcctag

SEQ ID NO: 262050 - DNA, 2796 bp, Artificial Sequence
  derived and/or modified sequence
atggacatgttccccctgacctgggtgttcctggccctgtacttcagccgacaccaggttcgaggccagcccgatcccccttgtggagggcgcttgaattcgaaggatgctgggtacattacatccccgggatacccacaggattatccaagccatcaaaactgtgagtggattgtatacgcaccagagcccaaccagaaaattgttcttaattttaacccgcattttgagattgaaaaacacgactgtaaatacgactttattgaaatccgcgacggcgactccgaatccgctgatctgctgggaaaacattgtggcaatatagccccaccaaccattatttcctccgggagtatgctgtacatccgctttaccagcgactacgctcgacagggagctggcttctcccttagatacgaaatcttcaaaaccggaagcgaggattgcagcaagaacttcacgtcaccaaacggaaccattgaatccccaggattccccgagaaatatccgcataatctagactgtacattcacaatactggctaaaccaaagatggaaattattcttcagttcctgatctttgacctggaacacgaccctttgcaagtgggcgagggggactgcaaatacgactggctagacatttgggacggtatcccgcacgtggggcctttgatcggcaagtattgcggcacaaagacaccatcagaactcagatctagtactggaatcctttcactaacttttcacactgatatggcggtcgctaaggacgggttttctgctaggtattatctcgtgcaccaggaacccctggagaatttccagtgtaacgtgcccctcggcatggaaagtggacgcattgccaacgagcaaatcagtgcttcatcgacttactccgatggtcgctggaccccccaacagagcaggctacacggggatgataacggatggactccaaatctggattcaaacaaagagtatttacaggtagacctgaggttcctcaccatgctgacggcaatagcaacgcagggagccatcagccgtgagacacaaaacggctactatgtgaaatcatacaagcttgaggtatccacgaatggggaagattggatggtttaccgtcatggtaaaaaccacaaggtgttccaagccaataacgacgccactgaggtggtcctgaacaaactccatgctcctctcctgacaaggtttgttaggattaggccccagacatggcactccggaatcgccctgagactggagctttttggctgccgggtaaccgatgcgccatgtagcaatatgctcggaatgctcagcgggctgatagcagatagccagatttccgcctccagcacgcaggagtacctctggagcccctctgccgccagactggtcagttcccgatcagggtggttcccgcgcatcccccaagcgcaacccggggaggagtggttgcaggtggatctgggaacgcccaaaaccgtgaaaggcgtaatcatacagggggcacggggaggcgatagcatcaccgccgtcgaggcaagggctttcgtcagaaagttcaaggtgagctatagcctgaatgggaaggactgggaatacattcaggaccctcgcactcagcagcctaaactttttgaggggaacatgcactacgacacaccagatattcgcagatttgatcctattcccgcccaatacgtccgggtgtatccggagagatggtccccagcaggcatcggcatgcgactcgaagtgctgggctgcgattggacagactcaaaacctacagtagaaactcttggccctactgtaaaatcagaagagaccactactccataccctacagaggaggaagcgacagagtgcggcgagaactgctcttttgaggatgataaagacctgcagctaccctctggatttaactgcaatttcgatttccttgaagaaccgtgtgggtggatgtacgatcatgcgaagtggctacgcacaacgtgggcatcctcttccagcccaaatgatcgcacctttccagacgatagaaattttctgcgcttacagagtgacagtcagagagagggccaatatgccaggctcatatccccgccagtgcaccttcctagatctccggtgtgcatggaattccagtatcaggcaactggcggcaggggtgtggccttgcaggtagtgagggaagcttctcaggagtctaagctcctatgggtgatcagggaagatcaggggggcgagtggaagcacggccggatcatactgcctagctatgatatggagtaccagattgtgtttgagggtgtcattggcaagggccgctccggggagattgctatcgacgatatccggatttctactgacgtgcccctcgagaactgcatggaacctatatccgcctttgcaggagagaattttaaggtggacatccccgagattcacgaaagggaaggttatgaagacgagatcgacgacgagtatgaggtagattggagtaactcatcgagtgctaccagtggctctggcgcaccttcaacagacaaggagaagtcatggctctacaccctcgaccccatccttattactatcatcgccatgagctcccttggcgtgttactcggcgctacctgcgctggactgcttttatattgtacttgtagctattccggcttgtcaagccgcagctgcacaaccttggagaactacaatttcgagctgtatgatggattgaaacataaagttaagatgaatcaccaaaagtgctgttccgaagcctag

SEQ ID NO: 262051 - DNA, 6662 bp, Artificial Sequence
  derived and/or modified sequence
cagagatcgcgagcgaggcaccagcctgcagccggcccccagcacatcctcagccgcacagacactcggcgaggtggaggtgagggcgggcgccagcgaactcggagaggggctcgctcactcccaggcgatcccagccgccaccgccgccgcaccagcagcagcaacagcagcagcagcttccttcctcagactcccctcgagaggctggccaagcgggtgtagccgttgggggaggctcccgccgggggaacccggcgaggacaagagcagggcggccgccttccactcgggctgtccggcggcggctgcctccgcccgtgtgtccgtcaagggtgccgcgggatgtgtgtcagtttacgcctctgagatcacacagctgcctgggggccgtgtgatgcccaaggcaagtcttggttttaattattattattatcattattgttacgcttggctttcgggaaatactcgtgatatttgtaggataaaggaaatgacactttgaggaactggagagaacatatatgcgttttgtttttaagaggaaaaccgtgttctcttcccggcttgttccctctttgctgatttcaggagctactctcctcctggtgaggtggaaattccagcaagaatagaggtgaagacaagccaccaggactcaggagggaaacgctgaccattagaaacctctgcataagacgttgtaaggaggaaaataaaagagagaaaaacacaaagatttaaacaagaaacctacgaacccagctctggaaagagccaccttctccaaaatggatatgtttcctctcacctgggttttcttagccctctacttttcaagacaccaagtgagaggccaaccagacccaccgtgcggaggtcgtttgaattccaaagatgctggctatatcacctctcccggttacccccaggactacccctcccaccagaactgcgagtggattgtttacgcccccgaacccaaccagaagattgtcctcaacttcaaccctcactttgaaatcgagaagcacgactgcaagtatgactttatcgagattcgggatggggacagtgaatccgcagacctcctgggcaaacactgtgggaacatcgccccgcccaccatcatctcctcgggctccatgctctacatcaggttcacctccgactacgcccggcagggggcaggcttctctctgcgctacgagatcttcaagacaggctctgaagattgctcaaaaaacttcacaagccccaacgggaccatcgaatctcctgggtttcctgagaagtatccacacaacttggactgcacctttaccatcctggccaaacccaagatggagatcatcctgcagttcctgatctttgacctggagcatgaccctttgcaggtgggagagggggactgcaagtacgattggctggacatctgggatggcattccacatgttggccccctgattggcaagtactgtgggaccaaaacaccctctgaacttcgttcatcgacggggatcctctccctgacctttcacacggacatggcggtggccaaggatggcttctctgcgcgttactacctggtccaccaagagccactagagaactttcagtgcaatgttcctctgggcatggagtctggccggattgctaatgaacagatcagtgcctcatctacctactctgatgggaggtggacccctcaacaaagccggctccatggtgatgacaatggctggacccccaacttggattccaacaaggagtatctccaggtggacctgcgctttttaaccatgctcacggccatcgcaacacagggagcgatttccagggaaacacagaatggctactatgtcaaatcctacaagctggaagtcagcactaatggagaggactggatggtgtaccggcatggcaaaaaccacaaggtatttcaagccaacaacgatgcaactgaggtggttctgaacaagctccacgctccactgctgacaaggtttgttagaatccgccctcagacctggcactcaggtatcgccctccggctggagctcttcggctgccgggtcacagatgctccctgctccaacatgctggggatgctctcaggcctcattgcagactcccagatctccgcctcttccacccaggaatacctctggagccccagtgcagcccgcctggttagcagccgctcgggctggttccctcgaatccctcaggcccagcccggtgaggagtggcttcaggtagatctgggaacacccaagacagtgaaaggtgtcatcatccagggagcccgcggaggagacagtatcactgctgtggaagccagagcatttgtgcgcaagttcaaagtctcctacagcctaaacggcaaggactgggaatacattcaggaccccaggacccagcagccaaagctgttcgaagggaacatgcactatgacacccctgacatccgaaggtttgaccccattccggcacagtatgtgcgggtatacccggagaggtggtcgccggcggggattgggatgcggctggaggtgctgggctgtgactggacagactccaagcccacggtagagacgctgggacccactgtgaagagcgaagagacaaccaccccctaccccaccgaagaggaggccacagagtgtggggagaactgcagctttgaggatgacaaagatttgcagctcccttcgggattcaattgcaacttcgatttcctcgaggagccctgtggttggatgtatgaccatgccaagtggctccggaccacctgggccagcagctccagcccaaacgaccggacgtttccagatgacaggaatttcttgcggctgcagagtgacagccagagagagggccagtatgcccggctcatcagcccccctgtccacctgccccgaagcccggtgtgcatggagttccagtaccaggccacgggcggccgcggggtggcgctgcaggtggtgcgggaagccagccaggagagcaagttgctgtgggtcatccgtgaggaccagggcggcgagtggaagcacgggcggatcatcctgcccagctacgacatggagtaccagattgtgttcgagggagtgatagggaaaggacgttccggagagattgccattgatgacattcggataagcactgatgtcccactggagaactgcatggaacccatctcggcttttgcaggtgagaattttaaagtggacatcccagaaatacatgagagagaaggatatgaagatgaaattgatgatgaatacgaggtggactggagcaattcttcttctgcaacctcagggtctggcgccccctcgaccgacaaagaaaagagctggctgtacaccctggatcccatcctcatcaccatcatcgccatgagctcactgggcgtcctcctgggggccacctgtgcaggcctcctgctctactgcacctgttcctactcgggcctgagctcccgaagctgcaccacactggagaactacaacttcgagctctacgatggccttaagcacaaggtcaagatgaaccaccaaaagtgctgctccgaggcatgacggattgcacctgaatcctatctgacgtttcattccagcaagaggggctggggaagattacatttttttttcctttggaaactgaatgccataatctcgatcaaaccgatccagaataccgaaggtatggacaggacagaaaagcgagtcgcaggaggaagggagatgcagccgcacaggggatgattaccctcctaggaccgcggtggctaagtcattgcaggaacggggctgtgttctctgctgggacaaaacaggagctcatctctttggggtcacagttctattttgtttgtgagtttgtattattattattattattattattattatattttatttctttggtctgtgagcaactcaaagaggcagaagaggagaatgacttttccagaatagaagtggagcagtgatcattattctccgctttctctttctaatcaacacttgaaaagcaaagtgtcttttcagcctttccatctttacaaataaaactcaaaaaagccgtccagcttatcccatcctctgattgtcttctgacttaagggatttactgtggtgtaggttctgccagccaaccctacaagctgccatttccagtcctagcatttaagtaggatgttgttgcctttaacttttcttatccaggggaaaattgccattttagggtcagcatgaacagctctttcttgtatgcgatttaaaacaaactggaaaggaaacttcacacgtcaaaatccatagaagcgcctggacgaggcttaaagtgctttgtgagtgaataggagccattcgctaattctagacccacagtgtctggtggtggggcttcccttgtggggcttctggtggtggttttgccttttcttttccctcctccatgttcttctaaaacatatacatatatacatacacacatacacatattcttcaggtctctaagcccctggaagcagcattgtgtgatattctcagaggcaggggaaaatagagggaaaaatagagactattggtatgttctccccatcagcgagttattgtaactggtcaccactggacgggaaggagaacagaggagagggaaagagaagcccaacctctgtgatcatatgagggccaaggctgagcagtgtagacagagaccctttgaaatgcatttgtctctcaaatagactagtaaacaccgacttctcctttgggttacaaacaccatttcaacctttcgggagagtcagagctaggatgtacaagaactgattctaaccagaagtccgcaagtactgtggacaagaatgcttaaccatgctgcttcagccttgagagacctaggttcttacacatatgcacacacgcatacacacatgcacgcacacacacatacacacatgcacgcacgcacgcatgcacaccaatttatgtttttattaagtgccttgaaaaaatgaagaaaaatgtattttccctttatgtaaaaattagtgaatatcttatgaattaaggcattcctctttccctaaccccgatggctccattcccaagtaccccaactcactgctgatcctattaaaggaatgagtcctgctacccgagtggtagtcatagccctagatgactctcaactactcttcaaagggaggcatcaggaatagaatgaaactgtgtgaaggataagattgttcgcatcaagatccaaatcttgatttcatattaacgcctaaggattgcctgtgtgctggaaatatatttgaaactcaaccagtatgcccagcctattgcatatcattgtcagaccatttttgctgctgtggtcacccacgatttcatttgtcttatacccaggtgaaaggggaagggtgaatgggactggctggttcctttaaatgttaacttatggaaatgctagttcaaatggtaatgtcacagtgttttgtatgcagagagcaagagttcaaccaacagctgtttattcatgtgtgtgtgtctttgctgctttgagttctctgtatctactgtgtatgtgaatggtcatgtgggactcagtggtggtgttgtgactttgacctagggtccgagtgtcacagctgatcttggcactcggcactcattggcacagtggtagttagaggtgaaaagtagagctgtcaagcccaagggcttagctttagggctcctcctgagttcggcccacagtagaagcaagattttaactagccccttttcctcttcaccctcccatgatgcgcagtgttcagaaagctggtaagtcctagggatttccagaagtagcctgcagaagaaggtaagtttgaaagccactccaggggtcctgatgctgtcatgctcagtgagccattttacagttctccaaagtctagccctgtttcggacctgcacttcacctctaagttatgtacaactcaacctgcatccctctaaaagtcctatatccatattcaccattggctaatttgaggccctgagtgggccttgaatgctaaaaagaagcagggtacgcagggctacatgtagataccacaccaaggctggaggctggtctgtcataagacagaaagaaagacgctgggcccaattttgacttggccaggggacaccttggtgtgtttgttatctttatctgtgggtaggctagctgacccatctccttgagtcattccctttgggaaaccccactgccagtattgatctcctttttgccttgtactgaatgacacattacctccacactctcccggactaggtggtcaacagggccacagggttgctttctgtctttggtggggcaggggagttgacagggatgagggtccaaggaataagcatgaatgacaagaaaacaagggaaagagttaacctgtcacatagcaggttaactttttcagggtttgcagttagaggtattcgaccattcactggctgagccagatcacgggaacttgagagcttttactgtgattcttcaatgtaaaaaataaacaacaatgtcaaactgtgtttatatgatttgtataaagcctttttaagattactatttaaataaacattataccagagata

SEQ ID NO: 262052 - DNA, 2796 bp, Artificial Sequence
  derived and/or modified sequence
atggacatgttccctctgacatgggtctttctggctctgtacttctcccgacaccaggtccggggacagccagatcctccttgtggtgggagactgaactcgaaggacgccggatatatcacctccccaggatacccgcaggattaccccagtcaccaaaactgtgaatggattgtgtacgcgccagaacctaatcagaaaattgtccttaattttaatccgcattttgagatcgagaagcatgattgcaagtatgatttcatcgagattagagacggcgatagtgagtccgccgacctgctaggcaaacattgcggaaatatcgcacctccaactattatctctagcggctctatgctatacataaggttcacctcagactatgctaggcaaggagctggattcagcctacggtacgagatcttcaagacagggtccgaagattgttcgaagaattttacatctcctaacggcacaatcgaatcccctgggttcccagagaagtaccctcacaatctggattgtacgttcacaattctcgcgaagcccaaaatggagattatcctacagttcttgattttcgacctggaacacgatcccctgcaggtgggtgaaggcgactgcaaatacgattggttagacatctgggacggcattcctcacgtaggtcccctgatcggaaagtactgtggaacaaaaacgccctccgagttacgctcttctaccggcatcctatcactcacctttcacacggacatggctgtggctaaagatggcttctctgccaggtactatcttgtccatcaggagcctctcgaaaactttcagtgcaatgtaccgcttggcatggagtccggccgtattgctaacgagcagatatctgcctcttccacctacagcgacggcaggtggacaccacagcagtcccgcctgcacggtgatgacaatggctggacacctaacctggatagcaataaagagtaccttcaagtggatctcaggttcctcacaatgcttaccgcaatcgctactcagggtgctatctcacgtgaaacccagaatgggtattatgtcaaatcatacaaacttgaagtgtccaccaatggagaagactggatggtatacagacatgggaaaaaccacaaggtgtttcaggccaacaatgacgcaactgaagtggttctgaataaactgcacgcacccctactgacaaggttcgtccggattagaccccagacttggcacagtggtatagcacttcgcctcgaattgttcggttgcagggtcaccgatgcaccttgctcaaacatgttgggaatgttgtcaggacttattgccgatagtcagatatccgcttctagcacccaggaatatctgtggtccccttctgccgcaagattggtgtcttcaaggtcaggctggtttccgaggattcctcaggcccaacctggggaagagtggctgcaggtcgatctgggaacccccaagactgtaaagggggtgattattcagggagctcggggaggggacagtattactgctgtagaggcgagggcttttgtccggaagttcaaggtcagttactctctaaacgggaaagattgggaatacattcaggatccccgaactcagcagccgaagctgtttgaaggaaatatgcactatgacacgcccgatattcggcgtttcgaccccattccggcacagtacgtgcgcgtttaccccgaaaggtggagtcctgcagggataggcatgcgacttgaggtgctcgggtgtgactggacagactccaagccaactgtggagacactcggtcctaccgttaagtccgaggaaacaacaaccccataccctactgaggaagaagccacagagtgcggagaaaattgttctttcgaggacgacaaagacctccagctgccatctggctttaattgcaatttcgactttttggaggagccttgcggttggatgtatgaccatgccaagtggctgcggaccacatgggcaagcagtagctcccccaacgaccggacctttcccgatgacaggaatttcctgcggttgcaaagcgactctcagagagaagggcaatacgccaggcttatctcccccccagtgcacctgcccagatcgccagtgtgcatggagtttcagtatcaggccacagggggtcggggagtggccctgcaggttgtgagggaggcgtctcaggagtccaagctgctttgggtaatccgagaagatcagggtggcgagtggaaacatggaagaattatcctccctagttatgatatggagtaccaaatagtgtttgaaggcgtgattgggaagggcaggtccggcgaaattgcaattgacgacatccgtatatccactgacgtgccgctcgagaactgcatggaaccaataagcgcctttgccggagagaactttaaggtggacattccggagatacacgaaagggagggatacgaagacgaaattgacgacgagtacgaagtcgattggagcaattctagttccgcaacgagcgggtcgggtgccccatccactgacaaagagaaatcttggctctacacgctggaccctatactgattacaattattgccatgagtagcctgggggtcttactcggtgccacttgcgccggactgctcctgtattgcacgtgtagctacagcgggctgtcgtctcgatcgtgtacaaccctggagaactataatttcgaactctatgacggactgaaacataaggttaagatgaatcaccagaaatgctgttcagaggcgtag

SEQ ID NO: 262053 - protein, 901 aa, Artificial Sequence
  derived and/or modified sequence
MDMFPLTWVFLALYFSRHQVRGQPDPPCGGRLNSKDAGYITSPGYPQDYPSHQNCEWIVYAPEPNQKIVLNFNPHFEIEKHDCKYDFIEIRDGDSESADLLGKHCGNIAPPTIISSGSMLYIRFTSDYARQGAGFSLRYEIFKTGSEDCSKNFTSPNGTIESPGFPEKYPHNLDCTFTILAKPKMEIILQFLIFDLEHDPLQVGEGDCKYDWLDIWDGIPHVGPLIGKYCGTKTPSELRSSTGILSLTFHTDMAVAKDGFSARYYLVHQEPLENFQCNVPLGMESGRIANEQISASSTYSDGRWTPQQSRLHGDDNGWTPNLDSNKEYLQVDLRFLTMLTAIATQGAISRETQNGYYVKSYKLEVSTNGEDWMVYRHGKNHKVFQANNDATEVVLNKLHAPLLTRFVRIRPQTWHSGIALRLELFGCRVTDAPCSNMLGMLSGLIADSQISASSTQEYLWSPSAARLVSSRSGWFPRIPQAQPGEEWLQVDLGTPKTVKGVIIQGARGGDSITAVEARAFVRKFKVSYSLNGKDWEYIQDPRTQQPKLFEGNMHYDTPDIRRFDPIPAQYVRVYPERWSPAGIGMRLEVLGCDWTDSKPTVETLGPTVKSEETTTPYPTEEEATECGENCSFEDDKDLQLPSGFNCNFDFLEEPCGWMYDHAKWLRTTWASSSSPNDRTFPDDRNFLRLQSDSQREGQYARLISPPVHLPRSPVCMEFQYQATGGRGVALQVVREASQESKLLWVIREDQGGEWKHGRIILPSYDMEYQIVFEGVIGKGRSGEIAIDDIRISTDVPLENCMEPISAFAGGTLLPGTEPTVDTVPMQPIPAYWYYVMAAGGAVLVLVSVALALVLHYHRFRYAAKKTDHSITYKTSHYTNGAPLAVEPTLTIKLEQDRGSHC

SEQ ID NO: 262054 - DNA, 2706 bp, Artificial Sequence
  derived and/or modified sequence
atggacatgttccccctgacctgggtgttcctggccctgtacttcagcagacaccaggtgagaggccagcccgaccccccctgcggcggcagactgaacagcaaggacgccggctacatcaccagccccggctacccccaggactaccccagccaccagaactgcgagtggatcgtgtacgcccccgagcccaaccagaagatcgtgctgaacttcaacccccacttcgagatcgagaagcacgactgcaagtacgacttcatcgagatcagagacggcgacagcgagagcgccgacctgctgggcaagcactgcggcaacatcgccccccccaccatcatcagcagcggcagcatgctgtacatcagattcaccagcgactacgccagacagggcgccggcttcagcctgagatacgagatcttcaagaccggcagcgaggactgcagcaagaacttcaccagccccaacggcaccatcgagagccccggcttccccgagaagtacccccacaacctggactgcaccttcaccatcctggccaagcccaagatggagatcatcctgcagttcctgatcttcgacctggagcacgaccccctgcaggtgggcgagggcgactgcaagtacgactggctggacatctgggacggcatcccccacgtgggccccctgatcggcaagtactgcggcaccaagacccccagcgagctgagaagcagcaccggcatcctgagcctgaccttccacaccgacatggccgtggccaaggacggcttcagcgccagatactacctggtgcaccaggagcccctggagaacttccagtgcaacgtgcccctgggcatggagagcggcagaatcgccaacgagcagatcagcgccagcagcacctacagcgacggcagatggaccccccagcagagcagactgcacggcgacgacaacggctggacccccaacctggacagcaacaaggagtacctgcaggtggacctgagattcctgaccatgctgaccgccatcgccacccagggcgccatcagcagagagacccagaacggctactacgtgaagagctacaagctggaggtgagcaccaacggcgaggactggatggtgtacagacacggcaagaaccacaaggtgttccaggccaacaacgacgccaccgaggtggtgctgaacaagctgcacgcccccctgctgaccagattcgtgagaatcagaccccagacctggcacagcggcatcgccctgagactggagctgttcggctgcagagtgaccgacgccccctgcagcaacatgctgggcatgctgagcggcctgatcgccgacagccagatcagcgccagcagcacccaggagtacctgtggagccccagcgccgccagactggtgagcagcagaagcggctggttccccagaatcccccaggcccagcccggcgaggagtggctgcaggtggacctgggcacccccaagaccgtgaagggcgtgatcatccagggcgccagaggcggcgacagcatcaccgccgtggaggccagagccttcgtgagaaagttcaaggtgagctacagcctgaacggcaaggactgggagtacatccaggaccccagaacccagcagcccaagctgttcgagggcaacatgcactacgacacccccgacatcagaagattcgaccccatccccgcccagtacgtgagagtgtaccccgagagatggagccccgccggcatcggcatgagactggaggtgctgggctgcgactggaccgacagcaagcccaccgtggagaccctgggccccaccgtgaagagcgaggagaccaccaccccctaccccaccgaggaggaggccaccgagtgcggcgagaactgcagcttcgaggacgacaaggacctgcagctgcccagcggcttcaactgcaacttcgacttcctggaggagccctgcggctggatgtacgaccacgccaagtggctgagaaccacctgggccagcagcagcagccccaacgacagaaccttccccgacgacagaaacttcctgagactgcagagcgacagccagagagagggccagtacgccagactgatcagcccccccgtgcacctgcccagaagccccgtgtgcatggagttccagtaccaggccaccggcggcagaggcgtggccctgcaggtggtgagagaggccagccaggagagcaagctgctgtgggtgatcagagaggaccagggcggcgagtggaagcacggcagaatcatcctgcccagctacgacatggagtaccagatcgtgttcgagggcgtgatcggcaagggcagaagcggcgagatcgccatcgacgacatcagaatcagcaccgacgtgcccctggagaactgcatggagcccatcagcgccttcgccggcggcaccctgctgcccggcaccgagcccaccgtggacaccgtgcccatgcagcccatccccgcctactggtactacgtgatggccgccggcggcgccgtgctggtgctggtgagcgtggccctggccctggtgctgcactaccacagattcagatacgccgccaagaagaccgaccacagcatcacctacaagaccagccactacaccaacggcgcccccctggccgtggagcccaccctgaccatcaagctggagcaggacagaggcagccactgctag

SEQ ID NO: 262055 - DNA, 2706 bp, Artificial Sequence
  derived and/or modified sequence
atggatatgttccctctcacatgggtgtttctggccctatacttctccaggcatcaggtgaggggacagcctgatccaccatgtggggggcgcctcaactctaaggacgcaggttatatcacttcccctggttacccccaggattacccgtctcaccagaattgtgagtggattgtctacgctcccgagcctaaccagaaaatagtgttgaatttcaacccccactttgaaattgaaaagcacgactgtaagtacgactttatcgaaatccgagacggtgatagtgagagcgctgaccttcttgggaagcattgtggcaatatcgctccccccacaataatcagctccggctctatgttatacatccgtttcacgtccgactacgcaaggcagggtgccggtttcagtctgcgatatgagatctttaaaaccgggtcagaggattgttccaaaaactttaccagtccaaatggaacaattgaaagtccgggcttccccgagaagtatccacacaacctcgattgtacctttactattctcgctaagccaaaaatggagatcatcctccagttcctaatctttgaccttgagcacgaccctctacaagttggtgagggcgattgcaagtacgactggctcgatatatgggacggtattcctcatgtcggacctctgatagggaagtactgcggaaccaagacgccgagcgagctcagatcatccacagggattctgtctttgacatttcacacagacatggctgtggctaaagacggcttctccgccagatattaccttgtccaccaggaacctctggagaactttcaatgtaacgtaccactggggatggagtccggaagaatagccaatgagcagatttctgcctcgtccacttactccgacgggcggtggacgccccaacagagtcggttgcatggcgatgataatggatggacccctaatctcgatagtaacaaagaatacctgcaggtagatctgaggttcctgacaatgctgactgctatagctacacagggagctatctcgcgagaaacacagaacggctactacgtcaaaagctacaaactggaggtcagcaccaatggcgaggattggatggtgtaccgacatggaaagaatcacaaggtctttcaggctaataacgatgccacagaagtggtcctgaacaaactgcatgcccctctactgacacgcttcgttaggatccggcctcagacttggcactcgggtatcgcactgaggttggagctgtttggatgtagagtgactgatgccccatgttccaacatgctgggcatgctgtctggattaatcgccgacagccagatttcagctagttccactcaggagtatctgtggtcacccagtgccgcacgtctcgtgtcgtctaggtcaggatggttcccaagaattcctcaggcccagcctggggaggagtggctccaggttgatctgggcacacccaaaacagtaaagggggtcattatccagggagcaaggggcggcgacagcattacggccgtggaagcaagggcttttgtgaggaaatttaaggtgtcttattcactgaacgggaaagattgggaatacattcaagaccctcggacccaacagcccaagctgttcgaaggcaatatgcactacgatactcctgatatcaggcggttcgacccaatcccagcgcagtatgtgagagtgtatcctgagcgatggtctcccgctgggattgggatgagacttgaagtactggggtgcgattggaccgatagcaagcccactgtggagactctgggtcccactgttaagagtgaagaaaccacgactccttatcctactgaggaagaagcaactgaatgcggcgagaattgtagctttgaagacgataaagatcttcagttaccatcgggatttaactgcaactttgactttctggaagagccatgtggctggatgtatgatcatgcaaagtggctgcgtactacttgggcatcctccagctctccaaatgataggaccttcccagatgaccggaattttctgagactgcaaagtgacagtcagagggagggacagtacgccagactcattagccctccggtccacctgcccagaagtccagtttgcatggaattccagtaccaggccaccggcggccggggtgtggctctgcaggtcgttagagaggcgagccaggagtccaagctgctatgggtcatacgtgaggatcagggcggagaatggaagcacggccggattattctcccttcttatgacatggagtaccaaattgttttcgaaggggtgattgggaaaggcagaagcggggaaattgctattgacgatattagaatttccactgatgtgccactcgaaaactgcatggaaccgatatctgcattcgccgggggaaccctgctgcctggaaccgagccgaccgtagacactgtgcctatgcaaccgatccccgcttactggtactacgtgatggccgccgggggggcagtcctggtgttagtttccgtggccctggctctggtactgcattaccacagattccggtacgcagcaaagaagaccgatcattctattacttacaaaacctcccattatacgaatggcgcaccgctggccgtagagcccacactgacaatcaaattagaacaggatcggggtagccattgttag

SEQ ID NO: 262056 - DNA, 2706 bp, Artificial Sequence
  derived and/or modified sequence
atggacatgttccccctgacctgggtgttcctggccctgtacttcagccgccaccaggtgcggggccagcctgaccccccctgtggcggccgcctgaacagcaaggatgctggctacatcaccagccctggctacccccaggactaccccagccaccagaactgtgagtggatcgtgtatgcccctgagcccaaccagaagatcgtgctgaacttcaacccccactttgaaattgagaagcatgactgcaagtatgacttcatcgagatcagagatggagacagcgagagcgctgacctgctgggcaagcactgcggcaacatcgccccacccaccatcatcagcagcggctccatgctgtacatccgcttcaccagtgactatgcccggcagggcgccggcttcagcctgcgctatgagatcttcaagacaggcagcgaggactgcagcaagaacttcaccagccccaacggcaccatcgagagccctggcttccctgagaagtacccccacaacctggactgcaccttcaccatcctggccaagcccaagatggagatcatcctgcagttcctgatctttgacctggagcatgaccccctgcaggtgggggagggggactgcaagtatgactggctggacatctgggatggcatcccccacgtgggccccctcatcggcaagtactgcggcaccaagacccccagcgagctgcggagcagcacaggcatcctgagcctgaccttccacacagacatggctgtggccaaggatggcttcagcgcccgctactacctggtgcaccaggagcccctggagaacttccagtgcaatgtgcccctgggcatggagagcggccgcatcgccaatgagcagatcagcgccagcagcacctacagtgatggccgctggaccccccagcagagccggctgcatggagatgacaatggctggacccccaacctggacagcaacaaggagtacctgcaggtggacctgcgcttcctgaccatgctgacagccatcgccacccagggcgccatcagccgggagacccagaatggctactacgtgaagagctacaagctggaggtgtccaccaacggggaggactggatggtgtacagacatggcaagaaccacaaggtgttccaggccaacaatgatgccacagaggtggtgctgaacaagctgcacgcccccctgctgaccaggtttgtgcgcatccggccccagacctggcacagcggcatcgccctgcggctggagctgtttggctgccgggtgacagatgccccctgcagcaacatgctgggcatgctgagcggcctgattgctgacagccagatcagcgccagcagcacccaggagtacctgtggagccccagcgctgcccggctggtgagcagccgcagcggctggttcccccgcatcccccaggcccagcctggagaggagtggctgcaggtggacctgggcacccccaagacagtgaagggcgtcatcatccagggcgcccggggcggggacagcatcacagctgtggaggcccgggcctttgtgaggaagttcaaggtgtcctacagcctgaatggcaaggactgggagtacatccaggaccccaggacccagcagcccaagctgtttgagggcaacatgcactatgacaccccagacatcagaagatttgaccccatcccagcccagtatgtgcgggtgtacccagagcgctggagccctgctggcatcggcatgaggctggaggtgctgggctgtgactggacagacagcaagcccaccgtggagaccctgggccccaccgtgaagtctgaggagaccaccaccccctaccccacagaggaggaggccacagaatgtggggagaactgcagctttgaagatgacaaggacctgcagctgcccagcggcttcaactgcaactttgacttcctggaggagccctgtggctggatgtatgaccacgccaagtggctgcggaccacctgggccagcagcagcagccccaatgacaggaccttcccagatgacaggaacttcctgcggctgcagagcgacagccagcgggagggccagtatgcccggctcatcagcccccctgtgcacctgcccaggagccctgtgtgcatggagttccagtaccaggccactggaggccggggcgtggccctgcaggtggtgcgggaggccagccaggagagcaagctgctgtgggtgatccgggaggaccagggcggggagtggaagcacggccgcatcatcctgcccagctatgacatggagtaccagatcgtgtttgagggcgtcatcggcaagggccgctctggagagatcgccattgatgacatccgcatcagcacagatgtgcccctggagaactgcatggagcccatcagcgcctttgctgggggcaccctgctgcccggcacagagcccaccgtggacacagtgcccatgcagcccatcccagcctactggtactacgtgatggccgccggcggcgctgtgctggtgctggtgtctgtggccctggccctggtgctgcactaccaccgcttccgctatgctgccaagaagacagaccacagcatcacctacaagaccagccactacaccaatggagcccccctggccgtggagcccaccctgaccatcaagctggagcaggaccggggcagccactgctag

SEQ ID NO: 262057 - DNA, 2706 bp, Artificial Sequence
  derived and/or modified sequence
atggacatgttccccctgacctgggtgttcctggccctgtacttcagtaggcatcaggtacgggggcagccagaccctccctgcgggggccgcctcaactccaaggacgctggttacattacatctccaggctacccacaggattatccatcccaccaaaattgcgagtggatcgtctatgcccccgaaccgaatcagaaaattgtgctgaattttaaccctcatttcgaaatagagaaacatgattgcaaatacgacttcatcgagatccgggacggcgattcagagtctgccgacctgcttggcaaacattgcggcaatatcgccccacctaccatcatatcctctggatccatgctctatatcaggtttacgagcgattacgcgcgccagggagccggattctcactgcgttacgagatattcaagactggctctgaagattgttctaagaactttaccagccctaacggcacgatcgaatccccaggatttccggaaaagtacccccacaatcttgactgtacattcaccatcctggctaagcccaaaatggagattatactgcagtttctgattttcgacctggagcacgatccactgcaggtgggcgagggggattgtaaatacgactggctggacatctgggacggcattccacatgtgggacctctgatcggaaaatattgtggaaccaagacccccagcgagttacgaagttccacaggcatcctatctttgacgttccataccgacatggcggttgcaaaggatggtttctccgcacgctattacttggtccatcaggagccactagaaaattttcagtgtaatgtcccgcttgggatggagtctgggcgcatcgccaatgagcagatctccgcctcatcaacgtactccgatgggcgctggaccccacagcagtcacggctccacggtgacgataatggctggacacctaacctggacagcaataaggagtacttgcaagtcgatctccgctttctgaccatgcttacagcaatagctactcagggggcaataagccgggagactcaaaacggatattatgtcaaatcttacaagctcgaggttagcactaatggagaggattggatggtttaccgtcatggaaaaaatcacaaggtgttccaagcaaataatgacgctacggaagttgtgctgaacaaactgcacgctccactgttaacaaggtttgtgcgtatccggcctcagacctggcatagcggtatagccctccgcctggagttgttcggctgtagggtgaccgacgccccctgctccaatatgctggggatgctaagcggacttatagccgacagccagatctcagcctcttctactcaggagtatctgtggtctccgtcggctgcccggctggttagctctcggtccggctggttccctcgcattccccaggcgcagccaggggaggagtggcttcaggtggacctgggtacacctaagacagtgaagggggttattatacagggcgccaggggtggggactccatcactgctgtggaggcccgagcattcgtgagaaagtttaaggtttcctatagtttgaacgggaaagattgggagtacatccaggaccctaggactcagcagccgaaactctttgagggcaatatgcactacgacacccctgatatcaggaggtttgatccaatccctgcacaatatgtcagagtgtatccagaacgctggagcccagctgggattggaatgcgcctcgaggttttaggttgtgattggacagacagcaaacccacggtggaaacactgggacccactgtgaaatccgaagagactacaaccccctatccgactgaggaggaagcaacagagtgcggagagaactgctctttcgaggatgacaaggatttgcagctgccatccggctttaactgcaattttgactttctagaagagccctgcggctggatgtacgaccacgccaagtggctacgcacaacctgggcaagctcctcttcgccaaatgatcgaacatttccagatgatcgcaactttttgcgtcttcagagcgattctcagagggaaggtcagtacgccagattgatcagtccacccgtccacttgccaaggtctcctgtctgtatggagtttcagtatcaggcgaccggggggcggggcgttgctctccaagttgtgcgggaggcatcacaggaatccaagctcctatgggtgattcgtgaagatcagggcggggagtggaaacacggccgtattattctgcctagctacgatatggagtatcagattgtgtttgaaggcgtcatcggaaaaggtcgatcaggcgagattgccattgacgacatcaggattagtactgacgtccccctggagaactgcatggagccaattagcgccttcgcaggcgggacacttctacccgggacggagcccacagttgacacggtgcccatgcagccaattcctgcatattggtactacgttatggctgccggaggtgccgtgcttgtcctagtgtccgtcgcacttgcgctcgtgctgcactatcaccgcttccggtatgccgcaaaaaagaccgatcactccattacatacaagacctctcattatacgaatggcgctcccctggccgtggagcctacactcacaattaaactggaacaggatagagggagccactgttag

SEQ ID NO: 262058 - DNA, 3367 bp, Artificial Sequence
  derived and/or modified sequence
cccagctctggaaagagccaccttctccaaaatggatatgtttcctctcacctgggttttcttagccctctacttttcaagacaccaagtgagaggccaaccagacccaccgtgcggaggtcgtttgaattccaaagatgctggctatatcacctctcccggttacccccaggactacccctcccaccagaactgcgagtggattgtttacgcccccgaacccaaccagaagattgtcctcaacttcaaccctcactttgaaatcgagaagcacgactgcaagtatgactttatcgagattcgggatggggacagtgaatccgcagacctcctgggcaaacactgtgggaacatcgccccgcccaccatcatctcctcgggctccatgctctacatcaggttcacctccgactacgcccggcagggggcaggcttctctctgcgctacgagatcttcaagacaggctctgaagattgctcaaaaaacttcacaagccccaacgggaccatcgaatctcctgggtttcctgagaagtatccacacaacttggactgcacctttaccatcctggccaaacccaagatggagatcatcctgcagttcctgatctttgacctggagcatgaccctttgcaggtgggagagggggactgcaagtacgattggctggacatctgggatggcattccacatgttggccccctgattggcaagtactgtgggaccaaaacaccctctgaacttcgttcatcgacggggatcctctccctgacctttcacacggacatggcggtggccaaggatggcttctctgcgcgttactacctggtccaccaagagccactagagaactttcagtgcaatgttcctctgggcatggagtctggccggattgctaatgaacagatcagtgcctcatctacctactctgatgggaggtggacccctcaacaaagccggctccatggtgatgacaatggctggacccccaacttggattccaacaaggagtatctccaggtggacctgcgctttttaaccatgctcacggccatcgcaacacagggagcgatttccagggaaacacagaatggctactatgtcaaatcctacaagctggaagtcagcactaatggagaggactggatggtgtaccggcatggcaaaaaccacaaggtatttcaagccaacaacgatgcaactgaggtggttctgaacaagctccacgctccactgctgacaaggtttgttagaatccgccctcagacctggcactcaggtatcgccctccggctggagctcttcggctgccgggtcacagatgctccctgctccaacatgctggggatgctctcaggcctcattgcagactcccagatctccgcctcttccacccaggaatacctctggagccccagtgcagcccgcctggttagcagccgctcgggctggttccctcgaatccctcaggcccagcccggtgaggagtggcttcaggtagatctgggaacacccaagacagtgaaaggtgtcatcatccagggagcccgcggaggagacagtatcactgctgtggaagccagagcatttgtgcgcaagttcaaagtctcctacagcctaaacggcaaggactgggaatacattcaggaccccaggacccagcagccaaagctgttcgaagggaacatgcactatgacacccctgacatccgaaggtttgaccccattccggcacagtatgtgcgggtatacccggagaggtggtcgccggcggggattgggatgcggctggaggtgctgggctgtgactggacagactccaagcccacggtagagacgctgggacccactgtgaagagcgaagagacaaccaccccctaccccaccgaagaggaggccacagagtgtggggagaactgcagctttgaggatgacaaagatttgcagctcccttcgggattcaattgcaacttcgatttcctcgaggagccctgtggttggatgtatgaccatgccaagtggctccggaccacctgggccagcagctccagcccaaacgaccggacgtttccagatgacaggaatttcttgcggctgcagagtgacagccagagagagggccagtatgcccggctcatcagcccccctgtccacctgccccgaagcccggtgtgcatggagttccagtaccaggccacgggcggccgcggggtggcgctgcaggtggtgcgggaagccagccaggagagcaagttgctgtgggtcatccgtgaggaccagggcggcgagtggaagcacgggcggatcatcctgcccagctacgacatggagtaccagattgtgttcgagggagtgatagggaaaggacgttccggagagattgccattgatgacattcggataagcactgatgtcccactggagaactgcatggaacccatctcggcttttgcagggggcaccctcctgccagggaccgagcccacagtggacacggtgcccatgcagcccatcccagcctactggtattacgtaatggccgccgggggcgccgtgctggtgctggtctccgtcgcgctggccctggtgctccactaccaccggttccgctatgcggccaagaagaccgatcactccatcacctacaaaacctcccactacaccaacggggcccctctggcggtggagcccaccctaaccattaagctagagcaagaccgtggctcgcactgctgagggccgaagcaagaacagcacccaaaacaaacgagaaagactgcaaacatgttgcctcgattttgcacttttttctcctcgcctagtttctgtgtgaactctcagacatctctttcccggatccccaaccctgagcactcttatcaatcccaaccatcctccttgggttcattttggtttctggtttttctttttcctttttgttgattccaaaccaacaaacccaactctaatgctgcatcttggactatccgaagagatccacccccaagcactccacaactcaaggctcagctggttttgttccagagactggttcgcttgttttttccccttgccttatcccatacctcctctcagtgggcagtctgccaggagacgtgaggggaagcctggatctgtgtgtatgtacatagtagacatgtgtgtgtgtgaatagctctctgtgtgtgggtgtgtgagagagcggctggttcattgtgtgtgtgtttgggcgaggggtgagtgttcagagagggcccctttaactcttatgttacttctcctggggtacattttacaagaaaataatatactgtacaagttttgtttacttggagaagagattgaagctttttgttgccttatcta

SEQ ID NO: 262059 - DNA, 2706 bp, Artificial Sequence
  derived and/or modified sequence
atggacatgttccccctgacctgggtgttccttgccctgtacttcagtaggcatcaggtgcggggacagcctgaccctccctgcggcggtcggcttaactccaaggacgctggctacatcacctctcctgggtacccccaggattatccctcgcaccagaactgcgagtggatcgtctacgctccggagcctaaccagaaaatcgtactcaacttcaacccacacttcgagattgaaaaacacgattgcaaatatgatttcatagagatccgggacggggactctgagagtgctgaccttttagggaagcattgcggcaacatcgccccacccactattatatcgagcggtagcatgctgtacattaggttcactagtgattatgcaagacagggggcaggttttagcctgaggtacgagatttttaaaaccggttctgaagactgttctaagaatttcacgagccctaatgggaccatcgagagccccggttttccagaaaaatatccacataatttggactgcacctttactatcctggccaaaccgaagatggagatcatcttacagttcctgatcttcgatctggagcacgatcctcttcaggtgggagaaggggactgcaaatacgactggttggatatctgggacgggatccctcatgtaggtccattgattgggaagtattgtggcacgaaaacaccttcagaactccgctcctcaaccggcattctatctttaacttttcacacagatatggctgtcgccaaagatggtttctcagccagatactacctcgtgcaccaggaacctctcgaaaatttccagtgcaacgtgccgctgggtatggagtctggacgcattgcaaacgaacagatctctgcttcgtcgacctattcagacggtaggtggacaccccagcagagcagattgcatggcgacgacaatggctggacgcctaatctggattctaataaggagtatttacaggtggatctgcgctttctgacaatgctgactgccattgccacccagggagccattagcagggagacacaaaatggctactatgtgaagagctacaaattagaagttagtaccaacggtgaagactggatggtgtacagacatggcaaaaatcacaaggtcttccaggccaataatgacgccactgaagtggtgctgaacaagctgcacgctccgttgttgaccagatttgtccggattaggccccagacctggcactccggtatcgcactccgcctcgagctattcggatgcagggtgactgatgccccatgttctaatatgttgggcatgctctccggcttgatagccgattcccaaatcagtgcgtcttcaacccaggagtacttatggagcccgtctgcagctaggctcgtgagctccaggtcaggatggttcccacggatcccacaggcgcaaccaggagaagaatggctgcaggtcgatttaggcactcctaaaacggtaaagggagtgattatccagggcgctcgagggggagactcaattactgctgtagaagccagagctttcgttaggaagtttaaagtctcctacagtttgaatggcaaagattgggaatacatacaggatccgaggacacagcagccaaagctgttcgaaggaaacatgcactacgacaccccggatatacgtcgtttcgacccaatccctgctcagtatgtccgtgtatatcctgaaaggtggtcccccgctgggatcggaatgagactggaggtcctggggtgtgattggactgactcaaagcccaccgtggaaaccttagggccaacagtaaaaagcgaagagacgaccactccttatcctaccgaagaggaggcaaccgagtgcggtgaaaactgctctttcgaggacgacaaagacctccagctgcctagcggttttaactgcaactttgatttcctcgaagagccttgtggatggatgtacgaccacgctaaatggctgcggacaacttgggcaagctctagcagccctaacgaccggacgttcccggatgatcgcaacttcttgcgactgcaaagcgactctcagagggagggccagtatgctagactgattagccctcccgtgcacctgcccaggagccctgtctgtatggagttccagtatcaggccacaggcggtcgaggggtggccctccaggttgtgagggaagccagccaagaaagcaagttgctttgggtgattcgcgaggaccagggcggtgaatggaaacacgggagaattattctgccgagctacgacatggagtaccagattgtgttcgaaggcgtcatcggcaagggccgtagcggagaaattgccatcgacgatataagaatatccacagatgtgcccctggagaactgcatggagcctattagtgcctttgccggaggcactctgctgcctggcacagagcccaccgtggataccgtgccgatgcagccaattccagcctattggtattacgtgatggcagccggaggagccgtgctggtgttggtgagcgtggccctggccctcgtcctgcattatcaccgctttcggtacgctgcgaaaaagactgatcacagcatcacctacaaaacgagccactacacaaacggcgctcctctcgcggtagagcctaccctgactattaagctggagcaggatcgaggctcccattgctag

SEQ ID NO: 262060 - protein, 1025 aa, Artificial Sequence
  derived and/or modified sequence
MSAAKENPCRKFQANIFNKSKCQNCFKPRESHLLNDEDLTQAKPIYGGWLLLAPDGTDFDNPVHRSRKWQRRFFILYEHGLLRYALDEMPTTLPQGTINMNQCTDVVDGEGRTGQKFSLCILTPEKEHFIRAETKEIVSGWLEMLMVYPRTNKQNQKKKRKVEPPTPQEPGPAKVAVTSSSSSSSSSSSIPSAEKVPTTKSTLWQEEMRTKDQPDGSSLSPAQSPSQSQPPAASSLREPGLESKEEESAMSSDRMDCGRKVRVESGYFSLEKTKQDLKAEEQQLPPPLSPPSPSTPNHRRSQVIEKFEALDIEKAEHMETNAVGPSPSSDTRQGRSEKRAFPRKRDFTNEAPPAPLPDASASPLSPHRRAKSLDRRSTEPSVTPDLLNFKKGWLTKQYEDGQWKKHWFVLADQSLRYYRDSVAEEAADLDGEIDLSACYDVTEYPVQRNYGFQIHTKEGEFTLSAMTSGIRRNWIQTIMKHVHPTTAPDVTSSLPEEKNKSSCSFETCPRPTEKQEAELGEPDPEQKRSRARERRREGRSKTFDWAEFRPIQQALAQERVGGVGPADTHEPLRPEAEPGELERERARRREERRKRFGMLDATDGPGTEDAALRMEVDRSPGLPMSDLKTHNVHVEIEQRWHQVETTPLREEKQVPIAPVHLSSEDGGDRLSTHELTSLLEKELEQSQKEASDLLEQNRLLQDQLRVALGREQSAREGYVLQATCERGFAAMEETHQKKIEDLQRQHQRELEKLREEKDRLLAEETAATISAIEAMKNAHREEMERELEKSQRSQISSVNSDVEALRRQYLEELQSVQRELEVLSEQYSQKCLENAHLAQALEAERQALRQCQRENQELNAHNQELNNRLAAEITRLRTLLTGDGGGEATGSPLAQGKDAYELEVLLRVKESEIQYLKQEISSLKDELQTALRDKKYASDKYKDIYTELSIAKAKADCDISRLKEQLKAATEALGEKSPDSATVSGYDIMKSKSNPDFLKKDRSCVTRQLRNIRSKSVIEQVSWDT

SEQ ID NO: 262061 - DNA, 3078 bp, Artificial Sequence
  derived and/or modified sequence
atgtcagccgcgaaagaaaacccttgccgtaagtttcaggctaatatctttaacaaatcaaaatgtcaaaattgcttcaaaccacgcgagtcgcatctgctgaatgacgaggacctaacacaggccaagccaatctatggtggatggctcctcttagccccggacggtactgattttgacaaccctgtgcatcgttctagaaaatggcagcggcgcttcttcattctgtatgaacatgggctgctgcgttacgcgttggatgaaatgccgacaacactgccacagggtacaattaatatgaaccagtgcaccgacgtggttgacggcgaagggaggaccggccagaagttttccctgtgcattctgacacccgagaaagagcatttcattcgtgccgagacgaaagagattgttagtggatggctagagatgctgatggtgtatccacgaactaataaacagaatcagaaaaaaaagcgaaaggtcgaacctcctacaccccaggaacctggccctgccaaggtggccgtgacttctagtagctctagttctagcagttcgtcaagtataccatcagcagagaaagttcctacaactaagagcactctgtggcaggaagaaatgcgcactaaggatcaacctgacggaagcagcttgagtccggctcagagtccttctcagtcacagccccctgccgcatcctccctcagagaaccaggccttgaatcgaaggaggaagagtctgccatgtcctcggaccggatggactgcggtaggaaagtcagggtggaaagcggctacttctcacttgagaagacaaagcaggatctcaaggccgaagaacagcagttaccgccacccctatccccccctagcccttctactcccaaccataggaggtcacaagtcatagaaaaattcgaagccttagacatcgagaaggccgagcacatggaaaccaatgctgtcgggcctagcccatctagcgacacacgacagggcaggtccgagaagcgtgcgttcccccggaaacgtgatttcaccaacgaggcccccccggccccactcccagatgccagcgcatcgccactttcaccacacagaagagctaagagcctggataggcggtcaacagagccaagcgtgacacctgatctactgaatttcaaaaaggggtggcttaccaaacaatatgaagatgggcaatggaagaaacattggtttgtgctggcagaccagtcgctgagatactatagggacagtgtagctgaggaggccgcggacctggacggagaaattgatcttagcgcatgctatgacgtgactgagtaccctgtgcagagaaactatggattccaaatccacacgaaggagggtgaattcactctgtcagccatgacatctggtatccggagaaactggatccaaacaatcatgaagcatgtgcacccaacaactgcccctgacgtgacttccagcctaccagaggagaaaaataagtccagctgttcgtttgaaacctgtccaagacctaccgaaaaacaggaagcagagctgggggagccggaccctgaacagaaaagatcccgcgctcgggagaggagacgggaagggcgaagtaaaactttcgattgggcagaattcagaccgatccagcaagcattggctcaggagcgggttggcggcgtgggacccgcggacacacacgagccacttcggcccgaggctgagccgggggagcttgagagagaacgcgcaagacgcagggaggagcggaggaaacgctttgggatgttagatgccactgacggcccaggtacggaggacgccgcactgcgaatggaggtggacaggtcacccggacttccaatgtccgacctaaagacccataatgtacacgtcgagatcgaacaaagatggcaccaagtggaaacgacgccactgagggaagagaaacaggtcccgatcgctcctgttcacctgagcagcgaagatggcggggaccgattatcgactcatgagctgacaagcctgctggagaaagaactggaacagtctcagaaagaggcttctgaccttctggagcagaataggctgctgcaggaccaactgcgggtggccctgggccgcgagcagagcgcaagagaggggtatgttctgcaagccacatgcgaaaggggatttgccgcgatggaggagacccaccagaaaaagatagaggatctgcagcggcagcaccagcgggaactggagaaactccgagaggagaaggacaggctgctggccgaagaaaccgcggcaacaatctccgcaatcgaagccatgaagaatgcccacagggaagagatggagagggagcttgaaaaatcgcagcgcagccagatcagtagcgtgaactcagacgtggaagctctacgaagacagtatcttgaagaattgcagtcggttcagcgcgaattggaggtcctgtctgaacagtactctcagaagtgcctggaaaatgcccacctggcacaggcccttgaggccgagcggcaggctttgcggcagtgtcagagggagaatcaggagttgaatgctcacaaccaggagttgaacaacagactcgctgctgaaattactagactgagaaccttgttgacgggagatgggggtggagaagcgaccggatctccactggcccagggcaaggatgcttatgaactggaggttttgcttagagtaaaggagtccgaaattcagtatctcaaacaagagatcagtagcctgaaggacgagctgcagaccgctttacgagacaaaaagtatgccagcgacaaatataaagatatttacactgaactgtctattgccaaggccaaagctgattgcgacatcagtagactgaaggaacagttgaaggcagccacggaggcactgggcgaaaaatcacctgactctgcaactgtaagcggttatgacattatgaaatcgaaatccaatcccgacttcctgaaaaaagatcgaagttgtgtgacacggcagttgcgtaacattcggtcaaaatctgttatcgagcaagtgtcttgggacacttag

SEQ ID NO: 262062 - DNA, 3078 bp, Artificial Sequence
  derived and/or modified sequence
atgagcgccgctaaggaaaatccatgcagaaagtttcaagctaacattttcaataagagcaaatgtcagaattgtttcaagccccgagagagtcaccttctcaacgacgaagacctcactcaggccaaacctatctatgggggctggctcctgctggctccagatggaaccgacttcgacaatccagtgcatcgaagccgcaaatggcagcgccggttttttatcctgtacgagcatggcctgctaaggtacgcccttgacgagatgcctacgacactgccccagggcacaattaacatgaatcagtgcaccgatgtcgtcgacggggaggggagaaccggtcagaagttttctctctgtatcctcactcccgagaaggagcatttcattcgggcagagactaaggagatcgtctcaggctggctggaaatgttgatggtctacccccgaacaaacaagcagaatcagaaaaaaaagcgtaaagtggagcctcccacgccccaggaacccgggcccgccaaggtagccgtcaccagctcatcttctagcagctcctcttccagcagcattcctagtgccgagaaggtgcctacaacgaagtctactctctggcaggaggaaatgcggacaaaagaccaacccgacggaagctccctgtcgcccgcccagtcccctagccaatcccagcctcctgccgcctccagcctcagggagccaggtcttgagagcaaagaagaggagtcggccatgtcatctgatcgcatggactgcgggcggaaggtgagggttgagagcggatatttttcactggaaaagacaaaacaggacctgaaggctgaggaacagcagctgcctccaccactctcccctccatccccttctacacccaatcatcggcgcagccaggtgatcgagaagttcgaggccctggatatcgagaaagcggaacatatggagactaacgctgtcggaccctctccatccagtgataccagacaaggaaggtcagagaagagagccttccctcgcaagagggacttcactaacgaggctccccctgctccactgccagatgccagtgcaagtccactctcgccccaccggagagcgaagagcctggatcgacggtctactgaaccttccgtgactcctgacctgttgaatttcaagaaaggttggctgactaaacagtatgaggacggacagtggaagaagcactggttcgtgctggccgaccaatctttacgttattacagggacagtgtcgccgaagaagccgccgaccttgatggggagatcgacctttccgcctgctacgacgtcactgaatacccagtccagaggaactatggattccagatacacactaaagagggcgagttcaccctgtctgccatgacaagcggcatacgacggaactggatccagacgattatgaagcacgtgcatcctactacggctcccgatgtgacgtccagtctacccgaggagaaaaacaagtcatcatgcagctttgagacttgcccaaggcccaccgagaagcaggaggcggagttgggtgaacctgatccggaacagaaacgttcaagagcacgcgagcgcaggcgggagggccggtcaaagacctttgactgggcagagtttcgcccaatacagcaagcactggcccaagagcgagtgggaggggtgggacccgcagacacacacgaacctctgagacctgaggctgagccaggcgagctggagcgggagcgtgcacgtaggagggaagagcgacgcaagaggttcggaatgttggacgcgacagacggccccgggacagaagatgccgctttgcgcatggaagttgaccggtcacccggcctgccaatgtccgacctcaaaacccataacgttcacgtcgagatcgaacagcggtggcatcaggttgaaactacaccccttcgggaggagaagcaggtgccaatcgccccggttcacctctcttcagaagatggaggagaccgtctttcaacacatgaactaacctctctgcttgagaaggaactggaacagtcccagaaagaagccagcgatctccttgaacagaaccgactgctgcaggaccagctgcgcgtggctttgggtagggaacagagtgctagggagggttatgtgcttcaggctacctgtgagagggggttcgccgccatggaggagactcaccaaaagaagatcgaagatctgcaaagacagcatcagagggagctggagaaattgagagaggaaaaggatcgcctgttggcagaagagaccgcagccaccatttccgccattgaggctatgaagaatgcccacagggaagaaatggagagggagctcgaaaaatcacagcggagccagattagcagcgtgaattcagatgtggaggcgttgagacgccagtacctggaagagctgcagtcagttcagcgcgagctggaagtactatcagaacagtatagtcaaaaatgtctggagaacgcacacctggctcaggcactagaagccgaaaggcaggccctgcgccagtgccaacgtgagaatcaggaactgaacgcacacaatcaggagcttaacaatcgactggcagccgaaataacgaggttgcgcaccctgctaactggcgatggaggtggggaggctaccggatcccctctggctcagggaaaggatgcatacgagttagaggtgctgctacgtgtgaaagagtcagagattcagtatttgaagcaagaaatttcctctctgaaggacgagctacagactgccctacgcgataagaaatacgccagtgataagtacaaagatatctacaccgaactttcaatagcgaaagctaaggcagactgtgatatatccagacttaaagagcagttgaaggcagcaactgaagccctcggggaaaagagtcctgacagcgccactgtttcaggttatgatatcatgaaaagcaaatctaaccccgactttctcaaaaaggacaggtcatgcgtaacacgccagctaagaaacattcgcagcaagagtgttatcgaacaggtaagctgggacacctag

SEQ ID NO: 262063 - DNA, 3078 bp, Artificial Sequence
  derived and/or modified sequence
atgtctgctgccaaggagaacccctgcaggaagttccaggccaacatcttcaacaagagcaagtgccagaactgcttcaagccccgggagagccacctgctgaatgatgaggacctgacccaggccaagcccatctacggcggctggctgctgctggccccagatggaacagactttgacaaccctgtgcacaggagcaggaagtggcagaggcgcttcttcatcctgtatgaacatggcctgctgcgctatgccctggatgagatgcccaccaccctgccccagggcaccatcaacatgaaccagtgcacagatgtggtggatggagagggccgcacaggccagaagttcagcctgtgcatcctgaccccagagaaggagcacttcatccgggcagagaccaaggagatcgtgtctggctggctggagatgctgatggtgtaccccaggaccaacaagcagaaccagaagaagaagaggaaggtggagccccccaccccccaggagcccggccctgccaaggtggccgtgaccagcagcagcagcagcagcagcagcagcagcagcatccccagcgctgagaaggtgcccaccaccaagagcaccctgtggcaggaggagatgaggaccaaggaccagccagatggcagcagcctgagccctgcccagagccccagccagagccagcccccagctgccagcagcctgcgggagcccggcctggagagcaaggaggaggagagcgccatgagcagtgacaggatggactgtggcaggaaggtgcgggtggagagcggctacttcagcctggagaagaccaagcaggacctgaaggccgaggagcagcagctgcccccacccctgagcccccccagccccagcacccccaaccacagaagaagccaggtgattgagaagtttgaggccctggacatcgagaaggccgagcacatggagaccaatgctgtgggccccagccccagcagtgacacccggcagggccgctctgagaagagggccttccccaggaagagggacttcaccaatgaggcccccccagcccccctgcctgatgccagcgccagccccctgagcccccaccggcgggccaagagcctggacagaagaagcacagagcccagcgtgaccccagacctgctgaacttcaagaagggctggctgaccaagcagtatgaagatggccagtggaagaagcactggtttgtgctggccgaccagagcctgcgctactacagagattctgtggccgaggaggccgctgacctggatggagaaattgacctgagcgcctgctatgatgtgacagagtaccctgtgcagaggaactacggcttccagatccacaccaaggagggggagttcaccctgagcgccatgaccagcggcatcagaagaaactggatccagaccatcatgaagcacgtgcaccccaccacagccccagatgtgaccagcagcctgcctgaggagaagaacaagagcagctgcagctttgagacctgcccccggcccacagagaagcaggaggccgagctgggggagccagaccctgagcagaagaggagccgggcccgggagaggagaagagagggccgcagcaagacctttgactgggccgagttccggcccatccagcaggccctggcccaggagcgggtgggcggcgtgggccctgctgacacccatgagcccctgcggcctgaggccgagcccggggagctggagcgggagcgggcccggcggcgggaggagaggaggaagcgcttcggcatgctggatgccacagatggccctggaacagaagatgctgccctgaggatggaggtggacaggagccctggcctgcccatgtctgacctgaagacccacaacgtgcacgtggagattgagcagcgctggcaccaggtggagaccacccccctgcgggaggagaagcaggtgcccatcgcccctgtgcacctgagcagtgaagatggaggagaccggctgagcacccatgagctgaccagcctgctggagaaggagctggagcagagccagaaggaggccagtgacctgctggagcagaaccggctgctgcaggaccagctgcgggtggccctgggccgggagcagagcgcccgggagggctacgtgctgcaggccacctgtgagcggggctttgctgccatggaggagacccaccagaagaagattgaggacctgcagaggcagcaccagcgggagctggagaagctgcgggaggagaaggaccggctgctggccgaggagacagctgccaccatcagcgccatcgaggccatgaagaatgcccaccgggaggagatggagcgggagctggagaagagccagaggagccagatcagctctgtgaacagtgatgtggaggccctgcggcggcagtacctggaggagctgcagagcgtgcagcgggagctggaggtgctgtctgagcagtacagccagaagtgcctggagaatgcccacctggcccaggccctggaggccgagcggcaggccctgcggcagtgccagcgggagaaccaggagctgaatgcccacaaccaggagctgaacaaccggctggccgctgagatcacccggctgcggaccctgctgactggagatggcggcggggaggccaccggcagccccctggcccagggcaaggatgcctatgagctggaggtgctgctgcgggtgaaggagagcgagatccagtacctgaagcaggagatcagcagcctgaaggatgagctgcagacagccctgcgggacaagaagtatgccagtgacaagtacaaggacatctacacagagctgagcatcgccaaggccaaggctgactgtgacatcagccggctgaaggagcagctgaaggccgccacagaggccctgggggagaagagcccagacagcgccaccgtgtctggctatgacatcatgaagagcaagagcaacccagacttcctgaagaaggacaggagctgtgtgacccggcagctgaggaacatccgcagcaagagcgtcatcgagcaggtgtcctgggacacctag

SEQ ID NO: 262064 - DNA, 3134 bp, Artificial Sequence
  derived and/or modified sequence
gccaggccggccaggcctgcgccgccgccgccgccgccgtcgccgccgcgccgaccatgtcggcagccaaggagaacccgtgcaggaaattccaggccaacatcttcaacaagagcaagtgtcagaactgcttcaagccccgcgagtcgcatctgctcaacgacgaggacctgacgcaggcaaaacccatttatggcggttggctgctcctggctccagatgggaccgactttgacaacccagtgcaccggtctcggaaatggcagcgacggttcttcatcctttacgagcacggcctcttgcgctacgccctggatgagatgcccacgacccttcctcagggcaccatcaacatgaaccagtgcacagatgtggtggatggggagggccgcacgggccagaagttctccctgtgtattctgacgcctgagaaggagcatttcatccgggcggagaccaaggagatcgtcagtgggtggctggagatgctcatggtctatccccggaccaacaagcagaatcagaagaagaaacggaaagtggagccccccacaccacaggagcctgggcctgccaaggtggctgttaccagcagcagcagcagcagcagcagcagcagcagcatccccagtgctgagaaagtccccaccaccaagtccacactctggcaggaagaaatgaggaccaaggaccagccagatggcagcagcctgagtccagctcagagtcccagccagagccagcctcctgctgccagctccctgcgggaacctgggctagagagcaaagaagaggagagcgccatgagtagcgaccgcatggactgtggccgcaaagtccgggtggagagcggctacttctctctggagaagaccaaacaggacttgaaggctgaagaacagcagctgcccccgccgctctcccctcccagccccagcacccccaaccacaggaggtcccaggtgattgaaaagtttgaggccttggacattgagaaggcagagcacatggagaccaatgcagtggggccctcaccatccagcgacacacgccagggccgcagcgagaagagggcgttccctaggaagcgggacttcaccaatgaagcccccccagctcctctcccagacgcctcggcttcccccctgtctccacaccgaagagccaagtcactggacaggaggtccacggagccctccgtgacgcccgacctgctgaatttcaagaaaggctggctgactaagcagtatgaggacggccagtggaagaaacactggtttgtcctcgccgatcaaagcctgagatactacagggattcagtggctgaggaggcagccgacttggatggagaaattgacttgtccgcatgttacgatgtcacagagtatccagttcagagaaactatggcttccagatacatacaaaggagggcgagtttaccctgtcggccatgacatctgggattcggcggaactggatccagaccatcatgaagcacgtgcacccgaccactgccccggatgtgaccagctcgttgccagaggaaaaaaacaagagcagctgctcttttgagacctgcccgaggcctactgagaagcaagaggcagagctgggggagccggaccctgagcagaagaggagccgcgcacgggagcggaggcgagagggccgctccaagacctttgactgggctgagttccgtcccatccagcaggccctggctcaggagcgggtgggcggcgtggggcctgctgacacccacgagcccctgcgccctgaggcggagcctggggagctggagcgggagcgtgcacggaggcgggaggagcgccgcaagcgcttcgggatgctcgacgccacagacgggccaggcactgaggatgcagccctgcgcatggaggtggaccggagcccagggctgcctatgagcgacctcaaaacgcataacgtccacgtggagattgagcagcggtggcatcaggtggagaccacacctctccgggaagagaagcaggtgcccatcgcccccgtccacctgtcttctgaagatgggggtgaccggctctccacacacgagctgacctctctgctcgagaaggagctggagcagagccagaaggaggcctcagaccttctggagcagaaccggctcctgcaggaccagctgagggtggccctgggccgggagcagagcgcccgtgagggctacgtgctgcaggccacgtgcgagcgagggtttgcagcaatggaagaaacgcaccagaagaagattgaagatctccagaggcagcaccagcgggagctagagaaacttcgagaagagaaagaccgcctcctagccgaggagacagcggccaccatctcagccatcgaagccatgaagaacgcccaccgggaggaaatggagcgggagctggagaagagccagcggtcccagatcagcagcgtcaactcggatgttgaggccctgcggcgccagtacctggaggagctgcagtcggtgcagcgggaactggaggtcctctcggagcagtactcgcagaagtgcctggagaatgcccatctggcccaggcgctggaggccgagcggcaggccctgcggcagtgccagcgtgagaaccaggagctcaatgcccacaaccaggagctgaacaaccgcctggctgcagagatcacacggttgcggacgctgctgactggggacggcggtggggaggccactgggtcaccccttgcacagggcaaggatgcctatgaactagaggtcttattgcgggtaaaggaatcggaaatacagtacctgaaacaggagattagctccctcaaggatgagctgcagacggcactgcgggacaagaagtacgcaagtgacaagtacaaagacatctacacagagctcagcatcgcgaaggctaaggctgactgtgacatcagcaggttgaaggagcagctcaaggctgcaacggaagcactgggggagaagtcccctgacagtgccacggtgtccggatatgatataatgaaatctaaaagcaaccctgacttcttgaagaaagacagatcctgtgtcacccggcaactcagaaacatcaggtccaagtccgtaattgagcaggtctcgtgggatacctga

SEQ ID NO: 262065 - DNA, 3078 bp, Artificial Sequence
  derived and/or modified sequence
atgagcgccgccaaggagaacccctgccggaagttccaggccaacatctttaacaagtctaagtgccaaaattgcttcaaacccagagagtctcatttgcttaatgatgaggatcttacacaagccaaaccaatttacggcggatggctgctgctggctcccgacgggacggacttcgataaccctgtgcaccgttccagaaagtggcagcgccgattctttatcctgtatgaacacggcttactcagatatgccctggatgaaatgccaactacccttccgcaggggacaatcaacatgaaccagtgtactgacgtggtggatggggaaggtcgaacagggcagaagtttagcctctgcatactgacacccgaaaaggaacactttattcgcgccgagacgaaggaaattgtaagcgggtggctggagatgcttatggtctacccacgcacaaacaagcagaatcaaaaaaaaaaaaggaaggtcgagccccccacacctcaagagcccggccctgccaaagttgccgttacgtcctcaagctcctcatccagctcctcgagctcaatcccatccgcagaaaaggtgcctacaacaaagtctaccctttggcaggaggagatgcggacgaaagatcagcctgacggaagttcattgtcccctgcccaaagcccgtcccagagtcagccgcccgctgcctcaagccttcgggagcccgggctggaaagtaaggaggaggagtccgccatgtcatccgacagaatggactgtggacgaaaggtgcgagtggagagcggctacttctcactggagaaaacgaagcaggacctcaaagctgaggaacaacaactgcctccaccattatcacccccgtcaccttccactccaaaccacagacgatcccaggtaatagagaaattcgaagcattggatattgagaaagcagagcatatggagaccaatgcggtaggacccagcccaagttccgacaccagacagggccgctcagagaaacgggctttccccagaaagcgcgatttcactaatgaggcgccaccagcccctcttccggacgccagcgccagcccgctgagtcctcacagaagagcaaagtccctcgatcgtaggtccacagagccatctgtgacacctgacttacttaattttaaaaaaggatggttaactaagcagtatgaggatgggcagtggaaaaagcactggttcgtgcttgccgaccaatctctgcgatactatagggattccgttgccgaggaggcggcggacttggacggcgagattgatttatctgcatgttacgacgttaccgaatacccggttcaacggaactatggatttcagattcataccaaagagggagagtttacactgtcggctatgacctccggcatccgcaggaactggatccagaccattatgaagcacgttcacccaaccacggcacccgatgttacatcttccctgccggaagaaaagaataagagttcctgctccttcgaaacctgccctcggcctactgagaaacaggaggcagaactcggcgagcccgacccggaacagaagcgttcccgcgcacgagagcgtaggagagaggggaggtccaaaacattcgattgggcggaattcagaccaattcaacaggccttggctcaggagcgtgtgggcggtgttggacctgcggacacccacgagcctctgcgcccagaggcagaaccgggagagttagagcgggaacgggcacgccgtcgggaggaaagacgcaagcggttcgggatgctagacgccactgacggtccaggcacagaggacgctgccctacgaatggaagtggatcgatcccctgggctgcctatgagcgatttgaagactcacaatgtgcatgtggaaatcgagcagcgctggcaccaggtcgagacgacccccctccgggaggagaaacaggttccaatcgcacctgtccatctgagtagtgaggacggaggcgaccgtcttagcacgcacgaactgacatccctgctcgaaaaggagctcgaacagagccagaaggaggcaagtgatctcttagaacagaatcgcctcctgcaggaccagctgagggtagcgctggggagggaacagtccgcccgcgaggggtacgttctgcaggctacctgcgagcggggatttgctgcgatggaggagactcaccagaaaaagatagaagacctccaacgtcagcatcagcgtgaactggagaagttgcgggaagagaaggatcgactgctcgcggaggaaacagccgcaacgattagtgccatcgaggctatgaagaatgcacaccgagaggagatggaacgggaactcgagaagagtcagcgttcgcagatttccagtgtgaacagtgatgtggaagcactacgacgccagtatctggaggagttacagagcgttcaacgagagcttgaagtgttgtcagagcagtatagtcagaagtgtcttgagaacgcccacctcgcccaggccttggaagctgagaggcaggcactgcggcagtgccaaagagaaaaccaggagctgaatgcccacaaccaagagctgaataataggctggccgccgaaattacaagattaaggacactgcttaccggcgacggcgggggagaggccactggtagtcctctagcccagggcaaggacgcttatgagctcgaagtgttactgagggtgaaagagtcggaaattcagtacctgaaacaggaaatctcaagtctgaaagatgagctgcagactgccctacgggacaagaagtacgcgtccgacaagtataaggacatctataccgagctgagtatcgctaaagctaaggctgactgtgatatcagcagactgaaagagcagctcaaggccgccaccgaggctctgggggagaagtcccctgacagtgccaccgtgtccggctatgacatcatgaaaagcaaatcaaaccccgacttcctcaaaaaagaccgctcatgcgtgaccaggcaactcagaaacattcggtccaaaagtgtgatcgagcaggtgagttgggacacgtag

SEQ ID NO: 262066 - DNA, 3078 bp, Artificial Sequence
  derived and/or modified sequence
atgagcgccgccaaggagaacccctgccggaagttccaggccaacatatttaacaaatctaagtgtcaaaattgctttaagccaagagagtcccatttattaaatgatgaagacctgactcaggcaaaaccaatctacggcggctggctactgctggctcctgatggcactgactttgacaacccagttcaccgctctcgaaagtggcagcgtcggttcttcattctgtacgaacatggacttctacgctatgccctagatgaaatgcctacaaccctgccacagggcaccatcaacatgaaccagtgcacagatgtagtggatggggagggaaggacaggacagaaattctctctgtgcatacttacacccgagaaagagcatttcatcagggccgagaccaaagagatcgtcagcggctggctggagatgctcatggtttatccgcggaccaacaaacagaaccaaaaaaaaaagcgcaaagtggaacctccaacccctcaggagccagggccagcaaaagtggccgtgacctcgagtagctcgagctctagctcctccagctccattcccagtgctgaaaaggttccaacaacgaagtcaaccctctggcaggaagagatgcgtaccaaagatcaacccgatggaagctcactgagccctgctcaatcacctagccagtctcaacccccagccgcgtcatctctgagggaaccaggactggaatccaaggaggaagagtccgccatgtcctccgacagaatggactgcgggcggaaggtacgcgttgagtccggctacttcagcctggagaaaaccaaacaggaccttaaagccgaagaacagcagcttcccccacctctctcacccccatcaccgtctacccccaaccaccggagaagccaggtaatcgagaagttcgaggcgcttgacattgagaaggctgagcacatggaaacgaacgccgttggtccctcacccagtagcgacacccgtcagggacgctctgaaaaacgggcttttcctaggaaaagagacttcaccaacgaggccccccccgccccgttaccagacgcctccgccagtccactgtctccacatagaagggcgaaaagcctggaccggcgatctaccgaaccctcggtgacacctgatcttctgaactttaagaagggctggttgaccaaacaatacgaagacggccagtggaagaagcattggttcgtgctggccgaccaaagtctaagatactatagggactcagtggccgaggaggccgcagatctcgatggagaaatcgacctgtccgcatgttacgatgttacagaatatcccgtgcagcggaattacggatttcaaattcacacaaaagaaggggagttcacactctcggctatgacaagcgggattcgtcgcaactggatccagaccatcatgaaacacgtgcatccaaccaccgctcctgatgtcacatccagtttgcccgaagaaaagaacaagagttcatgcagctttgagacgtgtcctaggcctaccgagaagcaggaggccgagctgggtgaacccgatccggaacagaagagatcccgcgccagggagagaagacgagagggacgcagcaaaacattcgactgggcagaattcaggcccatccagcaggcgttggcgcaagaacgggtgggcggagtggggcccgcagacactcacgagcccttacgccccgaagccgaaccaggggaactcgagagagagcgtgcccgtcgtagggaggagaggaggaaaaggttcggcatgctcgacgccacagacggccctggcacagaagatgccgccctacgaatggaagtggatcggagccctggcctgccgatgagcgacctgaaaacccacaatgtacacgttgagatcgaacagaggtggcaccaagtggagaccacccctctgcgtgaagagaagcaagtaccaattgcccctgtgcatctgtccagtgaggatggaggtgacaggctcagcactcacgaactgaccagtctactagagaaagagctggagcagtcgcaaaaagaagcctccgatcttctggagcagaaccgcctgctgcaggatcagcttagggttgcactaggcagggagcagagcgccagggaagggtatgtgttgcaggccacctgtgagcggggcttcgccgcaatggaagagacccaccagaagaaaatcgaggatctccagcggcagcatcagcgtgaactcgagaaattacgcgaagagaaggaccggctgctcgctgaagagaccgccgcaactatctcagccatagaggcgatgaaaaacgcacatcgtgaggagatggaacgcgaactggagaaaagccagcgatcccaaatcagctcagttaactccgatgtggaagctttgcgcaggcagtacttggaagaactccagagcgtgcagagagagctggaggtgctgagtgagcagtacagccaaaaatgtctggaaaacgcccatctggcccaggccctcgaggctgagcggcaggctctccgccaatgtcagagagaaaatcaggagctgaatgcccacaatcaggaattaaataaccggttagccgcagagattacacgattaagaacgctactgacgggagatggaggaggtgaagcaaccggcagccccctggctcaggggaaagacgcttacgaactggaagtacttttgcgcgtcaaggagtccgagatccagtacctcaagcaggagataagttccctgaaggatgaacttcagactgcactcagggacaaaaagtacgcttcagataagtataaagacatttacacagagctctcaatcgcaaaggccaaagctgactgcgatatcagtagactcaaagagcaactgaaggccgccactgaagctctgggcgaaaagtcacccgattccgctacagtcagtggttacgacatcatgaaatccaaaagcaacccagacttcttgaagaaggacagatcttgtgtgactcgccagctgaggaatattaggagcaagtccgtaatcgaacaggtgagctgggatacctag

SEQ ID NO: 262067 - DNA, 3078 bp, Artificial Sequence
  derived and/or modified sequence
atgtctgccgcaaaggaaaacccttgcagaaagtttcaggccaatattttcaataagagtaagtgtcaaaattgcttcaagccgagagagagccatctgctgaatgacgaggatctgacccaagcaaagcctatctacgggggttggctcctattggcgcctgatgggacagactttgataacccggtccacagatctcggaaatggcagcgcagattcttcatcctgtacgagcatgggctgctgaggtatgccttagacgagatgcccaccaccttaccccagggtacaatcaacatgaatcagtgtactgatgtggtggatggtgaaggtcgtaccggccagaaatttagtttatgcattctgactcctgaaaaagaacatttcattcgggctgagactaaggagattgtatcaggatggctggagatgcttatggtttacccacggactaacaagcagaatcaaaagaagaaacggaaagtggaaccacctacaccccaggagcctggcccagcaaaagtagctgttacctcaagctctagttcctctagcagctcttcttcaatcccttccgcggagaaggtgcccactactaaatctacattgtggcaggaagaaatgaggaccaaggatcaaccagatggatcgtccctgagcccagcgcagtctccttcccagagtcagcccccagccgctagttcgcttagagagcctggactggagtccaaagaagaagagagtgccatgtcatccgatagaatggactgtggaaggaaagtaagggtcgaatcaggatacttctcactcgagaagaccaagcaggatctgaaagcggaagagcagcagctgcccccaccactgtcccccccaagccccagcacccccaaccatcggagatcccaggtaattgaaaagtttgaagcattggacattgagaaggccgagcatatggagaccaatgctgttggacccagcccaagctcagatacccgacagggcaggagcgaaaaacgcgcattcccgcgaaagcgcgacttcacaaacgaagctccgcctgctcctttgccggatgcttcggcatcccctctgtcacctcacagacgagccaaaagcctggaccgcagaagcactgaaccatccgtgacccctgatctcttaaattttaagaagggatggttaacaaagcagtatgaagacggtcagtggaaaaagcactggttcgtcctcgccgatcagtcacttcggtactacagggacagcgtggcggaggaagccgcagacttggatggtgagatagatctatccgcctgttatgacgtgaccgagtaccccgtgcagcgcaattatggcttccagattcacacaaaagagggcgaattcacactgagtgctatgacctcgggcattcgccgtaattggatccagacgataatgaaacacgtacaccccacaaccgctcccgatgtgacttcctctctccccgaggaaaagaacaaatccagctgcagctttgaaacctgtcccaggccgacagagaagcaagaggcggagctgggggagcccgatcccgaacagaaacggtccagggctcgggagcgaaggcgagaaggcaggtccaaaacttttgattgggccgaattccgaccgatacagcaagctttagcacaggagagagtaggcggtgtggggcctgcagatacccacgaacccttgcggcctgaagccgagcccggtgaactggaaagggagagagcacgcaggagggaagagaggaggaaaagattcggaatgttagacgccaccgacgggccaggcaccgaggatgcggctctgcgtatggaagtcgaccgaagtcccggacttcccatgtctgacttaaagacccacaacgtccacgtggagatcgagcagcggtggcaccaggtagaaacaactcccttgagagaagaaaaacaggtgcctatagctcctgtacacctttcctcagaggacggcggagaccggctctctacccacgaactcacaagtctgttggagaaagaactggaacaatcccagaaggaggcaagtgatttattagaacaaaaccggctgcttcaggatcagctgagggtggcgctcggtcgagagcagagtgcaagggaaggatacgtgctgcaggccacatgtgaaagaggctttgcagctatggaggagacgcaccagaaaaagatcgaagaccttcagagacagcatcagcgggaactcgaaaagttgagagaggaaaaagacagactgcttgcggaggaaaccgcggctaccatctcggctatcgaggctatgaaaaacgcacatcgcgaggagatggagagagagttggagaagagtcagagatcacagatttcctccgtgaattcagacgtggaggctttacgccgtcagtatctggaggagcttcagagcgtgcagcgggaactggaggtgttgagtgaacaatatagtcagaagtgtctggagaatgcgcaccttgctcaagctctcgaggccgagcgacaggccctcagacaatgccagagggagaatcaggagctaaacgcccacaatcaggaacttaacaacaggctcgctgccgaaattactagactgcgaaccctgctcacgggggacggcggaggagaagccaccgggtccccactggctcagggtaaagacgcgtatgaactggaggttctgctgagagtcaaagagtcggaaatccagtacttaaagcaggaaattagtagcctgaaggacgagctgcaaacagcacttagggataaaaaatacgcttccgataagtacaaagatatctacacagagcttagcatcgctaaggctaaggcagattgtgacatttcccgtctgaaggagcagctgaaagcagctacggaagccctgggtgagaaaagtccagacagcgctactgtcagtggatacgatatcatgaagtccaagtctaacccagatttcctgaagaaagacaggtcatgtgtcactcggcaactaagaaacatccgtagcaagtcagttatcgaacaggtgtcgtgggacacgtag

SEQ ID NO: 262068 - DNA, 3078 bp, Artificial Sequence
  derived and/or modified sequence
atgtctgccgctaaggaaaacccgtgccggaaattccaagcaaacatcttcaacaaaagtaagtgccagaactgtttcaaacctagagagtctcatctgctaaacgacgaggacctgactcaggcgaaacctatatacgggggttggctcctactcgccccagacggaactgatttcgacaatccggttcatcgcagtcgcaagtggcaacgcagattcttcatcctctacgaacatggtctgctgcgatatgcattggatgaaatgcccacaactctgccacagggcactatcaacatgaatcagtgcacagatgtcgtggacggagaaggacggacaggccagaaattttctctctgtatactgacaccagagaaagaacactttatccgcgctgaaaccaaagagatagtgtctggctggctcgagatgcttatggtatatcccagaacaaacaagcagaaccagaagaaaaagcgaaaggtagagccaccaaccccccaggagcctggccctgcaaaggttgccgtcactagttcctcttccagctctagcagcagttcatccattccctctgccgagaaagtccctactaccaaaagcaccctctggcaggaagagatgaggacaaaggaccagcctgacgggtctagcttaagcccagcccaatccccttcccaatcacaacctccggctgcatcttcactgagagaaccgggtctggagagcaaggaagaggagtctgcaatgtcttcagatagaatggattgcggtcgcaaagtacgtgtggaatccggctacttcagcttagagaaaacaaagcaagacttgaaagccgaagagcagcaactccctccaccgttatcccctcctagcccttccactcctaaccataggcgatctcaggtaatcgaaaagtttgaggccctggatattgaaaaagccgaacatatggaaactaacgcggtgggtccctcaccgagttccgacaccagacaagggaggtcggagaagcgcgctttccccagaaaacgggatttcacgaacgaggctcctccagctcccctcccagatgcctccgcctctccactctcccctcacaggcgggctaaaagcctggatcggaggtcaactgaaccgtccgtgactccggatctgttaaattttaagaagggctggctcacaaaacagtatgaggacgggcaatggaagaaacactggtttgtgttagccgaccaatccctgcggtattatcgagactcagtggcagaagaggcagccgatctggacggagaaatcgacctatcagcatgctatgatgtgacagaatatcccgtgcagagaaactacgggttccagattcacaccaaggagggcgaatttactctatcggccatgacgtccggcatccggaggaattggatccaaacaatcatgaaacatgttcatccaactacagcccctgatgtcactagctccctgccagaagagaagaacaagtcctcgtgctctttcgagacatgccctaggcccacggagaaacaagaggcggagcttggagaacctgacccggaacagaaacggagccgagccagagagaggcgaagggagggcaggtcaaaaactttcgattgggctgagttccgacccatccagcaggcgctggcgcaggagcgggttgggggtgtcggacctgccgatactcacgagcccttaaggcctgaggccgagccaggcgaactggaacgcgagagagctcgcaggagggaggagcggagaaaaaggttcggaatgctggatgccaccgacggccctggcactgaggacgctgctctgcggatggaggtggaccgctctccagggcttccgatgtctgacctgaagacgcacaatgtgcacgtggagattgaacaacgatggcatcaagttgagacaacccctttgagggaggagaaacaagtgcccattgctcctgtgcacctgagcagtgaagatgggggtgacagactttcaacccacgaactaacttctttactggagaaagagctcgagcagtctcagaaggaggcgagcgacttgcttgaacagaacaggctgctccaagaccaactgagagtcgccctgggcagagaacagagcgctcgggaaggctacgtgctccaggctacatgtgagcggggattcgctgcaatggaggagacccatcagaagaagatcgaggatctgcaaaggcagcaccaacgggagttggaaaaactgagggaagaaaaggacaggctcctggctgaagagactgctgctacaatttctgccatagaagcaatgaagaatgcacacagagaggaaatggaacgtgagctggaaaagtcacagaggagccagattagctctgttaatagcgatgttgaagccctgagacgacagtacctcgaagagcttcagagcgtgcagcgggagttggaggtcctgagcgaacagtattctcagaagtgtctggagaacgcacaccttgcccaagcactcgaagccgaacgccaagcattaaggcagtgccaaagggagaaccaggagttaaacgcacacaaccaggaattgaataatcggcttgctgccgagataacccggctgaggacactccttactggcgatgggggtggagaggccaccggttctcctctcgctcagggaaaagatgcctatgagttagaggtgttgttgcgagtgaaagagtccgagattcaatacctcaagcaggaaatctcgtctctaaaagatgagctgcaaaccgctctgcgagacaaaaagtacgccagcgacaaatacaaggacatctacaccgagctgtctatagccaaagccaaggccgattgcgacatctctaggttgaaggaacagctgaaggcagctaccgaagcgctcggagaaaaatcccccgatagtgcaacggtgtccggatacgatattatgaaaagcaaaagcaatccggactttctgaaaaaggacagatcctgtgtgacaaggcaactgcgcaatatccggtcgaaaagcgtcatagaacaggtgtcctgggacacctag

SEQ ID NO: 262069 - DNA, 3078 bp, Artificial Sequence
  derived and/or modified sequence
atgagcgccgccaaggagaacccctgcagaaagttccaggccaacatcttcaacaagagcaagtgccagaactgcttcaagcccagagagagccacctgctgaacgacgaggacctgacccaggccaagcccatctacggcggctggctgctgctggcccccgacggcaccgacttcgacaaccccgtgcacagaagcagaaagtggcagagaagattcttcatcctgtacgagcacggcctgctgagatacgccctggacgagatgcccaccaccctgccccagggcaccatcaacatgaaccagtgcaccgacgtggtggacggcgagggcagaaccggccagaagttcagcctgtgcatcctgacccccgagaaggagcacttcatcagagccgagaccaaggagatcgtgagcggctggctggagatgctgatggtgtaccccagaaccaacaagcagaaccagaagaagaagagaaaggtggagccccccaccccccaggagcccggccccgccaaggtggccgtgaccagcagcagcagcagcagcagcagcagcagcagcatccccagcgccgagaaggtgcccaccaccaagagcaccctgtggcaggaggagatgagaaccaaggaccagcccgacggcagcagcctgagccccgcccagagccccagccagagccagccccccgccgccagcagcctgagagagcccggcctggagagcaaggaggaggagagcgccatgagcagcgacagaatggactgcggcagaaaggtgagagtggagagcggctacttcagcctggagaagaccaagcaggacctgaaggccgaggagcagcagctgcccccccccctgagcccccccagccccagcacccccaaccacagaagaagccaggtgatcgagaagttcgaggccctggacatcgagaaggccgagcacatggagaccaacgccgtgggccccagccccagcagcgacaccagacagggcagaagcgagaagagagccttccccagaaagagagacttcaccaacgaggccccccccgcccccctgcccgacgccagcgccagccccctgagcccccacagaagagccaagagcctggacagaagaagcaccgagcccagcgtgacccccgacctgctgaacttcaagaagggctggctgaccaagcagtacgaggacggccagtggaagaagcactggttcgtgctggccgaccagagcctgagatactacagagacagcgtggccgaggaggccgccgacctggacggcgagatcgacctgagcgcctgctacgacgtgaccgagtaccccgtgcagagaaactacggcttccagatccacaccaaggagggcgagttcaccctgagcgccatgaccagcggcatcagaagaaactggatccagaccatcatgaagcacgtgcaccccaccaccgcccccgacgtgaccagcagcctgcccgaggagaagaacaagagcagctgcagcttcgagacctgccccagacccaccgagaagcaggaggccgagctgggcgagcccgaccccgagcagaagagaagcagagccagagagagaagaagagagggcagaagcaagaccttcgactgggccgagttcagacccatccagcaggccctggcccaggagagagtgggcggcgtgggccccgccgacacccacgagcccctgagacccgaggccgagcccggcgagctggagagagagagagccagaagaagagaggagagaagaaagagattcggcatgctggacgccaccgacggccccggcaccgaggacgccgccctgagaatggaggtggacagaagccccggcctgcccatgagcgacctgaagacccacaacgtgcacgtggagatcgagcagagatggcaccaggtggagaccacccccctgagagaggagaagcaggtgcccatcgcccccgtgcacctgagcagcgaggacggcggcgacagactgagcacccacgagctgaccagcctgctggagaaggagctggagcagagccagaaggaggccagcgacctgctggagcagaacagactgctgcaggaccagctgagagtggccctgggcagagagcagagcgccagagagggctacgtgctgcaggccacctgcgagagaggcttcgccgccatggaggagacccaccagaagaagatcgaggacctgcagagacagcaccagagagagctggagaagctgagagaggagaaggacagactgctggccgaggagaccgccgccaccatcagcgccatcgaggccatgaagaacgcccacagagaggagatggagagagagctggagaagagccagagaagccagatcagcagcgtgaacagcgacgtggaggccctgagaagacagtacctggaggagctgcagagcgtgcagagagagctggaggtgctgagcgagcagtacagccagaagtgcctggagaacgcccacctggcccaggccctggaggccgagagacaggccctgagacagtgccagagagagaaccaggagctgaacgcccacaaccaggagctgaacaacagactggccgccgagatcaccagactgagaaccctgctgaccggcgacggcggcggcgaggccaccggcagccccctggcccagggcaaggacgcctacgagctggaggtgctgctgagagtgaaggagagcgagatccagtacctgaagcaggagatcagcagcctgaaggacgagctgcagaccgccctgagagacaagaagtacgccagcgacaagtacaaggacatctacaccgagctgagcatcgccaaggccaaggccgactgcgacatcagcagactgaaggagcagctgaaggccgccaccgaggccctgggcgagaagagccccgacagcgccaccgtgagcggctacgacatcatgaagagcaagagcaaccccgacttcctgaagaaggacagaagctgcgtgaccagacagctgagaaacatcagaagcaagagcgtgatcgagcaggtgagctgggacacctag

SEQ ID NO: 262070 - protein, 270 aa, Artificial Sequence
  derived and/or modified sequence
MSSTQFNKGPSYGLSAEVKNRLLSKYDPQKEAELRTWIEGLTGLSIGPDFQKGLKDGTILCTLMNKLQPGSVPKINRSMQNWHQLENLSNFIKAMVSYGMNPVDLFEANDLFESGNMTQVQVSLLALAGKMGTNKCASQSGMTAYGTRRHLYDPKNHILPPMDHSTISLQMGTNKCASQVGMTAPGTRRHIYDTKLGTDKCDNSSMSLQMGYTQGANQSGQVFGLGRQIYDPKYCPQGTVADGAPSGTGDCPDPGEVPEYPPYYQEEAGY

SEQ ID NO: 262071 - DNA, 813 bp, Artificial Sequence
  derived and/or modified sequence
atgagcagcacccagttcaacaagggccccagctacggcctgagcgccgaggtgaagaacagactgctgagcaagtacgacccccagaaggaggccgagctgagaacctggatcgagggcctgaccggcctgagcatcggccccgacttccagaagggcctgaaggacggcaccatcctgtgcaccctgatgaacaagctgcagcccggcagcgtgcccaagatcaacagaagcatgcagaactggcaccagctggagaacctgagcaacttcatcaaggccatggtgagctacggcatgaaccccgtggacctgttcgaggccaacgacctgttcgagagcggcaacatgacccaggtgcaggtgagcctgctggccctggccggcaagatgggcaccaacaagtgcgccagccagagcggcatgaccgcctacggcaccagaagacacctgtacgaccccaagaaccacatcctgccccccatggaccacagcaccatcagcctgcagatgggcaccaacaagtgcgccagccaggtgggcatgaccgcccccggcaccagaagacacatctacgacaccaagctgggcaccgacaagtgcgacaacagcagcatgagcctgcagatgggctacacccagggcgccaaccagagcggccaggtgttcggcctgggcagacagatctacgaccccaagtactgcccccagggcaccgtggccgacggcgcccccagcggcaccggcgactgccccgaccccggcgaggtgcccgagtaccccccctactaccaggaggaggccggctactag

SEQ ID NO: 262072 - DNA, 2337 bp, Artificial Sequence
  derived and/or modified sequence
gaaagagtgagagccgcccacgagctctgagcagagagcccgcaggagtgccacgtcccggcggcctcggcccctccctgcctcagtttcccgtggcatcaaagggggcgaggggcccctccaggcctctggtgacgggggtgctgtgcccaggcgggggtccgggggcgaccgagggggctcaggaagtccgcggccgcaggaattcggcgcctccaggccttataaggacatttgcgctccgggccaatcagcggcgggggcgtggcgcgcggagcccggcgcgtcccaaccccgcgccagcccggcggtcccgtcccgtcccgtcctgtgcggccccgtcccgccgcccgcccgccagccatgagctccacgcagttcaacaagggcccctcgtacgggctgtcggccgaggtcaagaaccggctcctgtccaaatatgacccccagaaggaggcagagctccgcacctggatcgagggactcaccggcctctccatcggccccgacttccagaagggcctgaaggatggaactatcttatgcacactcatgaacaagctacagccgggctccgtccccaagatcaaccgctccatgcagaactggcaccagctagaaaacctgtccaacttcatcaaggccatggtcagctacggcatgaaccctgtggacctgttcgaggccaacgacctgtttgagagtgggaacatgacgcaggtgcaggtgtctcttctcgccctggcggggaagatgggcaccaacaaatgcgccagccagtcgggcatgactgcctacggcacgagaaggcatctctatgaccccaagaaccatatcctgccccccatggaccactcgaccatcagcctccagatgggcacgaacaagtgtgccagccaggtgggcatgacggctcccgggacccggcggcacatctatgataccaagctgggaaccgacaagtgtgacaactcctccatgtccctgcagatgggctacacgcagggcgccaaccagagcggccaggtcttcggcctgggccggcagatatatgaccccaagtactgcccgcaaggcacagtggccgatggggctccctcgggcaccggcgactgcccggacccgggggaggtccctgaatatcccccttactaccaggaggaggccggctactgaggctcccagcacgctctctccccacatcgtctgcccatctgggtttttgggtttttctgtgttttcatcttttttttttttttcttaacccgttcagtgctgccagtcaaccaagggtctgtgagtgtcagcgtgggatcaggcagcagagcttttttcccctttgccttgatccttcgcaaggctgagccactgggctgtgggggaaggggtcaaggccatatcccaatacgtgtagggcgagggtccctgctggcacattcaggctgtgctgggaagaagagacctgggcttggaaggaaccggtccccgacggtttctgcttgcctcgcctcttcccccttttgtcagctgagcagtttgtggtttctatgcccgcaagtttcaggaagtattcacaaaagaaaaatacattttttcccccaggggtggggcaaggacagtggagagagtgctaggaaatgagtcccctgggaaaggggaccgggccgtgatgttaaatatctccggctcccaagtgactggatttgcctaggaccttcagaccaacagacttcagaccctcagacctgccccggggccaggtggagaaagtgagggccgtacaaggaagtgaaattctgagttgttggggctaagcctgaccccctctccatgctccccgccccaacccactctggcctcagtagatttttttttcagttgtggttgttgcccaggctggagtgcagtggcgccatcttggctcactgcacctccaccttccgggctcaagcgattctccagcctcagcctcctgagtagctaggactgcaggtgctccaccacgcccggctaatttttgtatttttagtagagatggggtttccccatgttggccaggctggtctcgaactcctggcctcaggtgtgatccgcccgcctccgcctccccaagcgctgagattacaggtgtgagccaccgtgcccagcccctcagtaggttttaaggagcccccagccctcctcccttctgggcccgaccagcttatactgctccatcttccccggccacatgccccgccaagtactgcacagggaccccccacccaggggacctgctccgtgagataatgtgaaatacgactgtggaccaaacgcaataaaacctctgtttgtacg

SEQ ID NO: 262073 - DNA, 813 bp, Artificial Sequence
  derived and/or modified sequence
atgtcctctacacagtttaacaaggggcctagctatggactgtctgcggaggtgaagaataggctactgagcaagtatgacccccagaaggaggccgagctccggacctggattgaaggactgacaggcctgtctattggcccagatttccagaaaggactgaaggatggcaccattttgtgtaccttaatgaataagctacaacctggcagcgtgccgaagatcaaccgaagcatgcaaaactggcatcagctggaaaacctgtctaattttattaaagctatggtgtcttacgggatgaacccagtggacctgtttgaggccaacgacctttttgagagcggtaatatgacccaggtgcaggtgtcactgttagcgcttgctggcaaaatgggaaccaacaagtgtgccagccagagtggcatgactgcctatggtactagacgacacctgtatgatccgaagaaccatatcttaccgccaatggatcacagcaccatatccctacagatgggaacaaacaaatgcgcatcccaggtcggtatgactgcccctgggactcgacggcatatttatgatacaaaactggggaccgacaagtgcgacaacagttccatgagtctccaaatgggctacacccaaggggccaatcagtctggccaggtgtttggactgggtcgtcagatttacgaccctaaatattgtccccaggggactgttgctgatggcgcaccgagcgggaccggggattgcccggaccctggcgaggtgccagagtaccctccttactatcaggaagaagctgggtactag

SEQ ID NO: 262074 - DNA, 813 bp, Artificial Sequence
  derived and/or modified sequence
atgagcagcacccagttcaacaagggccccagctatggcctgtctgctgaggtgaagaaccggctgctgagcaaatatgacccccagaaggaggccgagctgcggacctggattgagggcctgaccggcctgagcatcggccctgacttccagaagggcctgaaggatggcaccatcctgtgcaccctgatgaacaagctgcagcccggctctgtgcccaagatcaacagatccatgcagaactggcaccagctggagaacctgagcaacttcatcaaggccatggtgtcctatggcatgaaccctgtggacctgtttgaggccaatgacctgtttgagagcggcaacatgacccaggtgcaggtgtccctgctggccctggccggcaagatgggcaccaacaagtgtgccagccagagcggcatgacagcctacggcacccggcggcacctgtatgaccccaagaaccacatcctgccccccatggaccacagcaccatcagcctgcagatgggcaccaacaagtgtgccagccaggtgggcatgacagcccctggcacccggcggcacatctatgacaccaagctgggcacagacaagtgtgacaacagctccatgagcctgcagatgggctacacccagggcgccaaccagagcggccaggtgtttggcctgggccggcagatctatgaccccaagtactgcccccagggcaccgtggctgatggagcccccagcggcaccggggactgcccagaccccggggaggtgcctgagtacccaccctactaccaggaggaggccggctactag

SEQ ID NO: 262075 - DNA, 813 bp, Artificial Sequence
  derived and/or modified sequence
atgagcagcacccagttcaacaagggccccagctacggcctgagcgcggaggtgaaaaaccgcttgcttagtaagtatgatcctcagaaggaggccgaactacggacatggattgagggcttgacaggcctgtcgatcggacccgactttcagaaaggcctgaaggatggaactatattgtgtaccctcatgaacaaactgcagcctggctcagttcccaaaatcaacagaagcatgcagaattggcaccaactggagaacctgtccaactttatcaaggcaatggtctcctatggaatgaacccagtggatctgttcgaggctaatgatctgttcgaatccggaaatatgactcaggtccaggtgtccctgcttgcattggctggtaaaatgggcacgaataaatgtgcttcacagtcgggtatgacagcctacggcacacgcagacacctttatgatccgaaaaaccatatccttccaccaatggatcattctaccatttctctgcaaatgggtactaacaaatgcgcaagtcaggtgggtatgactgcacctggtacaagaaggcacatttacgacaccaagctgggcaccgacaagtgcgataattctagcatgtctctccaaatgggatacacacaaggtgcgaaccaatcgggacaagtgtttggtcttgggcgtcagatttacgacccgaagtactgccctcaaggaacagtggccgacggggcaccatcaggcaccggagactgtcctgacccaggggaagttcccgaatatccaccctactaccaggaagaggccggctattag

SEQ ID NO: 262076 - DNA, 813 bp, Artificial Sequence
  derived and/or modified sequence
atgtcctcgacccagttcaacaagggccctagctatgggttgtcagcagaggttaaaaaccggctcctctctaagtatgacccccaaaaagaagcggagcttcgcacctggatcgaaggcttgactgggctttcaataggcccagatttccagaaaggactcaaggacgggacaattctctgcaccttaatgaataagctgcagcccggttcagtgccaaagataaacaggagtatgcaaaactggcatcaactggaaaatctcagtaatttcattaaagccatggtctcctacgggatgaaccctgttgacttattcgaagcaaatgacctcttcgagtcagggaatatgactcaggtccaggtctcactactggctctggctggtaagatgggtacgaacaaatgtgcatctcagagtggtatgactgcttatggcactcgaagacatctctatgaccctaagaaccatattctgccgcctatggatcactctactatctctctccagatgggcaccaataaatgtgcttctcaggtggggatgaccgcgccagggactagaagacatatctatgacactaaattgggaaccgacaagtgtgacaattcgtctatgagtctccaaatgggatatacgcagggcgctaaccagtctggacaggtctttggactcggtaggcagatctacgaccccaaatactgtccgcaggggaccgtggcggacggagcgcctagcggcaccggcgactgccctgacccgggtgaagtgcctgaatatcctccatattaccaagaggaggcagggtattag

SEQ ID NO: 262077 - protein, 909 aa, Artificial Sequence
  derived and/or modified sequence
MDMFPLTWVFLALYFSRHQVRGQPDPPCGGRLNSKDAGYITSPGYPQDYPSHQNCEWIVYAPEPNQKIVLNFNPHFEIEKHDCKYDFIEIRDGDSESADLLGKHCGNIAPPTIISSGSMLYIRFTSDYARQGAGFSLRYEIFKTGSEDCSKNFTSPNGTIESPGFPEKYPHNLDCTFTILAKPKMEIILQFLIFDLEHDPLQVGEGDCKYDWLDIWDGIPHVGPLIGKYCGTKTPSELRSSTGILSLTFHTDMAVAKDGFSARYYLVHQEPLENFQCNVPLGMESGRIANEQISASSTYSDGRWTPQQSRLHGDDNGWTPNLDSNKEYLQVDLRFLTMLTAIATQGAISRETQNGYYVKSYKLEVSTNGEDWMVYRHGKNHKVFQANNDATEVVLNKLHAPLLTRFVRIRPQTWHSGIALRLELFGCRVTDAPCSNMLGMLSGLIADSQISASSTQEYLWSPSAARLVSSRSGWFPRIPQAQPGEEWLQVDLGTPKTVKGVIIQGARGGDSITAVEARAFVRKFKVSYSLNGKDWEYIQDPRTQQPKLFEGNMHYDTPDIRRFDPIPAQYVRVYPERWSPAGIGMRLEVLGCDWTDSKPTVETLGPTVKSEETTTPYPTEEEATECGENCSFEDDKDLQLPSGFNCNFDFLEEPCGWMYDHAKWLRTTWASSSSPNDRTFPDDRNFLRLQSDSQREGQYARLISPPVHLPRSPVCMEFQYQATGGRGVALQVVREASQESKLLWVIREDQGGEWKHGRIILPSYDMEYQIVFEGVIGKGRSGEIAIDDIRISTDVPLENCMEPISAFADEYEVDWSNSSSATSGSGAPSTDKEKSWLYTLDPILITIIAMSSLGVLLGATCAGLLLYCTCSYSGLSSRSCTTLENYNFELYDGLKHKVKMNHQKCCSEA

SEQ ID NO: 262078 - protein, 909 aa, Artificial Sequence
  derived and/or modified sequence
MDMFPLTWVFLALYFSRHQVRGQPDPPCGGRLNSKDAGYITSPGYPQDYPSHQNCEWIVYAPEPNQKIVLNFNPHFEIEKHDCKYDFIEIRDGDSESADLLGKHCGNIAPPTIISSGSMLYIRFTSDYARQGAGFSLRYEIFKTGSEDCSKNFTSPNGTIESPGFPEKYPHNLDCTFTILAKPKMEIILQFLIFDLEHDPLQVGEGDCKYDWLDIWDGIPHVGPLIGKYCGTKTPSELRSSTGILSLTFHTDMAVAKDGFSARYYLVHQEPLENFQCNVPLGMESGRIANEQISASSTYSDGRWTPQQSRLHGDDNGWTPNLDSNKEYLQVDLRFLTMLTAIATQGAISRETQNGYYVKSYKLEVSTNGEDWMVYRHGKNHKVFQANNDATEVVLNKLHAPLLTRFVRIRPQTWHSGIALRLELFGCRVTDAPCSNMLGMLSGLIADSQISASSTQEYLWSPSAARLVSSRSGWFPRIPQAQPGEEWLQVDLGTPKTVKGVIIQGARGGDSITAVEARAFVRKFKVSYSLNGKDWEYIQDPRTQQPKLFEGNMHYDTPDIRRFDPIPAQYVRVYPERWSPAGIGMRLEVLGCDWTDSKPTVETLGPTVKSEETTTPYPTEEEATECGENCSFEDDKDLQLPSGFNCNFDFLEEPCGWMYDHAKWLRTTWASSSSPNDRTFPDDRNFLRLQSDSQREGQYARLISPPVHLPRSPVCMEFQYQATGGRGVALQVVREASQESKLLWVIREDQGGEWKHGRIILPSYDMEYQIVFEGVIGKGRSGEIAIDDIRISTDVPLENCMGPKACIADEYEVDWSNSSSATSGSGAPSTDKEKSWLYTLDPILITIIAMSSLGVLLGATCAGLLLYCTCSYSGLSSRSCTTLENYNFELYDGLKHKVKMNHQKCCSEA

SEQ ID NO: 262079 - DNA, 2730 bp, Artificial Sequence
  derived and/or modified sequence
atggacatgttccccctgacctgggtgttcctggccctgtacttcagcagacaccaggtgagaggccagcccgaccccccctgcggcggcagactgaacagcaaggacgccggctacatcaccagccccggctacccccaggactaccccagccaccagaactgcgagtggatcgtgtacgcccccgagcccaaccagaagatcgtgctgaacttcaacccccacttcgagatcgagaagcacgactgcaagtacgacttcatcgagatcagagacggcgacagcgagagcgccgacctgctgggcaagcactgcggcaacatcgccccccccaccatcatcagcagcggcagcatgctgtacatcagattcaccagcgactacgccagacagggcgccggcttcagcctgagatacgagatcttcaagaccggcagcgaggactgcagcaagaacttcaccagccccaacggcaccatcgagagccccggcttccccgagaagtacccccacaacctggactgcaccttcaccatcctggccaagcccaagatggagatcatcctgcagttcctgatcttcgacctggagcacgaccccctgcaggtgggcgagggcgactgcaagtacgactggctggacatctgggacggcatcccccacgtgggccccctgatcggcaagtactgcggcaccaagacccccagcgagctgagaagcagcaccggcatcctgagcctgaccttccacaccgacatggccgtggccaaggacggcttcagcgccagatactacctggtgcaccaggagcccctggagaacttccagtgcaacgtgcccctgggcatggagagcggcagaatcgccaacgagcagatcagcgccagcagcacctacagcgacggcagatggaccccccagcagagcagactgcacggcgacgacaacggctggacccccaacctggacagcaacaaggagtacctgcaggtggacctgagattcctgaccatgctgaccgccatcgccacccagggcgccatcagcagagagacccagaacggctactacgtgaagagctacaagctggaggtgagcaccaacggcgaggactggatggtgtacagacacggcaagaaccacaaggtgttccaggccaacaacgacgccaccgaggtggtgctgaacaagctgcacgcccccctgctgaccagattcgtgagaatcagaccccagacctggcacagcggcatcgccctgagactggagctgttcggctgcagagtgaccgacgccccctgcagcaacatgctgggcatgctgagcggcctgatcgccgacagccagatcagcgccagcagcacccaggagtacctgtggagccccagcgccgccagactggtgagcagcagaagcggctggttccccagaatcccccaggcccagcccggcgaggagtggctgcaggtggacctgggcacccccaagaccgtgaagggcgtgatcatccagggcgccagaggcggcgacagcatcaccgccgtggaggccagagccttcgtgagaaagttcaaggtgagctacagcctgaacggcaaggactgggagtacatccaggaccccagaacccagcagcccaagctgttcgagggcaacatgcactacgacacccccgacatcagaagattcgaccccatccccgcccagtacgtgagagtgtaccccgagagatggagccccgccggcatcggcatgagactggaggtgctgggctgcgactggaccgacagcaagcccaccgtggagaccctgggccccaccgtgaagagcgaggagaccaccaccccctaccccaccgaggaggaggccaccgagtgcggcgagaactgcagcttcgaggacgacaaggacctgcagctgcccagcggcttcaactgcaacttcgacttcctggaggagccctgcggctggatgtacgaccacgccaagtggctgagaaccacctgggccagcagcagcagccccaacgacagaaccttccccgacgacagaaacttcctgagactgcagagcgacagccagagagagggccagtacgccagactgatcagcccccccgtgcacctgcccagaagccccgtgtgcatggagttccagtaccaggccaccggcggcagaggcgtggccctgcaggtggtgagagaggccagccaggagagcaagctgctgtgggtgatcagagaggaccagggcggcgagtggaagcacggcagaatcatcctgcccagctacgacatggagtaccagatcgtgttcgagggcgtgatcggcaagggcagaagcggcgagatcgccatcgacgacatcagaatcagcaccgacgtgcccctggagaactgcatggagcccatcagcgccttcgccgacgagtacgaggtggactggagcaacagcagcagcgccaccagcggcagcggcgcccccagcaccgacaaggagaagagctggctgtacaccctggaccccatcctgatcaccatcatcgccatgagcagcctgggcgtgctgctgggcgccacctgcgccggcctgctgctgtactgcacctgcagctacagcggcctgagcagcagaagctgcaccaccctggagaactacaacttcgagctgtacgacggcctgaagcacaaggtgaagatgaaccaccagaagtgctgcagcgaggcctag

SEQ ID NO: 262080 - DNA, 2730 bp, Artificial Sequence
  derived and/or modified sequence
atggacatgttccccctgacctgggtgttcctggccctgtacttcagcagacaccaggtgagaggccagcccgaccccccctgcggcggcagactgaacagcaaggacgccggctacatcaccagccccggctacccccaggactaccccagccaccagaactgcgagtggatcgtgtacgcccccgagcccaaccagaagatcgtgctgaacttcaacccccacttcgagatcgagaagcacgactgcaagtacgacttcatcgagatcagagacggcgacagcgagagcgccgacctgctgggcaagcactgcggcaacatcgccccccccaccatcatcagcagcggcagcatgctgtacatcagattcaccagcgactacgccagacagggcgccggcttcagcctgagatacgagatcttcaagaccggcagcgaggactgcagcaagaacttcaccagccccaacggcaccatcgagagccccggcttccccgagaagtacccccacaacctggactgcaccttcaccatcctggccaagcccaagatggagatcatcctgcagttcctgatcttcgacctggagcacgaccccctgcaggtgggcgagggcgactgcaagtacgactggctggacatctgggacggcatcccccacgtgggccccctgatcggcaagtactgcggcaccaagacccccagcgagctgagaagcagcaccggcatcctgagcctgaccttccacaccgacatggccgtggccaaggacggcttcagcgccagatactacctggtgcaccaggagcccctggagaacttccagtgcaacgtgcccctgggcatggagagcggcagaatcgccaacgagcagatcagcgccagcagcacctacagcgacggcagatggaccccccagcagagcagactgcacggcgacgacaacggctggacccccaacctggacagcaacaaggagtacctgcaggtggacctgagattcctgaccatgctgaccgccatcgccacccagggcgccatcagcagagagacccagaacggctactacgtgaagagctacaagctggaggtgagcaccaacggcgaggactggatggtgtacagacacggcaagaaccacaaggtgttccaggccaacaacgacgccaccgaggtggtgctgaacaagctgcacgcccccctgctgaccagattcgtgagaatcagaccccagacctggcacagcggcatcgccctgagactggagctgttcggctgcagagtgaccgacgccccctgcagcaacatgctgggcatgctgagcggcctgatcgccgacagccagatcagcgccagcagcacccaggagtacctgtggagccccagcgccgccagactggtgagcagcagaagcggctggttccccagaatcccccaggcccagcccggcgaggagtggctgcaggtggacctgggcacccccaagaccgtgaagggcgtgatcatccagggcgccagaggcggcgacagcatcaccgccgtggaggccagagccttcgtgagaaagttcaaggtgagctacagcctgaacggcaaggactgggagtacatccaggaccccagaacccagcagcccaagctgttcgagggcaacatgcactacgacacccccgacatcagaagattcgaccccatccccgcccagtacgtgagagtgtaccccgagagatggagccccgccggcatcggcatgagactggaggtgctgggctgcgactggaccgacagcaagcccaccgtggagaccctgggccccaccgtgaagagcgaggagaccaccaccccctaccccaccgaggaggaggccaccgagtgcggcgagaactgcagcttcgaggacgacaaggacctgcagctgcccagcggcttcaactgcaacttcgacttcctggaggagccctgcggctggatgtacgaccacgccaagtggctgagaaccacctgggccagcagcagcagccccaacgacagaaccttccccgacgacagaaacttcctgagactgcagagcgacagccagagagagggccagtacgccagactgatcagcccccccgtgcacctgcccagaagccccgtgtgcatggagttccagtaccaggccaccggcggcagaggcgtggccctgcaggtggtgagagaggccagccaggagagcaagctgctgtgggtgatcagagaggaccagggcggcgagtggaagcacggcagaatcatcctgcccagctacgacatggagtaccagatcgtgttcgagggcgtgatcggcaagggcagaagcggcgagatcgccatcgacgacatcagaatcagcaccgacgtgcccctggagaactgcatgggccccaaggcctgcatcgccgacgagtacgaggtggactggagcaacagcagcagcgccaccagcggcagcggcgcccccagcaccgacaaggagaagagctggctgtacaccctggaccccatcctgatcaccatcatcgccatgagcagcctgggcgtgctgctgggcgccacctgcgccggcctgctgctgtactgcacctgcagctacagcggcctgagcagcagaagctgcaccaccctggagaactacaacttcgagctgtacgacggcctgaagcacaaggtgaagatgaaccaccagaagtgctgcagcgaggcctag

SEQ ID NO: 262081 - DNA, 2730 bp, Artificial Sequence
  derived and/or modified sequence
atggatatgttcccattaacatgggtttttctggctctttactttagccggcaccaggtacggggacagcctgatcctccatgtggcggaagattgaactccaaggatgctggttacatcacttcccccgggtatccgcaggactatcccagccaccaaaattgtgaatggatcgtttacgcacccgagcctaatcagaaaatcgtgctgaattttaatcctcactttgagatcgagaagcacgactgtaagtacgactttattgaaattcgcgatggcgattctgagagcgccgatctcctaggaaaacattgtggcaacattgcacctccgacaattatcagctctggctccatgctgtatatccgctttacctccgattacgccaggcagggcgcaggctttagtctgaggtacgagatattcaaaactgggtctgaagactgttctaaaaactttacaagcccaaacggtactatcgagagtcccggattccctgaaaaatacccacataacttggactgcactttcactatcttagcaaagccaaaaatggagataattttgcagttcttgatcttcgacctggagcacgacccgctccaagtgggggagggggactgcaagtatgactggttggacatatgggacggcatcccgcatgttggacccctgattggaaaatactgtggaaccaagactccatctgaactccggtcctccacaggaatcctgtccttgacctttcataccgacatggccgttgctaaagatgggttcagcgcaaggtattatttagtgcaccaggagcctttagaaaactttcaatgcaacgtgcctttagggatggagagcggtagaattgccaatgaacagatcagcgccagtagcacctactcggacggcaggtggacgccacagcagtcgaggttgcatggcgatgacaacggatggacaccaaatctcgatagtaacaaggaatatctgcaagttgacctgaggtttttaacgatgttgacagcaatcgccactcagggagccatatcgcgcgagactcagaatgggtactatgtgaaatcatataaacttgaagtttccaccaacggagaagactggatggtttatcgccatggcaagaaccacaaagtgttccaggccaacaatgatgcaactgaggtggttcttaataagctgcacgcgcctctgctgaccagattcgtccgcattaggccccagacctggcatagtggtattgctctaagactggagctgttcggatgcagggtgacagatgccccttgctccaatatgctcgggatgctctctgggctgattgccgattctcagatcagcgctagtagcacacaagagtacttgtggtctccttcagccgcacgtctcgtctcctctcgatccggctggtttccgagaattcctcaggctcagcctggtgaagagtggctgcaggtagatttggggacacccaagactgtaaaaggagttattattcagggggcaagaggtggtgatagtatcaccgctgtcgaggcacgcgcgttcgtgcgcaagttcaaggtctcctacagcctgaacgggaaagattgggagtacattcaggatcccaggactcagcaacccaagctcttcgaaggcaacatgcactatgatacgcctgatatcaggaggttcgatccaattcccgctcaatacgtgcgagtttaccccgagaggtggtccccggcgggcataggaatgaggctggaggtgttgggctgcgactggaccgattctaaaccgaccgtagagacactaggacctaccgtgaagtctgaagagactaccactccgtaccctaccgaggaggaggctactgaatgtggcgagaactgtagcttcgaagatgacaaggatctacagctgccaagtggctttaactgtaatttcgatttcctggaagagccttgcggctggatgtacgaccacgccaagtggctcagaaccacctgggcctcgagtagttcccccaacgatcgcacttttccagatgacaggaacttcctccggctccaatccgactcccaacgggaagggcagtacgccagactgataagcccccctgtgcatctccccaggtccccagtgtgtatggaatttcagtatcaggccactggaggccgaggggttgctcttcaggtggtcagagaggcatctcaggaatcaaaacttctgtgggtgattcgggaagaccagggcggtgagtggaagcatggacgaattatcttaccttcatacgatatggaatatcagatcgtattcgaaggcgtaattggcaaagggagaagtggagagattgccatcgacgatatcagaatttctaccgatgtgccgctagagaactgtatggagcccataagcgccttcgccgacgagtatgaggtagattggtcaaactcttcaagtgcaacaagcggtagcggagctccctctaccgacaaggaaaagagctggctgtacacactagatcccatcctgatcaccattattgctatgtcctcattgggagtcctgttgggtgcaacatgcgccggactgttgttatactgtacttgctcctactctgggctgtcctcacgttcttgcaccactctcgaaaactacaactttgaattatacgacggactcaagcataaagtgaaaatgaaccatcaaaagtgctgctccgaggcttag

SEQ ID NO: 262082 - DNA, 2730 bp, Artificial Sequence
  derived and/or modified sequence
atggacatgtttcccctgacatgggtttttttagcattgtacttctcacgacaccaagtgagaggacagcctgacccgccttgtggcggccggttgaatagtaaggatgctgggtacatcacatcccctggctacccgcaagattatccttcacatcagaattgcgagtggatcgtgtatgcccctgaacccaaccagaaaattgtgttgaactttaatcctcatttcgaaatcgagaagcacgactgtaaatacgacttcatcgagatccgggatggcgactctgagagcgcggaccttctggggaaacattgcggaaacatcgctccaccgacaatcatctccagtggctcaatgctgtatatcaggtttacgagcgactacgcacgccagggtgccggattctccctgagatatgaaatcttcaagacaggaagcgaggactgttcaaagaactttaccagcccgaatgggacgattgagtcacccggattccccgagaagtaccctcataatctcgattgcacgttcaccatactggccaaacctaagatggagattatccttcagttcctgatctttgacctcgagcacgaccccctgcaggttggagagggcgattgcaaatacgattggttagacatctgggacggaattccacatgtgggcccactcattgggaaatactgcggaaccaagacaccctcggagctgaggagttccaccggcatcttgtcgctgaccttccacacagatatggccgtggccaaagacggtttttctgcaaggtactacctcgtgcaccaggagccactggagaacttccagtgcaacgtaccgctgggtatggagagtggcaggatcgcaaacgaacagatatcggcctccagcacctattcagacggccgatggacaccacaacaatctagattgcatggggacgataacggatggacacccaatctagatagcaacaaggagtatctgcaagtggatctcagattcttaacaatgcttacagccatagcaacacagggagccatctctcgggagactcaaaacggttattacgtgaagtcgtacaaactggaggtttccacaaatggagaggattggatggtgtatcggcacggcaagaatcacaaggtcttccaggccaataatgatgcgaccgaggtggtgcttaacaagctccacgcaccgcttcttacgagattcgtccggatcagaccccagacttggcacagcggaatcgcattgagattggaactcttcggctgccgcgtgacggacgctccatgcagcaacatgcttgggatgttgtcaggattgatcgctgattcgcagatcagcgcgagttccactcaagagtacctatggagccccagcgcagctcgccttgtttcttcacgctccggctggttcccaaggataccccaagcccagccaggagaagaatggttgcaggttgatctcgggactcctaagacagtaaagggcgtgattatccaaggcgctcgggggggcgattccatcactgccgttgaagcccgagcatttgtgcgaaagtttaaggtgagctacagccttaacggtaaggactgggagtatatacaagacccacgcacacaacaacccaagctcttcgagggaaacatgcactacgacacgccagacatcagaaggtttgaccccatacccgcccaatacgtgagagtttacccagagagatggagccccgccggcattgggatgaggctcgaggtactgggttgtgactggaccgacagtaagcctacagtggagactctcggcccaaccgtgaagtctgaggagacaaccactccgtatcccaccgaggaagaggccaccgagtgcggggagaactgttcgttcgaggatgataaggatctgcagctcccatcaggattcaattgtaatttcgacttcctagaagaaccatgtggctggatgtacgatcatgctaagtggctgcgtacgacttgggccagttcctctagcccaaacgacaggacattccctgacgacaggaactttttgcggctgcagtcagatagccagcgtgaggggcagtacgctaggctgatttctccaccagtccaccttccgagatcccctgtctgtatggagttccagtaccaggcgacaggaggcagaggcgtcgcgctgcaggtggttagggaagcgtctcaagagagcaagttgctgtgggttataagggaagatcagggcggggagtggaagcacggaagaattatcctaccaagctacgacatggagtaccagatcgtgttcgaaggcgtgatcggaaagggacggtcaggagaaattgccatcgacgatattcgcatatcaacagacgtgccgctcgagaattgcatgggccccaaagcttgcattgccgacgaatacgaggtcgactggagtaacagcagtagcgctacatccggtagcggagcccctagcacagacaaagaaaaatcatggctctacacactcgaccctatactcattaccatcatcgctatgtctagcctgggcgtgctcctgggggcaacctgcgccggattgctgctgtattgtacttgtagctattccggtcttagctctcgaagctgcacaacattagaaaattacaatttcgaattatacgacgggctcaaacacaaggtaaagatgaaccatcagaagtgctgcagtgaggcatag

SEQ ID NO: 262083 - DNA, 2730 bp, Artificial Sequence
  derived and/or modified sequence
atggacatgttccccctgacctgggtgttcctggccctgtacttcagccgccaccaggtgcggggccagcctgaccccccctgtggcggccgcctgaacagcaaggatgctggctacatcaccagccctggctacccccaggactaccccagccaccagaactgtgagtggatcgtgtatgcccctgagcccaaccagaagatcgtgctgaacttcaacccccactttgaaattgagaagcatgactgcaagtatgacttcatcgagatcagagatggagacagcgagagcgctgacctgctgggcaagcactgcggcaacatcgccccacccaccatcatcagcagcggctccatgctgtacatccgcttcaccagtgactatgcccggcagggcgccggcttcagcctgcgctatgagatcttcaagacaggcagcgaggactgcagcaagaacttcaccagccccaacggcaccatcgagagccctggcttccctgagaagtacccccacaacctggactgcaccttcaccatcctggccaagcccaagatggagatcatcctgcagttcctgatctttgacctggagcatgaccccctgcaggtgggggagggggactgcaagtatgactggctggacatctgggatggcatcccccacgtgggccccctcatcggcaagtactgcggcaccaagacccccagcgagctgcggagcagcacaggcatcctgagcctgaccttccacacagacatggctgtggccaaggatggcttcagcgcccgctactacctggtgcaccaggagcccctggagaacttccagtgcaatgtgcccctgggcatggagagcggccgcatcgccaatgagcagatcagcgccagcagcacctacagtgatggccgctggaccccccagcagagccggctgcatggagatgacaatggctggacccccaacctggacagcaacaaggagtacctgcaggtggacctgcgcttcctgaccatgctgacagccatcgccacccagggcgccatcagccgggagacccagaatggctactacgtgaagagctacaagctggaggtgtccaccaacggggaggactggatggtgtacagacatggcaagaaccacaaggtgttccaggccaacaatgatgccacagaggtggtgctgaacaagctgcacgcccccctgctgaccaggtttgtgcgcatccggccccagacctggcacagcggcatcgccctgcggctggagctgtttggctgccgggtgacagatgccccctgcagcaacatgctgggcatgctgagcggcctgattgctgacagccagatcagcgccagcagcacccaggagtacctgtggagccccagcgctgcccggctggtgagcagccgcagcggctggttcccccgcatcccccaggcccagcctggagaggagtggctgcaggtggacctgggcacccccaagacagtgaagggcgtcatcatccagggcgcccggggcggggacagcatcacagctgtggaggcccgggcctttgtgaggaagttcaaggtgtcctacagcctgaatggcaaggactgggagtacatccaggaccccaggacccagcagcccaagctgtttgagggcaacatgcactatgacaccccagacatcagaagatttgaccccatcccagcccagtatgtgcgggtgtacccagagcgctggagccctgctggcatcggcatgaggctggaggtgctgggctgtgactggacagacagcaagcccaccgtggagaccctgggccccaccgtgaagtctgaggagaccaccaccccctaccccacagaggaggaggccacagaatgtggggagaactgcagctttgaagatgacaaggacctgcagctgcccagcggcttcaactgcaactttgacttcctggaggagccctgtggctggatgtatgaccacgccaagtggctgcggaccacctgggccagcagcagcagccccaatgacaggaccttcccagatgacaggaacttcctgcggctgcagagcgacagccagcgggagggccagtatgcccggctcatcagcccccctgtgcacctgcccaggagccctgtgtgcatggagttccagtaccaggccactggaggccggggcgtggccctgcaggtggtgcgggaggccagccaggagagcaagctgctgtgggtgatccgggaggaccagggcggggagtggaagcacggccgcatcatcctgcccagctatgacatggagtaccagatcgtgtttgagggcgtcatcggcaagggccgctctggagagatcgccattgatgacatccgcatcagcacagatgtgcccctggagaactgcatggagcccatcagcgcctttgctgatgaatatgaggtggactggagcaacagcagcagcgccaccagcggcagcggggcccccagcacagacaaggagaagtcctggctgtacaccctggaccccatcctgatcaccatcatcgccatgagcagcctgggcgtgctgctgggcgccacctgtgccggcctgctgctgtactgcacctgcagctacagcggcctgagcagccgcagctgcaccaccctggagaactacaactttgagctgtatgatggcctgaagcacaaggtgaagatgaaccaccagaagtgctgcagcgaggcctag

SEQ ID NO: 262084 - DNA, 2730 bp, Artificial Sequence
  derived and/or modified sequence
atggacatgttccccctgacctgggtgttcctggccctgtacttcagccgccaccaggtgcggggccagcctgaccccccctgtggcggccgcctgaacagcaaggatgctggctacatcaccagccctggctacccccaggactaccccagccaccagaactgtgagtggatcgtgtatgcccctgagcccaaccagaagatcgtgctgaacttcaacccccactttgaaattgagaagcatgactgcaagtatgacttcatcgagatcagagatggagacagcgagagcgctgacctgctgggcaagcactgcggcaacatcgccccacccaccatcatcagcagcggctccatgctgtacatccgcttcaccagtgactatgcccggcagggcgccggcttcagcctgcgctatgagatcttcaagacaggcagcgaggactgcagcaagaacttcaccagccccaacggcaccatcgagagccctggcttccctgagaagtacccccacaacctggactgcaccttcaccatcctggccaagcccaagatggagatcatcctgcagttcctgatctttgacctggagcatgaccccctgcaggtgggggagggggactgcaagtatgactggctggacatctgggatggcatcccccacgtgggccccctcatcggcaagtactgcggcaccaagacccccagcgagctgcggagcagcacaggcatcctgagcctgaccttccacacagacatggctgtggccaaggatggcttcagcgcccgctactacctggtgcaccaggagcccctggagaacttccagtgcaatgtgcccctgggcatggagagcggccgcatcgccaatgagcagatcagcgccagcagcacctacagtgatggccgctggaccccccagcagagccggctgcatggagatgacaatggctggacccccaacctggacagcaacaaggagtacctgcaggtggacctgcgcttcctgaccatgctgacagccatcgccacccagggcgccatcagccgggagacccagaatggctactacgtgaagagctacaagctggaggtgtccaccaacggggaggactggatggtgtacagacatggcaagaaccacaaggtgttccaggccaacaatgatgccacagaggtggtgctgaacaagctgcacgcccccctgctgaccaggtttgtgcgcatccggccccagacctggcacagcggcatcgccctgcggctggagctgtttggctgccgggtgacagatgccccctgcagcaacatgctgggcatgctgagcggcctgattgctgacagccagatcagcgccagcagcacccaggagtacctgtggagccccagcgctgcccggctggtgagcagccgcagcggctggttcccccgcatcccccaggcccagcctggagaggagtggctgcaggtggacctgggcacccccaagacagtgaagggcgtcatcatccagggcgcccggggcggggacagcatcacagctgtggaggcccgggcctttgtgaggaagttcaaggtgtcctacagcctgaatggcaaggactgggagtacatccaggaccccaggacccagcagcccaagctgtttgagggcaacatgcactatgacaccccagacatcagaagatttgaccccatcccagcccagtatgtgcgggtgtacccagagcgctggagccctgctggcatcggcatgaggctggaggtgctgggctgtgactggacagacagcaagcccaccgtggagaccctgggccccaccgtgaagtctgaggagaccaccaccccctaccccacagaggaggaggccacagaatgtggggagaactgcagctttgaagatgacaaggacctgcagctgcccagcggcttcaactgcaactttgacttcctggaggagccctgtggctggatgtatgaccacgccaagtggctgcggaccacctgggccagcagcagcagccccaatgacaggaccttcccagatgacaggaacttcctgcggctgcagagcgacagccagcgggagggccagtatgcccggctcatcagcccccctgtgcacctgcccaggagccctgtgtgcatggagttccagtaccaggccactggaggccggggcgtggccctgcaggtggtgcgggaggccagccaggagagcaagctgctgtgggtgatccgggaggaccagggcggggagtggaagcacggccgcatcatcctgcccagctatgacatggagtaccagatcgtgtttgagggcgtcatcggcaagggccgctctggagagatcgccattgatgacatccgcatcagcacagatgtgcccctggagaactgcatgggccccaaggcctgcatcgcagatgaatatgaggtggactggagcaacagcagcagcgccaccagcggcagcggggcccccagcacagacaaggagaagtcctggctgtacaccctggaccccatcctgatcaccatcatcgccatgagcagcctgggcgtgctgctgggcgccacctgtgccggcctgctgctgtactgcacctgcagctacagcggcctgagcagccgcagctgcaccaccctggagaactacaactttgagctgtatgatggcctgaagcacaaggtgaagatgaaccaccagaagtgctgcagcgaggcctag

SEQ ID NO: 262085 - DNA, 2730 bp, Artificial Sequence
  derived and/or modified sequence
atggacatgttccccctgacctgggtgttcctggccctgtacttcagccggcatcaggtgcgggggcaaccggacccgccttgtggtggacgtttgaactctaaggacgccggttacattacctctcccgggtaccctcaggattatccttcccaccagaattgcgagtggattgtctacgccccagaaccgaaccaaaagatcgtcctcaatttcaatccacatttcgagatcgagaaacatgattgtaagtatgacttcattgagatcagggatggggactcggaatctgccgatcttctcgggaagcattgcgggaacatcgctccaccaactataatctctagtggaagcatgctgtatattaggttcacatcagattatgctaggcagggagcaggcttctctttaagatacgagattttcaagaccggttctgaagactgcagtaagaactttacatctcccaacggtacaattgaaagccctggatttcccgagaagtacccacacaatcttgactgcaccttcaccattctggccaagccaaaaatggagattatcctgcagttcctaatttttgacctggaacacgatcctctgcaggtgggagaaggcgattgcaagtacgattggctcgacatctgggatggaatcccccatgttggacccctcattgggaaatactgcggaaccaagacaccatccgagctgagaagctcaacgggtatactatcactaactttccatacagacatggccgtggcaaaggacggctttagtgccaggtactacttagtgcatcaggagcctctcgagaatttccagtgtaatgtgcccctcggcatggagtccggaagaattgccaacgaacaaatctctgccagctctacttattcggacggccggtggacaccgcaacagagcaggttgcatggggatgacaacgggtggactccaaacctggattcgaacaaggaataccttcaggtagatctgagattcctgaccatgctgaccgccattgccactcaaggcgccatttctcgggaaactcagaacggctactatgtgaagtcttacaaactggaggtgtccactaacggcgaagactggatggtgtataggcatggcaagaaccataaggttttccaagcaaacaatgacgctacagaggtggttcttaataagttacacgcaccactgctaacccggttcgtaaggatcaggcctcagacatggcactcaggtattgccctgcggctggaactgttcggatgccgtgtcaccgacgctccatgctccaacatgctcggcatgctgagcggattaattgcagacagccagatctctgccagcagcactcaagagtatctgtggagcccttccgctgcaaggctcgtgtccagccggtcaggatggtttcctaggattccacaggctcagccaggggaagagtggctccaggttgacctgggtaccccaaaaaccgtaaagggggtgattattcaaggtgctcgcggaggcgacagtattacagcagtcgaagcaagagcgtttgtccgcaagtttaaagtgagctactccctgaacgggaaagactgggaatacatccaagatccgcgaacgcagcagcccaagctgtttgagggaaacatgcactatgacacaccggatatcagacggtttgatcccataccggcccagtacgttcgtgtataccctgaaagatggtccccggcaggaatcggcatgagattggaggtgctggggtgtgactggacagattcaaaaccaaccgtagagactctcggccccacagtgaagtctgaggaaactaccaccccttatcccaccgaagaagaagcaacggagtgcggagagaattgcagtttcgaggacgacaaggacttacagctgcctagcggcttcaattgcaactttgactttctcgaggagccatgcgggtggatgtacgaccacgcaaaatggttgcgaaccacatgggccagttcgagcagccctaatgaccggacatttcctgacgaccgcaacttcctgcgcctccagtcagactcccagagagagggacagtacgctcgtttaatctcaccgcctgtgcacttgcctcgtagtccagtgtgtatggagttccagtatcaggccacaggaggcagaggagtggctctgcaagtggtccgagaagcgagtcaggaatcaaaactgctgtgggttatcagggaagaccagggaggcgagtggaaacatgggaggattatacttccctcatacgacatggagtatcagattgtgtttgagggcgtcattgggaagggacggagcggtgagatcgccatcgacgatattcggatcagtacagatgtccctcttgagaactgtatggaaccaatctccgcctttgccgatgaatatgaggtcgattggtccaattcctcgtctgccacgtctggctccggtgctccctccactgataaagagaaaagttggctttacacgcttgaccctatcctcataactatcatcgccatgagtagcctaggagtgctattgggcgctacatgcgccggattgttgctctattgcacctgttcatattccggactatcctctcgcagctgtaccactttagagaactacaatttcgaactgtacgacggattaaaacacaaggttaagatgaaccaccagaagtgttgttccgaagcatag

SEQ ID NO: 262086 - DNA, 2730 bp, Artificial Sequence
  derived and/or modified sequence
atggacatgttccccctgacctgggtgttcctggccctgtacttctcccgccaccaagtcaggggtcagcccgatccaccatgtggcggccgattgaattctaaagatgccggctacatcactagccccggctatcctcaggactaccccagccatcagaactgcgaatggattgtttatgcccccgaacctaaccagaaaattgtactgaacttcaacccacacttcgaaattgaaaaacacgactgcaagtacgattttatagaaattcgagacggagatagtgagtcagctgatctgctcgggaagcattgtggtaacatcgcaccaccaacaataatttcatctggctccatgctctacatcagatttactagcgactacgcgcgccaaggggccgggttcagtctgcgctacgagatctttaagacaggatcagaggactgctccaaaaattttacttcacccaacggaactatcgaaagcccaggctttcctgaaaagtatccccacaatctcgactgtaccttcacaatcctggcaaagcccaagatggaaattatcctacagtttctgatctttgaccttgaacacgaccccttacaagtgggcgagggcgactgcaagtacgactggttagatatttgggatgggatacctcacgtcggccctctgattggaaagtactgtggcactaaaacaccatctgagcttcggtcgtccactgggatcttatccctcacattccatactgacatggctgtcgccaaagacggtttctcagccaggtattatctggttcatcaggagcccctcgaaaactttcagtgtaacgtgcccttaggtatggagagcggaaggatcgctaatgagcagataagcgcatcttccacttactccgacggtaggtggactccacagcagtctcggctgcacggcgacgataacgggtggacccccaatctcgactcaaacaaggaatatctgcaggtggatctcaggttcttaaccatgttgactgcaatagcaacgcaaggtgctatcagtcgggagacccaaaacggctattacgtgaaaagctacaaactcgaggtgtcaacaaacggcgaggactggatggtttataggcacggaaagaatcacaaggtgtttcaggccaacaacgatgccacagaggtggttctgaataagctccacgcccctttgctcacccgcttcgtacgtattagaccacagacgtggcactctgggatcgcactgcgtttagaattattcggttgtagggtgacagacgctccatgtagtaacatgctgggcatgctctccggcctgatcgctgacagccagatctctgcaagcagtactcaagaatacctgtggtctccctccgccgcccgtttggtgtccagtagaagcgggtggtttcctcgaatacctcaggcccagccaggggaagagtggctgcaggtagacctgggaactcctaaaaccgtgaagggtgtcataatccaaggggctcgggggggcgattcaatcaccgccgtggaggcccgggcctttgtaaggaagtttaaggtcagctacagcctaaacggaaaggactgggagtatatccaggatcctaggacacagcagcccaagctatttgaaggaaatatgcactatgatactcccgacataaggagattcgatcccattcccgcacaatacgtccgagtctacccagagcggtggtcgccagctggtatagggatgaggctcgaagtgctgggctgcgattggacagattcaaagccaacagtcgaaaccctcggccctacggtcaaaagtgaggaaacaaccacaccatatccaacagaggaggaggcaactgaatgcggcgagaattgctcattcgaggatgacaaggacctgcagctcccaagtggtttcaactgcaattttgatttcctcgaggaaccttgtggatggatgtacgatcacgccaagtggctgagaactacctgggccagtagcagctctccaaacgaccgcacctttcctgacgatcggaatttcctgcggctgcagagcgattcgcagcgtgagggccagtacgcacggctgatcagccctccagtgcacctgcccagatctcctgtgtgcatggagttccagtatcaggcgactggaggtcggggtgtcgcgctgcaggtggtgagagaggcctcccaggagagtaagttactgtgggttattcgggaggatcagggaggcgaatggaaacacggccgaatcatcttgccctcctatgatatggagtatcagattgtcttcgaaggtgtgatcggtaaaggtagatctggggagattgctatagacgacatccgcatctccaccgacgtacccctcgaaaactgtatgggcccaaaggcttgtatcgcagatgagtatgaggtggattggtctaattcctctagcgccacatcagggtccggggctccgtccacagataaggagaaatcctggctgtacaccctggatccgattttaatcaccattattgcaatgagcagtctgggtgtgttactgggcgccacttgtgctggccttctgctctactgcacctgtagctatagtgggctctcttccagatcctgtacaactctcgagaactataactttgaactgtatgacggattgaagcataaggtcaagatgaatcaccaaaaatgctgtagtgaggcatag

SEQ ID NO: 262087 - DNA, 2730 bp, Artificial Sequence
  derived and/or modified sequence
atggatatgtttcctctcacctgggttttcttagccctctacttttcaagacaccaagtgagaggccaaccagacccaccgtgcggaggtcgtttgaattccaaagatgctggctatatcacctctcccggttacccccaggactacccctcccaccagaactgcgagtggattgtttacgcccccgaacccaaccagaagattgtcctcaacttcaaccctcactttgaaatcgagaagcacgactgcaagtatgactttatcgagattcgggatggggacagtgaatccgcagacctcctgggcaaacactgtgggaacatcgccccgcccaccatcatctcctcgggctccatgctctacatcaggttcacctccgactacgcccggcagggggcaggcttctctctgcgctacgagatcttcaagacaggctctgaagattgctcaaaaaacttcacaagccccaacgggaccatcgaatctcctgggtttcctgagaagtatccacacaacttggactgcacctttaccatcctggccaaacccaagatggagatcatcctgcagttcctgatctttgacctggagcatgaccctttgcaggtgggagagggggactgcaagtacgattggctggacatctgggatggcattccacatgttggccccctgattggcaagtactgtgggaccaaaacaccctctgaacttcgttcatcgacggggatcctctccctgacctttcacacggacatggcggtggccaaggatggcttctctgcgcgttactacctggtccaccaagagccactagagaactttcagtgcaatgttcctctgggcatggagtctggccggattgctaatgaacagatcagtgcctcatctacctactctgatgggaggtggacccctcaacaaagccggctccatggtgatgacaatggctggacccccaacttggattccaacaaggagtatctccaggtggacctgcgctttttaaccatgctcacggccatcgcaacacagggagcgatttccagggaaacacagaatggctactatgtcaaatcctacaagctggaagtcagcactaatggagaggactggatggtgtaccggcatggcaaaaaccacaaggtatttcaagccaacaacgatgcaactgaggtggttctgaacaagctccacgctccactgctgacaaggtttgttagaatccgccctcagacctggcactcaggtatcgccctccggctggagctcttcggctgccgggtcacagatgctccctgctccaacatgctggggatgctctcaggcctcattgcagactcccagatctccgcctcttccacccaggaatacctctggagccccagtgcagcccgcctggttagcagccgctcgggctggttccctcgaatccctcaggcccagcccggtgaggagtggcttcaggtagatctgggaacacccaagacagtgaaaggtgtcatcatccagggagcccgcggaggagacagtatcactgctgtggaagccagagcatttgtgcgcaagttcaaagtctcctacagcctaaacggcaaggactgggaatacattcaggaccccaggacccagcagccaaagctgttcgaagggaacatgcactatgacacccctgacatccgaaggtttgaccccattccggcacagtatgtgcgggtatacccggagaggtggtcgccggcggggattgggatgcggctggaggtgctgggctgtgactggacagactccaagcccacggtagagacgctgggacccactgtgaagagcgaagagacaaccaccccctaccccaccgaagaggaggccacagagtgtggggagaactgcagctttgaggatgacaaagatttgcagctcccttcgggattcaattgcaacttcgatttcctcgaggagccctgtggttggatgtatgaccatgccaagtggctccggaccacctgggccagcagctccagcccaaacgaccggacgtttccagatgacaggaatttcttgcggctgcagagtgacagccagagagagggccagtatgcccggctcatcagcccccctgtccacctgccccgaagcccggtgtgcatggagttccagtaccaggccacgggcggccgcggggtggcgctgcaggtggtgcgggaagccagccaggagagcaagttgctgtgggtcatccgtgaggaccagggcggcgagtggaagcacgggcggatcatcctgcccagctacgacatggagtaccagattgtgttcgagggagtgatagggaaaggacgttccggagagattgccattgatgacattcggataagcactgatgtcccactggagaactgcatggaacccatctcggcttttgcagatgaatacgaggtggactggagcaattcttcttctgcaacctcagggtctggcgccccctcgaccgacaaagaaaagagctggctgtacaccctggatcccatcctcatcaccatcatcgccatgagctcactgggcgtcctcctgggggccacctgtgcaggcctcctgctctactgcacctgttcctactcgggcctgagctcccgaagctgcaccacactggagaactacaacttcgagctctacgatggccttaagcacaaggtcaagatgaaccaccaaaagtgctgctccgaggcatga

SEQ ID NO: 262088 - DNA, 3521 bp, Artificial Sequence
  derived and/or modified sequence
cagagatcgcgagcgaggcaccagcctgcagccggcccccagcacatcctcagccgcacagacactcggcgaggtggaggtgagggcgggcgccagcgaactcggagaggggctcgctcactcccaggcgatcccagccgccaccgccgccgcaccagcagcagcaacagcagcagcagcttccttcctcagactcccctcgagaggctggccaagcgggtgtagccgttgggggaggctcccgccgggggaacccggcgaggacaagagcagggcggccgccttccactcgggctgtccggcggcggctgcctccgcccgtgtgtccgtcaagggtgccgcgggatgtgtgtcagtttacgcctctgagatcacacagctgcctgggggccgtgtgatgcccaaggcaagtcttggttttaattattattattatcattattgttacgcttggctttcgggaaatactcgtgatatttgtaggataaaggaaatgacactttgaggaactggagagaacatatatgcgttttgtttttaagaggaaaaccgtgttctcttcccggcttgttccctctttgctgatttcaggagctactctcctcctggtgaggtggaaattccagcaagaatagaggtgaagacaagccaccaggactcaggagggaaacgctgaccattagaaacctctgcataagacgttgtaaggaggaaaataaaagagagaaaaacacaaagatttaaacaagaaacctacgaacccagctctggaaagagccaccttctccaaaatggatatgtttcctctcacctgggttttcttagccctctacttttcaagacaccaagtgagaggccaaccagacccaccgtgcggaggtcgtttgaattccaaagatgctggctatatcacctctcccggttacccccaggactacccctcccaccagaactgcgagtggattgtttacgcccccgaacccaaccagaagattgtcctcaacttcaaccctcactttgaaatcgagaagcacgactgcaagtatgactttatcgagattcgggatggggacagtgaatccgcagacctcctgggcaaacactgtgggaacatcgccccgcccaccatcatctcctcgggctccatgctctacatcaggttcacctccgactacgcccggcagggggcaggcttctctctgcgctacgagatcttcaagacaggctctgaagattgctcaaaaaacttcacaagccccaacgggaccatcgaatctcctgggtttcctgagaagtatccacacaacttggactgcacctttaccatcctggccaaacccaagatggagatcatcctgcagttcctgatctttgacctggagcatgaccctttgcaggtgggagagggggactgcaagtacgattggctggacatctgggatggcattccacatgttggccccctgattggcaagtactgtgggaccaaaacaccctctgaacttcgttcatcgacggggatcctctccctgacctttcacacggacatggcggtggccaaggatggcttctctgcgcgttactacctggtccaccaagagccactagagaactttcagtgcaatgttcctctgggcatggagtctggccggattgctaatgaacagatcagtgcctcatctacctactctgatgggaggtggacccctcaacaaagccggctccatggtgatgacaatggctggacccccaacttggattccaacaaggagtatctccaggtggacctgcgctttttaaccatgctcacggccatcgcaacacagggagcgatttccagggaaacacagaatggctactatgtcaaatcctacaagctggaagtcagcactaatggagaggactggatggtgtaccggcatggcaaaaaccacaaggtatttcaagccaacaacgatgcaactgaggtggttctgaacaagctccacgctccactgctgacaaggtttgttagaatccgccctcagacctggcactcaggtatcgccctccggctggagctcttcggctgccgggtcacagatgctccctgctccaacatgctggggatgctctcaggcctcattgcagactcccagatctccgcctcttccacccaggaatacctctggagccccagtgcagcccgcctggttagcagccgctcgggctggttccctcgaatccctcaggcccagcccggtgaggagtggcttcaggtagatctgggaacacccaagacagtgaaaggtgtcatcatccagggagcccgcggaggagacagtatcactgctgtggaagccagagcatttgtgcgcaagttcaaagtctcctacagcctaaacggcaaggactgggaatacattcaggaccccaggacccagcagccaaagctgttcgaagggaacatgcactatgacacccctgacatccgaaggtttgaccccattccggcacagtatgtgcgggtatacccggagaggtggtcgccggcggggattgggatgcggctggaggtgctgggctgtgactggacagactccaagcccacggtagagacgctgggacccactgtgaagagcgaagagacaaccaccccctaccccaccgaagaggaggccacagagtgtggggagaactgcagctttgaggatgacaaagatttgcagctcccttcgggattcaattgcaacttcgatttcctcgaggagccctgtggttggatgtatgaccatgccaagtggctccggaccacctgggccagcagctccagcccaaacgaccggacgtttccagatgacaggaatttcttgcggctgcagagtgacagccagagagagggccagtatgcccggctcatcagcccccctgtccacctgccccgaagcccggtgtgcatggagttccagtaccaggccacgggcggccgcggggtggcgctgcaggtggtgcgggaagccagccaggagagcaagttgctgtgggtcatccgtgaggaccagggcggcgagtggaagcacgggcggatcatcctgcccagctacgacatggagtaccagattgtgttcgagggagtgatagggaaaggacgttccggagagattgccattgatgacattcggataagcactgatgtcccactggagaactgcatgggtcccaaagcatgtatcgcagatgaatacgaggtggactggagcaattcttcttctgcaacctcagggtctggcgccccctcgaccgacaaagaaaagagctggctgtacaccctggatcccatcctcatcaccatcatcgccatgagctcactgggcgtcctcctgggggccacctgtgcaggcctcctgctctactgcacctgttcctactcgggcctgagctcccgaagctgcaccacactggagaactacaacttcgagctctacgatggccttaagcacaaggtcaagatgaaccaccaaaagtgctgctccgaggcatga

SEQ ID NO: 262089 - DNA, 2730 bp, Artificial Sequence
  derived and/or modified sequence
atggacatgtttcccctgacttgggtgtttctggccctgtacttcagcaggcatcaggtccgcggacagcctgatcccccttgcgggggaagattgaattcgaaagatgctggatacattacctcacccggatacccccaggattacccctctcaccagaactgcgagtggatcgtgtacgctcctgaacccaaccagaaaatcgtcctgaattttaacccacacttcgagattgagaagcatgactgcaagtatgatttcatcgaaataagggacggagacagtgagagtgctgatttactgggtaagcactgcggaaatatcgctcctccaactatcatcagcagcggatccatgctgtacattcggtttaccagtgactatgctagacagggggcaggtttcagtctgagatatgagatttttaagacagggagcgaggattgttctaagaactttacgtcccccaatggtacgatcgagtccccgggatttcccgagaaataccctcataatctggattgcacctttacaattcttgcaaaacccaagatggagattattctccagttcctgatcttcgacctggagcatgaccccctacaggtgggggagggagactgcaaatatgattggctcgacatttgggacgggattccacacgtcgggcctctgatcgggaagtactgtggtaccaaaacaccatccgaactgaggtccagcaccggcatcctgtccctaactttccacaccgacatggcagtcgcaaaggacggtttctccgcacgatactatttggtccaccaggagccactcgagaacttccagtgcaatgtgcccctggggatggaatctggacggatagccaatgaacagattagtgcttcctccacctactccgacggcagatggaccccacagcagtccagactgcatggagacgataacggatggacgcccaatttggacagtaacaaagagtatttacaggtggacctccgattcttgacgatgctgacggctatagcaacccagggtgccatcagccgggagacccaaaatggttactacgttaaatcctataaactggaggtgagtacaaacggggaggactggatggtctacaggcacgggaagaaccacaaggtcttccaagcgaacaacgatgctaccgaggtggttctgaacaaactgcacgcgccattattaactcggtttgtgcggatcaggccccagacctggcattcagggatcgccctcaggttggaactgttcggctgtagggtgaccgatgctccctgctcaaacatgctggggatgttatctggcctgattgcggattcgcagatcagcgcctctagtacccaagagtatctttggtctccctccgccgctcggctggtctcgtccaggtctggttggttccctaggataccccaggctcagccaggggaggagtggttgcaggtcgatcttggcacacctaaaaccgttaaaggggttattatccagggcgcacgtggaggtgatagcatcacagctgtggaagcaagggccttcgtacgcaaattcaaagtgagctacagtctaaacggaaaggactgggagtatatccaagatccacgcacacaacagcctaagcttttcgagggcaacatgcactatgacacccctgatatccgaagattcgatcctatccctgcacagtacgtccgggtgtaccctgagcggtggagccctgcaggcattggaatgcgcctcgaggtgctaggttgcgactggaccgactctaaaccaactgtggaaaccctgggtcccaccgtcaagtcagaggagaccacaaccccatatcctaccgaggaagaggccacagagtgtggtgagaattgttcatttgaggatgataaggatctgcaactcccaagcgggtttaactgtaactttgattttctcgaggagccctgcggctggatgtatgaccatgctaaatggttacgcaccacctgggcttccagctcctccccaaatgatagaactttcccggacgaccgtaacttcctccggctgcagtccgacagtcagagggaaggtcagtatgctcgcttgatctcaccaccagtccacctccctcgatctcctgtgtgtatggagtttcagtatcaggccactggaggacgtggagtggcactacaggttgtcagggaagcgtcacaggagagtaaactcctctgggttattagagaagaccaaggtggcgagtggaagcacggtaggatcatcctgccatcgtatgacatggagtaccagatcgtcttcgagggggtcattggaaaaggacggtctggggaaatcgccatagacgacatcaggatatccactgacgtacccctggaaaactgcatggagccaatctcagcatttgccgatgagtacgaggtcgactggtcaaatagttcttcggcgacatccggttcaggcgctccgtcaacagacaaggaaaagtcctggttgtacacacttgatccaatcctgatcacaattatagcaatgtcttccctgggcgtgctgctgggagccacttgcgcgggtctgctgctatattgcacctgttcatactctggcttaagttccaggtcctgtactaccctggagaattataactttgagctctacgatggcctgaagcacaaggtgaaaatgaatcatcagaaatgctgttccgaggcttag

SEQ ID NO: 262090 - DNA, 2730 bp, Artificial Sequence
  derived and/or modified sequence
atggatatgtttccactgacctgggtgtttctggccctgtacttttctagacaccaagttcgtgggcaacccgatcctccctgtggcggtagattaaacagcaaggacgcgggatacatcacaagcccagggtatcctcaggactaccccagtcaccagaactgtgaatggatagtatatgccccagaaccaaatcagaaaattgtgctgaatttcaacccccattttgagatcgagaaacacgactgcaaatacgacttcatcgaaattcgcgacggcgactctgagagtgccgatcttctggggaagcactgtggcaatatcgcccctccaaccataatctcatcggggagcatgctttatatccggtttacttccgactacgcacggcagggagcaggatttagccttcgatatgagatctttaaaactgggagtgaggactgctctaagaacttcacaagccccaacggcaccatcgaatcgcccggtttccccgagaaatacccccataatctggactgtacattcactattttggctaagcccaagatggaaatcattctgcagtttcttatattcgatctcgaacacgaccctctgcaggttggcgagggtgactgcaaatacgattggctagatatttgggacggtatcccacatgtgggcccactgattggcaagtattgcggcaccaagacacctagtgaactgagatcctccaccggaatcctgagcctcacatttcacacagatatggcggtggctaaggatggttttagcgcccgttattacctggtccatcaggagcctctggaaaactttcagtgcaacgtgcccctggggatggagtccgggagaatcgccaacgagcaaatatctgcatcaagcacgtattctgatggccgatggacaccgcaacagagcagactccacggggatgacaacggctggactccaaatctagacagtaacaaagagtacctgcaggtggacctgaggtttctgacaatgctaacagcaatagctacacagggtgcaatttcacgcgagacccagaatggctactacgtaaagtcgtacaagctcgaggtgtccacaaacggcgaggattggatggtttacaggcacggaaaaaaccataaggtttttcaagcaaacaatgatgcaacagaagttgtgctgaacaagctccatgccccactcctcaccagattcgtcaggatccggccacagacatggcattccggaattgcgctccgcctggagttgttcgggtgtcgcgtgaccgacgctccgtgttcaaatatgctgggcatgttgtccggcctgatcgccgactcacaaatttctgcgtcctcaactcaggaatacctatggtcgcccagtgctgcaaggctggttagttccagatccgggtggtttcccagaatacctcaggcacagccgggagaggaatggctccaagttgatctgggcacacctaagacagtcaaaggagtgatcatccagggtgctagaggcggagactccatcactgctgtggaagctcgcgcttttgtccgcaaattcaaagtttcctatagtctgaacgggaaggactgggaatacattcaggaccccagaactcagcagcctaaacttttcgaaggcaacatgcattacgacacgcctgacatccgcaggtttgatcctatcccagcccaatacgtacgcgtgtatccggagcgttggtcccccgctggtattggtatgaggctggaggtgctgggctgtgactggacagactccaaacccaccgtggaaaccttaggaccgaccgtcaagagtgaagagactactacgccttaccccactgaggaggaggctacagaatgcggggagaactgttcctttgaagacgacaaggatttacagctgccttccggttttaactgcaacttcgatttccttgaggagccttgtggttggatgtacgatcacgccaagtggctgagaaccacatgggccagcagcagttcccctaatgaccgcacctttcctgatgaccgtaattttctcagactccaatcagactctcagcgcgagggtcagtacgccaggctgatctccccgccagtccatttgccgagatcacctgtatgtatggagttccagtaccaagcaacgggcggacggggtgtcgccttacaggttgtacgggaagcctcgcaagaatcgaaacttctctgggtcattcgggaagaccaaggcggtgagtggaagcacgggaggattattcttcccagttatgatatggaataccagatagttttcgaaggcgtgatcggcaaggggagaagcggggagatcgcaattgacgatattcgaatcagcaccgacgtcccccttgagaattgtatggggccaaaggcttgtatcgcggatgagtacgaagttgattggagcaactcttccagcgccacaagcggctctggggctcccagcactgataaggaaaagtcctggctctacaccctagatcctatcctcatcactatcatcgccatgagtagtctgggcgtgctcctgggcgcaacttgtgccggtctgctgctctactgcacttgttcctactctgggttatcctccaggagttgcactaccctcgaaaactacaatttcgagctgtacgacggcctcaaacacaaggtaaaaatgaaccaccagaagtgctgcagtgaggcctag

SEQ ID NO: 262091 - protein, 187 aa, Artificial Sequence
  derived and/or modified sequence
MSGGGTETPVGCEAAPGGGSKKRDSLGTAGSAHLIIKDLGEIHSRLLDHRPVIQGETRYFVKEFEEKRGLREMRVLENLKNMIHETNEHTLPKCRDTMRDSLSQVLQRLQAANDSVCRLQQREQERKKIHSDHLVASEKQHMLQWDNFMKEQPNKRAEVDEEHRKAMERLKEQYAEMEKDLAKFSTF

SEQ ID NO: 262092 - DNA, 564 bp, Artificial Sequence
  derived and/or modified sequence
atgtcaggcggaggtactgaaactccagttggttgtgaggccgcccccgggggcggttctaaaaaaagagattctctcggtacggcaggaagtgcacacctgatcattaaagacttaggagagatccacagtagactcctagaccatcggccagtgatccagggggagacgagatacttcgtgaaagagttcgaggagaaacgaggccttagagagatgcgggtgctggagaaccttaagaacatgatacatgagactaacgagcacacactgccaaagtgtcgcgataccatgcgtgactccctatctcaggtccttcaacgcctccaggccgccaatgactcggtgtgtagacttcagcagagagagcaggaacgaaaaaagattcactccgaccatttggtcgcatctgagaagcagcatatgctgcagtgggataattttatgaaggagcagcctaacaagcgcgccgaggtcgatgaggaacatagaaaggcaatggagaggcttaaggaacaatatgccgagatggagaaggatctggcaaagttcagtaccttttag

SEQ ID NO: 262093 - DNA, 564 bp, Artificial Sequence
  derived and/or modified sequence
atgtctgggggcggcacagagacccctgtgggctgtgaggccgcccctgggggcggcagcaagaagagggacagcctgggcacagctggcagcgcccacctgatcatcaaggacctgggggagatccacagccggctgctggaccacaggcctgtgatccagggcgagacccgctactttgtgaaggagtttgaggagaagaggggcctgcgggagatgagggtgctggagaacctgaagaacatgatccacgagaccaatgagcacaccctgcccaagtgccgggacaccatgagggacagcctgagccaggtgctgcagaggctgcaggccgccaatgattctgtgtgccgcctgcagcagcgggagcaggagaggaagaagatccacagcgaccacctggtggccagcgagaagcagcacatgctgcagtgggacaacttcatgaaggagcagcccaacaagagagctgaggtggatgaggagcacaggaaggccatggagcggctgaaggagcagtatgcagagatggagaaggacctggccaagttcagcaccttctag

SEQ ID NO: 262094 - DNA, 2684 bp, Artificial Sequence
  derived and/or modified sequence
aggcgcagcgtggccgcgggtgggcggaactggtcgggatgagtggcggagggacagagacccctgtgggttgtgaggccgccccgggcggtggcagcaagaagagggactccctggggactgcgggctcagcgcacctcattatcaaggatcttggagaaattcattcaaggcttttggatcacagaccagttattcaaggtgaaactcgttattttgtaaaagaatttgaagaaaaacgtggtcttcgagaaatgcgagttcttgaaaatttgaagaacatgatccatgaaacaaatgaacatactcttcccaaatgtagagacacaatgcgggacagcctcagccaggttctccagagattgcaagcagctaatgactcagtctgtagactccaacagagggaacaggaacgaaaaaagattcatagtgaccacttagtagctagtgagaaacagcatatgctccagtgggacaacttcatgaaggagcaacccaacaaaagggctgaagtggatgaagagcacagaaaagccatggaaaggcttaaagaacaatatgctgagatggagaaggacctagcgaaattttcaaccttttaagaacttgaaccacaacaatcacaaactaatgagaagatgttcacctctctcctgaaaactattcccaccagaccgtttagcctctgcttcaagcttagcaatatattcagtggcactcttatatcagaagaaagaagtttctactggcattctgattggatatttaaagaagggtgccacatttttccagctttaagtgcctatatatgattatttgaatgaagaggagtaggaaggaaaatggaatcaatatactctttgttagtcagaattgatcatcttttccattgattagctcagagaactgtaggtatagacttcttagaaagataatttcattcatttctatacagggttaacaatagtttattattgtggcttaatgggaaggtatagaagctacctgtcatagcctccttggctgttggaaggatgtataaagtgttactgcatgagtaatgtagacaaaaaaaaaagccagctgtccttggagcagagatcacatttcagagaggtgagagtgaacacattgtctctgctgtggcaaagatggccacgctggtgtttgagctgcctcttgggaagcgttgcatattttacagtgcagcataatgccatgggcttccgtggatgggaagacacatgttaagttttgtggccttccagcacttactattttcagctttttaaagcatgcttagaaggaaaagcttaccaaaaatatattttgacatttagtttttccaagagctataatcttgcccatagtatttacctcatttttgtgtctgttttgctgtgggtaagctttataagataaataatgtctatacatgtttcgactgtttaatgagtaatcaacaaaatctgccagagagtccctctggaaccatataaagttcctggctttgaatgaaccagaagtgtttgcccacacagcaaatggtccatgttaaatgtaaatcctttttagtgttaatgtctgttctcataagcaggtatattatgatgaaacatgtaccagttctgtcatcactgtgatctttaaaaacctgcatttaacagtctaatttgaggctgggtgcagtggctcacacctgtaatctcaacactttgggaggccgaggcaggcggatcatttgaagtcaggagttcaagcctagcctggccaacatggtgaaaccccgtctctactaaaaatacaaaaattagcccggcatgttggtgcacgcttgtaatcccagctactcaggagtctgaggcacgagaatcacctgaactcaggaggcggaggttgcggtgagctgagatggcaccactgcactccagcttgggtgacagagtgagactccatctcaacaaaaaaaaaatctaactgaagaactaagttgattttttatttgccataaaccaagcaaaagtaaatgcaataatttcgagatttatggtaaacaaatttgaggtatggataaatctttcacatattttttattgctctttagtaaagaaaggcacaagaaagaaaatatccagctctcttgtgttatctcagtgtggcgactgcagaaaattgacaatgcctgcctgtgtaaatgtatggcttactgtcaaagcttcattcttggctgcatgttgaaaatgtgattaaagttaatagaggagatgaaataagtatttgagatttttttcaataacactgaacttctgccaactttctctatccgctactgtaggcttgacaggctcatcaatcatttgctggtacctggactaaaaagcgcacttgctgacaccaaggcatgttggaattttcttaattcagtggatggaaaaagaaatacttccaaaaatatcccacacatgaaaagggaggggagccttaaatgaaaattccctttgtaccgtagacactttttggaatgcgattaattgccaacacatcattgaacgaatgctgtaaccaagaaattaagattgtgtgtgtgaagggaatatattcttaactgtggctacccaacttgtatagcaaagatttctgatagtttgtgttcatctcatgtgaataataaatactttacccta

SEQ ID NO: 262095 - DNA, 1273 bp, Artificial Sequence
  derived and/or modified sequence
ggtgggcggaactggtcgggatgagtggcggagggacagagacccctgtgggttgtgaggccgccccgggcggtggcagcaagaagagggactccctggggactgcgggctcagcgcacctcattatcaaggatcttggagaaattcattcaaggcttttggatcacagaccagttattcaaggtgaaactcgttattttgtaaaagaatttgaaaatgaagactaaaccatagttaaaggcagacagtgtaatatccagtggctgtgtgttctgacggtgaagatgtagtgtaactatcagaaaatagaaggagatggaaaaacgtggtcttcgagaaatgcgagttcttgaaaatttgaagaacatgatccatgaaacaaatgaacatactcttcccaaatgtagagacacaatgcgggacagcctcagccaggttctccagagattgcaagcagctaatgactcagtctgtagactccaacagagggaacaggaacgaaaaaagattcatagtgaccacttagtagctagtgagaaacagcatatgctccagtgggacaacttcatgaaggagcaacccaacaaaagggctgaagtggatgaagagcacagaaaagccatggaaaggcttaaagaacaatatgctgagatggagaaggacctagcgaaattttcaaccttttaagaacttgaaccacaacaatcacaaactaatgagaagatgttcacctctctcctgaaaactattcccaccagaccgtttagcctctgcttcaagcttagcaatatattcagtggcactcttatatcagaagaaagaagtttctactggcattctgattggatatttaaagaagggtgccacatttttccagctttaagtgcctatatatgattatttgaatgaagaggagtaggaaggaaaatggaatcaatatactctttgttagtcagaattgatcatcttttccattgattagctcagagaactgtaggtatagacttcttagaaagataatttcattcatttctatacagggttaacaatagtttattattgtggcttaatgggaaggtatagaagctacctgtcatagcctccttggctgttggaaggatgtataaagtgttactgcatgagtaatgtagacaaaaaaaaaagccagctgtccttggagcagagatcacatttcagagaggtgagagtgaacacattgtctctgctgtggcaaagatggccacgctggtgtttgagctgcctcttgggaagc

SEQ ID NO: 262096 - DNA, 564 bp, Artificial Sequence
  derived and/or modified sequence
atgagcggcggcggcaccgagacccccgtgggctgcgaggccgcccctggtggcggctccaaaaagcgcgacagtctgggcacagcaggcagtgcccacctgatcatcaaagatctgggcgagatacatagcaggcttcttgaccaccggcctgtaatccagggtgagacaaggtactttgtgaaagagtttgaagagaagaggggactccgggagatgagggtacttgagaacttaaagaatatgattcatgagacaaacgagcatacactgcctaagtgccgggacactatgagagatagcctgagccaggtattgcagcgcctgcaggctgcaaacgattccgtttgccgattgcaacaacgtgaacaggaacgtaaaaaaattcattcagaccacttggttgccagcgagaaacagcacatgttgcagtgggataatttcatgaaagagcagcctaataaacgcgccgaggtggatgaagaacaccgtaaagctatggagaggcttaaggagcagtacgcggagatggagaaagacctcgccaaattttccaccttctag

SEQ ID NO: 262097 - DNA, 564 bp, Artificial Sequence
  derived and/or modified sequence
atgagtgggggaggcaccgaaacacccgttggctgcgaagccgcaccgggtggtggaagtaaaaagcgggactctctcggcaccgcaggatccgcacatctgatcatcaaagaccttggcgaaattcacagcaggctcttagaccaccgtccagtcatccaaggagaaaccagatactttgtaaaggagttcgaagaaaaaaggggtttgcgagaaatgagggtcttagagaacctgaagaatatgattcatgagaccaacgagcacactctgcccaagtgtcgcgacaccatgagagactccctgtcccaggtccttcagaggctacaagccgcaaacgactccgtgtgcaggctccagcagagagagcaagagcggaagaagatccactccgaccatctggtagcttcagagaaacaacacatgctgcaatgggataatttcatgaaggagcaacccaacaaaagggccgaggtggacgaggagcatagaaaggccatggagagacttaaggagcagtatgccgaaatggaaaaggacttagcaaaattcagtacattttag

SEQ ID NO: 262098 - DNA, 564 bp, Artificial Sequence
  derived and/or modified sequence
atgagcggcggcggcaccgagacccccgtgggctgcgaggccgcccccggcggcggcagcaagaagagagacagcctgggcaccgccggcagcgcccacctgatcatcaaggacctgggcgagatccacagcagactgctggaccacagacccgtgatccagggcgagaccagatacttcgtgaaggagttcgaggagaagagaggcctgagagagatgagagtgctggagaacctgaagaacatgatccacgagaccaacgagcacaccctgcccaagtgcagagacaccatgagagacagcctgagccaggtgctgcagagactgcaggccgccaacgacagcgtgtgcagactgcagcagagagagcaggagagaaagaagatccacagcgaccacctggtggccagcgagaagcagcacatgctgcagtgggacaacttcatgaaggagcagcccaacaagagagccgaggtggacgaggagcacagaaaggccatggagagactgaaggagcagtacgccgagatggagaaggacctggccaagttcagcaccttctag

SEQ ID NO: 262099 - DNA, 1716 bp, Artificial Sequence
  derived and/or modified sequence
atggaggagccacccctacttccaggagagaacatcaaagacatggcgaaagatgtaacctacatttgcccgttcactggggcggtgagaggaaccctgaccgtgaccaattatcgcctctattttaaatcgatggagcgggaccctccatttgtgctggacgcctctctcggcgtgatcaatagggttgagaagattggaggcgcttcttcccggggtgaaaacagctacgggttggaaacagtgtgtaaggacattagaaatttgaggtttgcacacaagcctgaagggcgcacaaggaggagcatctttgagaacttgatgaagtacgccttcccagtatctaataacctgcctcttttcgcctttgaatacaaagaggtttttccagagaatggatggaagttgtatgatccactgttggagtacagacgccagggtattcccaacgaatcctggagaatcaccaagatcaatgagaggtacgaattatgcgatacctacccagcactgctggtggtaccagccaatatccctgacgaggaactgaagagggtagcgagttttaggtcccgcggccggattccagtgttatcatggatccaccctgagagccaggctacaattacgcgctgcagccagcccatggtcggagtgtctgggaagagatcaaaggaggatgagaaatacttgcaagctatcatggattcaaacgcgcagagccataagatctttatttttgacgccaggccctccgtgaacgcagtagccaacaaggctaaaggaggcggatatgaatccgaagatgcctatcagaatgccgagctcgtgttcctggatattcataacatccatgtcatgcgcgaatccctgcgaaaactaaaagaaattgtgtatcccaatattgaagaaactcactggctctccaatctcgagtcaacccactggctggaacacataaaactcattctggcaggcgccctacggatagccgataaggttgagtccgggaagacatctgtggttgtgcactgctcagacgggtgggaccgaaccgcgcaactcacgagtttggcaatgctgatgctggatggctattacagaacaattcgcggcttcgaggttctagtggaaaaggaatggctcagctttggccacaggttccagcttagggtaggacacggggacaagaatcacgcagacgcggatcgctctcctgtgtttttgcaatttattgactgtgtttggcaaatgactcgtcagttccccaccgctttcgagttcaacgagtactttctaatcacaattctcgaccacctgtattcctgcctgttcggcaccttcctgtgcaattccgaacagcagaggggcaaggagaatctacccaagcgtacagtttccctgtggagttatattaattcccaactggaagactttactaaccccctgtacggttcttattccaaccacgtgctataccccgtggctagtatgcgccacctggagctgtgggtgggctattacatcaggtggaatcctagaatgaagccacaagaaccgattcataaccgctataaggagttgttggctaaacgcgcagaattgcagaagaaggttgaggagttacagagggagatcagcaaccgtagcacctctagtagcgagcgggcaagcagtccagctcagtgtgtaactccagttcagaccgtggtatag

SEQ ID NO: 262100 - DNA, 1716 bp, Artificial Sequence
  derived and/or modified sequence
atggaggagccacccctgttgcctggcgagaacataaaggacatggcaaaggatgtcacatatatctgcccctttaccggcgccgtcaggggtaccctaactgttaccaactaccgactgtacttcaagtccatggaaagggacccaccgtttgtgctcgatgcatcactgggcgttataaatagggttgaaaagattgggggggcgagttcaaggggcgagaacagttatggtctggagacagtgtgcaaggacatccgcaatctcagatttgctcataagcccgagggaaggacacgaaggtcaatctttgagaatctgatgaaatatgcctttcctgtctcaaacaacctccctctttttgctttcgaatacaaggaagtgttccctgagaacggttggaagttgtatgacccgctgttggagtatcgtagacagggcataccaaacgagtcctggcggattaccaaaattaatgaaagatacgaattgtgcgatacataccccgccctgctcgtggttcccgcaaacataccggatgaagagctgaagcgtgtggcctccttcagatctaggggcaggatcccagtcctatcatggatccatcccgaatcccaagccacgattacccggtgctcccagcctatggtaggcgtgagcggcaagaggtcaaaggaggatgagaagtacctgcaagccataatggactcaaacgcgcagtctcacaagatcttcatattcgacgctcgccccagcgtcaacgcagtcgcgaacaaagcaaagggcggaggatacgagtcagaggacgcctatcagaacgctgagctggtcttcctggacatacacaacatacacgtaatgcgcgagagtctccgcaagctgaaggagattgtatatcccaatatcgaggagacgcactggttgagcaacctggaatccacccactggcttgaacatataaagctgatcctggccggtgcgctgcggattgccgacaaagtcgagtcagggaagaccagcgttgtagtgcactgcagtgatggctgggatagaaccgcccagcttacctctctcgcaatgctgatgctggacggttattaccggacaattcgcggttttgaggttctggtggagaaggagtggctctcattcggccatcgatttcaactgcgggtcggacacggagacaaaaaccatgctgatgccgatcgatcaccagtattcctgcaatttattgactgtgtttggcagatgacccggcaattcccaaccgcattcgaattcaacgagtattttctgattactatcctcgaccatctatactcttgtttattcggcacatttctttgcaactcagaacaacagaggggcaaggagaatctgcccaagagaactgtgtccttgtggtcttacattaactctcaacttgaagatttcaccaatccactttacggctcgtattccaaccacgtactgtatcccgtggcatcaatgcggcacctcgagctgtgggtggggtactatattaggtggaacccccggatgaaaccacaagaacccattcacaacagatataaagaactgctcgctaagcgggccgagttacaaaagaaggtggaagagcttcagagagaaatatcaaatcggagtacatcaagttctgaacgagcttcatcacctgcacagtgcgtcacacccgtgcaaactgttgtgtag

SEQ ID NO: 262101 - DNA, 1716 bp, Artificial Sequence
  derived and/or modified sequence
atggaagaacctcctctgctcccgggagagaacatcaaggacatggctaaggatgtgacttacatttgccctttcacaggagcggtgcgcggcacgctgaccgtaacaaactaccgcctttattttaagtctatggagagagatccacccttcgttctggacgccagtcttggcgtcatcaaccgagtggagaagattggaggagcttcgagtagaggggagaattcttatgggctcgaaactgtatgtaaagacatcagaaatctgcgttttgctcataaaccagagggccgcacccgccgctctatctttgagaacctgatgaaatatgcctttccagtgtcaaacaacctgccactcttcgcatttgaatataaggaggtattccccgagaatggttggaagctgtacgacccattgctcgagtaccgcaggcaaggcataccgaacgagtcctggagaattaccaagatcaatgagcggtatgagctttgcgatacttaccctgccctgctcgttgtacctgcgaacatcccggacgaggagcttaagcgggttgcctcctttcgctctcggggccgcatccctgtgctgtcttggattcatcctgagagtcaagcaacgataactcggtgcagtcaacctatggtgggagtgagtggaaagcgcagcaaagaagatgaaaagtatcttcaggccatcatggattcaaatgcgcaatcacataagattttcatctttgatgctagacctagtgtgaacgccgtggccaataaagccaagggaggtggatacgagagcgaagacgcctatcagaatgctgaactggttttcctggatatccacaacattcacgtgatgagagagtctctacgcaaactgaaagaaatagtctatccaaatatcgaagagacacactggctaagtaacctggagtctacacattggctggagcacattaaactgatccttgcaggagccctgagaatcgccgacaaggtcgaatcagggaaaacctcagttgtagtgcactgttcagacggctgggatagaaccgctcagcttacctctctcgctatgctcatgctggacgggtactaccgtacgatcaggggcttcgaagttctcgtggagaaggaatggttgtcttttggtcacaggttccagcttagagtgggacatggagacaaaaatcacgctgatgcagacagatcaccggtcttcctgcaattcatcgactgcgtttggcagatgactcggcagtttcctacagcgttcgaatttaatgagtacttcctgattaccatcttggaccatctctacagttgtctgtttggtacgttcttatgcaactctgagcagcagcgtgggaaagagaacctgcctaagcggaccgtgtcactgtggagctacattaatagccagctagaagatttcactaatcctctgtacgggtcttattctaaccatgtgctttatccagtggcctcaatgcgccacctggaattgtgggtcggctactacatacgatggaacccccgcatgaaaccccaggaaccgattcataatagatacaaggaactgctggccaagagggctgaactgcagaagaaggtggaagagctccaaagagaaataagtaataggagcacctcaagctcagagagggctagctctcccgctcaatgcgtaacccccgtacaaaccgtggtttag

SEQ ID NO: 262102 - DNA, 1716 bp, Artificial Sequence
  derived and/or modified sequence
atggaggagccccccctgctgcccggggagaacatcaaggacatggccaaggatgtgacctacatctgccccttcaccggggctgtgcggggcaccctgactgtgaccaactaccgcctgtacttcaagtccatggagcgggaccccccatttgtgctggatgccagcctgggcgtcatcaacagagtggagaagattggaggagccagcagcagaggagagaacagctatggcctggagaccgtgtgcaaggacatccggaacctgcgctttgcccacaagccagagggccgcacccggcgcagcatctttgagaacctgatgaagtatgccttccctgtgagcaacaacctgcccctgtttgcctttgagtacaaggaggtgtttcctgaaaatggctggaagctgtatgaccccctgctggagtaccgccggcagggcatccccaatgaatcctggaggatcaccaagatcaatgaaagatatgagctgtgtgacacctacccagccctgctggtggtgcctgccaacatcccagatgaggagctgaagagggtggccagcttccgcagccggggccgcatccctgtgctgtcctggatccaccctgagagccaggccaccatcacccgctgcagccagcccatggtgggcgtgtctgggaagaggagcaaggaggatgagaagtacctgcaggccatcatggacagcaatgcccagagccacaagatcttcatctttgatgcccggcccagcgtgaatgctgtggccaacaaggccaagggcggcggctatgaaagtgaagatgcctaccagaatgctgagctggtgttcctggacatccacaacatccacgtgatgagggagagcctgaggaagctgaaggagatcgtgtaccccaacatcgaggagacccactggctgagcaacctggagagcacccactggctggagcacatcaagctgatcctggccggggccctgagaattgctgacaaggtggagagcggcaagacctctgtggtggtgcactgcagtgatggctgggacagaacagcccagctgaccagcctggccatgctgatgctggatggctactaccgcaccatccggggctttgaggtgctggtggagaaggagtggctgagctttggccaccgcttccagctgcgggtgggccacggggacaagaaccacgcagatgctgacaggagccctgtgttcctgcagttcatcgactgtgtgtggcagatgacccggcagttccccacagcctttgagttcaatgagtacttcctgatcaccatcctggaccacctgtacagctgcctgtttggcaccttcctgtgcaacagcgagcagcagaggggcaaggagaacctgcccaagaggacagtgtccctgtggagctacatcaacagccagctggaggacttcaccaaccccctgtatggcagctacagcaaccacgtgctgtaccctgtggcctccatgaggcacctggagctgtgggtgggctactacatccgctggaaccccaggatgaagccccaggagcccatccacaaccgctacaaggagctgctggccaagagagctgagctgcagaagaaggtggaggagctgcagcgggagatcagcaacagaagcaccagcagcagcgagcgggccagcagccctgcccagtgtgtgacccctgtgcagacagtggtgtag

SEQ ID NO: 262103 - DNA, 1716 bp, Artificial Sequence
  derived and/or modified sequence
atggaggagccccccctgctgcccggcgagaacatcaaggacatggccaaggacgtaacctacatttgcccctttactggggccgtgcgcggcacactgaccgttacaaattatcgcctctacttcaagagcatggagagggacccccccttcgttctagacgcctctctgggagtgatcaacagggttgagaaaatcggcggggcatcctcacgaggtgagaacagctacgggttagaaaccgtatgcaaagacatccgaaatctgcggttcgcccataagccagagggccgaacgaggaggtcaattttcgaaaacctcatgaagtatgcctttccagtcagcaacaatctgccactgtttgcgttcgaatacaaggaagtgttccccgagaacggatggaaactgtatgacccactgctcgaatacaggcgacaaggcatccccaacgagagctggcgtattacaaagattaatgaacggtacgagctctgcgatacctaccctgccctgttagtcgttccggccaatattccagacgaggagttgaagcgtgtggcctcctttaggagccggggtagaataccagtactgtcctggatccaccctgaatcccaggccacaattacccgttgttctcagccaatggttggagtgagcggcaaacggtccaaggaggatgaaaagtatctccaagccattatggattcaaatgcccagtctcataaaatatttatttttgacgcaaggccctccgtaaacgctgtcgcaaacaaggccaagggaggcgggtacgaatctgaggacgcctatcagaatgccgaactggtgtttcttgacatccacaacattcatgtcatgcgcgagtctttacggaagctgaaagaaatagtctaccccaacattgaggagacgcactggctgtccaatcttgagagcacacattggctggagcatatcaagctcatcctggccggggctcttcgcattgctgacaaggtggagtcaggtaagaccagtgtggtcgtccattgctcagacggatgggatcgtactgctcagctcaccagccttgctatgctgatgctggacggctactaccgcaccatccgcggctttgaggttttagtcgaaaaggaatggctcagcttcgggcaccggtttcagctgcgcgttggccatggcgacaagaaccatgcagatgctgataggtctcccgtgtttcttcagttcatcgattgcgtctggcagatgacacgccaatttcctactgccttcgagtttaacgagtatttcctcatcacaattctggatcacctgtactcctgtctttttggaaccttcttgtgcaactcggagcagcagcgagggaaggaaaacttgccaaagcggacagtctcactgtggtcctatattaactctcagctggaggactttactaacccactgtatgggtcatatagcaatcatgttctgtaccccgtagccagtatgcgccatctggaactctgggtgggctattacattcgatggaatccacgtatgaaaccccaagagcccatacacaatcggtacaaagaactgctggccaagcgcgcagagctgcagaagaaggtcgaggagctccagcgtgaaatcagcaatagatctactagcagtagtgaacgcgcatcttcaccagcccagtgtgtgacccccgtccagaccgttgtatag

SEQ ID NO: 262104 - DNA, 1716 bp, Artificial Sequence
  derived and/or modified sequence
atggaggagccccccctgctgcccggcgagaacatcaaggacatggcgaaggacgtcacgtatatatgtccattcactggagccgtacgaggcaccttgactgtgacaaattatcgcctttacttcaagagtatggagcgcgaccccccgtttgtgctcgatgctagcctgggcgtcattaaccgagtggagaagataggtggcgcttcgtctcggggagagaattcgtatggcctggaaacagtttgtaaagacatacggaatctcaggttcgcgcataagcctgaggggcggacccgacgctccatttttgaaaacctgatgaaatacgccttccccgtgtccaataatctcccgctgttcgcctttgagtacaaagaggttttccctgagaatgggtggaaactgtacgacccactcctggagtatcgaaggcaaggcatcccaaatgagtcctggcgcattactaaaatcaacgaacggtacgagctatgcgatacttatccagccctcctggtggtgcccgcaaacattccggacgaggaactgaagcgagttgcatccttcagaagtcgcggaagaattcccgtgctctcatggatccaccccgagtcccaggcaaccatcacccgatgcagtcagcctatggtgggagtgagcggcaagcggtctaaggaggatgaaaaatatctccaagcaatcatggattctaacgcccagtcacacaaaatttttatatttgatgcacgaccctctgtgaatgccgtggcaaacaaggctaagggtggcgggtacgagtccgaggacgcataccagaacgcagaactggtgtttctagacatccacaacatccatgtcatgcgggagagcttgagaaagctcaaggaaattgtttacccaaatatagaggagacccactggctgtcaaatctagagtccacacactggctggaacacatcaaactgattttagcaggtgcactgagaatcgcagacaaggtggaatctggcaaaacctccgtggtggtgcactgcagtgacggctgggaccgtaccgcacagctcacttccctcgccatgctgatgctggacgggtattaccggaccatacgtgggttcgaagttctcgttgagaaggagtggctgtctttcggtcacaggttccagttgagggtgggccatggcgacaaaaaccacgccgacgccgacagaagccctgtgttcttgcagtttattgactgtgtttggcaaatgacaaggcagtttcccacagctttcgaatttaatgagtactttctgatcaccatacttgatcacctctacagctgcttgttcggcacatttctatgcaattccgagcaacagagggggaaggaaaaccttccaaagcgcacagtctcgttgtggtcctacatcaactcacagctcgaggatttcactaaccctttatatggcagctattccaaccacgtactatatccagtcgcctcaatgcgacacttagagttgtgggtcggttactatattagatggaatccgcgtatgaagcctcaggagccgatccacaacaggtacaaggaactcctggcaaaacgagcggaacttcaaaagaaggtagaggaactgcagagggagatcagcaacagaagtacaagctcaagtgagcgcgcatcaagcccagcccaatgtgtgactcctgtgcagacagtagtctag

SEQ ID NO: 262105 - DNA, 1716 bp, Artificial Sequence
  derived and/or modified sequence
atggaggagccccccctgctgcccggcgagaacatcaaggacatggctaaggatgtcacatacatatgccccttcacaggggctgtgaggggcactcttactgtcaccaattatcggctctactttaaatcaatggagagagacccgccttttgtactggatgctagcctgggagtaatcaaccgagttgaaaaaatcggaggcgcgagctcccgcggggaaaacagctatggcctggagaccgtgtgtaaggatatccggaatctccgctttgcgcacaagcctgagggacggacccggcggtcaattttcgagaacctgatgaaatacgcatttccggtctccaataacttgcctctctttgccttcgagtataaagaggtttttcccgagaacggatggaaattatatgatcctctgctggagtaccgccgtcaggggatacccaacgagagctggaggataacgaagatcaatgaacggtacgagttatgtgatacctatcccgcactgctggtggtaccagctaacatcccagatgaagagctgaaacgagttgcgagcttccgcagccgcggcagaatccctgtactctcctggatccatcctgaatcccaggctacgatcacccgctgctcccagccaatggtgggtgttagcggaaagcgcagcaaagaggacgaaaaatatttacaggctattatggattccaacgcccagtcccacaagatttttatctttgatgccaggccaagcgttaatgctgtggccaataaagcaaaaggaggtgggtatgagtccgaggacgcctaccagaatgcagagttggtgttcctggatatacacaatatccatgtgatgagagaaagtcttcggaagctcaaggagatcgtctaccccaacatagaagagacccattggttatccaacctggaatccactcactggctcgagcacattaaacttattcttgctggagcactgcgcatcgctgacaaggttgaatcagggaagacctccgttgtcgtgcactgtagcgatggctgggacaggacagctcagctcacttcactcgcaatgctgatgctggacggctactataggaccatcaggggattcgaagtgctggttgagaaagaatggctctcttttggacacaggttccagctccgagtgggacacggagataagaaccatgccgacgctgaccgctcccctgttttcttgcagtttatcgattgcgtgtggcagatgactcgacaattccctacagcctttgagtttaacgaatattttcttattacgatcctggatcatctgtacagttgcctgttcggcactttcttatgtaactctgagcagcagcgcggcaaagagaatcttcccaaacgcacagtgtccctttggagttacatcaactcccagctggaggattttacaaaccccctatatggttcttactctaaccatgttctctacccagtcgcttccatgcgtcatttagagctttgggttggctactatatccggtggaatcctagaatgaaaccccaggagccgatccataataggtataaagagctgctggcaaaaagggcggagctacagaagaaggtggaggaattgcagagagagatcagtaatcgctcgaccagctcttccgagagagcctcttcccctgcccaatgtgttaccccagtccagaccgtggtctag

SEQ ID NO: 262106 - DNA, 1716 bp, Artificial Sequence
  derived and/or modified sequence
atggaggagcccccacttctgcctggcgaaaatatcaaggatatggctaaagacgtgacctacatctgcccatttaccggcgctgtcaggggcacattgacagtcacaaactatcggctgtatttcaagtccatggaacgggaccctccgtttgttctggatgccagtctgggagtaattaatcgcgtggaaaaaattggcggagcctcttctcgtggcgagaactcctacggcctggagaccgtgtgcaaggatattcgtaatcttcgatttgctcacaagcccgaggggagaacgcggaggtctattttcgaaaatctgatgaagtacgcatttcccgtgtccaacaatctgccgctttttgccttcgaatacaaggaagtcttccccgagaacgggtggaagctctatgatcctcttttggaatatcgaaggcaggggattcctaacgaatcctggcggatcaccaagattaatgagcgctatgaactatgcgacacctatccagcactcttggtggtgcctgccaacatcccggacgaggagctcaagagagtggcttcgtttcgctctcggggaagaattcccgtgctctcatggatccaccccgaatctcaggctacgattacgaggtgcagccaacctatggttggcgtgtcagggaaaaggtccaaggaggacgaaaagtacctgcaggctattatggacagtaacgcgcagtctcataaaattttcatcttcgatgccaggccaagtgtcaatgcagtcgccaacaaagccaaaggcggtggttacgagtcagaagacgcctatcagaacgctgaactagtgtttctggatatccacaacattcacgttatgcgcgaatccctgcggaagctgaaggaaatcgtgtatccaaatatcgaggaaacacattggctttcaaacttggagagtacacactggcttgagcatataaaactgattctcgccggagctctgaggatagccgacaaagttgagtccgggaagacgagcgtcgtcgtccactgctcagacggttgggatcgcaccgctcaattgacctctttggcaatgcttatgcttgatgggtattatcgcactatcagaggcttcgaagtgctggtggaaaaggaatggctctctttcggccacaggtttcaactcagagtgggtcatggcgacaaaaaccacgcagatgccgatagatctccggtgtttctacaatttatcgactgcgtgtggcaaatgacccgccaattccccacagcttttgagtttaatgagtactttcttatcaccatcctggaccatctgtatagctgcctgttcggcacgttcctgtgcaacagcgagcagcaaagggggaaggaaaacctgcccaagcgtaccgtgagcctctggtcatacataaattcacagcttgaggatttcactaacccactgtatggctcatattctaatcacgtactgtatcccgtggccagcatgaggcatctggagttatgggtcgggtactatatccggtggaatcccagaatgaaacctcaggaaccgatccacaatcggtataaggaattgttagccaagagagcagaactgcagaagaaagtggaagaactgcagagagagatctctaatcgatccacatccagctccgaaagagcttccagccccgctcagtgtgttactcctgtgcagactgtagtgtag

SEQ ID NO: 262107 - DNA, 1716 bp, Artificial Sequence
  derived and/or modified sequence
atggaggagccaccccttcttcctggggagaatatcaaagatatggctaaagacgtcacctacatctgtcccttcactggcgcagtccgaggtactctaaccgtaactaactatcgcctatactttaaaagtatggagagggatcctcccttcgtgctggacgcaagtctgggcgttattaatcgggtcgagaagattgggggagcctcttcccgcggagagaactcctacgggctggagaccgtgtgcaaggacatccgaaacctgagattcgctcacaaacccgagggcagaacgcggaggagcatctttgagaatctgatgaaatatgccttcccagtatcaaacaacctccccctattcgcatttgagtacaaggaggtgtttccagaaaatggctggaaactctatgaccctctgctggagtatcgcagacaaggaatcccaaacgagagctggcgcatcaccaagataaacgagcggtacgagctatgcgatacctaccccgctttactggttgtccctgctaacatccccgatgaagaactgaagcgggtcgcatcttttagatctcgcggacgcatccctgtgctgagctggatccatccagagtctcaagcgaccatcaccagatgctcccaacccatggttggagtatctggcaagcgctctaaagaggacgagaaatacctccaggctatcatggactccaatgcacagtcccacaaaatatttatttttgatgccaggccctcggtgaacgccgtggccaacaaggccaaaggaggcggatatgaaagcgaggacgcataccaaaatgctgagttggttttcctagacatccataacatccatgtaatgagggagtcgttgcgcaagctgaaagagatcgtgtatccaaatatcgaggaaacgcactggctatccaaccttgagtctacgcactggctggagcacataaagcttattctggctggggctctgagaatcgccgacaaggtcgagtcgggaaagacatcggtggtcgtgcactgttccgatggatgggatcgcaccgctcagctgacttccctggccatgctcatgctggatggctattaccgaacaattcggggattcgaagtcctggtcgagaaagagtggctctccttcgggcatcggttccaactgagggttggccacggcgataagaatcatgctgatgctgataggagcccagtctttcttcagtttattgattgtgtctggcagatgacccgtcagtttccaaccgcattcgagtttaacgaatacttcctgatcacgatcctcgaccacttatatagctgtctgttcgggaccttcctgtgcaattccgaacagcagcgtggaaaggagaacctgcctaagcgcaccgtgtccctgtggtcatatatcaatagtcagctggaggacttcacaaatccactttacggcagctattctaatcacgtattataccctgtggcctctatgcgtcacttggagctctgggtcgggtactatatcaggtggaatccacgcatgaagccacaggagcctattcacaacaggtacaaagaactgttggctaaacgcgcagagctgcagaagaaagttgaagaactgcaacgggagatctcaaatcggtcaacgtcatctagcgagcgcgcatctagccccgctcagtgtgtgactcccgtacagacagtggtgtag

SEQ ID NO: 262108 - DNA, 1716 bp, Artificial Sequence
  derived and/or modified sequence
atggaagagccacctctgctgcctggagaaaacatcaaggatatggccaaagacgtgacatacatctgtccttttaccggggcagtgaggggcactctgaccgtgacaaactaccgactttacttcaaatccatggaaagggatcctcctttcgtgctcgatgctagtcttggcgttattaacagggtggaaaagataggtggcgcatcaagcaggggtgagaacagttatggactggaaaccgtgtgcaaagacatccgaaatctgcgattcgctcataaaccagaagggcgaaccaggaggagtatcttcgagaacttgatgaaatacgcctttccagtgtccaacaatctgcccttgttcgcatttgaatacaaagaggtgttcccagaaaacggatggaaattgtacgatcccctgttagagtaccgcagacaagggatcccgaacgagagttggcgcatcaccaaaattaatgaaaggtatgaactttgtgacacttacccagccctcctggtcgtgcccgctaacatccctgacgaggaactgaagagagttgccagtttccgcagcaggggccgtatccccgtattgtcctggattcacccagaatcccaggccaccattacccggtgtagtcagcctatggtgggggtctctggaaaacggagtaaagaggacgagaaatacctccaagccataatggattctaatgcccaatctcataaaatttttatatttgatgccagaccaagcgtaaacgcagtcgcaaacaaggcaaagggaggcggatatgagtcggaagacgcataccagaatgcagaattggtgttcctcgacatccacaatattcacgtgatgagggagtcactgaggaagttaaaggaaatcgtgtaccccaatatagaagaaacacattggctatccaatctcgagagtacccattggctggagcatatcaagttgatcctggcaggcgctctacggattgccgacaaggtggagtccggaaaaacgagcgtcgttgtccactgttcagatgggtgggatagaactgcccagctgacctcactcgcgatgctaatgctcgatggatactatcgaacaataagaggattcgaggtgctggtcgagaaagaatggctctccttcggtcaccgttttcagcttagagtgggccatggtgacaagaaccacgcggatgcagacaggagccctgtgttcctacagtttatcgactgcgtttggcagatgactcgtcagtttcccactgccttcgaattcaatgagtattttcttatcacgatcctcgatcatctgtattcttgtctgtttgggacattcctgtgcaactctgagcagcagcggggaaaggagaacctgccgaagagaacagtctcactctggagctatataaactcccagttggaggatttcaccaatcctttatacggctcctattccaaccacgttctgtaccccgtggccagcatgcgccatctggagctgtgggtcgggtattatatcaggtggaatccgagaatgaagccacaagagccaattcataaccggtacaaggaattgttagctaaacgggctgaactccagaagaaagtcgaagaactgcagagggagatcagtaacagaagcacctcatctagtgaaagggcctcaagccctgctcaatgcgtgacccccgtgcagactgtcgtgtag

SEQ ID NO: 262109 - DNA, 1716 bp, Artificial Sequence
  derived and/or modified sequence
atggaggagccccccctgctgcccggcgagaacatcaaggacatggccaaggacgtgacctacatctgccccttcaccggcgccgtgagaggcaccctgaccgtgaccaactacagactgtacttcaagagcatggagagagacccccccttcgtgctggacgccagcctgggcgtgatcaacagagtggagaagatcggcggcgccagcagcagaggcgagaacagctacggcctggagaccgtgtgcaaggacatcagaaacctgagattcgcccacaagcccgagggcagaaccagaagaagcatcttcgagaacctgatgaagtacgccttccccgtgagcaacaacctgcccctgttcgccttcgagtacaaggaggtgttccccgagaacggctggaagctgtacgaccccctgctggagtacagaagacagggcatccccaacgagagctggagaatcaccaagatcaacgagagatacgagctgtgcgacacctaccccgccctgctggtggtgcccgccaacatccccgacgaggagctgaagagagtggccagcttcagaagcagaggcagaatccccgtgctgagctggatccaccccgagagccaggccaccatcaccagatgcagccagcccatggtgggcgtgagcggcaagagaagcaaggaggacgagaagtacctgcaggccatcatggacagcaacgcccagagccacaagatcttcatcttcgacgccagacccagcgtgaacgccgtggccaacaaggccaagggcggcggctacgagagcgaggacgcctaccagaacgccgagctggtgttcctggacatccacaacatccacgtgatgagagagagcctgagaaagctgaaggagatcgtgtaccccaacatcgaggagacccactggctgagcaacctggagagcacccactggctggagcacatcaagctgatcctggccggcgccctgagaatcgccgacaaggtggagagcggcaagaccagcgtggtggtgcactgcagcgacggctgggacagaaccgcccagctgaccagcctggccatgctgatgctggacggctactacagaaccatcagaggcttcgaggtgctggtggagaaggagtggctgagcttcggccacagattccagctgagagtgggccacggcgacaagaaccacgccgacgccgacagaagccccgtgttcctgcagttcatcgactgcgtgtggcagatgaccagacagttccccaccgccttcgagttcaacgagtacttcctgatcaccatcctggaccacctgtacagctgcctgttcggcaccttcctgtgcaacagcgagcagcagagaggcaaggagaacctgcccaagagaaccgtgagcctgtggagctacatcaacagccagctggaggacttcaccaaccccctgtacggcagctacagcaaccacgtgctgtaccccgtggccagcatgagacacctggagctgtgggtgggctactacatcagatggaaccccagaatgaagccccaggagcccatccacaacagatacaaggagctgctggccaagagagccgagctgcagaagaaggtggaggagctgcagagagagatcagcaacagaagcaccagcagcagcgagagagccagcagccccgcccagtgcgtgacccccgtgcagaccgtggtgtag

SEQ ID NO: 262110 - DNA, 1887 bp, Artificial Sequence
  derived and/or modified sequence
atgagacccagcggcaccgccggcgccgccctgctggccctgctggccgccctgtgccccgccagcagagccctggaggagaagaaggtgtgccagggcaccagcaacaagctgacccagctgggcaccttcgaggaccacttcctgagcctgcagagaatgttcaacaactgcgaggtggtgctgggcaacctggagatcacctacgtgcagagaaactacgacctgagcttcctgaagaccatccaggaggtggccggctacgtgctgatcgccctgaacaccgtggagagaatccccctggagaacctgcagatcatcagaggcaacatgtactacgagaacagctacgccctggccgtgctgagcaactacgacgccaacaagaccggcctgaaggagctgcccatgagaaacctgcaggagatcctgcacggcgccgtgagattcagcaacaaccccgccctgtgcaacgtggagagcatccagtggagagacatcgtgagcagcgacttcctgagcaacatgagcatggacttccagaaccacctgggcagctgccagaagtgcgaccccagctgccccaacggcagctgctggggcgccggcgaggagaactgccagaagctgaccaagatcatctgcgcccagcagtgcagcggcagatgcagaggcaagagccccagcgactgctgccacaaccagtgcgccgccggctgcaccggccccagagagagcgactgcctggtgtgcagaaagttcagagacgaggccacctgcaaggacacctgcccccccctgatgctgtacaaccccaccacctaccagatggacgtgaaccccgagggcaagtacagcttcggcgccacctgcgtgaagaagtgccccagaaactacgtggtgaccgaccacggcagctgcgtgagagcctgcggcgccgacagctacgagatggaggaggacggcgtgagaaagtgcaagaagtgcgagggcccctgcagaaaggtgtgcaacggcatcggcatcggcgagttcaaggacagcctgagcatcaacgccaccaacatcaagcacttcaagaactgcaccagcatcagcggcgacctgcacatcctgcccgtggccttcagaggcgacagcttcacccacaccccccccctggacccccaggagctggacatcctgaagaccgtgaaggagatcaccggcttcctgctgatccaggcctggcccgagaacagaaccgacctgcacgccttcgagaacctggagatcatcagaggcagaaccaagcagcacggccagttcagcctggccgtggtgagcctgaacatcaccagcctgggcctgagaagcctgaaggagatcagcgacggcgacgtgatcatcagcggcaacaagaacctgtgctacgccaacaccatcaactggaagaagctgttcggcaccagcggccagaagaccaagatcatcagcaacagaggcgagaacagctgcaaggccaccggccaggtgtgccacgccctgtgcagccccgagggctgctggggccccgagcccagagactgcgtgagctgcagaaacgtgagcagaggcagagagtgcgtggacaagtgcaacctgctggagggcgagcccagagagttcgtggagaacagcgagtgcatccagtgccaccccgagtgcctgccccaggccatgaacatcacctgcaccggcagaggccccgacaactgcatccagtgcgcccactacatcgacggcccccactgcgtgaagacctgccccgccggcgtgatgggcgagaacaacaccctggtgtggaagtacgccgacgccggccacgtgtgccacctgtgccaccccaactgcacctacggcagctag

SEQ ID NO: 262111 - DNA, 2239 bp, Artificial Sequence
  derived and/or modified sequence
ccccggcgcagcgcggccgcagcagcctccgccccccgcacggtgtgagcgcccgacgcggccgaggcggccggagtcccgagctagccccggcggccgccgccgcccagaccggacgacaggccacctcgtcggcgtccgcccgagtccccgcctcgccgccaacgccacaaccaccgcgcacggccccctgactccgtccagtattgatcgggagagccggagcgagctcttcggggagcagcgatgcgaccctccgggacggccggggcagcgctcctggcgctgctggctgcgctctgcccggcgagtcgggctctggaggaaaagaaagtttgccaaggcacgagtaacaagctcacgcagttgggcacttttgaagatcattttctcagcctccagaggatgttcaataactgtgaggtggtccttgggaatttggaaattacctatgtgcagaggaattatgatctttccttcttaaagaccatccaggaggtggctggttatgtcctcattgccctcaacacagtggagcgaattcctttggaaaacctgcagatcatcagaggaaatatgtactacgaaaattcctatgccttagcagtcttatctaactatgatgcaaataaaaccggactgaaggagctgcccatgagaaatttacaggaaatcctgcatggcgccgtgcggttcagcaacaaccctgccctgtgcaacgtggagagcatccagtggcgggacatagtcagcagtgactttctcagcaacatgtcgatggacttccagaaccacctgggcagctgccaaaagtgtgatccaagctgtcccaatgggagctgctggggtgcaggagaggagaactgccagaaactgaccaaaatcatctgtgcccagcagtgctccgggcgctgccgtggcaagtcccccagtgactgctgccacaaccagtgtgctgcaggctgcacaggcccccgggagagcgactgcctggtctgccgcaaattccgagacgaagccacgtgcaaggacacctgccccccactcatgctctacaaccccaccacgtaccagatggatgtgaaccccgagggcaaatacagctttggtgccacctgcgtgaagaagtgtccccgtaattatgtggtgacagatcacggctcgtgcgtccgagcctgtggggccgacagctatgagatggaggaagacggcgtccgcaagtgtaagaagtgcgaagggccttgccgcaaagtgtgtaacggaataggtattggtgaatttaaagactcactctccataaatgctacgaatattaaacacttcaaaaactgcacctccatcagtggcgatctccacatcctgccggtggcatttaggggtgactccttcacacatactcctcctctggatccacaggaactggatattctgaaaaccgtaaaggaaatcacagggtttttgctgattcaggcttggcctgaaaacaggacggacctccatgcctttgagaacctagaaatcatacgcggcaggaccaagcaacatggtcagttttctcttgcagtcgtcagcctgaacataacatccttgggattacgctccctcaaggagataagtgatggagatgtgataatttcaggaaacaaaaatttgtgctatgcaaatacaataaactggaaaaaactgtttgggacctccggtcagaaaaccaaaattataagcaacagaggtgaaaacagctgcaaggccacaggccaggtctgccatgccttgtgctcccccgagggctgctggggcccggagcccagggactgcgtctcttgccggaatgtcagccgaggcagggaatgcgtggacaagtgcaaccttctggagggtgagccaagggagtttgtggagaactctgagtgcatacagtgccacccagagtgcctgcctcaggccatgaacatcacctgcacaggacggggaccagacaactgtatccagtgtgcccactacattgacggcccccactgcgtcaagacctgcccggcaggagtcatgggagaaaacaacaccctggtctggaagtacgcagacgccggccatgtgtgccacctgtgccatccaaactgcacctacgggtcctaataaatcttcactgtctgactttagtctcccactaaaactgcatttcctttctacaatttcaatttctccctttgcttcaaataaagtcctgacactattcatttga

SEQ ID NO: 262112 - DNA, 1887 bp, Artificial Sequence
  derived and/or modified sequence
atgcgcccttccgggaccgcaggcgctgctctgctcgccctgttggcagcgctgtgcccggcctctagggctttggaagagaaaaaagtgtgccagggaacatctaataagctcacgcaacttggtaccttcgaggatcattttctatccctgcaaaggatgttcaacaactgcgaagttgtgctcggaaatctcgagatcacttacgttcagagaaattatgacctcagcttcttaaaaaccattcaggaggtggcgggctatgtcctgattgctctaaatacggtcgagcgcattcccctggagaatctacagatcatcagaggaaacatgtattacgaaaactcgtacgcgctggcggttctctccaactacgatgccaacaaaactggcctgaaggagcttccaatgcgcaatctgcaggaaatactccacggggctgtgaggttctcaaataatccagccctgtgtaatgtcgaatccatccagtggcgggatattgtatctagcgattttctgtccaacatgtctatggactttcaaaaccacctcggcagctgccagaagtgcgatccatcatgcccaaacggaagctgttggggcgccggtgaagagaattgtcagaagctgaccaaaatcatctgtgcccaacagtgctccggaaggtgtcggggaaaatcaccctccgactgctgtcacaaccagtgtgccgctggctgcacgggcccccgggagagtgattgcctagtatgccgtaagtttcgagacgaagctacttgtaaggatacatgcccacccttaatgttatacaacccgacaacctaccagatggatgtgaacccggaaggtaagtatagtttcggcgcaacttgcgttaaaaaatgcccgcgtaactatgtagtaaccgaccacggaagctgcgtgagagcttgtggagcagattcgtatgaaatggaggaggacggggtgcgcaagtgcaagaaatgcgaaggtccgtgcaggaaggtttgcaatggcatcggaattggcgaattcaaggattcactctcgataaacgcaactaacatcaagcactttaaaaattgtacttcgatcagcggcgacctccacattcttcccgttgccttcagaggggatagcttcacccacactccaccgttggatccgcaggaattagatatcctgaagactgtgaaggagattactggctttcttctgatccaggcctggcccgagaaccgaaccgaccttcatgccttcgagaatcttgagattattcgagggagaacaaagcagcacggacagttctccctcgccgtggtgtcactgaacattaccagtctggggctgcgatctctcaaggaaatctcagacggggatgtgataatctctggcaacaaaaatctgtgctacgctaataccataaactggaaaaagctgttcggcacctctggccagaagaccaaaatcatctcaaataggggcgagaactcttgtaaggcaacaggccaggtctgtcacgctctctgcagccctgagggttgttggggcccagaaccccgggactgcgttagttgccgcaacgtgtcaagaggcagggagtgcgttgacaagtgtaacctgctggagggtgagccccgggaattcgttgagaattcagaatgcatccagtgccatcctgaatgcctccctcaagcgatgaatatcacttgtacaggcagaggtcccgacaattgcatccaatgcgcccactatatcgatggcccccattgcgtgaagacttgccccgccggggtcatgggggagaataacaccctggtctggaagtatgcagacgccggacacgtgtgtcacctctgccatccaaactgcacctatggatcgtag

SEQ ID NO: 262113 - DNA, 1887 bp, Artificial Sequence
  derived and/or modified sequence
atgaggcccagcggcacagctggagctgccctgctggccctgctggccgccctgtgcccagccagccgggccctggaggagaagaaggtgtgccagggcaccagcaacaagctgacccagctgggcacctttgaggaccacttcctgagcctgcagaggatgttcaacaactgtgaggtggtgctgggcaacctggagatcacctacgtgcagaggaactatgacctgtccttcctgaagaccatccaggaggtggccggctacgtgctgattgccctgaacacagtggagcgcatccccctggagaacctgcagatcatccggggcaacatgtactatgagaacagctatgccctggccgtgctgagcaactatgatgccaacaagacaggcctgaaggagctgcccatgaggaacctgcaggagatcctgcatggagctgtgcgcttcagcaacaacccagccctgtgcaatgtggagagcatccagtggagggacatcgtgtccagtgacttcctgagcaacatgtccatggacttccagaaccacctgggcagctgccagaagtgtgaccccagctgccccaacggcagctgctggggcgctggggaggagaactgccagaagctgaccaagatcatctgtgcccagcagtgcagcggccgctgccggggcaagagccccagcgactgctgccacaaccagtgtgccgccggctgcaccggcccccgggagagtgactgcctggtgtgcaggaagttcagagatgaggccacctgcaaggacacctgcccccccctgatgctgtacaaccccaccacctaccagatggatgtgaaccctgagggcaagtacagctttggagccacctgtgtgaagaagtgccccagaaattatgtggtgacagaccacggcagctgtgtgcgggcctgtggggctgacagctatgagatggaggaggatggagtgaggaagtgcaagaagtgtgagggcccctgcaggaaggtgtgcaatggcatcggcatcggggagttcaaggacagcctgagcatcaatgccaccaacatcaagcacttcaagaactgcaccagcatcagcggggacctgcacatcctgcctgtggccttccggggggacagcttcacccacaccccacccctggacccccaggagctggacatcctgaagacagtgaaggagatcaccggcttcctgctgatccaggcctggccagagaacagaacagacctgcacgcctttgagaacctggagatcatccggggccgcaccaagcagcacggccagttcagcctggccgtggtgtccctgaacatcaccagcctgggcctgcggagcctgaaggagatcagtgatggagatgtgatcatcagcggcaacaagaacctgtgctacgccaacaccatcaactggaagaagctgtttggcaccagcggccagaagaccaagatcatcagcaacagaggagagaacagctgcaaggccaccggccaggtgtgccacgccctgtgcagccctgagggctgctggggccctgagccccgggactgtgtgtcctgcagaaatgtgtcccggggccgggagtgtgtggacaagtgcaacctgctggagggggagccccgggagtttgtggagaacagcgagtgcatccagtgccacccagaatgtctgccccaggccatgaacatcacctgcaccggccggggccctgacaactgcatccagtgtgcccactacattgatggcccccactgtgtgaagacctgcccagctggggtgatgggagagaacaacaccctggtgtggaagtatgcagatgctggccacgtgtgccacctgtgccaccccaactgcacctacggcagctag

SEQ ID NO: 262114 - DNA, 1887 bp, Artificial Sequence
  derived and/or modified sequence
atgcggcccagcggcaccgccggcgccgccctgctggccctgctggcagcattatgcccagccagcagagcgctggaggaaaagaaggtatgtcagggtaccagtaataaactgacacagcttggaaccttcgaggatcactttctgtccttgcagcgcatgtttaataactgcgaagtagtgctcggcaacctggaaatcacttatgtgcagaggaactacgatcttagcttcctgaaaacgatccaggaggtggccgggtatgtgctgatcgccctgaacacagtagagcggatcccgctggaaaatttacagatcatacgggggaacatgtactacgaaaactcttacgccctggcagtgctgagcaattatgatgccaacaagactggcctgaaggaattgcccatgagaaatctgcaggagatcctgcacggcgccgtcagattctccaacaatcccgccttatgtaatgtcgagagtatccagtggcgcgatattgtctcttccgatttcctcagcaatatgtccatggactttcagaaccatctcggctcctgccagaagtgcgacccgtcatgccctaatggaagttgctggggcgctggagaggaaaattgccagaagttaactaaaattatctgtgctcaacagtgtagtgggaggtgccgggggaaaagtccgagcgattgttgtcacaaccagtgcgcagccgggtgtacgggccctcgtgaaagcgactgtctggtgtgtagaaagttccgagatgaggctacctgtaaagatacttgtcctccattgatgctgtacaacccgaccacctaccagatggacgtgaatcccgagggcaaatactcttttggagcaacctgcgtgaaaaaatgtcctcgtaattatgtggtgacggaccacggatcttgcgtccgggcctgtggcgcagattcctacgagatggaggaggacggcgtaagaaagtgcaagaagtgcgagggaccatgtagaaaagtatgcaatgggattggtatcggcgagtttaaagattctttgtctattaatgccaccaatattaaacacttcaagaactgcacctccattagcggagacctccacatactccctgtggccttcaggggcgactctttcactcacaccccacccctcgacccacaagaactcgatatattgaagaccgtgaaagagataaccgggtttctgctgatccaggcatggcctgagaatcgcactgatttgcatgcttttgagaatctcgaaattatcagaggacgtacgaagcagcacggccaattcagcctggcagtggtttcactaaacattactagcttaggcctcagaagtctgaaggagatctcggatggtgatgttattatttccggcaacaaaaacctatgttacgccaatacaatcaactggaagaaattgtttgggacatctgggcagaaaaccaaaattatatccaacagaggcgagaattcttgcaaagctacagggcaggtgtgccacgctctgtgttcccctgagggctgttggggccctgaaccacgcgactgcgtcagttgcaggaacgtgtccagggggcgtgagtgtgttgataaatgcaatttgttggaaggtgaaccccgcgagtttgtggaaaactcagagtgcattcagtgtcatcccgagtgtctgccgcaagccatgaatatcacctgcaccggccgaggccccgacaactgcattcagtgcgcccactacattgacgggcctcattgcgtcaagacgtgtcccgcaggcgttatgggcgaaaacaacaccctcgtgtggaaatacgccgatgcagggcacgtgtgtcatctgtgtcatccaaattgcacgtacggcagctag

SEQ ID NO: 262115 - DNA, 1887 bp, Artificial Sequence
  derived and/or modified sequence
atgagaccctcgggcaccgcaggcgcagccctgttagcactattggctgcgctctgcccggcatcccgggctttggaagagaagaaagtatgtcagggcactagcaataaactgacgcaactgggcacatttgaggatcactttctttccctacagcgaatgttcaacaactgcgaggtggtgctgggtaatctggagataacttacgtgcaacggaattacgacttgtcctttctgaaaaccatccaggaagttgccggatatgtcctgatagccctcaacacagtagagcggattccactggaaaacttgcagattatccgtggcaatatgtactacgagaacagctacgctttggcagtactaagtaattacgacgcaaacaaaaccggactgaaggaactacccatgaggaacctgcaggaaatcctgcatggagccgtgcggttttccaataaccctgccctgtgcaatgtcgagtctatccaatggagggacattgtgtcctctgattttctgtcgaacatgagcatggacttccagaatcacctgggtagctgtcagaaatgcgatccttcttgtcccaacggctcctgctggggggcaggcgaagagaactgccagaaactcactaaaatcatatgcgctcagcaatgtagcggcagatgtaggggcaaaagcccctccgactgttgccataaccagtgcgctgcaggatgcactgggccacgtgagagtgactgcctggtttgccggaagttccgcgacgaagctacatgcaaggatacgtgtccccctctaatgctgtacaacccaactacctaccagatggatgtaaaccccgaaggaaagtacagtttcggcgctacctgtgttaagaagtgccctagaaactacgtcgttacggaccacgggtcctgcgttagagcctgcggagcagactcttatgagatggaagaggacggcgtgagaaaatgcaaaaagtgcgagggcccatgtaggaaagtgtgcaacggcataggtatcggcgaattcaaggactccctctcaattaacgctactaacatcaaacatttcaaaaattgtacatcaattagcggcgacctgcatattctgcctgtggcgttcaggggagactcttttacccacactccacctcttgacccccaggaactcgacatactgaaaacagtgaaggagataaccggcttcttgctcatacaggcgtggcctgagaatcgcactgatctccacgcctttgagaacttagagatcatccggggtcgaactaagcaacacgggcagttctcccttgccgtggtttctctgaatattacaagtcttggtctaaggtcactcaaagagatctcagacggggatgtcataatctccggaaataagaatttatgctacgctaacacaatcaactggaaaaagctcttcgggacttctggtcaaaaaacaaagatcatatccaatagaggcgaaaacagctgtaaagccacaggccaggtttgtcacgctctttgcagtccagagggatgttggggaccagagccaagagactgtgtatcatgtcgcaatgtcagcagagggagggagtgcgtcgacaagtgtaatctgctggagggagaacctcgggagttcgtggaaaactccgagtgcatccaatgccaccccgaatgcctgcctcaggcaatgaatattacgtgcacgggacgtggtcccgataactgtattcaatgcgcccactacatcgatggtcctcattgcgtaaaaacctgccccgctggtgtcatgggtgagaataacactctggtgtggaaatacgcagatgctggccatgtatgtcacctgtgtcacccaaactgcacatacggcagttag

SEQ ID NO: 262116 - protein, 405 aa, Artificial Sequence
  derived and/or modified sequence
MRPSGTAGAALLALLAALCPASRALEEKKVCQGTSNKLTQLGTFEDHFLSLQRMFNNCEVVLGNLEITYVQRNYDLSFLKTIQEVAGYVLIALNTVERIPLENLQIIRGNMYYENSYALAVLSNYDANKTGLKELPMRNLQEILHGAVRFSNNPALCNVESIQWRDIVSSDFLSNMSMDFQNHLGSCQKCDPSCPNGSCWGAGEENCQKLTKIICAQQCSGRCRGKSPSDCCHNQCAAGCTGPRESDCLVCRKFRDEATCKDTCPPLMLYNPTTYQMDVNPEGKYSFGATCVKKCPRNYVVTDHGSCVRACGADSYEMEEDGVRKCKKCEGPCRKVCNGIGIGEFKDSLSINATNIKHFKNCTSISGDLHILPVAFRGDSFTHTPPLDPQELDILKTVKEITGLS

SEQ ID NO: 262117 - DNA, 1218 bp, Artificial Sequence
  derived and/or modified sequence
atgagacccagcggcaccgccggcgccgccctgctggccctgctggccgccctgtgccccgccagcagagccctggaggagaagaaggtgtgccagggcaccagcaacaagctgacccagctgggcaccttcgaggaccacttcctgagcctgcagagaatgttcaacaactgcgaggtggtgctgggcaacctggagatcacctacgtgcagagaaactacgacctgagcttcctgaagaccatccaggaggtggccggctacgtgctgatcgccctgaacaccgtggagagaatccccctggagaacctgcagatcatcagaggcaacatgtactacgagaacagctacgccctggccgtgctgagcaactacgacgccaacaagaccggcctgaaggagctgcccatgagaaacctgcaggagatcctgcacggcgccgtgagattcagcaacaaccccgccctgtgcaacgtggagagcatccagtggagagacatcgtgagcagcgacttcctgagcaacatgagcatggacttccagaaccacctgggcagctgccagaagtgcgaccccagctgccccaacggcagctgctggggcgccggcgaggagaactgccagaagctgaccaagatcatctgcgcccagcagtgcagcggcagatgcagaggcaagagccccagcgactgctgccacaaccagtgcgccgccggctgcaccggccccagagagagcgactgcctggtgtgcagaaagttcagagacgaggccacctgcaaggacacctgcccccccctgatgctgtacaaccccaccacctaccagatggacgtgaaccccgagggcaagtacagcttcggcgccacctgcgtgaagaagtgccccagaaactacgtggtgaccgaccacggcagctgcgtgagagcctgcggcgccgacagctacgagatggaggaggacggcgtgagaaagtgcaagaagtgcgagggcccctgcagaaaggtgtgcaacggcatcggcatcggcgagttcaaggacagcctgagcatcaacgccaccaacatcaagcacttcaagaactgcaccagcatcagcggcgacctgcacatcctgcccgtggccttcagaggcgacagcttcacccacaccccccccctggacccccaggagctggacatcctgaagaccgtgaaggagatcaccggcctgagctag

SEQ ID NO: 262118 - DNA, 1570 bp, Artificial Sequence
  derived and/or modified sequence
ccggcgcagcgcggccgcagcagcctccgccccccgcacggtgtgagcgcccgacgcggccgaggcggccggagtcccgagctagccccggcggccgccgccgcccagaccggacgacaggccacctcgtcggcgtccgcccgagtccccgcctcgccgccaacgccacaaccaccgcgcacggccccctgactccgtccagtattgatcgggagagccggagcgagctcttcggggagcagcgatgcgaccctccgggacggccggggcagcgctcctggcgctgctggctgcgctctgcccggcgagtcgggctctggaggaaaagaaagtttgccaaggcacgagtaacaagctcacgcagttgggcacttttgaagatcattttctcagcctccagaggatgttcaataactgtgaggtggtccttgggaatttggaaattacctatgtgcagaggaattatgatctttccttcttaaagaccatccaggaggtggctggttatgtcctcattgccctcaacacagtggagcgaattcctttggaaaacctgcagatcatcagaggaaatatgtactacgaaaattcctatgccttagcagtcttatctaactatgatgcaaataaaaccggactgaaggagctgcccatgagaaatttacaggaaatcctgcatggcgccgtgcggttcagcaacaaccctgccctgtgcaacgtggagagcatccagtggcgggacatagtcagcagtgactttctcagcaacatgtcgatggacttccagaaccacctgggcagctgccaaaagtgtgatccaagctgtcccaatgggagctgctggggtgcaggagaggagaactgccagaaactgaccaaaatcatctgtgcccagcagtgctccgggcgctgccgtggcaagtcccccagtgactgctgccacaaccagtgtgctgcaggctgcacaggcccccgggagagcgactgcctggtctgccgcaaattccgagacgaagccacgtgcaaggacacctgccccccactcatgctctacaaccccaccacgtaccagatggatgtgaaccccgagggcaaatacagctttggtgccacctgcgtgaagaagtgtccccgtaattatgtggtgacagatcacggctcgtgcgtccgagcctgtggggccgacagctatgagatggaggaagacggcgtccgcaagtgtaagaagtgcgaagggccttgccgcaaagtgtgtaacggaataggtattggtgaatttaaagactcactctccataaatgctacgaatattaaacacttcaaaaactgcacctccatcagtggcgatctccacatcctgccggtggcatttaggggtgactccttcacacatactcctcctctggatccacaggaactggatattctgaaaaccgtaaaggaaatcacaggtttgagctgaattatcacatgaatataaatgggaaatcagtgttttagagagagaacttttcgacatatttcctgttcccttggaataaaaacatttcttctgaaattttaccgttaa

SEQ ID NO: 262119 - DNA, 1218 bp, Artificial Sequence
  derived and/or modified sequence
atgcggccgtcaggaacagcaggcgcagctctgctggctcttctggcggccctgtgccctgctagcagagctctcgaggagaagaaggtgtgtcaaggaacctcaaacaagctgacgcagcttgggactttcgaggaccatttcttgtctttgcaacggatgttcaataactgtgaggttgtgctgggaaaccttgagattacttatgtccagcgcaactacgatctctcttttctgaagaccatacaggaggtggcaggatatgtgctgattgccttgaatacggtggagcggatccccctcgagaacctgcagatcattaggggaaatatgtactatgagaactcatacgccctcgccgtattatcaaactatgatgccaataagaccggtttgaaagagcttcctatgcggaatctgcaagagattttgcacggggccgtcaggttttccaataatcctgccctttgcaacgttgagagcatccagtggcgggatatagttagctctgattttctttcaaatatgagcatggacttccagaatcacctcgggtcttgtcagaagtgcgaccccagctgtcctaatggatcttgctggggagctggagaggaaaactgccagaagctgacaaagatcatctgcgctcagcagtgtagtggtcgatgtcgcggaaaatcgccttccgactgttgtcacaatcagtgtgctgcagggtgtacgggcccccgcgaaagcgattgtttagtgtgtagaaagttccgggacgaggccacgtgtaaagatacatgtccacctctcatgctgtacaacccaacaacataccagatggatgtcaatcctgagggtaaatatagcttcggagccacatgtgttaagaagtgccctaggaattacgtggtgactgaccacggcagctgcgtgagggcatgtggtgcagactcatatgaaatggaggaggacggagtacgtaaatgcaaaaaatgtgagggcccctgcaggaaagtgtgtaacggaatcggaattggagaatttaaggattccctctccatcaacgctacaaacatcaagcacttcaagaactgcacctcaatctccggcgatttacatattctacctgtggcctttaggggggattcttttacgcacacccccccgctggaccctcaggagctcgatatactgaaaaccgtgaaagagattacaggactcagttag

SEQ ID NO: 262120 - DNA, 1218 bp, Artificial Sequence
  derived and/or modified sequence
atgaggcccagcggcacagctggagctgccctgctggccctgctggccgccctgtgcccagccagccgggccctggaggagaagaaggtgtgccagggcaccagcaacaagctgacccagctgggcacctttgaggaccacttcctgagcctgcagaggatgttcaacaactgtgaggtggtgctgggcaacctggagatcacctacgtgcagaggaactatgacctgtccttcctgaagaccatccaggaggtggccggctacgtgctgattgccctgaacacagtggagcgcatccccctggagaacctgcagatcatccggggcaacatgtactatgagaacagctatgccctggccgtgctgagcaactatgatgccaacaagacaggcctgaaggagctgcccatgaggaacctgcaggagatcctgcatggagctgtgcgcttcagcaacaacccagccctgtgcaatgtggagagcatccagtggagggacatcgtgtccagtgacttcctgagcaacatgtccatggacttccagaaccacctgggcagctgccagaagtgtgaccccagctgccccaacggcagctgctggggcgctggggaggagaactgccagaagctgaccaagatcatctgtgcccagcagtgcagcggccgctgccggggcaagagccccagcgactgctgccacaaccagtgtgccgccggctgcaccggcccccgggagagtgactgcctggtgtgcaggaagttcagagatgaggccacctgcaaggacacctgcccccccctgatgctgtacaaccccaccacctaccagatggatgtgaaccctgagggcaagtacagctttggagccacctgtgtgaagaagtgccccagaaattatgtggtgacagaccacggcagctgtgtgcgggcctgtggggctgacagctatgagatggaggaggatggagtgaggaagtgcaagaagtgtgagggcccctgcaggaaggtgtgcaatggcatcggcatcggggagttcaaggacagcctgagcatcaatgccaccaacatcaagcacttcaagaactgcaccagcatcagcggggacctgcacatcctgcctgtggccttccggggggacagcttcacccacaccccacccctggacccccaggagctggacatcctgaagacagtgaaggagatcaccggcctgtcctag

SEQ ID NO: 262121 - DNA, 1218 bp, Artificial Sequence
  derived and/or modified sequence
atgcggcccagcggcaccgccggcgccgccctgctggccctgctggcagccctgtgtcctgccagccgcgcactagaggagaaaaaggtctgccaaggtacatcaaataaactcacgcagctgggcacctttgaggaccattttttgagcctgcagcgcatgtttaacaattgcgaagttgtgctggggaatcttgagattacctatgttcagcggaactacgatctgtccttccttaaaacgatccaggaagtggctggctatgtgcttattgctctgaataccgtggaacggatcccactggagaatcttcagataattaggggcaacatgtactacgaaaatagctatgcactggccgttttgtcaaattacgacgccaataaaaccggcctgaaggagcttccaatgaggaacttgcaagaaatcttgcatggagccgtgcgcttctctaataaccccgctctatgcaacgtcgagagtatacagtggagggacattgtgagctctgactttctgagtaacatgagtatggattttcagaaccatctgggtagctgtcaaaaatgcgatccttcgtgtccaaatgggagctgctggggagcgggagaagagaactgccagaaactgacaaagattatctgtgcccagcagtgctccggaaggtgcaggggtaaatctccttctgattgttgtcacaatcagtgtgccgccggatgcaccggcccacgcgagagcgactgcttggtctgccgaaagtttcgcgatgaggccacatgtaaagacacctgccccccacttatgctgtacaatcccacaacctaccagatggacgtcaaccctgagggtaagtattctttcggagcgacctgtgtgaaaaaatgtccgagaaattatgtggtaactgatcatggatcatgtgtgcgcgcttgtggggcagactcatacgagatggaagaagacggggtgcgcaaatgtaagaaatgtgaaggcccttgtcggaaagtttgtaatggaataggaataggagaatttaaagacagcttgagcataaacgcaactaacatcaagcattttaaaaactgcacctctattagtggcgacctacatatcctaccggtggctttcaggggggacagcttcacccacaccccacctctcgacccacaggaactcgatatccttaaaactgtcaaagagattaccgggctgtcctag

SEQ ID NO: 262122 - DNA, 1218 bp, Artificial Sequence
  derived and/or modified sequence
atgagaccaagtggtacagcgggagccgctctgctcgccctgcttgcagctctctgccctgcttctcgcgctctggaggagaaaaaggtgtgccaaggcacctccaataaactcacccagttagggacttttgaagaccacttcctgtctctccagaggatgtttaataattgtgaggtggtgctcgggaatctggagatcacgtatgtccaacgcaactatgaccttagcttcctgaaaactatacaagaggtagctgggtacgtcctcattgcacttaacacggtagagcggatccctctcgagaatctgcagattatccgcggtaatatgtactatgagaatagctatgctctggctgttctctccaattatgacgccaataaaaccggattaaaggagctgcccatgcggaacctgcaagagattcttcacggggcagtgagattctccaataatcccgctttatgcaacgtggaaagtatccagtggagggatatcgtgagtagcgatttcttatccaatatgtcgatggatttccaaaaccatcttgggagctgccaaaagtgcgatccatcatgtccaaacggttcttgctggggcgcaggtgaagaaaattgccaaaagcttactaaaattatttgtgcccagcagtgctccggaagatgccgtggcaagtctccttctgattgctgtcacaaccagtgtgcagctggttgcacgggtccaagagaatctgactgtctagtctgccggaaattcagagacgaggcaacatgtaaagatacatgcccacccctgatgctctataaccccacaacatatcaaatggacgtcaatcctgagggcaagtattcatttggcgctacgtgcgtgaagaagtgccctagaaattacgtggtgacagatcacggcagttgcgtgagagcttgcggagcagattcttatgagatggaagaagatggtgtgcgtaagtgcaaaaagtgtgagggaccttgcaggaaagtgtgcaacggcattggcattggcgaatttaaagacagcctaagtatcaacgctaccaatattaaacactttaaaaattgtacctcaatatcaggggatctccacattctgccagtagcatttcggggtgactcattcacacatacccccccactggacccgcaggagctcgacattttgaagacggtcaaggagatcacaggtttgtcgtag

SEQ ID NO: 262123 - protein, 628 aa, Artificial Sequence
  derived and/or modified sequence
MRPSGTAGAALLALLAALCPASRALEEKKVCQGTSNKLTQLGTFEDHFLSLQRMFNNCEVVLGNLEITYVQRNYDLSFLKTIQEVAGYVLIALNTVERIPLENLQIIRGNMYYENSYALAVLSNYDANKTGLKELPMRNLQEILHGAVRFSNNPALCNVESIQWRDIVSSDFLSNMSMDFQNHLGSCQKCDPSCPNGSCWGAGEENCQKLTKIICAQQCSGRCRGKSPSDCCHNQCAAGCTGPRESDCLVCRKFRDEATCKDTCPPLMLYNPTTYQMDVNPEGKYSFGATCVKKCPRNYVVTDHGSCVRACGADSYEMEEDGVRKCKKCEGPCRKVCNGIGIGEFKDSLSINATNIKHFKNCTSISGDLHILPVAFRGDSFTHTPPLDPQELDILKTVKEITGFLLIQAWPENRTDLHAFENLEIIRGRTKQHGQFSLAVVSLNITSLGLRSLKEISDGDVIISGNKNLCYANTINWKKLFGTSGQKTKIISNRGENSCKATGQVCHALCSPEGCWGPEPRDCVSCRNVSRGRECVDKCNLLEGEPREFVENSECIQCHPECLPQAMNITCTGRGPDNCIQCAHYIDGPHCVKTCPAGVMGENNTLVWKYADAGHVCHLCHPNCTYGS

SEQ ID NO: 262124 - protein, 705 aa, Artificial Sequence
  derived and/or modified sequence
MRPSGTAGAALLALLAALCPASRALEEKKVCQGTSNKLTQLGTFEDHFLSLQRMFNNCEVVLGNLEITYVQRNYDLSFLKTIQEVAGYVLIALNTVERIPLENLQIIRGNMYYENSYALAVLSNYDANKTGLKELPMRNLQEILHGAVRFSNNPALCNVESIQWRDIVSSDFLSNMSMDFQNHLGSCQKCDPSCPNGSCWGAGEENCQKLTKIICAQQCSGRCRGKSPSDCCHNQCAAGCTGPRESDCLVCRKFRDEATCKDTCPPLMLYNPTTYQMDVNPEGKYSFGATCVKKCPRNYVVTDHGSCVRACGADSYEMEEDGVRKCKKCEGPCRKVCNGIGIGEFKDSLSINATNIKHFKNCTSISGDLHILPVAFRGDSFTHTPPLDPQELDILKTVKEITGFLLIQAWPENRTDLHAFENLEIIRGRTKQHGQFSLAVVSLNITSLGLRSLKEISDGDVIISGNKNLCYANTINWKKLFGTSGQKTKIISNRGENSCKATGQVCHALCSPEGCWGPEPRDCVSCRNVSRGRECVDKCNLLEGEPREFVENSECIQCHPECLPQAMNITCTGRGPDNCIQCAHYIDGPHCVKTCPAGVMGENNTLVWKYADAGHVCHLCHPNCTYGPGNESLKAMLFCLFKLSSCNQSNDGSVSHQSGSPAAQESCLGWIPSLLPSEFQLGWGGCSHLHAWPSASVIITASSCH

SEQ ID NO: 262125 - DNA, 2118 bp, Artificial Sequence
  derived and/or modified sequence
atgagacccagcggcaccgccggcgccgccctgctggccctgctggccgccctgtgccccgccagcagagccctggaggagaagaaggtgtgccagggcaccagcaacaagctgacccagctgggcaccttcgaggaccacttcctgagcctgcagagaatgttcaacaactgcgaggtggtgctgggcaacctggagatcacctacgtgcagagaaactacgacctgagcttcctgaagaccatccaggaggtggccggctacgtgctgatcgccctgaacaccgtggagagaatccccctggagaacctgcagatcatcagaggcaacatgtactacgagaacagctacgccctggccgtgctgagcaactacgacgccaacaagaccggcctgaaggagctgcccatgagaaacctgcaggagatcctgcacggcgccgtgagattcagcaacaaccccgccctgtgcaacgtggagagcatccagtggagagacatcgtgagcagcgacttcctgagcaacatgagcatggacttccagaaccacctgggcagctgccagaagtgcgaccccagctgccccaacggcagctgctggggcgccggcgaggagaactgccagaagctgaccaagatcatctgcgcccagcagtgcagcggcagatgcagaggcaagagccccagcgactgctgccacaaccagtgcgccgccggctgcaccggccccagagagagcgactgcctggtgtgcagaaagttcagagacgaggccacctgcaaggacacctgcccccccctgatgctgtacaaccccaccacctaccagatggacgtgaaccccgagggcaagtacagcttcggcgccacctgcgtgaagaagtgccccagaaactacgtggtgaccgaccacggcagctgcgtgagagcctgcggcgccgacagctacgagatggaggaggacggcgtgagaaagtgcaagaagtgcgagggcccctgcagaaaggtgtgcaacggcatcggcatcggcgagttcaaggacagcctgagcatcaacgccaccaacatcaagcacttcaagaactgcaccagcatcagcggcgacctgcacatcctgcccgtggccttcagaggcgacagcttcacccacaccccccccctggacccccaggagctggacatcctgaagaccgtgaaggagatcaccggcttcctgctgatccaggcctggcccgagaacagaaccgacctgcacgccttcgagaacctggagatcatcagaggcagaaccaagcagcacggccagttcagcctggccgtggtgagcctgaacatcaccagcctgggcctgagaagcctgaaggagatcagcgacggcgacgtgatcatcagcggcaacaagaacctgtgctacgccaacaccatcaactggaagaagctgttcggcaccagcggccagaagaccaagatcatcagcaacagaggcgagaacagctgcaaggccaccggccaggtgtgccacgccctgtgcagccccgagggctgctggggccccgagcccagagactgcgtgagctgcagaaacgtgagcagaggcagagagtgcgtggacaagtgcaacctgctggagggcgagcccagagagttcgtggagaacagcgagtgcatccagtgccaccccgagtgcctgccccaggccatgaacatcacctgcaccggcagaggccccgacaactgcatccagtgcgcccactacatcgacggcccccactgcgtgaagacctgccccgccggcgtgatgggcgagaacaacaccctggtgtggaagtacgccgacgccggccacgtgtgccacctgtgccaccccaactgcacctacggccccggcaacgagagcctgaaggccatgctgttctgcctgttcaagctgagcagctgcaaccagagcaacgacggcagcgtgagccaccagagcggcagccccgccgcccaggagagctgcctgggctggatccccagcctgctgcccagcgagttccagctgggctggggcggctgcagccacctgcacgcctggcccagcgccagcgtgatcatcaccgccagcagctgccactag

SEQ ID NO: 262126 - DNA, 2864 bp, Artificial Sequence
  derived and/or modified sequence
cccggcgcagcgcggccgcagcagcctccgccccccgcacggtgtgagcgcccgacgcggccgaggcggccggagtcccgagctagccccggcggccgccgccgcccagaccggacgacaggccacctcgtcggcgtccgcccgagtccccgcctcgccgccaacgccacaaccaccgcgcacggccccctgactccgtccagtattgatcgggagagccggagcgagctcttcggggagcagcgatgcgaccctccgggacggccggggcagcgctcctggcgctgctggctgcgctctgcccggcgagtcgggctctggaggaaaagaaagtttgccaaggcacgagtaacaagctcacgcagttgggcacttttgaagatcattttctcagcctccagaggatgttcaataactgtgaggtggtccttgggaatttggaaattacctatgtgcagaggaattatgatctttccttcttaaagaccatccaggaggtggctggttatgtcctcattgccctcaacacagtggagcgaattcctttggaaaacctgcagatcatcagaggaaatatgtactacgaaaattcctatgccttagcagtcttatctaactatgatgcaaataaaaccggactgaaggagctgcccatgagaaatttacaggaaatcctgcatggcgccgtgcggttcagcaacaaccctgccctgtgcaacgtggagagcatccagtggcgggacatagtcagcagtgactttctcagcaacatgtcgatggacttccagaaccacctgggcagctgccaaaagtgtgatccaagctgtcccaatgggagctgctggggtgcaggagaggagaactgccagaaactgaccaaaatcatctgtgcccagcagtgctccgggcgctgccgtggcaagtcccccagtgactgctgccacaaccagtgtgctgcaggctgcacaggcccccgggagagcgactgcctggtctgccgcaaattccgagacgaagccacgtgcaaggacacctgccccccactcatgctctacaaccccaccacgtaccagatggatgtgaaccccgagggcaaatacagctttggtgccacctgcgtgaagaagtgtccccgtaattatgtggtgacagatcacggctcgtgcgtccgagcctgtggggccgacagctatgagatggaggaagacggcgtccgcaagtgtaagaagtgcgaagggccttgccgcaaagtgtgtaacggaataggtattggtgaatttaaagactcactctccataaatgctacgaatattaaacacttcaaaaactgcacctccatcagtggcgatctccacatcctgccggtggcatttaggggtgactccttcacacatactcctcctctggatccacaggaactggatattctgaaaaccgtaaaggaaatcacagggtttttgctgattcaggcttggcctgaaaacaggacggacctccatgcctttgagaacctagaaatcatacgcggcaggaccaagcaacatggtcagttttctcttgcagtcgtcagcctgaacataacatccttgggattacgctccctcaaggagataagtgatggagatgtgataatttcaggaaacaaaaatttgtgctatgcaaatacaataaactggaaaaaactgtttgggacctccggtcagaaaaccaaaattataagcaacagaggtgaaaacagctgcaaggccacaggccaggtctgccatgccttgtgctcccccgagggctgctggggcccggagcccagggactgcgtctcttgccggaatgtcagccgaggcagggaatgcgtggacaagtgcaaccttctggagggtgagccaagggagtttgtggagaactctgagtgcatacagtgccacccagagtgcctgcctcaggccatgaacatcacctgcacaggacggggaccagacaactgtatccagtgtgcccactacattgacggcccccactgcgtcaagacctgcccggcaggagtcatgggagaaaacaacaccctggtctggaagtacgcagacgccggccatgtgtgccacctgtgccatccaaactgcacctacgggccaggaaatgagagtctcaaagccatgttattctgcctttttaaactatcatcctgtaatcaaagtaatgatggcagcgtgtcccaccagagcgggagcccagctgctcaggagtcatgcttaggatggatcccttctcttctgccgtcagagtttcagctgggttggggtggatgcagccacctccatgcctggccttctgcatctgtgatcatcacggcctcctcctgccactgagcctcatgccttcacgtgtctgttccccccgcttttcctttctgccacccctgcacgtgggccgccaggttcccaagagtatcctacccatttccttccttccactccctttgccagtgcctctcaccccaactagtagctaaccatcacccccaggactgacctcttcctcctcgctgccagatgattgttcaaagcacagaatttgtcagaaacctgcagggactccatgctgccagccttctccgtaattagcatggccccagtccatgcttctagccttggttccttctgcccctctgtttgaaattctagagccagctgtgggacaattatctgtgtcaaaagccagatgtgaaaacatctcaataacaaactggctgctttgttcaatgctagaacaacgcctgtcacagagtagaaactcaaaaatatttgctgagtgaatgaacaaatgaataaatgcataataaataattaaccaccaatccaacatccaga

SEQ ID NO: 262127 - DNA, 2118 bp, Artificial Sequence
  derived and/or modified sequence
atgcggccgtccggaactgctggcgcggctttacttgctctcctggcggccctgtgccccgcgtctcgcgccctggaggaaaagaaagtatgccaaggcacctccaacaaactcacacagctggggacgtttgaagatcatttcctgtcactgcaaagaatgttcaataactgtgaagtagtgctgggtaatctggagatcacctatgtgcaaagaaattacgacctttcctttttaaagaccatccaggaggtggcaggatatgtattgatcgctctgaatacagtggagcgaataccactggaaaaccttcagataattagggggaatatgtactacgagaactcttatgcactggccgtgctttcgaactacgacgccaacaaaactggactcaaggagctcccaatgaggaacttgcaagaaattctgcacggggccgtcaggtttagcaacaatccggccttgtgtaatgtagagtcaattcagtggcgcgacatcgtcagttctgacttcctctctaacatgtctatggattttcagaaccatctcggatcatgccagaagtgtgatccaagttgtcccaatggtagctgctggggagctggggaagagaattgtcaaaagctcactaagattatctgcgctcagcaatgttccggtaggtgtagaggcaagtccccaagcgactgttgccacaaccagtgcgccgcaggctgcaccggaccaagggagtctgattgcctcgtctgtagaaagttccgagatgaggctacctgcaaggacacatgcccaccactcatgctttacaatccaacaacataccagatggacgtcaatccggagggaaagtattcctttggcgccacatgcgtgaagaaatgtccccggaactatgtggtgacagatcatggatcttgtgtgcgggcctgtggagctgacagttacgagatggaagaggacggtgtccgcaaatgtaagaagtgtgagggtccctgtcgcaaggtttgtaatggcattggcatcggggagtttaaggattccctctcgatcaacgcaaccaacataaagcatttcaagaattgcacttcgatttcaggggatcttcatatcttacccgtggcattcagaggagattccttcacacacacccccccgctcgaccctcaggagttagacatcctcaaaacggtgaaggaaattactggctttctgctcattcaggcctggcccgagaacagaaccgatcttcatgcctttgaaaatctggagattatacgcggtaggactaagcaacacggccagttcagccttgcggttgtctccctgaacatcacatctctgggtctgaggagcctgaaagagattagtgacggtgacgtgattatcagcggtaataagaacctctgctacgccaacacgataaattggaaaaaattattcggtacctcggggcagaaaacaaaaatcatctccaaccggggtgagaattcctgcaaagctacaggacaagtgtgccacgccctatgcagccccgaaggatgttggggcccagagccacgtgattgtgtttcttgtcgcaacgtatctcgcgggcgtgagtgtgtagacaaatgcaaccttctggaaggagaacctagggagtttgttgagaattcagagtgcatccagtgccatcctgagtgtcttcctcaagccatgaatatcacttgcacggggcggggcccagataattgtatccagtgtgctcactatattgacgggccccattgcgtaaaaacatgtcccgcgggcgtcatgggtgaaaacaatacattggtttggaaatacgctgatgctggccacgtatgccacctgtgtcatccaaactgcacctacgggcccgggaatgaatctttaaaggctatgctcttctgtctgtttaagctgtctagctgcaaccagtcaaacgacggctccgttagtcaccagtctggctctcccgccgcccaagagtcttgcctcggctggataccttcacttctgccctccgagttccaactcggatggggtggttgttctcatctgcatgcatggcccagcgcttcagtaataattacggcctcaagctgtcactag

SEQ ID NO: 262128 - DNA, 2118 bp, Artificial Sequence
  derived and/or modified sequence
atgaggcccagcggcacagctggagctgccctgctggccctgctggccgccctgtgcccagccagccgggccctggaggagaagaaggtgtgccagggcaccagcaacaagctgacccagctgggcacctttgaggaccacttcctgagcctgcagaggatgttcaacaactgtgaggtggtgctgggcaacctggagatcacctacgtgcagaggaactatgacctgtccttcctgaagaccatccaggaggtggccggctacgtgctgattgccctgaacacagtggagcgcatccccctggagaacctgcagatcatccggggcaacatgtactatgagaacagctatgccctggccgtgctgagcaactatgatgccaacaagacaggcctgaaggagctgcccatgaggaacctgcaggagatcctgcatggagctgtgcgcttcagcaacaacccagccctgtgcaatgtggagagcatccagtggagggacatcgtgtccagtgacttcctgagcaacatgtccatggacttccagaaccacctgggcagctgccagaagtgtgaccccagctgccccaacggcagctgctggggcgctggggaggagaactgccagaagctgaccaagatcatctgtgcccagcagtgcagcggccgctgccggggcaagagccccagcgactgctgccacaaccagtgtgccgccggctgcaccggcccccgggagagtgactgcctggtgtgcaggaagttcagagatgaggccacctgcaaggacacctgcccccccctgatgctgtacaaccccaccacctaccagatggatgtgaaccctgagggcaagtacagctttggagccacctgtgtgaagaagtgccccagaaattatgtggtgacagaccacggcagctgtgtgcgggcctgtggggctgacagctatgagatggaggaggatggagtgaggaagtgcaagaagtgtgagggcccctgcaggaaggtgtgcaatggcatcggcatcggggagttcaaggacagcctgagcatcaatgccaccaacatcaagcacttcaagaactgcaccagcatcagcggggacctgcacatcctgcctgtggccttccggggggacagcttcacccacaccccacccctggacccccaggagctggacatcctgaagacagtgaaggagatcaccggcttcctgctgatccaggcctggccagagaacagaacagacctgcacgcctttgagaacctggagatcatccggggccgcaccaagcagcacggccagttcagcctggccgtggtgtccctgaacatcaccagcctgggcctgcggagcctgaaggagatcagtgatggagatgtgatcatcagcggcaacaagaacctgtgctacgccaacaccatcaactggaagaagctgtttggcaccagcggccagaagaccaagatcatcagcaacagaggagagaacagctgcaaggccaccggccaggtgtgccacgccctgtgcagccctgagggctgctggggccctgagccccgggactgtgtgtcctgcagaaatgtgtcccggggccgggagtgtgtggacaagtgcaacctgctggagggggagccccgggagtttgtggagaacagcgagtgcatccagtgccacccagaatgtctgccccaggccatgaacatcacctgcaccggccggggccctgacaactgcatccagtgtgcccactacattgatggcccccactgtgtgaagacctgcccagctggggtgatgggagagaacaacaccctggtgtggaagtatgcagatgctggccacgtgtgccacctgtgccaccccaactgcacctacggccctggaaatgaaagcctgaaggccatgctgttctgcctcttcaagctgagcagctgcaaccagagcaatgatggctctgtgagccaccagagcggcagccctgctgcccaggagagctgcctgggctggatccccagcctgctgcccagcgagttccagctgggctggggcggctgcagccacctgcacgcctggcccagcgccagcgtcatcatcacagccagcagctgccactag

SEQ ID NO: 262129 - DNA, 2118 bp, Artificial Sequence
  derived and/or modified sequence
atgcggcccagcggcaccgccggcgccgccctgctggccctgctggcagctctgtgtccagcctcacgcgccctggaagaaaaaaaggtgtgccaaggtacatccaacaaactgactcagttaggaacctttgaggaccattttctgagcctgcagcgcatgtttaataactgtgaggtcgtgctgggcaatcttgagatcacctatgtccagcgcaactatgacttgagtttccttaagacgatacaggaggttgccggttacgtcctgatcgctctcaacactgtcgaacggattcccctggaaaatttgcagatcattcgcggcaatatgtactacgaaaatagctacgctcttgctgtgctgagcaactatgacgccaacaagactggactgaaggagctgccaatgagaaatctgcaagaaatcttgcatggagccgttaggttctctaacaaccctgccctttgtaatgtagagtctatccaatggcgggacatcgtatctagcgattttttgtccaatatgagcatggactttcagaaccacctcggttcctgccagaaatgtgacccttcatgtcccaacggatcttgctggggggccggggaggaaaactgtcagaaactaaccaagataatctgtgcccaacagtgcagcggccgatgtaggggaaagtcgccttcagactgttgccacaaccagtgtgccgccggatgtacgggccccagagagtccgactgcctcgtctgcaggaagtttagggatgaagctacttgcaaagacacatgtccacctctgatgctgtataatccgactacctaccagatggacgttaatccagagggcaagtacagcttcggagccacctgcgtgaagaagtgtcctaggaattatgtggtgaccgaccatggttcctgtgtgagggcctgcggcgctgattcctatgaaatggaagaagacggtgtcaggaaatgtaagaagtgcgagggtccttgcaggaaggtatgtaacgggatcgggataggtgaattcaaagattccctttccattaatgccacaaatataaagcacttcaaaaattgtacttcaatttccggggacttacacatcctgcccgtcgccttccgcggggattcctttactcacaccccgcctctggatccacaggaactggacattttgaaaactgtgaaggaaatcactggattcctcttaattcaggcttggcctgaaaaccgcacagatttgcatgcctttgaaaacctggaaatcatcagggggcgcacgaaacagcacggccagttctcccttgctgtcgtatcgttaaacattaccagtctgggactacgcagcttgaaggaaatctctgacggcgacgtgatcatctcagggaataaaaatctgtgctacgctaacacaattaattggaagaagcttttcggaacaagcggtcagaaaacaaaaattataagcaatcgcggtgaaaattcatgtaaagccaccggacaggtctgccacgccctctgctcgcccgagggctgctggggccccgaaccccgggattgtgtctcctgcagaaacgtttcacgaggtcgtgagtgcgtcgacaagtgcaatcttttagaaggggaaccacgagaattcgttgagaacagtgagtgtatccagtgccaccccgaatgcctcccccaggccatgaatattacctgcacgggccgcggcccagataattgtattcaatgcgcccactacatcgacggtccacattgcgtaaagacctgtccagccggtgtgatgggcgaaaataatactctcgtgtggaagtatgctgacgccgggcatgtatgtcatctgtgtcatccaaactgtacttatggccctggcaatgagagcctcaaggctatgcttttctgcctcttcaagctttcctcttgcaatcagagcaatgatgggtcagtgagccaccagtcagggtctccagccgctcaggagtcgtgtctaggctggatcccatctctgcttccaagtgaattccagctggggtggggaggctgctctcatctgcacgcctggccctccgcctcagtgattattaccgccagctcatgccactag

SEQ ID NO: 262130 - DNA, 2118 bp, Artificial Sequence
  derived and/or modified sequence
atgcggccttctggtaccgccggagcagccctgctcgccctgttggcagccctgtgccccgcttctagggctctcgaggagaagaaagtatgccagggaacaagtaataagctgacacagttaggtactttcgaggaccatttcctttcccttcagcggatgtttaacaactgcgaagtggtgctggggaaccttgagatcacatacgtgcaacgcaattatgatctcagtttcctcaagacaatccaggaagtagctggttacgtcttaattgcgctcaacactgtcgaacggattccactggaaaatctccagattatcagaggaaacatgtattacgagaattcctacgcacttgcagtgttgtccaactacgatgcgaacaaaacaggtcttaaagagctgccgatgaggaaccttcaggagatactacacggcgcagtgaggttctcaaacaatcctgcattgtgtaacgtggaaagtatccagtggcgcgatatcgtaagctctgattttctcagcaatatgagcatggatttccagaaccacttaggcagttgccagaagtgtgacccttcttgcccaaacggttcctgctggggggctggtgaggagaactgtcagaaattgaccaaaattatttgcgcacaacagtgctccggacgctgtcggggaaaatctccctctgactgttgccacaatcagtgcgcagcgggatgcacaggccctcgtgagagtgactgtttagtgtgtcgtaaattcagagacgaggctacatgtaaagatacctgtcctccgctcatgctgtacaacccgactacttatcagatggacgtcaatccggagggtaagtactcatttggagcaacctgtgtcaagaagtgcccccgaaactatgtggtcacggaccatgggagctgtgtgcgggcatgcggtgccgacagctatgaaatggaggaagacggagtgagaaaatgtaaaaaatgtgagggtccctgtagaaaggtctgtaatggcatcggcatcggagaatttaaggacagcttgagcataaatgctaccaatatcaaacatttcaaaaactgcacatccatttctggggacctccacatcctaccagtggctttccgcggtgacagctttacccataccccaccactggatccccaggagctcgatattctaaagaccgtaaaggagattacgggcttcttactgatccaggcctggccggaaaatcggacagatttacatgcctttgagaacctcgaaattattcgaggacggactaagcagcatggacagttttcattagcagtggtgtccctgaacataacaagtctgggcctaagatctttaaaagagatctcagacggggatgtgattatttccggcaataagaacctgtgttatgctaataccattaattggaaaaaactgtttggaacctctgggcaaaagacaaagattatcagtaacaggggagagaactcctgcaaggctacagggcaggtgtgtcacgccctatgttcccccgagggctgctggggtccagagcctagggattgcgtctcttgccggaacgtcagcaggggccgagagtgtgttgataagtgtaacttacttgagggggagcctagggaattcgttgaaaattccgagtgtatccagtgtcatcccgagtgtctgccacaggctatgaatattacatgcactggcagaggacctgacaattgcatccagtgcgcccattatatcgacggacctcattgtgtgaagacatgtcctgcaggcgtcatgggagaaaataatactctggtttggaaatatgcagatgcgggacatgtgtgccacctgtgccatcctaattgtacctacggcccaggtaatgagtctctgaaggctatgctcttctgtttgtttaagctgtcctcatgtaaccagagcaacgatggctccgtatcccatcagtccgggtcacctgcagcccaagagagctgtctcggctggatcccatcactgctcccttccgagtttcagctgggttgggggggatgctcccatctgcatgcttggccctcagcatctgtcatcatcactgcttcctcctgccactag

SEQ ID NO: 262131 - protein, 382 aa, Artificial Sequence
  derived and/or modified sequence
MRSPLCWLLPLLILASVAQGQPTRRPRPGTGPGRRPRPRPRPTPSFPQPDEPAEPTDLPPPLPPGPPSIFPDCPRECYCPPDFPSALYCDSRNLRKVPVIPPRIHYLYLQNNFITELPVESFQNATGLRWINLDNNRIRKIDQRVLEKLPGLVFLYMEKNQLEEVPSALPRNLEQLRLSQNHISRIPPGVFSKLENLLLLDLQHNRLSDGVFKPDTFHGLKNLMQLNLAHNILRKMPPRVPTAIHQLYLDSNKIETIPNGYFKSFPNLAFIRLNYNKLTDRGLPKNSFNISNLLVLHLSHNRISSVPAINNRLEHLYLNNNSIEKINGTQICPNDLVAFHDFSSDLENVPHLRYLRLDGNYLKPPIPLDLMMCFRLLQSVVI

SEQ ID NO: 262132 - DNA, 1149 bp, Artificial Sequence
  derived and/or modified sequence
atgcgcagtcctctgtgctggttgctaccccttctgatcttagcctctgtggcacagggtcagcctacccgccgcccccgcccaggcacagggcctggtaggcggcctagaccacgccctcgccctacgccaagcttcccccagcccgatgagcctgctgaacccacggacctgcccccgcctctccctcctggccctccctcgatttttccagactgccctcgcgagtgctattgtcctccagatttcccctccgcactgtattgcgactcgagaaaccttcgaaaggtgcccgtgatccctccacgcattcattacctgtatctgcagaataatttcatcacggaactgcctgtcgagtcttttcagaatgcaactggtctgcgctggatcaatctcgacaacaaccgcatccggaagattgaccaaagggttctggagaagctgccaggcctggtctttctctacatggaaaaaaatcagttggaggaggtaccatccgctctgccgaggaacctggagcagctgcgactgtcccaaaaccatatctccagaattcctcccggtgttttttccaagctcgaaaatctactcttgctcgatttgcaacataatcgattatccgatggcgtgttcaaaccggatactttccacggcctcaaaaatttgatgcagctgaatctcgcccacaacatccttaggaagatgccccctcgcgtgccgaccgccatccatcagctgtacctcgattctaataaaatagagactataccaaacgggtactttaagagtttccccaacctggcctttattagactgaattataacaaactgacagaccgcggtttgcctaaaaacagtttcaatatcagtaatctgttggtgctgcatctgagtcacaatcggatttccagcgtgccagccatcaacaatcggctggagcacctctacttgaacaacaatagcatcgaaaagattaatgggactcaaatctgcccaaacgacctggtcgcattccacgatttctcctctgatctggagaacgtccctcatctgagatacttgcgcctcgacggaaattacttgaaaccccctatccctttagacctaatgatgtgctttcgcttgttgcaaagtgtggtgatctag

SEQ ID NO: 262133 - DNA, 1149 bp, Artificial Sequence
  derived and/or modified sequence
atgaggagccccctgtgctggctgctgcccctgctgatcctggcctctgtggcccagggccagcccacccggcggccccggcccggcaccggccctggccggcggccccggccccggccccggcccacccccagcttcccccagccagatgagcctgctgagcccacagacctgcccccacccctgcccccaggcccccccagcatcttcccagactgcccccgggagtgctactgccccccagacttccccagcgccctgtactgtgacagcaggaacctgaggaaggtgcctgtgattcctccccgcatccactacctgtacctgcagaacaacttcatcacagagctgcctgtggagagcttccagaatgccaccggcctgcgctggatcaacctggacaacaaccgcatcaggaagattgaccagagggtgctggagaagctgcccggcctggtgttcctgtacatggagaagaaccagctggaggaggtgcccagcgccctgcccaggaacctggagcagctgcggctgagccagaaccacatcagccgcatccccccaggagtcttcagcaagctggagaacctgctgctgctggacctgcagcacaaccggctgagtgatggagtcttcaagccagacaccttccacggcctgaagaacctgatgcagctgaacctggcccacaacatcctgaggaagatgccaccccgggtgcccacagccatccaccagctgtacctggacagcaacaagattgagaccatccccaacggctacttcaagagcttccccaacctggccttcatccggctgaactacaacaagctgacagaccggggcctgcccaagaacagcttcaacatcagcaacctgctggtgctgcacctgagccacaaccgcatcagctctgtgcctgccatcaacaaccggctggagcacctgtacctgaacaacaacagcattgagaagatcaatggcacccagatctgccccaatgacctggtggccttccatgacttcagcagtgacctggagaatgtgccccacctgcgctacctgcggctggatggcaactacctgaagccacccatccccctggacctgatgatgtgcttccggctgctgcagagcgtggtgatctag

SEQ ID NO: 262134 - DNA, 1149 bp, Artificial Sequence
  derived and/or modified sequence
atgcggagccccctgtgctggctgctgcccctgctgatcctggcctcagtggcgcagggtcagcccactaggcgtcctcgccccggcacaggtcccggccgacgaccacggccccgacccagaccaacaccctccttcccacagcctgatgaacctgcggagccgacagatcttcctccaccactgccgcccggccccccctcaatctttcctgattgtcctcgcgaatgctattgccctcctgattttccgtctgctttatattgcgactccagaaaccttagaaaggtgcctgtgatccccccgcgcattcactacctttacctgcagaataacttcattacagaactcccagtggagtcctttcagaacgcgactggcctgcggtggataaatctcgataataaccggataagaaaaatagaccagagagtcttggaaaagctgcccggactggtgtttctgtacatggaaaaaaatcagctggaagaagtcccatccgccctgccacgcaatcttgagcaactgcgcctcagccaaaatcatatctcccggatcccgccgggcgtcttttccaaattggaaaacctcttgctgctcgatctccagcataatagactgtcggatggagtctttaagcccgacacattccacggattaaagaacttaatgcaactgaacctggcacataacattttgaggaagatgcccccaagggtccccacggcaatacaccagctctatctggacagtaacaagatcgaaactattccaaatgggtactttaagtcatttcctaatcttgcctttatcagactcaattacaataagctgaccgatcgtgggttgcccaagaattcatttaatatcagtaatcttcttgtgctccatctctcccacaaccgtattagctcagtgcctgccattaacaatagattagaacacctgtatctgaataacaacagcatcgaaaaaatcaatggaacccagatctgcccaaacgatctcgtggcgttccacgacttcagctcagatctggagaatgttccacatttacggtatttgcgactggatggtaactatcttaagccacccataccactcgaccttatgatgtgcttccgcttgttgcaatctgtggtgatctag

SEQ ID NO: 262135 - DNA, 1149 bp, Artificial Sequence
  derived and/or modified sequence
atgcggtcccctttgtgttggctgctgccgctgctgattctcgcttcagtggcacagggccagccaacccggcgaccacgaccagggacagggccaggcaggcgtccaagacctaggcctcgccctacccccagcttcccccagcccgatgagcctgctgaaccaacagacctgcctccgccattaccgccaggcccacctagtatttttcctgattgtccccgagaatgctattgtcctcccgacttcccgtcagctctctactgcgacagcagaaaccttcgaaaagtgcctgtgattccgcctagaatccattatctctatttacagaacaattttattacagagctgccagtcgagagttttcagaatgccactggactgcgctggattaacctggacaacaatagaatcaggaaaatcgaccagagggttttagagaagctgcccggactggtgtttctgtacatggagaaaaatcaacttgaggaggtgccgtccgccctccctcgcaatctcgagcaactccgcctgagccaaaaccatatctcccggatccctccaggtgttttcagcaagttagaaaatctgctcctcctggatctccaacataacaggctgagcgatggcgtttttaaaccagacacgtttcatgggctaaagaatctgatgcaactgaacctggcgcacaatatcctcaggaagatgccaccgagagtgcccaccgctattcaccagctctacctggattccaataagatagagacgatacccaatggatattttaaatcattccctaacctggcatttattcggcttaattataataaactcaccgatcgaggccttcccaaaaatagtttcaatatctcgaacctgctggtgttacacctgagtcacaatagaatcagtagtgtacccgcaataaacaaccgtctggagcacctctatcttaataacaacagtatagagaaaataaatggaacccaaatttgtccaaatgacctggtcgccttccatgacttcagcagcgacctagagaatgtcccacatcttagatatctgcgcctggacggcaactatttgaaaccaccgattcccctcgacttgatgatgtgcttcaggttattgcaatcggttgtgatttag

SEQ ID NO: 262136 - DNA, 5747 bp, Artificial Sequence
  derived and/or modified sequence
ctgggagatcagatcttctagctggctctctgctgccacagctccgccgaagggagggggtggaagaggaggactaaactcagagctgagaggagaggcaggtgtgtgcaggtgcatcacctggatcatgaggtcacccctctgctggctcctcccacttctcatcttggcctcagtggcccaaggccagccaacaagacgaccaagacccgggactgggcccgggcgcagacccaggcccaggcccaggcccacacccagctttcctcagcctgatgaaccagcagagccaacagacctgcctcctcccctccctccaggccctccatctatcttccctgactgtccccgcgaatgctactgcccccctgatttcccatctgccctctactgtgatagccgcaacctgcgaaaggtccctgtcatcccgccccgcatccattacctctatctccagaacaacttcatcactgagctcccggtggagtccttccagaatgccacaggcctgcgatggattaacctggacaacaaccgaatccgcaagatagaccagagggtgctggagaaactgcccggcctggtgttcctctacatggagaagaaccagttggaagaggtcccctcggccctgccccggaacctggagcagctgaggctgagccagaaccacatctccagaatcccgcctggtgtcttcagcaagctggagaacctgctgctcctggatctccagcacaacaggctgagcgacggcgtcttcaagcccgacaccttccatggcctcaagaacctcatgcagctcaacctggcccacaacatcctgagaaagatgccgcccagggtccccaccgccattcaccagctctacctggacagtaacaagattgagaccatccctaacggatacttcaagagctttcccaatcttgccttcattcggcttaactacaacaagctgacagacaggggactccccaagaactcctttaatatctccaacctgcttgtgctccacctgtcccacaacaggatcagcagtgtgcccgccatcaacaacaggctggaacacctgtacctcaacaacaatagcatcgagaaaatcaacggaacccagatttgccccaacgacctagtggcgttccatgacttctcctcggacctggagaacgtgccacacctgcgctacctgcggctggatggaaactacttgaagccgcccatcccgctggacctcatgatgtgcttccgcctcctgcagtccgtggtcatctaggccctactccgccaccggatctgctctgaccgcacttgaaggctggggcccaggcacctgtgccggccattcgttttctctctctccctttctttctcccagctttgcctcccttatcccaccctcgaggcagggaaaagccatctattcttctgcagcctcaggagcgagacttcaaggactcagtttggttccacccagttgaaagacacccagtgcacacccaaactcctggccttctgtggtttccctttgctccagaaacacagatgtgtctaaagacttggtgtccccttctctctcctcccccacccgccactcctgggtacatctgggccgtggactatctgatcttggtcctggccgagcaaacagcccggaggtaaggttcagaaagtccccctggggactcctccatcttcggcagctctggctcaaagaggccgagaaacccagttctcctgggccaaggatcccttctggcaaagctgctgctccgccgcttggttccccggcaccagacatcgccctggccctgctggcccgggtatcgggaaggaggagcgagggaatgacggaggtagggtgcagggtcagggctcccgcaggggcctgcatctggccagcaggacacagggatgcgcagggcgcccccttctgttccagggtgaacatagcacacgccctcctggctgggcctcaggaggaacagccaaggagaagaatggcccaaggaactaggaagcagccatgggagaggggaagggttcaagcccgggatgggcccgcgtgacgtcgatgggtcctgcggcccccttgcccaacctcgggtttagggaggagggttcacagtgtttttgtgggggcgggggaaggaagaggcagccccgcccccgccatctgttctccatcagtgtgcgcggcccagccatttccaccctcgggaggcggctcctgagaaacagggaggaaggggcggagcacctggacgtctcccagaagcccctccacgtttgaaaatgcgcctcctcctcggagacagacgcatcggtgccacctagtggctggtgggagtaacagctggtcccagtcttgcgcctggccctcttcctggggtgattttcctcggtggaggaggcccgtggggtcccaacacggaagagccatgggccgtgtgcatggtgtcgctctcctctagggtctagcgggcacaaacgtccccaggctgggctcattcccatcgtgagtgagcccaggtgaggacatagtcggctcccgtttgttgtaggcccttcccaggtgccttctcagctccctcatctgtaaaccgaggaggtggataagatgctcccggccgggcgcggtggctcacgcctgtaatcccagcactttgggaggccgaggcgggcagattattgcctgagctcaggagttcgaaaccaccctgggcaacatggtgaaacccccgtctctactaaaatacaaaaaaattagccaggcatagtggcgcgcgcctataatcccagctactgggaggctgaggcgggagaatcgcttgagccggggaggcggaggttgcagtgaggcgagattgtgccactgcactccagcttgggcgacagagtgagactccgtctcaaaaaagaaaaaaaaaagatgctcctctgaggtccctccggcgctcatgttccgagtctgcagctccacactttaaatcatactcgaatgcaggacaagtcctaaatatttgccccttcccttgcagtaatttattttctgtatggactgtccctcccccagaggcttccccaccctccattgcctggcccaggtgagcagcttggcaggtctccaagtggaacccggtccagacagggctgcctcgacttcacctttccccctaacttcctccaagggatgctgccccttctcagccccctgcgtgtgtatattggtgggaggcatagaggatggatgttctagaaatgagtaagacacagtgcccacccccaagttaggatgaaaaaagttccagaggtttttaagaaattggattaagctgggtccctaacttcaagaaattcccattatgctccttctcacctttcttttttgctaattatggaaaatagggcccatttcatcatagcctccttcccccgtgctccactacaatcgccgcattctttctagctgcagctggtttcttcaaggctcctgcttaaagtccacacgttattatggccgaaagcaacctggtgcttcggcctggataagagccccttctgcatcttattcacagcttgcagcctcagcccctttgatgaggccctcaggggagaggtcattaccttgatcctgcaaacccagactcgttgagcagcaacgcaatcaccatcatcccactgcccaatctagaatatgtctgctctcctttgctctctgcagctgtaagccagaggggattcaaggtaaataggctttacaggctcccctcctccaaacacacacagaatgggctggtttctttcaagtttaaaaaaagcccccttctccatgcacaagttcattccctccatgctgtcgtcatcgacatatacaggtgtgtacgtaggtgtatgtgtgtactctgcacgtatatctcttctgtcttgaagaccctgttaactttgtgaaataacttccacatttcaacacacttcacagtacaggaaataaagtaatatgaaaaacaccctgcgtgaactcaacggtgtgaacaggtcaagaataacacttcaaagtcatcttgccagccaggcgtggtggatcacgcctgtaatcccagcactctgggaggccaaagcgggcagatcacctgaggtcaggagttcaagaccagcctggccaacatagtgaaaccccttgtttactcaaaatacaaaaattggctgggtgcggtggtacatgcctgtagtcccagctacttgggaggctgaggcaggagaattgcttgaaccctggaggcagaagttgcagtgagccgagatcgcaccactgcactccagcctaggagacaaaacgagacttcatttaaaaaaaataaaaataaaaataaaaataaagtcatcttgccacccaccccctaccattgagccaccatgcccagccccaaagcctcttaattgctctaacaagatgagtggggaaaagattatactcttaagaaattcctacgaaagctatccaaaagccttttctttcctcttttcttattatttttaaatagaggcagggtctcattatgttgcccaggctggtctggaactcctggcctcaagtgatcctcccaccttggcctccccagagtgctgggattacacacgtgagtcaccatgcccagccccaaagccatttcttgaagaatttctcgcaaactcacaaccctcatgaaaaattaatcctcagttccacgagactgcccacccacagacaaaaaaatatatatattcctaaagtcggaccagaaatctgacagctgcctttgaaacccaaagcctcgggttctttcaagctacatgtactaaattgtcgaaggtctcccaggagctctgtactgaggcagacacagaaagacacaaaacggtcgtctttcctgcccaagtaaagcttacagactaactggggagatgtagtgtgcatacaaaacagtaaaagagccatctcaaggacagagagcatagaccaagtcatctggaatggtctacatgccatgcggaagtccaccgaagggttagaacagggtgtcccagactctctcttctgagggaaggttggttgcaaaagtgggattcatgaccctcccaggctacaccatcttctttagaatgagaactgccaggtgacgccctcgctgctcctacctggctactaaacatcgacttcggttcacttcacggatgttcagtggatatcggtcacatgccaggtccccagctacgcattcaaggatggataatatacatagcagcacatccttgaggaactcataccttggtaaagggaaagaaatccatgaatggatacctctgtgtcctaagtgtttgtaataatgctgtgtgtcaggcctctgagcccaagctaagccatcatatcccctgtgacctgcatgtgcacatccagacggctggttcctaccttaactgatgatattccaccacaaaagaagtgaaaatggctggtccctgccttaactgatgacattaccttgtgaaattccttctcctggctcatcctggctcaaaagctcccccactgaacaccttgcaacccccacccctggccaccagagaacaaccccctttgactgtaattttccattacctacccacatcttataaaatggccccatccctatctcccttcgctgactcttttcggactcagcccgcctgcacccaggtgaaataaacagccttgttgctcacacaaa

SEQ ID NO: 262137 - DNA, 1149 bp, Artificial Sequence
  derived and/or modified sequence
atgagaagccccctgtgctggctgctgcccctgctgatcctggccagcgtggcccagggccagcccaccagaagacccagacccggcaccggccccggcagaagacccagacccagacccagacccacccccagcttcccccagcccgacgagcccgccgagcccaccgacctgcccccccccctgccccccggcccccccagcatcttccccgactgccccagagagtgctactgcccccccgacttccccagcgccctgtactgcgacagcagaaacctgagaaaggtgcccgtgatcccccccagaatccactacctgtacctgcagaacaacttcatcaccgagctgcccgtggagagcttccagaacgccaccggcctgagatggatcaacctggacaacaacagaatcagaaagatcgaccagagagtgctggagaagctgcccggcctggtgttcctgtacatggagaagaaccagctggaggaggtgcccagcgccctgcccagaaacctggagcagctgagactgagccagaaccacatcagcagaatcccccccggcgtgttcagcaagctggagaacctgctgctgctggacctgcagcacaacagactgagcgacggcgtgttcaagcccgacaccttccacggcctgaagaacctgatgcagctgaacctggcccacaacatcctgagaaagatgccccccagagtgcccaccgccatccaccagctgtacctggacagcaacaagatcgagaccatccccaacggctacttcaagagcttccccaacctggccttcatcagactgaactacaacaagctgaccgacagaggcctgcccaagaacagcttcaacatcagcaacctgctggtgctgcacctgagccacaacagaatcagcagcgtgcccgccatcaacaacagactggagcacctgtacctgaacaacaacagcatcgagaagatcaacggcacccagatctgccccaacgacctggtggccttccacgacttcagcagcgacctggagaacgtgccccacctgagatacctgagactggacggcaactacctgaagccccccatccccctggacctgatgatgtgcttcagactgctgcagagcgtggtgatctag

SEQ ID NO: 262138 - protein, 4533 aa, Artificial Sequence
  derived and/or modified sequence
MAGPLPDEQDFIQAYEEVREKYKDERDRVQKKTFTKWVNKHLIKAQRHISDLYEDLRDGHNLISLLEVLSGDSLPREKGRMRFHKLQNVQIALDYLRHRQVKLVNIRNDDIADGNPKLTLGLIWTIILHFQISDIQVSGQSEDMTAKEKLLLWSQRMVEGYQGLRCDNFTSSWRDGRLFNAIIHRHKPLLIDMNKVYRQTNLENLDQAFSVAERDLGVTRLLDPEDVDVPQPDEKSIITYVSSLYDAMPRVPDVQDGVRANELQLRWQEYRELVLLLLQWMRHHTAAFEERRFPSSFEEIEILWSQFLKFKEMELPAKEADKNRSKGIYQSLEGAVQAGQLKVPPGYHPLDVEKEWGKLHVAILEREKQLRSEFERLECLQRIVTKLQMEAGLCEEQLNQADALLQSDVRLLAAGKVPQRAGEVERDLDKADSMIRLLFNDVQTLKDGRHPQGEQMYRRVYRLHERLVAIRTEYNLRLKAGVAAPATQVAQVTLQSVQRRPELEDSTLRYLQDLLAWVEENQHRVDGAEWGVDLPSVEAQLGSHRGLHQSIEEFRAKIERARSDEGQLSPATRGAYRDCLGRLDLQYAKLLNSSKARLRSLESLHSFVAAATKELMWLNEKEEEEVGFDWSDRNTNMTAKKESYSALMRELELKEKKIKELQNAGDRLLREDHPARPTVESFQAALQTQWSWMLQLCCCIEAHLKENAAYFQFFSDVREAEGQLQKLQEALRRKYSCDRSATVTRLEDLLQDAQDEKEQLNEYKGHLSGLAKRAKAVVQLKPRHPAHPMRGRLPLLAVCDYKQVEVTVHKGDECQLVGPAQPSHWKVLSSSGSEAAVPSVCFLVPPPNQEAQEAVTRLEAQHQALVTLWHQLHVDMKSLLAWQSLRRDVQLIRSWSLATFRTLKPEEQRQALHSLELHYQAFLRDSQDAGGFGPEDRLMAEREYGSCSHHYQQLLQSLEQGAQEESRCQRCISELKDIRLQLEACETRTVHRLRLPLDKEPARECAQRIAEQQKAQAEVEGLGKGVARLSAEAEKVLALPEPSPAAPTLRSELELTLGKLEQVRSLSAIYLEKLKTISLVIRGTQGAEEVLRAHEEQLKEAQAVPATLPELEATKASLKKLRAQAEAQQPTFDALRDELRGAQEVGERLQQRHGERDVEVERWRERVAQLLERWQAVLAQTDVRQRELEQLGRQLRYYRESADPLGAWLQDARRRQEQIQAMPLADSQAVREQLRQEQALLEEIERHGEKVEECQRFAKQYINAIKDYELQLVTYKAQLEPVASPAKKPKVQSGSESVIQEYVDLRTHYSELTTLTSQYIKFISETLRRMEEEERLAEQQRAEERERLAEVEAALEKQRQLAEAHAQAKAQAEREAKELQQRMQEEVVRREEAAVDAQQQKRSIQEELQQLRQSSEAEIQAKARQAEAAERSRLRIEEEIRVVRLQLEATERQRGGAEGELQALRARAEEAEAQKRQAQEEAERLRRQVQDESQRKRQAEVELASRVKAEAEAAREKQRALQALEELRLQAEEAERRLRQAEVERARQVQVALETAQRSAEAELQSKRASFAEKTAQLERSLQEEHVAVAQLREEAERRAQQQAEAERAREEAERELERWQLKANEALRLRLQAEEVAQQKSLAQAEAEKQKEEAEREARRRGKAEEQAVRQRELAEQELEKQRQLAEGTAQQRLAAEQELIRLRAETEQGEQQRQLLEEELARLQREAAAATQKRQELEAELAKVRAEMEVLLASKARAEEESRSTSEKSKQRLEAEAGRFRELAEEAARLRALAEEAKRQRQLAEEDAARQRAEAERVLAEKLAAIGEATRLKTEAEIALKEKEAENERLRRLAEDEAFQRRRLEEQAAQHKADIEERLAQLRKASDSELERQKGLVEDTLRQRRQVEEEILALKASFEKAAAGKAELELELGRIRSNAEDTLRSKEQAELEAARQRQLAAEEERRRREAEERVQKSLAAEEEAARQRKAALEEVERLKAKVEEARRLRERAEQESARQLQLAQEAAQKRLQAEEKAHAFAVQQKEQELQQTLQQEQSVLDQLRGEAEAARRAAEEAEEARVQAEREAAQSRRQVEEAERLKQSAEEQAQARAQAQAAAEKLRKEAEQEAARRAQAEQAALRQKQAADAEMEKHKKFAEQTLRQKAQVEQELTTLRLQLEETDHQKNLLDEELQRLKAEATEAARQRSQVEEELFSVRVQMEELSKLKARIEAENRALILRDKDNTQRFLQEEAEKMKQVAEEAARLSVAAQEAARLRQLAEEDLAQQRALAEKMLKEKMQAVQEATRLKAEAELLQQQKELAQEQARRLQEDKEQMAQQLAEETQGFQRTLEAERQRQLEMSAEAERLKLRVAEMSRAQARAEEDAQRFRKQAEEIGEKLHRTELATQEKVTLVQTLEIQRQQSDHDAERLREAIAELEREKEKLQQEAKLLQLKSEEMQTVQQEQLLQETQALQQSFLSEKDSLLQRERFIEQEKAKLEQLFQDEVAKAQQLREEQQRQQQQMEQERQRLVASMEEARRRQHEAEEGVRRKQEELQQLEQQRRQQEELLAEENQRLREQLQLLEEQHRAALAHSEEVTASQVAATKTLPNGRDALDGPAAEAEPEHSFDGLRRKVSAQRLQEAGILSAEELQRLAQGHTTVDELARREDVRHYLQGRSSIAGLLLKATNEKLSVYAALQRQLLSPGTALILLEAQAASGFLLDPVRNRRLTVNEAVKEGVVGPELHHKLLSAERAVTGYKDPYTGQQISLFQAMQKGLIVREHGIRLLEAQIATGGVIDPVHSHRVPVDVAYRRGYFDEEMNRVLADPSDDTKGFFDPNTHENLTYLQLLERCVEDPETGLCLLPLTDKAAKGGELVYTDSEARDVFEKATVSAPFGKFQGKTVTIWEIINSEYFTAEQRRDLLRQFRTGRITVEKIIKIIITVVEEQEQKGRLCFEGLRSLVPAAELLESRVIDRELYQQLQRGERSVRDVAEVDTVRRALRGANVIAGVWLEEAGQKLSIYNALKKDLLPSDMAVALLEAQAGTGHIIDPATSARLTVDEAVRAGLVGPEFHEKLLSAEKAVTGYRDPYTGQSVSLFQALKKGLIPREQGLRLLDAQLSTGGIVDPSKSHRVPLDVACARGCLDEETSRALSAPRADAKAYSDPSTGEPATYGELQQRCRPDQLTGLSLLPLSEKAARARQEELYSELQARETFEKTPVEVPVGGFKGRTVTVWELISSEYFTAEQRQELLRQFRTGKVTVEKVIKILITIVEEVETLRQERLSFSGLRAPVPASELLASGVLSRAQFEQLKDGKTTVKDLSELGSVRTLLQGSGCLAGIYLEDTKEKVSIYEAMRRGLLRATTAALLLEAQAATGFLVDPVRNQRLYVHEAVKAGVVGPELHEQLLSAEKAVTGYRDPYSGSTISLFQAMQKGLVLRQHGIRLLEAQIATGGIIDPVHSHRVPVDVAYQRGYFSEEMNRVLADPSDDTKGFFDPNTHENLTYRQLLERCVEDPETGLRLLPLKGAEKAEVVETTQVYTEEETRRAFEETQIDIPGGGSHGGSTMSLWEVMQSDLIPEEQRAQLMADFQAGRVTKERMIIIIIEIIEKTEIIRQQGLASYDYVRRRLTAEDLFEARIISLETYNLLREGTRSLREALEAESAWCYLYGTGSVAGVYLPGSRQTLSIYQALKKGLLSAEVARLLLEAQAATGFLLDPVKGERLTVDEAVRKGLVGPELHDRLLSAERAVTGYRDPYTEQTISLFQAMKKELIPTEEALRLLDAQLATGGIVDPRLGFHLPLEVAYQRGYLNKDTHDQLSEPSEVRSYVDPSTDERLSYTQLLRRCRRDDGTGQLLLPLSDARKLTFRGLRKQITMEELVRSQVMDEATALQLREGLTSIEEVTKNLQKFLEGTSCIAGVFVDATKERLSVYQAMKKGIIRPGTAFELLEAQAATGYVIDPIKGLKLTVEEAVRMGIVGPEFKDKLLSAERAVTGYKDPYSGKLISLFQAMKKGLILKDHGIRLLEAQIATGGIIDPEESHRLPVEVAYKRGLFDEEMNEILTDPSDDTKGFFDPNTEENLTYLQLMERCITDPQTGLCLLPLKEKKRERKTSSKSSVRKRRVVIVDPETGKEMSVYEAYRKGLIDHQTYLELSEQECEWEEITISSSDGVVKSMIIDRRSGRQYDIDDAIAKNLIDRSALDQYRAGTLSITEFADMLSGNAGGFRSRSSSVGSSSSYPISPAVSRTQLASWSDPTEETGPVAGILDTETLEKVSITEAMHRNLVDNITGQRLLEAQACTGGIIDPSTGERFPVTDAVNKGLVDKIMVDRINLAQKAFCGFEDPRTKTKMSAAQALKKGWLYYEAGQRFLEVQYLTGGLIEPDTPGRVPLDEALQRGTVDARTAQKLRDVGAYSKYLTCPKTKLKISYKDALDRSMVEEGTGLRLLEAAAQSTKGYYSPYSVSGSGSTAGSRTGSRTGSRAGSRRGSFDATGSGFSMTFSSSSYSSSGYGRRYASGSSASLGGPESAVA

SEQ ID NO: 262139 - protein, 4525 aa, Artificial Sequence
  derived and/or modified sequence
MDPSRAIQNEISSLKDERDRVQKKTFTKWVNKHLIKAQRHISDLYEDLRDGHNLISLLEVLSGDSLPREKGRMRFHKLQNVQIALDYLRHRQVKLVNIRNDDIADGNPKLTLGLIWTIILHFQISDIQVSGQSEDMTAKEKLLLWSQRMVEGYQGLRCDNFTSSWRDGRLFNAIIHRHKPLLIDMNKVYRQTNLENLDQAFSVAERDLGVTRLLDPEDVDVPQPDEKSIITYVSSLYDAMPRVPDVQDGVRANELQLRWQEYRELVLLLLQWMRHHTAAFEERRFPSSFEEIEILWSQFLKFKEMELPAKEADKNRSKGIYQSLEGAVQAGQLKVPPGYHPLDVEKEWGKLHVAILEREKQLRSEFERLECLQRIVTKLQMEAGLCEEQLNQADALLQSDVRLLAAGKVPQRAGEVERDLDKADSMIRLLFNDVQTLKDGRHPQGEQMYRRVYRLHERLVAIRTEYNLRLKAGVAAPATQVAQVTLQSVQRRPELEDSTLRYLQDLLAWVEENQHRVDGAEWGVDLPSVEAQLGSHRGLHQSIEEFRAKIERARSDEGQLSPATRGAYRDCLGRLDLQYAKLLNSSKARLRSLESLHSFVAAATKELMWLNEKEEEEVGFDWSDRNTNMTAKKESYSALMRELELKEKKIKELQNAGDRLLREDHPARPTVESFQAALQTQWSWMLQLCCCIEAHLKENAAYFQFFSDVREAEGQLQKLQEALRRKYSCDRSATVTRLEDLLQDAQDEKEQLNEYKGHLSGLAKRAKAVVQLKPRHPAHPMRGRLPLLAVCDYKQVEVTVHKGDECQLVGPAQPSHWKVLSSSGSEAAVPSVCFLVPPPNQEAQEAVTRLEAQHQALVTLWHQLHVDMKSLLAWQSLRRDVQLIRSWSLATFRTLKPEEQRQALHSLELHYQAFLRDSQDAGGFGPEDRLMAEREYGSCSHHYQQLLQSLEQGAQEESRCQRCISELKDIRLQLEACETRTVHRLRLPLDKEPARECAQRIAEQQKAQAEVEGLGKGVARLSAEAEKVLALPEPSPAAPTLRSELELTLGKLEQVRSLSAIYLEKLKTISLVIRGTQGAEEVLRAHEEQLKEAQAVPATLPELEATKASLKKLRAQAEAQQPTFDALRDELRGAQEVGERLQQRHGERDVEVERWRERVAQLLERWQAVLAQTDVRQRELEQLGRQLRYYRESADPLGAWLQDARRRQEQIQAMPLADSQAVREQLRQEQALLEEIERHGEKVEECQRFAKQYINAIKDYELQLVTYKAQLEPVASPAKKPKVQSGSESVIQEYVDLRTHYSELTTLTSQYIKFISETLRRMEEEERLAEQQRAEERERLAEVEAALEKQRQLAEAHAQAKAQAEREAKELQQRMQEEVVRREEAAVDAQQQKRSIQEELQQLRQSSEAEIQAKARQAEAAERSRLRIEEEIRVVRLQLEATERQRGGAEGELQALRARAEEAEAQKRQAQEEAERLRRQVQDESQRKRQAEVELASRVKAEAEAAREKQRALQALEELRLQAEEAERRLRQAEVERARQVQVALETAQRSAEAELQSKRASFAEKTAQLERSLQEEHVAVAQLREEAERRAQQQAEAERAREEAERELERWQLKANEALRLRLQAEEVAQQKSLAQAEAEKQKEEAEREARRRGKAEEQAVRQRELAEQELEKQRQLAEGTAQQRLAAEQELIRLRAETEQGEQQRQLLEEELARLQREAAAATQKRQELEAELAKVRAEMEVLLASKARAEEESRSTSEKSKQRLEAEAGRFRELAEEAARLRALAEEAKRQRQLAEEDAARQRAEAERVLAEKLAAIGEATRLKTEAEIALKEKEAENERLRRLAEDEAFQRRRLEEQAAQHKADIEERLAQLRKASDSELERQKGLVEDTLRQRRQVEEEILALKASFEKAAAGKAELELELGRIRSNAEDTLRSKEQAELEAARQRQLAAEEERRRREAEERVQKSLAAEEEAARQRKAALEEVERLKAKVEEARRLRERAEQESARQLQLAQEAAQKRLQAEEKAHAFAVQQKEQELQQTLQQEQSVLDQLRGEAEAARRAAEEAEEARVQAEREAAQSRRQVEEAERLKQSAEEQAQARAQAQAAAEKLRKEAEQEAARRAQAEQAALRQKQAADAEMEKHKKFAEQTLRQKAQVEQELTTLRLQLEETDHQKNLLDEELQRLKAEATEAARQRSQVEEELFSVRVQMEELSKLKARIEAENRALILRDKDNTQRFLQEEAEKMKQVAEEAARLSVAAQEAARLRQLAEEDLAQQRALAEKMLKEKMQAVQEATRLKAEAELLQQQKELAQEQARRLQEDKEQMAQQLAEETQGFQRTLEAERQRQLEMSAEAERLKLRVAEMSRAQARAEEDAQRFRKQAEEIGEKLHRTELATQEKVTLVQTLEIQRQQSDHDAERLREAIAELEREKEKLQQEAKLLQLKSEEMQTVQQEQLLQETQALQQSFLSEKDSLLQRERFIEQEKAKLEQLFQDEVAKAQQLREEQQRQQQQMEQERQRLVASMEEARRRQHEAEEGVRRKQEELQQLEQQRRQQEELLAEENQRLREQLQLLEEQHRAALAHSEEVTASQVAATKTLPNGRDALDGPAAEAEPEHSFDGLRRKVSAQRLQEAGILSAEELQRLAQGHTTVDELARREDVRHYLQGRSSIAGLLLKATNEKLSVYAALQRQLLSPGTALILLEAQAASGFLLDPVRNRRLTVNEAVKEGVVGPELHHKLLSAERAVTGYKDPYTGQQISLFQAMQKGLIVREHGIRLLEAQIATGGVIDPVHSHRVPVDVAYRRGYFDEEMNRVLADPSDDTKGFFDPNTHENLTYLQLLERCVEDPETGLCLLPLTDKAAKGGELVYTDSEARDVFEKATVSAPFGKFQGKTVTIWEIINSEYFTAEQRRDLLRQFRTGRITVEKIIKIIITVVEEQEQKGRLCFEGLRSLVPAAELLESRVIDRELYQQLQRGERSVRDVAEVDTVRRALRGANVIAGVWLEEAGQKLSIYNALKKDLLPSDMAVALLEAQAGTGHIIDPATSARLTVDEAVRAGLVGPEFHEKLLSAEKAVTGYRDPYTGQSVSLFQALKKGLIPREQGLRLLDAQLSTGGIVDPSKSHRVPLDVACARGCLDEETSRALSAPRADAKAYSDPSTGEPATYGELQQRCRPDQLTGLSLLPLSEKAARARQEELYSELQARETFEKTPVEVPVGGFKGRTVTVWELISSEYFTAEQRQELLRQFRTGKVTVEKVIKILITIVEEVETLRQERLSFSGLRAPVPASELLASGVLSRAQFEQLKDGKTTVKDLSELGSVRTLLQGSGCLAGIYLEDTKEKVSIYEAMRRGLLRATTAALLLEAQAATGFLVDPVRNQRLYVHEAVKAGVVGPELHEQLLSAEKAVTGYRDPYSGSTISLFQAMQKGLVLRQHGIRLLEAQIATGGIIDPVHSHRVPVDVAYQRGYFSEEMNRVLADPSDDTKGFFDPNTHENLTYRQLLERCVEDPETGLRLLPLKGAEKAEVVETTQVYTEEETRRAFEETQIDIPGGGSHGGSTMSLWEVMQSDLIPEEQRAQLMADFQAGRVTKERMIIIIIEIIEKTEIIRQQGLASYDYVRRRLTAEDLFEARIISLETYNLLREGTRSLREALEAESAWCYLYGTGSVAGVYLPGSRQTLSIYQALKKGLLSAEVARLLLEAQAATGFLLDPVKGERLTVDEAVRKGLVGPELHDRLLSAERAVTGYRDPYTEQTISLFQAMKKELIPTEEALRLLDAQLATGGIVDPRLGFHLPLEVAYQRGYLNKDTHDQLSEPSEVRSYVDPSTDERLSYTQLLRRCRRDDGTGQLLLPLSDARKLTFRGLRKQITMEELVRSQVMDEATALQLREGLTSIEEVTKNLQKFLEGTSCIAGVFVDATKERLSVYQAMKKGIIRPGTAFELLEAQAATGYVIDPIKGLKLTVEEAVRMGIVGPEFKDKLLSAERAVTGYKDPYSGKLISLFQAMKKGLILKDHGIRLLEAQIATGGIIDPEESHRLPVEVAYKRGLFDEEMNEILTDPSDDTKGFFDPNTEENLTYLQLMERCITDPQTGLCLLPLKEKKRERKTSSKSSVRKRRVVIVDPETGKEMSVYEAYRKGLIDHQTYLELSEQECEWEEITISSSDGVVKSMIIDRRSGRQYDIDDAIAKNLIDRSALDQYRAGTLSITEFADMLSGNAGGFRSRSSSVGSSSSYPISPAVSRTQLASWSDPTEETGPVAGILDTETLEKVSITEAMHRNLVDNITGQRLLEAQACTGGIIDPSTGERFPVTDAVNKGLVDKIMVDRINLAQKAFCGFEDPRTKTKMSAAQALKKGWLYYEAGQRFLEVQYLTGGLIEPDTPGRVPLDEALQRGTVDARTAQKLRDVGAYSKYLTCPKTKLKISYKDALDRSMVEEGTGLRLLEAAAQSTKGYYSPYSVSGSGSTAGSRTGSRTGSRAGSRRGSFDATGSGFSMTFSSSSYSSSGYGRRYASGSSASLGGPESAVA

SEQ ID NO: 262140 - protein, 4684 aa, Artificial Sequence
  derived and/or modified sequence
MVAGMLMPRDQLRAIYEVLFREGVMVAKKDRRPRSLHPHVPGVTNLQVMRAMASLRARGLVRETFAWCHFYWYLTNEGIAHLRQYLHLPPEIVPASLQRVRRPVAMVMPARRTPHVQAVQGPLGSPPKRGPLPTEEQRVYRRKELEEVSPETPVVPATTQRTLARPGPEPAPATDERDRVQKKTFTKWVNKHLIKAQRHISDLYEDLRDGHNLISLLEVLSGDSLPREKGRMRFHKLQNVQIALDYLRHRQVKLVNIRNDDIADGNPKLTLGLIWTIILHFQISDIQVSGQSEDMTAKEKLLLWSQRMVEGYQGLRCDNFTSSWRDGRLFNAIIHRHKPLLIDMNKVYRQTNLENLDQAFSVAERDLGVTRLLDPEDVDVPQPDEKSIITYVSSLYDAMPRVPDVQDGVRANELQLRWQEYRELVLLLLQWMRHHTAAFEERRFPSSFEEIEILWSQFLKFKEMELPAKEADKNRSKGIYQSLEGAVQAGQLKVPPGYHPLDVEKEWGKLHVAILEREKQLRSEFERLECLQRIVTKLQMEAGLCEEQLNQADALLQSDVRLLAAGKVPQRAGEVERDLDKADSMIRLLFNDVQTLKDGRHPQGEQMYRRVYRLHERLVAIRTEYNLRLKAGVAAPATQVAQVTLQSVQRRPELEDSTLRYLQDLLAWVEENQHRVDGAEWGVDLPSVEAQLGSHRGLHQSIEEFRAKIERARSDEGQLSPATRGAYRDCLGRLDLQYAKLLNSSKARLRSLESLHSFVAAATKELMWLNEKEEEEVGFDWSDRNTNMTAKKESYSALMRELELKEKKIKELQNAGDRLLREDHPARPTVESFQAALQTQWSWMLQLCCCIEAHLKENAAYFQFFSDVREAEGQLQKLQEALRRKYSCDRSATVTRLEDLLQDAQDEKEQLNEYKGHLSGLAKRAKAVVQLKPRHPAHPMRGRLPLLAVCDYKQVEVTVHKGDECQLVGPAQPSHWKVLSSSGSEAAVPSVCFLVPPPNQEAQEAVTRLEAQHQALVTLWHQLHVDMKSLLAWQSLRRDVQLIRSWSLATFRTLKPEEQRQALHSLELHYQAFLRDSQDAGGFGPEDRLMAEREYGSCSHHYQQLLQSLEQGAQEESRCQRCISELKDIRLQLEACETRTVHRLRLPLDKEPARECAQRIAEQQKAQAEVEGLGKGVARLSAEAEKVLALPEPSPAAPTLRSELELTLGKLEQVRSLSAIYLEKLKTISLVIRGTQGAEEVLRAHEEQLKEAQAVPATLPELEATKASLKKLRAQAEAQQPTFDALRDELRGAQEVGERLQQRHGERDVEVERWRERVAQLLERWQAVLAQTDVRQRELEQLGRQLRYYRESADPLGAWLQDARRRQEQIQAMPLADSQAVREQLRQEQALLEEIERHGEKVEECQRFAKQYINAIKDYELQLVTYKAQLEPVASPAKKPKVQSGSESVIQEYVDLRTHYSELTTLTSQYIKFISETLRRMEEEERLAEQQRAEERERLAEVEAALEKQRQLAEAHAQAKAQAEREAKELQQRMQEEVVRREEAAVDAQQQKRSIQEELQQLRQSSEAEIQAKARQAEAAERSRLRIEEEIRVVRLQLEATERQRGGAEGELQALRARAEEAEAQKRQAQEEAERLRRQVQDESQRKRQAEVELASRVKAEAEAAREKQRALQALEELRLQAEEAERRLRQAEVERARQVQVALETAQRSAEAELQSKRASFAEKTAQLERSLQEEHVAVAQLREEAERRAQQQAEAERAREEAERELERWQLKANEALRLRLQAEEVAQQKSLAQAEAEKQKEEAEREARRRGKAEEQAVRQRELAEQELEKQRQLAEGTAQQRLAAEQELIRLRAETEQGEQQRQLLEEELARLQREAAAATQKRQELEAELAKVRAEMEVLLASKARAEEESRSTSEKSKQRLEAEAGRFRELAEEAARLRALAEEAKRQRQLAEEDAARQRAEAERVLAEKLAAIGEATRLKTEAEIALKEKEAENERLRRLAEDEAFQRRRLEEQAAQHKADIEERLAQLRKASDSELERQKGLVEDTLRQRRQVEEEILALKASFEKAAAGKAELELELGRIRSNAEDTLRSKEQAELEAARQRQLAAEEERRRREAEERVQKSLAAEEEAARQRKAALEEVERLKAKVEEARRLRERAEQESARQLQLAQEAAQKRLQAEEKAHAFAVQQKEQELQQTLQQEQSVLDQLRGEAEAARRAAEEAEEARVQAEREAAQSRRQVEEAERLKQSAEEQAQARAQAQAAAEKLRKEAEQEAARRAQAEQAALRQKQAADAEMEKHKKFAEQTLRQKAQVEQELTTLRLQLEETDHQKNLLDEELQRLKAEATEAARQRSQVEEELFSVRVQMEELSKLKARIEAENRALILRDKDNTQRFLQEEAEKMKQVAEEAARLSVAAQEAARLRQLAEEDLAQQRALAEKMLKEKMQAVQEATRLKAEAELLQQQKELAQEQARRLQEDKEQMAQQLAEETQGFQRTLEAERQRQLEMSAEAERLKLRVAEMSRAQARAEEDAQRFRKQAEEIGEKLHRTELATQEKVTLVQTLEIQRQQSDHDAERLREAIAELEREKEKLQQEAKLLQLKSEEMQTVQQEQLLQETQALQQSFLSEKDSLLQRERFIEQEKAKLEQLFQDEVAKAQQLREEQQRQQQQMEQERQRLVASMEEARRRQHEAEEGVRRKQEELQQLEQQRRQQEELLAEENQRLREQLQLLEEQHRAALAHSEEVTASQVAATKTLPNGRDALDGPAAEAEPEHSFDGLRRKVSAQRLQEAGILSAEELQRLAQGHTTVDELARREDVRHYLQGRSSIAGLLLKATNEKLSVYAALQRQLLSPGTALILLEAQAASGFLLDPVRNRRLTVNEAVKEGVVGPELHHKLLSAERAVTGYKDPYTGQQISLFQAMQKGLIVREHGIRLLEAQIATGGVIDPVHSHRVPVDVAYRRGYFDEEMNRVLADPSDDTKGFFDPNTHENLTYLQLLERCVEDPETGLCLLPLTDKAAKGGELVYTDSEARDVFEKATVSAPFGKFQGKTVTIWEIINSEYFTAEQRRDLLRQFRTGRITVEKIIKIIITVVEEQEQKGRLCFEGLRSLVPAAELLESRVIDRELYQQLQRGERSVRDVAEVDTVRRALRGANVIAGVWLEEAGQKLSIYNALKKDLLPSDMAVALLEAQAGTGHIIDPATSARLTVDEAVRAGLVGPEFHEKLLSAEKAVTGYRDPYTGQSVSLFQALKKGLIPREQGLRLLDAQLSTGGIVDPSKSHRVPLDVACARGCLDEETSRALSAPRADAKAYSDPSTGEPATYGELQQRCRPDQLTGLSLLPLSEKAARARQEELYSELQARETFEKTPVEVPVGGFKGRTVTVWELISSEYFTAEQRQELLRQFRTGKVTVEKVIKILITIVEEVETLRQERLSFSGLRAPVPASELLASGVLSRAQFEQLKDGKTTVKDLSELGSVRTLLQGSGCLAGIYLEDTKEKVSIYEAMRRGLLRATTAALLLEAQAATGFLVDPVRNQRLYVHEAVKAGVVGPELHEQLLSAEKAVTGYRDPYSGSTISLFQAMQKGLVLRQHGIRLLEAQIATGGIIDPVHSHRVPVDVAYQRGYFSEEMNRVLADPSDDTKGFFDPNTHENLTYRQLLERCVEDPETGLRLLPLKGAEKAEVVETTQVYTEEETRRAFEETQIDIPGGGSHGGSTMSLWEVMQSDLIPEEQRAQLMADFQAGRVTKERMIIIIIEIIEKTEIIRQQGLASYDYVRRRLTAEDLFEARIISLETYNLLREGTRSLREALEAESAWCYLYGTGSVAGVYLPGSRQTLSIYQALKKGLLSAEVARLLLEAQAATGFLLDPVKGERLTVDEAVRKGLVGPELHDRLLSAERAVTGYRDPYTEQTISLFQAMKKELIPTEEALRLLDAQLATGGIVDPRLGFHLPLEVAYQRGYLNKDTHDQLSEPSEVRSYVDPSTDERLSYTQLLRRCRRDDGTGQLLLPLSDARKLTFRGLRKQITMEELVRSQVMDEATALQLREGLTSIEEVTKNLQKFLEGTSCIAGVFVDATKERLSVYQAMKKGIIRPGTAFELLEAQAATGYVIDPIKGLKLTVEEAVRMGIVGPEFKDKLLSAERAVTGYKDPYSGKLISLFQAMKKGLILKDHGIRLLEAQIATGGIIDPEESHRLPVEVAYKRGLFDEEMNEILTDPSDDTKGFFDPNTEENLTYLQLMERCITDPQTGLCLLPLKEKKRERKTSSKSSVRKRRVVIVDPETGKEMSVYEAYRKGLIDHQTYLELSEQECEWEEITISSSDGVVKSMIIDRRSGRQYDIDDAIAKNLIDRSALDQYRAGTLSITEFADMLSGNAGGFRSRSSSVGSSSSYPISPAVSRTQLASWSDPTEETGPVAGILDTETLEKVSITEAMHRNLVDNITGQRLLEAQACTGGIIDPSTGERFPVTDAVNKGLVDKIMVDRINLAQKAFCGFEDPRTKTKMSAAQALKKGWLYYEAGQRFLEVQYLTGGLIEPDTPGRVPLDEALQRGTVDARTAQKLRDVGAYSKYLTCPKTKLKISYKDALDRSMVEEGTGLRLLEAAAQSTKGYYSPYSVSGSGSTAGSRTGSRTGSRAGSRRGSFDATGSGFSMTFSSSSYSSSGYGRRYASGSSASLGGPESAVA

SEQ ID NO: 262141 - protein, 4515 aa, Artificial Sequence
  derived and/or modified sequence
MKIVPDERDRVQKKTFTKWVNKHLIKAQRHISDLYEDLRDGHNLISLLEVLSGDSLPREKGRMRFHKLQNVQIALDYLRHRQVKLVNIRNDDIADGNPKLTLGLIWTIILHFQISDIQVSGQSEDMTAKEKLLLWSQRMVEGYQGLRCDNFTSSWRDGRLFNAIIHRHKPLLIDMNKVYRQTNLENLDQAFSVAERDLGVTRLLDPEDVDVPQPDEKSIITYVSSLYDAMPRVPDVQDGVRANELQLRWQEYRELVLLLLQWMRHHTAAFEERRFPSSFEEIEILWSQFLKFKEMELPAKEADKNRSKGIYQSLEGAVQAGQLKVPPGYHPLDVEKEWGKLHVAILEREKQLRSEFERLECLQRIVTKLQMEAGLCEEQLNQADALLQSDVRLLAAGKVPQRAGEVERDLDKADSMIRLLFNDVQTLKDGRHPQGEQMYRRVYRLHERLVAIRTEYNLRLKAGVAAPATQVAQVTLQSVQRRPELEDSTLRYLQDLLAWVEENQHRVDGAEWGVDLPSVEAQLGSHRGLHQSIEEFRAKIERARSDEGQLSPATRGAYRDCLGRLDLQYAKLLNSSKARLRSLESLHSFVAAATKELMWLNEKEEEEVGFDWSDRNTNMTAKKESYSALMRELELKEKKIKELQNAGDRLLREDHPARPTVESFQAALQTQWSWMLQLCCCIEAHLKENAAYFQFFSDVREAEGQLQKLQEALRRKYSCDRSATVTRLEDLLQDAQDEKEQLNEYKGHLSGLAKRAKAVVQLKPRHPAHPMRGRLPLLAVCDYKQVEVTVHKGDECQLVGPAQPSHWKVLSSSGSEAAVPSVCFLVPPPNQEAQEAVTRLEAQHQALVTLWHQLHVDMKSLLAWQSLRRDVQLIRSWSLATFRTLKPEEQRQALHSLELHYQAFLRDSQDAGGFGPEDRLMAEREYGSCSHHYQQLLQSLEQGAQEESRCQRCISELKDIRLQLEACETRTVHRLRLPLDKEPARECAQRIAEQQKAQAEVEGLGKGVARLSAEAEKVLALPEPSPAAPTLRSELELTLGKLEQVRSLSAIYLEKLKTISLVIRGTQGAEEVLRAHEEQLKEAQAVPATLPELEATKASLKKLRAQAEAQQPTFDALRDELRGAQEVGERLQQRHGERDVEVERWRERVAQLLERWQAVLAQTDVRQRELEQLGRQLRYYRESADPLGAWLQDARRRQEQIQAMPLADSQAVREQLRQEQALLEEIERHGEKVEECQRFAKQYINAIKDYELQLVTYKAQLEPVASPAKKPKVQSGSESVIQEYVDLRTHYSELTTLTSQYIKFISETLRRMEEEERLAEQQRAEERERLAEVEAALEKQRQLAEAHAQAKAQAEREAKELQQRMQEEVVRREEAAVDAQQQKRSIQEELQQLRQSSEAEIQAKARQAEAAERSRLRIEEEIRVVRLQLEATERQRGGAEGELQALRARAEEAEAQKRQAQEEAERLRRQVQDESQRKRQAEVELASRVKAEAEAAREKQRALQALEELRLQAEEAERRLRQAEVERARQVQVALETAQRSAEAELQSKRASFAEKTAQLERSLQEEHVAVAQLREEAERRAQQQAEAERAREEAERELERWQLKANEALRLRLQAEEVAQQKSLAQAEAEKQKEEAEREARRRGKAEEQAVRQRELAEQELEKQRQLAEGTAQQRLAAEQELIRLRAETEQGEQQRQLLEEELARLQREAAAATQKRQELEAELAKVRAEMEVLLASKARAEEESRSTSEKSKQRLEAEAGRFRELAEEAARLRALAEEAKRQRQLAEEDAARQRAEAERVLAEKLAAIGEATRLKTEAEIALKEKEAENERLRRLAEDEAFQRRRLEEQAAQHKADIEERLAQLRKASDSELERQKGLVEDTLRQRRQVEEEILALKASFEKAAAGKAELELELGRIRSNAEDTLRSKEQAELEAARQRQLAAEEERRRREAEERVQKSLAAEEEAARQRKAALEEVERLKAKVEEARRLRERAEQESARQLQLAQEAAQKRLQAEEKAHAFAVQQKEQELQQTLQQEQSVLDQLRGEAEAARRAAEEAEEARVQAEREAAQSRRQVEEAERLKQSAEEQAQARAQAQAAAEKLRKEAEQEAARRAQAEQAALRQKQAADAEMEKHKKFAEQTLRQKAQVEQELTTLRLQLEETDHQKNLLDEELQRLKAEATEAARQRSQVEEELFSVRVQMEELSKLKARIEAENRALILRDKDNTQRFLQEEAEKMKQVAEEAARLSVAAQEAARLRQLAEEDLAQQRALAEKMLKEKMQAVQEATRLKAEAELLQQQKELAQEQARRLQEDKEQMAQQLAEETQGFQRTLEAERQRQLEMSAEAERLKLRVAEMSRAQARAEEDAQRFRKQAEEIGEKLHRTELATQEKVTLVQTLEIQRQQSDHDAERLREAIAELEREKEKLQQEAKLLQLKSEEMQTVQQEQLLQETQALQQSFLSEKDSLLQRERFIEQEKAKLEQLFQDEVAKAQQLREEQQRQQQQMEQERQRLVASMEEARRRQHEAEEGVRRKQEELQQLEQQRRQQEELLAEENQRLREQLQLLEEQHRAALAHSEEVTASQVAATKTLPNGRDALDGPAAEAEPEHSFDGLRRKVSAQRLQEAGILSAEELQRLAQGHTTVDELARREDVRHYLQGRSSIAGLLLKATNEKLSVYAALQRQLLSPGTALILLEAQAASGFLLDPVRNRRLTVNEAVKEGVVGPELHHKLLSAERAVTGYKDPYTGQQISLFQAMQKGLIVREHGIRLLEAQIATGGVIDPVHSHRVPVDVAYRRGYFDEEMNRVLADPSDDTKGFFDPNTHENLTYLQLLERCVEDPETGLCLLPLTDKAAKGGELVYTDSEARDVFEKATVSAPFGKFQGKTVTIWEIINSEYFTAEQRRDLLRQFRTGRITVEKIIKIIITVVEEQEQKGRLCFEGLRSLVPAAELLESRVIDRELYQQLQRGERSVRDVAEVDTVRRALRGANVIAGVWLEEAGQKLSIYNALKKDLLPSDMAVALLEAQAGTGHIIDPATSARLTVDEAVRAGLVGPEFHEKLLSAEKAVTGYRDPYTGQSVSLFQALKKGLIPREQGLRLLDAQLSTGGIVDPSKSHRVPLDVACARGCLDEETSRALSAPRADAKAYSDPSTGEPATYGELQQRCRPDQLTGLSLLPLSEKAARARQEELYSELQARETFEKTPVEVPVGGFKGRTVTVWELISSEYFTAEQRQELLRQFRTGKVTVEKVIKILITIVEEVETLRQERLSFSGLRAPVPASELLASGVLSRAQFEQLKDGKTTVKDLSELGSVRTLLQGSGCLAGIYLEDTKEKVSIYEAMRRGLLRATTAALLLEAQAATGFLVDPVRNQRLYVHEAVKAGVVGPELHEQLLSAEKAVTGYRDPYSGSTISLFQAMQKGLVLRQHGIRLLEAQIATGGIIDPVHSHRVPVDVAYQRGYFSEEMNRVLADPSDDTKGFFDPNTHENLTYRQLLERCVEDPETGLRLLPLKGAEKAEVVETTQVYTEEETRRAFEETQIDIPGGGSHGGSTMSLWEVMQSDLIPEEQRAQLMADFQAGRVTKERMIIIIIEIIEKTEIIRQQGLASYDYVRRRLTAEDLFEARIISLETYNLLREGTRSLREALEAESAWCYLYGTGSVAGVYLPGSRQTLSIYQALKKGLLSAEVARLLLEAQAATGFLLDPVKGERLTVDEAVRKGLVGPELHDRLLSAERAVTGYRDPYTEQTISLFQAMKKELIPTEEALRLLDAQLATGGIVDPRLGFHLPLEVAYQRGYLNKDTHDQLSEPSEVRSYVDPSTDERLSYTQLLRRCRRDDGTGQLLLPLSDARKLTFRGLRKQITMEELVRSQVMDEATALQLREGLTSIEEVTKNLQKFLEGTSCIAGVFVDATKERLSVYQAMKKGIIRPGTAFELLEAQAATGYVIDPIKGLKLTVEEAVRMGIVGPEFKDKLLSAERAVTGYKDPYSGKLISLFQAMKKGLILKDHGIRLLEAQIATGGIIDPEESHRLPVEVAYKRGLFDEEMNEILTDPSDDTKGFFDPNTEENLTYLQLMERCITDPQTGLCLLPLKEKKRERKTSSKSSVRKRRVVIVDPETGKEMSVYEAYRKGLIDHQTYLELSEQECEWEEITISSSDGVVKSMIIDRRSGRQYDIDDAIAKNLIDRSALDQYRAGTLSITEFADMLSGNAGGFRSRSSSVGSSSSYPISPAVSRTQLASWSDPTEETGPVAGILDTETLEKVSITEAMHRNLVDNITGQRLLEAQACTGGIIDPSTGERFPVTDAVNKGLVDKIMVDRINLAQKAFCGFEDPRTKTKMSAAQALKKGWLYYEAGQRFLEVQYLTGGLIEPDTPGRVPLDEALQRGTVDARTAQKLRDVGAYSKYLTCPKTKLKISYKDALDRSMVEEGTGLRLLEAAAQSTKGYYSPYSVSGSGSTAGSRTGSRTGSRAGSRRGSFDATGSGFSMTFSSSSYSSSGYGRRYASGSSASLGGPESAVA

SEQ ID NO: 262142 - DNA, 14055 bp, Artificial Sequence
  derived and/or modified sequence
atggtagctggcatgctgatgcctcgcgaccagctaagggccatctacgaggtcttgtttcgggagggagttatggtggcaaagaaagacaggcgaccccgcagtcttcatccccacgtacccggcgtcacaaaccttcaggtcatgcgggcaatggcctctttgagggcgaggggacttgtccgggagactttcgcctggtgccatttttactggtacctgacaaacgaggggatcgcccatttacggcagtatctacacctaccacctgagattgttcccgcaagtctgcagcgcgtacggagacctgtagcaatggtcatgcctgctcgtcgcactccccatgtgcaggccgtccagggccctcttgggtcacctcctaaacgggggccactgcccacggaggaacaaagagtgtaccgccgcaaggaactcgaggaagtaagtccggaaaccccagtggtaccggccaccacgcagcgcacgctggccagacccggaccggagcccgctcctgcgactgacgagagggaccgtgtgcaaaagaaaacgtttacgaagtgggtcaataaacacctgattaaggcccagaggcatatcagcgatctgtacgaggatctaagggacgggcacaatcttatcagtttactggaagttctgtcaggggacagtctaccacgggagaagggcagaatgcggttccacaaactgcagaacgtgcagattgccctcgattatctgagacaccgtcaggtgaaactggtgaacattcgtaacgacgacatcgccgacggtaaccctaaacttacattaggattgatttggacaattatactccactttcaaattagtgacattcaagtttccggacagagtgaggatatgacagccaaagagaaactcctgctttggtctcagcggatggtggagggctaccagggcctgaggtgcgataattttacttctagttggcgcgacggacggttgtttaatgcgatcatccacagacacaaacccctgctaatcgacatgaacaaggtgtaccgacagactaatctcgagaaccttgatcaagctttttcagtggctgaaagggacctgggcgtaacacggcttctcgaccctgaggatgtggatgtgcctcaacccgacgagaagtccattatcacttacgtgtcttcactctatgacgcaatgccacgggtacctgacgttcaggacggagtaagggctaatgagctacagctcagatggcaggaatatcgggaactagtgctgctcctgttgcagtggatgcggcatcataccgcggcctttgaggagagacgattcccatcttcctttgaggaaattgaaattttatggagccagtttctaaaattcaaagagatggagctgcccgctaaggaggcggacaaaaaccgatcgaaaggcatttatcagagcctcgagggagctgttcaggccggccagctgaaagtaccccctggctaccaccccttagacgtcgagaaggagtggggaaagctccatgttgcaattttggaacgcgaaaagcagctcaggagcgaattcgaacgacttgaatgtctgcagagaatcgtgaccaagctgcagatggaggcaggactctgtgaggagcagctgaaccaggctgatgccctgctgcaatccgacgtgcggctgttggctgccggaaaggttccccagagagctggcgaggtggagagggatttggataaggccgacagtatgatccgcctgctcttcaatgatgtgcagaccctaaaggatggcagacatccacagggcgagcagatgtatcggagggtgtataggttgcatgagcgcctcgtggctattcggactgagtataacctccggctgaaggccggagtcgctgcgcccgcgacacaagtggcgcaggtaacacttcaatcagtgcaaagaaggcctgagctggaagatagcaccctgcgctacctgcaggatttactggcatgggtcgaagagaaccagcacagagtcgatggggctgaatggggtgtggacctacctagcgtagaggctcagctgggaagccaccgcgggcttcaccaatcaatagaggagtttcgcgccaaaattgagagagcacgaagcgatgaggggcagttatctcccgcaactcgtggcgcctaccgcgactgcctgggccggctggatctccagtacgccaaactacttaattcaagcaaagctcggctgaggtctttggagagcctgcactcgtttgtcgctgccgccaccaaagagctgatgtggctcaacgagaaagaggaggaggaggtcggatttgattggagcgaccgtaacaccaacatgaccgcgaaaaaggaatcttatagcgctctaatgcgggaactcgagctgaaagagaagaagattaaggagctgcaaaacgccggggacaggctcttaagagaagaccaccctgctcggcccacggtggaatcctttcaggctgccctgcaaacccaatggagctggatgctgcagctgtgttgttgtatcgaggcccacctgaaagaaaatgcagcctacttccagttctttagtgatgttagggaagcagaaggtcagctccagaagctgcaggaagctctgagaaggaaatacagctgtgataggagcgctactgttactcggctggaggacctgttgcaggacgcccaggatgagaaagaacagctcaacgaatataaggggcatctgagcgggctcgccaagagagcaaaagcggttgttcagctgaagccaagacaccccgctcatcctatgagagggagactgcccctgcttgcggtatgtgattacaaacaagtggaggtcactgtgcataaaggggatgagtgtcaactggtcgggcccgcacaaccttcacattggaaggtcctgagctcctcaggaagcgaggccgccgttccctccgtatgtttcctcgtcccaccgcccaaccaagaagcccaggaggcggttacacggctcgaggctcaacatcaggctttagtgactctgtggcatcaactgcacgtcgatatgaaatccctactggcatggcaaagcctgcgcagagatgtgcaattgatccggtcatggagtcttgctacattccgcacactgaagcccgaagaacagaggcaggcactccacagtcttgaacttcactaccaggccttccttagggattctcaagacgccggggggttcggtccagaggatcgattgatggctgagcgggagtatggcagctgctcacaccactatcagcagctgttgcagtctttggagcagggcgcccaagaagaaagccgatgtcagcggtgcatcagtgagctgaaagatattcgactgcagctcgaagcttgcgagacaaggaccgtacaccgattgagactgccgctggacaaggagcccgctcgggagtgcgcccagcggattgcagaacaacagaaggctcaggccgaggtggaagggctcggaaaaggcgtggcccggctcagcgccgaagcagaaaaggttctggcacttcctgagcccagcccagctgcccctactttaagaagtgaactggagctcaccctcggaaagcttgaacaggtgcgctcgttgtccgcgatttatctggagaaactcaaaacaatctctctggtaattagaggaacccaaggcgcagaggaagtgctgagagcccatgaggaacagttgaaagaggcccaggcagtgcccgccaccctgcccgaactggaagccacaaaggctagcctgaagaagctacgggcacaagcagaggctcaacagccaactttcgatgctcttagagacgagctgcggggggcccaagaagtgggggaacgcctacagcagaggcatggcgagagggatgtggaagtagagcgatggagagaacgtgtggctcaactgctcgaaaggtggcaagctgtcctggctcaaaccgacgtgaggcagcgcgaactggaacagctgggaagacaattacggtattacagggaatccgcggatccgctgggtgcctggctccaggacgcaaggaggcggcaagagcaaatacaagctatgccactggccgactcccaggctgtacgcgaacagttgcgacaagaacaagccctgttggaagagatcgagcggcacggcgagaaagtcgaggagtgccaaagattcgctaaacagtacatcaatgccatcaaagattatgagctgcagctggtgacctataaggcccagctcgaacctgtcgcgagccctgcaaaaaaaccaaaagtgcaatcaggaagtgagagcgttatacaggagtatgtcgacctcaggactcactacagtgagctaacaacactgacgtcccagtacattaagtttatctctgagactctccggcgcatggaagaagaagaaagactggcggaacagcagcgggcagaagagcgcgaaagattggcggaggttgaggccgcactggagaagcagcggcagctggccgaggcccacgcacaggccaaagcacaggccgaaagagaggcgaaggaacttcaacagcgtatgcaagaggaagtggtgcgccgggaagaggctgcggtggatgctcagcagcagaaacgcagcatacaggaagagctccagcagctgcgccagagcagcgaggccgaaatccaagccaaagccagacaagccgaagcagccgagcggtcacgactgcggatcgaggaagaaataagggtggtgagactacagctcgaggcaacagaaagacagcggggcggtgccgagggagaacttcaggccctgagagcccgtgccgaagaagctgaagcacagaagagacaagcccaggaagaggcggaacggctcaggcggcaggtgcaggacgaatcccagcgcaaaaggcaggctgaagttgaactcgcctcgagggtgaaggcagaagccgaggccgcacgtgaaaaacaacgggcactgcaggcccttgaggaactccgactgcaggcagaggaggcagaacggagactccgtcaagcagaggtagagagagcacggcaggtgcaggtggctcttgagaccgctcagcgctcagccgaagctgagttgcaaagcaaaagggcatcattcgctgaaaagacagcacagctggaacgcagcctgcaagaggagcacgtggctgtggcgcagcttagggaagaggccgagcggcgagcacagcagcaggcggaagcagaaagagcgagagaagaagccgagcgtgaactcgagaggtggcagctgaaggctaacgaagcactgagacttaggcttcaggcagaggaggtcgcccagcagaagtcactggcacaagccgaagcagaaaagcagaaggaggaagccgagcgtgaggcgagacggcggggaaaagctgaagaacaggccgtcagacagcgtgaactcgcagagcaggagctggaaaaacagcggcagcttgcggaaggcaccgcgcagcagcgtcttgccgctgaacaggagttaattcgcctacgggctgaaaccgaacagggcgagcagcagcgtcaattgcttgaggaggaactggcccgcctacagcgcgaagcagctgccgccacgcaaaaaaggcaggagctggaggctgaactggccaaggtcagggcagagatggaggtactgctcgcaagtaaagctcgggccgaggaggaatccaggagcacaagcgagaaatccaaacaaaggctcgaggcagaggccgggcggtttagagaactggctgaagaggccgcgcgactccgcgccctggcagaagaggcaaagcgccagaggcagcttgcagaggaggacgccgcacggcagagggccgaagcagagcgtgttctggctgagaaactcgcagccataggagaagccactcgtctgaagaccgaagctgagatcgctctgaaggagaaagaggccgagaatgagcggttgaggaggctcgccgaggacgaagcgttccagcgtaggaggctagaggaacaggctgcgcagcacaaggccgatattgaggagagacttgcccagctccgaaaggcctccgattccgagctcgagagacagaaaggtcttgtcgaagacacgctgagacagcgcagacaggtcgaagaggaaatactcgcccttaaagcgtccttcgagaaagcggccgcaggcaaagccgaactggagcttgagcttggaagaattcggagcaatgctgaagacaccttgaggagcaaggaacaggcagaactagaagccgcccgccagcgccagcttgcagccgaggaggaaagacgacgacgcgaggcggaagagagggtccaaaagagtctagctgcggaagaagaagcagcccggcaacgtaaggccgccttggaagaggtggaaagactcaaggcgaaggtagaggaggctcgccgcctgcgagaaagagctgaacaggagtcagcccgtcaacttcagctggcacaggaggccgctcagaagaggctgcaggcagaagagaaagctcacgctttcgctgtccagcaaaaggagcaggaactgcagcagaccttgcagcaagaacagtctgtgctggaccagttgagaggtgaggccgaggctgcacgcagagctgcggaggaagccgaggaagcgcgggtccaggccgagcgggaggccgcacagagtaggagacaagtagaagaagccgaacgtcttaagcagagtgctgaagagcaggcacaggctcgggcccaggcacaggcagcagcagaaaaattacgcaaagaagcagagcaagaagccgcaaggagagcccaggcggaacaggccgctttgcgtcagaaacaggccgcagacgctgaaatggaaaaacataaaaaatttgccgaacagaccctgcgtcagaaggctcaggtggagcaggagttgacaacactacgactacagctcgaggaaactgaccaccagaaaaacctcctagacgaagaactccagagactgaaggctgaagcgaccgaggcagctaggcagcgttcacaggtggaggaagagttattttccgtgcgggtgcagatggaggagctgtctaaactcaaggcgagaattgaagctgaaaatagggcactaattctgagagataaggacaacacccaacgcttcctccaggaggaggctgagaagatgaaacaggtggctgaagaagccgctcggttaagcgtggcggctcaggaggcagcaaggcttcgccagctcgctgaagaagacctggcgcagcagagagccctggctgaaaagatgctgaaagaaaagatgcaggctgttcaggaagcgaccaggctgaaggcggaggccgagctcctccagcagcagaaagaactcgcacaggaacaggcgcggcggttacaagaagacaaggaacagatggcccagcaactggctgaagagactcagggatttcagcgcactttagaagcggaaagacaaagacagctagagatgtccgccgaagcagagcggctcaagctaagagttgctgagatgtctcgcgcccaggccagggcagaagaggacgcccagagattccggaaacaagccgaggaaattggagagaagctgcacagaacagagttagccacgcaagagaaagtaactttagtgcaaacactggaaattcagcggcaacagtctgatcatgacgctgagcgactgcgggaggccattgcggagctcgaacgagagaaagagaaactgcagcaggaagccaaactgttgcagctaaaaagcgaggaaatgcagaccgtacagcaggagcagctgctacaggagacccaggcccttcaacagtcctttctgtctgagaaggattccctgctacagagagagagatttatcgagcaggagaaggcgaagctcgagcagctgttccaggacgaagtggcaaaagctcagcagctccgggaggagcagcagcgacagcaacagcaaatggagcaggagaggcaaagactggtcgcaagcatggaggaagcaaggcgacggcagcacgaggcagaggaaggggtccggagaaagcaggaggaactccaacagctggagcagcagcgccgtcagcaagaagaactgctggccgaggaaaatcagagacttagagagcagctgcaactattggaagagcagcacagggccgcacttgcccactcagaagaagtgacagcctctcaggtcgcggccaccaagacacttcccaatggtcgggatgcgctggatgggccggccgcggaagcggaacctgagcatagcttcgacgggctccggagaaaggttagcgcccagaggcttcaggaggccggcatcctgtccgccgaggagttgcaacgattggctcagggccatacaactgtcgacgaactcgcaaggcgggaagacgttaggcattatttacagggcagatcaagtatcgctggccttctgttgaaagccactaacgagaaactttctgtctatgctgcattacagcgccaattgttgtctccagggacagcacttatacttctggaggcccaggccgccagcggcttcctcctggacccagtacgcaataggagactgacggtaaacgaggcagtcaaggaaggcgtcgtgggtcccgagttgcaccacaagctcctgtccgcagaacgggctgtaacagggtataaggatccctacacaggccagcagatttcgctgtttcaagcgatgcagaaggggctcattgtcagagagcacggaatccgcctactcgaagctcagatcgcaactggtggcgtaatagacccggtccattcccacagagtccctgttgacgtcgcttatcgccgcgggtactttgacgaggagatgaatcgcgtcctggctgacccctccgacgatactaaggggttctttgatccaaatacccacgagaatttaacctatctccagcttctcgaaagatgtgtggaggatcctgaaacaggtctgtgcctactgccattgacagacaaagccgctaaaggcggggagttggtgtatacagacagcgaggccagagacgtgttcgagaaggccactgtcagcgccccattcggtaaattccagggcaagactgttaccatctgggagattatcaactccgaatatttcactgctgagcaaagacgcgacctgttacgccagtttagaacagggcgtattacggtggagaagattataaagatcataatcaccgtcgtggaggagcaggaacagaagggcaggctctgcttcgagggccttcgttccctcgtcccggcggctgaacttttggaatccagagtaatcgaccgcgaactttatcagcaacttcagcggggcgaaaggagcgtgcgcgatgtcgcggaggttgatacagttcgtagggccctaaggggcgctaacgtgattgctggcgtctggctcgaggaggcagggcagaagctcagcatttataacgctttaaagaaggatttgctgccttctgacatggccgtagcgttactcgaagcccaggcaggtacagggcatatcatcgatcctgcaacttctgcaagattgacagtcgacgaagcagtaagggccgggttggtgggacctgaattccacgaaaaattgttaagtgcagagaaggctgtgactgggtaccgagacccctacacgggacagtcggtttccctcttccaagcactgaaaaagggactaatacctagagagcagggactgagactgcttgatgcccagctgtctaccggtgggattgtggatccttccaaatcgcaccgtgtccccctcgatgtggcctgtgcgaggggctgcctggatgaggagacttcacgcgctctgtctgcccctagggccgacgctaaagcttactccgatcctagcaccggcgaacctgctacatacggcgaattacaacagcgttgcagaccagaccagctgaccggcctgtcactgctgcctctctcggagaaagcggcaagggcccgacaggaggaactgtactctgagcttcaggcccgcgagacatttgaaaaaacgcccgtcgaagtgccagtcggtggattcaaaggaagaaccgttaccgtgtgggagctgatttcatccgagtacttcacggccgagcagcgtcaggaactgctccgccagtttaggactggaaaggttacggtggaaaaggtcataaagattttaatcacaatagtggaggaggtggaaactttacggcaggagagattgtctttttctgggttacgcgccccggtaccggctagcgaattgttagcttcaggggttctgagccgtgctcagtttgaacagctgaaagacggcaagaccaccgttaaagatttgtcagagcttgggtcagttcgcacactgctacaaggaagcgggtgcctggctggcatctatctggaagacacaaaagaaaaggtgtcaatttatgaagctatgcgcagagggctgctgagagctacaaccgcagcgttgctccttgaagcacaagctgcaacagggttcctggtggatcccgtgcggaatcagaggctttatgtccacgaagctgtgaaggccggggttgtcggccccgaacttcacgagcagttgctatcagctgaaaaggctgttacaggttatagagatccttactcgggctctaccatcagtctgtttcaagctatgcaaaagggattggtcttaagacagcacggcattagacttctagaggcacagatcgccacaggaggcataatcgatcctgttcatagccacagggtgccggtcgatgtagcttaccagaggggatacttctcagaggaaatgaatcgggtactcgccgacccaagcgacgatacaaaaggcttcttcgatcccaatacgcacgaaaatctgacctatcgccaacttcttgaacggtgtgtggaagaccccgaaacaggcctgaggttgctccccctcaaaggagcagaaaaggccgaagtagtagagacaactcaagtgtacacagaagaggagacacgacgtgcttttgaggagacccagattgatattccgggcggcggcagccacggtggaagcaccatgtctttgtgggaggttatgcagtccgacctgattcctgaggaacagagggctcagttgatggctgacttccaggccggaagagtgaccaaggagagaatgattattatcattatcgagataatcgagaaaaccgagataattaggcagcaggggctcgccagttacgattatgtcaggcgcagactgaccgccgaggacttgttcgaggcaagaatcatctctttagaaacctataacctgctccgagagggaacccgctctctgagagaagccctggaagccgagtccgcatggtgctacttatatggcaccggatcagtcgccggggtgtatcttccgggcagtaggcagactctgtccatttatcaggctctgaagaaggggctgctctccgccgaagtggcccgtctcctgctggaggcacaggcggctactggattcctgctggaccccgtcaagggggagcggttaaccgtggacgaggcggtgcggaagggcctcgtggggccagaattgcacgacaggctgctttcagccgagcgggccgtgacaggctatcgggacccgtacactgaacagacgatctctttgttccaggccatgaagaaagagctgattccgactgaagaggcccttagattactggatgcgcagttggccaccggagggatcgtagatcctaggctagggtttcatttacctctagaagtcgcctaccagagaggataccttaataaggacacacacgatcagttgtctgaaccctcagaagtgcgatcatacgtcgatccgtccaccgacgagagattgtcatacactcagctcctgcgccgctgcaggagagatgacggtaccggacagttactcctccctctgtcagacgcccgcaaactgactttccgcgggctgcgaaagcagatcacaatggaggagctggtccgctcgcaagtcatggatgaggctaccgctttgcagctgagagaggggctcaccagtatcgaggaggtcacaaaaaacttgcaaaaattcctcgaggggacctcctgtattgccggagtgttcgtagatgctacaaaagaacggctctctgtgtatcaggccatgaaaaaaggcattatcagaccaggcactgcttttgagttgctggaggcccaagcagccactgggtatgtgatcgatcccatcaaagggctcaaactcactgtcgaggaggcggtcagaatggggatagtgggcccagaattcaaggacaaactgctcagcgccgaacgcgcagtcacaggatataaagatccctacagtgggaagctgatcagcctgttccaggccatgaaaaaggggctgatcctcaaggatcacgggatacgactgttagaggcccagatcgcaacaggagggatcatcgacccagaggaatcgcatcggttgccagtagaagttgcctacaagaggggtctgtttgacgaagagatgaacgaaattttaactgacccctcagacgatacaaaaggctttttcgacccaaacacagaggagaacttgacatatctgcagctaatggaacgatgtataactgaccctcagacaggactatgtttgctgcctcttaaagagaagaagagggaaaggaaaacgtccagcaaaagctcagtgagaaagcgccgggtggtgattgtggatcccgaaacgggcaaagaaatgtccgtgtacgaagcatataggaagggattaatcgaccatcaaacatatcttgaactctctgagcaggagtgtgaatgggaggagatcacaatttcctcgagcgatggagtggtcaagtctatgatcatcgatcgtcgaagcgggcggcagtacgacatagatgacgccatcgctaaaaatctgattgacaggagtgcactcgatcagtacagagcaggaacgctgagcattactgagtttgccgatatgctgagtgggaacgccggtgggtttcgatcgcggagtagttccgtaggaagcagcagcagctaccctatttcgcccgctgtcagccggactcagctcgcttcctggtcagaccctacagaggagaccggccccgttgctggaattttagatactgagaccctggaaaaagtaagcatcaccgaagctatgcatagaaacctggttgataatataacaggacagaggctactggaagcccaggcgtgtaccggcggtatcatcgatccgagcactggggagcgctttcccgtgacagatgctgtcaataagggcttggtggacaagataatggtcgaccggataaacctggcccagaaggccttctgtggatttgaggatccacggactaagaccaagatgtcagctgctcaagcactgaaaaaggggtggctctactacgaagccggccaaagattcttggaagtccaatacctcactggcggactgattgagccggatacccccggccgggtccccctggacgaggccctacagcgcggcaccgtcgacgctcgcacagcccagaagttaagggacgttggtgcttacagcaaatacctgacctgccccaaaaccaagctcaaaatctcctataaagacgccctcgaccgttcaatggtcgaagaggggactgggcttcgcctgctcgaagcagccgctcagtcgaccaaaggctactatagcccctacagcgtgtctggctcaggatcaacagctgggagccggactggctcccgcacagggtcacgcgccgggagcagaagagggagttttgatgcaactggatcaggcttctccatgacattctcttcctcatcctactcctcaagcggctatggtagaagatacgcctccggctcttcagccagcctcggcggtcctgagtccgccgtcgcctag

SEQ ID NO: 262143 - DNA, 13644 bp, Artificial Sequence
  derived and/or modified sequence
atgtctcaacaccagttacgagttccacagccggaaggcttgggtcgtaagcgcacaagtagtgaggacaacctatatctcgcggtgttacgggcttctgaaggaaagaaagatgaaagagatcgcgtgcagaagaagacatttacaaagtgggtcaacaagcatctgattaaggcccagaggcacattagcgatctctacgaggatctgcgggacggacataacctcatcagcctcctggaagtactgtccggggattctttgccccgagaaaaagggcggatgcggttccacaagttgcaaaacgtgcagatagctcttgattatctgaggcatcggcaggtgaagctggttaacattcggaatgatgatatcgccgatggcaaccctaaactgacactgggcctgatctggacaattatccttcactttcagattagcgacatccaggtgagtgggcagtccgaggatatgaccgctaaggagaaacttttactttggagccagaggatggtcgaagggtatcagggcctgcgctgcgacaatttcaccagctcctggcgggacggacggctgtttaatgcaatcattcatcggcataaacccttactgatcgacatgaacaaggtgtaccgccagaccaacctcgagaatttggatcaggccttctccgtcgccgaacgcgatctcggagtgacaagactcttggaccctgaggacgtcgatgtccctcagcccgacgaaaaatcaattatcacttatgtgtcttctttatatgacgcaatgccaagggtaccggatgtgcaagatggagtgcgcgctaacgagttacagcttcggtggcaggagtatcgtgagttggtcctgttgctcctgcagtggatgaggcaccacactgccgcattcgaggaacggcggtttccttccagcttcgaggaaatcgagatcctctggagccagttccttaagtttaaagagatggagttgcctgccaaagaagctgataagaaccgatctaagggcatataccagtctctggagggggccgttcaagcaggacaactcaaggttccacccggctatcaccccctagacgtggaaaaagaatggggcaagttgcacgtggccatcctggagagggaaaaacagctgcgttctgagttcgaaaggctggaatgcctgcaaaggatcgtcacaaagctgcagatggaagctggactgtgcgaggagcagttgaatcaagctgatgcactccttcaaagcgatgtccggttattagcagcggggaaggtgccccagcgtgccggagaagtggagcgggacctggataaagcagactcaatgatcaggctcctgtttaacgacgtgcagacactgaaggatggacgacatccacaaggagagcagatgtataggcgtgtctatagactgcacgagaggctggtggccatccggaccgagtataacttgcgcttgaaagccggcgttgcagcccctgctacgcaggtggcccaggttacgctgcagtcagttcagaggcggccagagctggaggactctacgctgcgctatctccaggacttgctcgcttgggtggaggagaatcagcaccgagttgatggcgcagaatggggcgtggatctaccctctgtggaagcccagctgggcagccatagagggctgcaccagtctatcgaagaattccgtgccaagatcgagcgcgctcgctcggatgaaggacagctaagtccagcgacaagaggagcctaccgcgattgtcttggcaggctggacctacagtacgctaaactgctcaattcaagtaaggcacggcttaggtccttggaatcactgcacagcttcgtcgccgccgcgaccaaagaactaatgtggctgaatgagaaggaagaggaagaggtaggttttgactggtctgacaggaacacaaatatgactgccaaaaaggaatcctatagtgcgttgatgcgcgaattggaactgaaggagaaaaaaatcaaggagttgcagaatgctggcgaccgcctcctcagagaagaccacccagctcgccccactgtggagagtttccaggcggctttacaaactcagtggagttggatgttgcagttgtgttgctgtatagaggctcatctgaaagagaatgccgcgtacttccaattcttttccgatgttcgtgaggcagagggccagctgcagaagctccaggaggccttgagaaggaagtattcctgtgacaggtctgcaaccgttacaagactggaggacttgctgcaggatgcgcaggacgagaaggagcagctgaatgagtataaaggccatctgtctgggctggccaagagagccaaggctgtggtccaactgaagcctcgacacccagcccatcctatgcgcgggcgactacctttactggcagtgtgtgactataaacaggtggaagttacagtgcacaagggggacgaatgccagttggttgggccagcccagcctagtcattggaaggtcctgtcaagctctgggtccgaggcggccgttccctcggtgtgttttctggtgcccccaccgaaccaggaggcacaggaggccgtgactcggctcgaggcacaacaccaggcccttgtgacactgtggcaccaactgcatgtagacatgaaaagtctgctagcttggcaaagtctgcgtcgggacgtacagctcataagaagttggagcctggccacatttcgaacactgaagcccgaggagcagcggcaggcattgcatagtcttgaacttcactatcaagcctttctcagagactctcaggacgctggcgggttcggcccagaagatagattaatggccgagcgtgaatacggctcttgtagccaccattaccaacaacttttgcagagtttggagcagggcgcccaggaagagtccagatgtcagcggtgtatatccgagttgaaagacatccgactgcaattagaggcttgtgaaacccgcactgtacataggttacggctgcctctcgataaagaaccagctcgggaatgcgcacagcggatcgcagagcagcagaaagcgcaagccgaagttgaagggctcgggaagggcgtcgcccggctcagcgccgaagcggagaaggtcctggctctgcccgagccaagccccgccgcccccacactgagatctgagcttgaattaaccctcgggaaactcgaacaggtcaggtctctgagcgctatttatctggaaaaactgaaaacaatcagtctcgtgatccgcggtactcagggcgcagaggaggtactgagagcgcacgaagagcagcttaaggaagctcaggccgtcccggccacccttcctgagctggaggcaactaaggcctccctgaagaagctgagagcccaggccgaagcccagcagcctactttcgacgcactccgcgacgaactcaggggagcccaagaggtgggagaacgcctacagcagcggcacggggaaagagacgtggaggtcgagcgttggcgtgagcgtgtcgctcagttactggagcgttggcaggccgtgttggcccagaccgatgtgaggcagcgcgagctggagcagctgggcagacagctccggtattaccgggagtcagccgacccattaggcgcttggctgcaagacgcccgtcggagacaggagcagattcaggctatgccgctggcagactctcaggcagtccgagagcagctgaggcaggagcaggccctcctggaggagattgagcgacacggggagaaagtcgaggagtgtcaacggtttgcaaaacagtacataaatgctataaaagattacgagctgcaactggtgacatataaggcacaacttgagcccgttgcttcccctgcgaagaagccaaaggttcaatctggctcggagtccgtcatccaggagtacgtggatctgagaactcattactccgagctcaccacgctcacctctcagtacataaagtttatttccgaaacgctccgaagaatggaagaagaggagcgcctggctgaacagcagagggccgaggagagggagcgattagctgaggtggaagccgcccttgagaagcagcggcaactcgcggaggctcacgcccaggcgaaagcacaagcggagcgcgaagctaaagaactgcagcaacgaatgcaagaggaagtggtgaggagagaagaggcagccgtggacgcccagcaacagaagagatcgattcaggaggagctccagcagctcaggcaaagcagcgaagcggaaatacaagctaaggctcgtcaggctgaagcagccgagcgcagtcggctgcggattgaggaagagatccgtgtcgtgcgcttgcagcttgaagctacagaaagacagcggggtggggccgagggcgaactgcaagctctgcgcgccagggcggaggaggccgaggcgcagaaacgtcaggctcaggaggaagctgagcggctgagaagacaggtacaggatgaaagccagcggaagcgccaagccgaagtggagctggccagcagggtgaaggccgaggccgaagctgctagggagaagcagcgagcactccaggccctggaagaacttaggctgcaggcagaggaagcggagcggcggctcagacaggcagaggtcgaacgcgcacgccaagtacaggtggcgctggagacagcccaacggagtgccgaagccgagctccaatcaaagcgggcatccttcgccgagaagactgctcagctggaacgatcactgcaggaagaacacgtcgcagtggcacagttgagagaggaggctgagagacgcgcccagcaacaggcggaggctgagcgagccagggaggaggccgagagggagctggagcggtggcagctgaaggccaatgaagctcttaggctgcgcctgcaggcagaggaagtcgcccaacagaaaagccttgcccaggccgaagccgagaaacagaaagaggaagctgagcgcgaggcgcggagacgaggaaaagcggaggaacaggcggtgcgccagcgtgaacttgcagagcaggaattggaaaaacagcggcagctagctgaaggtacagctcagcagaggctggctgccgaacaggaactgatccgtctgcgggcagaaaccgaacagggcgaacagcagcggcagcttctcgaggaggagttggctcggctgcagcgagaggccgccgctgctacccagaagagacaggagctcgaggccgaactcgccaaggtccgtgctgaaatggaggtgctgttagccagcaaagcccgagctgaggaggagtcaagatcgacctctgagaaatcaaagcagaggctggaggctgaagcagggcggtttagagaattagccgaggaagccgcccgactgagggctcttgccgaggaggctaaacggcaacgccagctcgccgaagaagatgcagcccggcagcgggcagaagcagagcgggttctggccgaaaagctagccgccattggcgaggcgactaggctaaagacagaagccgagatagccctaaaggagaaggaagctgagaatgaaagactgcggagactagccgaagacgaggcctttcagcggcggcgtctggaggaacaggccgcccagcataaagctgatatcgaggagcgacttgcacagctgaggaaggcgagcgactccgaactggaacgccaaaaaggactcgtggaagatacccttaggcaacggcggcaggttgaggaggaaatattggcactgaaagcttcattcgagaaggccgcagcgggaaaggccgaattagaactagaactagggaggatccgttcgaatgctgaggacactctccgcagcaaagagcaggccgaactggaggccgctagacagaggcagttggccgcagaggaagaaaggcgaagacgcgaggccgaggagcgcgtacagaaatccctcgcagccgaggaagaggccgcacgacagagaaaggccgccctggaagaagtggagcgcctgaaggcaaaggttgaagaagcccgccgactgcgagagagggcagagcaggaatctgcccgacagctgcaacttgcacaggaggctgcccaaaaaagactccaagccgaagagaaggctcatgccttcgccgttcagcagaaggaacaagagctccagcagactctacaacaagagcagagcgttcttgatcaactgcgaggtgaagctgaggcagcccgtagggcagcagaggaggcagaagaggcacgagtgcaggccgaacgggaagctgcacagtcgaggaggcaggtcgaagaggctgagaggctgaagcaatcagctgaggagcaggcgcaagcaagggcgcaggctcaggctgcggctgaaaagctccggaaagaggctgaacaagaggcggccaggagagcacaggccgaacaggccgccttaaggcagaagcaggcagctgacgctgagatggaaaagcacaagaagttcgctgagcagaccctccgacagaaagcacaggtggagcaggagctgacgaccctgaggctgcagttggaggagaccgatcaccagaagaatcttctagatgaagagttgcaaagactgaaggcagaggccactgaggccgcccgtcagagaagccaagtggaggaagagcttttttccgtgcgcgttcagatggaggagctttctaagctgaaggcccgcatcgaagccgaaaatagagcgctgatcctgagggacaaggacaatacccagagatttctccaggaagaagcagaaaagatgaaacaagtggccgaagaggcggccagactttctgttgctgcgcaggaagccgccaggctgcgccagctggctgaagaagacttagctcaacagcgcgctctcgccgagaaaatgttgaaggagaaaatgcaagcagtccaggaggcaactaggctcaaagctgaggctgaactcctgcagcaacagaaggagctcgctcaggagcaagcacgccggttgcaggaggacaaggagcagatggcccaacaactcgccgaggagacgcaaggttttcagagaactcttgaggcagaaaggcagcggcagctggagatgagcgccgaggccgagcgcttaaagctccgcgtggccgagatgtccagggcccaagctcgggcggaagaggatgcacagcgtttccggaagcaggccgaggagataggggagaaactccataggaccgagttagccacacaggagaaggtcacccttgtccagacattagaaattcaaaggcaacagtccgaccatgacgccgaaaggctgcgcgaagcgatagctgagctggagagagagaaggagaagcttcagcaggaagccaagcttctgcagcttaagagtgaagagatgcagacggtgcagcaggaacagctcttgcaagagacacaggcgctgcagcaaagcttcctgagtgagaaggattcgctgctccagcgggagaggttcattgagcaggagaaggcaaagttggagcagctgtttcaggatgaggtagcaaaagcccaacagctgagagaggaacagcagcggcaacagcagcagatggagcaagaacggcagcgcctagttgcctcgatggaggaggcacggaggcggcagcatgaagccgaagagggcgttcgaaggaaacaggaagagctgcagcagctcgagcaacaacgcaggcagcaagaagaactcctggcagaggagaaccagcggctgagggagcagctgcagctgctggaagagcagcatagagccgcactggcccacagcgaagaggtaaccgctagtcaggttgccgcgacaaagaccttaccaaatggccgcgacgcactcgacgggcccgccgcagaagccgagccagagcacagtttcgatggactacggcgtaaggtgagtgcacagagactgcaagaagctgggattctgtcggccgaggagctacaaaggctcgcgcaaggccataccaccgtagatgaactcgcccggcgcgaagacgtccgacattatctgcaggggcgaagttcaatagccggtctgttactcaaagctaccaacgagaaactgtccgtttacgccgctctccaaaggcaactccttagcccaggaacagcactgatcctactggaggctcaggccgccagcggcttcctgctggatcctgtgcgcaacaggcgcttaactgtgaatgaagctgtgaaagaaggagtggtgggccctgaactgcaccataaactcttgtcggccgaaagggccgtgacggggtacaaggatccctacacaggacagcaaatttctctttttcaggccatgcagaaaggcctaatcgtgagggaacacggaatacgcctcttggaggcccagatagccaccggtggagtgatcgaccccgtgcactcacatagggttcctgtcgacgttgcgtaccgaagaggctacttcgacgaagagatgaacagggtgctggctgatccttctgacgatacaaaggggttcttcgatcctaatactcacgagaacctaacttacctgcagttgttggagcgttgtgtggaggaccctgaaaccggcctgtgcctgttacctctgaccgataaagccgccaaaggcggagaactcgtctacaccgattccgaagcaagagatgtctttgagaaggcaaccgtaagcgctccctttgggaaatttcagggcaaaacggtaacgatttgggagattattaattccgaatattttaccgccgagcaacgacgggatctcctccgtcagttcagaacaggacgaataacagtggagaagataattaagattatcataacggtcgtcgaggagcaggaacaaaaaggccgcctgtgctttgagggtcttagatccttagtgcctgccgccgaactgctagaaagtcgcgtgatcgatcgggaactttaccagcagttgcagagaggggagcggtctgttagagacgtggcagaggtggacacagtgagacgggccctaaggggagccaatgtgatcgcaggcgtgtggctggaggaggcaggtcaaaaattgtccatctataacgctctgaagaaggacttactgccctccgacatggccgtggctcttctggaagcacaagccggtactggtcacatcattgaccccgcaacttctgcccggctcactgtggatgaggcagtgagagccggcctggtgggaccagaattccatgaaaaacttctgagtgcggaaaaggccgtgactgggtaccgcgatccatacacaggacagtctgtttccctcttccaggcccttaagaaggggcttattccacgggagcaggggctgcggctcctcgatgcccaactttcgaccggcggtatcgtcgatcctagcaaatcacacagggtgccactggatgtggcctgcgctcggggctgtttagatgaggaaacgagtcgcgctttgtcggccccccgggcagacgccaaagcatacagtgatccgagcacgggggaaccagccacatacggcgagttgcagcaacggtgccggcctgatcagttgaccggcctatctctccttccactgtctgagaaggcggcaagagctcggcaggaagaactctacagcgaactgcaagccagagagacttttgagaaaactcccgtggaggttcccgtaggcggattcaagggacgcacagtaacagtctgggaactgatctcttccgaatattttaccgccgaacaaagacaggaattgcttcgacagtttcgcactgggaaagttacagtcgagaaagttataaaaatcctgattaccatagtcgaggaggtcgaaaccctgaggcaggaaaggttgagcttcagtgggcttcgtgctccagtcccagcctcggaactcctcgcttccggtgtcctcagccgagcccaatttgagcaactcaaagatggcaaaaccactgttaaggacctgtccgaactcggatctgtgcggactctgctccagggctctggttgcctcgccgggatctacctagaggatacaaaggaaaaggtttcaatctacgaagcaatgcggcggggcctgctccgcgcaacaacagcagcgttattgctggaagctcaggcagcgacgggatttctggttgacccggtccgaaaccaaagattgtatgtccatgaggctgtgaaagccggtgtggtgggcccggagctccatgagcagctgctgagtgctgaaaaagcagtcactggttatcgtgacccttatagcggcagcaccatcagcctgttccaagctatgcagaagggcctggtgctgaggcagcacggtatacgcctgctggaagcccagatcgcgactggcgggattatagaccctgtgcattcacatcgggtccctgttgatgtggcttatcagagaggctacttctctgaggagatgaatagggtgctggcagatccaagtgacgataccaaggggttcttcgacccaaatactcacgaaaacctgacctatagacagctgcttgagagatgtgtggaagaccctgaaaccggactgaggcttctcccattgaagggcgcggagaaggccgaggtggtggaaaccacccaggtgtacacagaagaggaaacacggcgtgctttcgaagaaactcagatcgacatcccaggcggtggctctcacggcgggtcaacaatgtcactgtgggaagtcatgcagagcgatctgatcccagaagaacaaagagcccaattgatggccgattttcaggccggccgtgtgaccaaagagaggatgattattattatcatcgagatcatcgagaagacggagataatcaggcagcagggcctggcatcctatgattatgtccggcgcagactcaccgcggaggacctcttcgaggcccgaatcataagcctggagacctacaatcttctgcgcgagggcaccaggtcgttaagggaagctcttgaagccgagtccgcttggtgctacctgtacggcactggcagcgttgccggagtgtatttgccggggtccaggcagaccctgtctatttaccaggcacttaagaaagggctactcagcgccgaagtggcccgccttctcctggaggcgcaggcggctacaggcttcctactggacccagtgaaaggcgaacgcctgaccgtggatgaggccgtgaggaagggcttggtgggacctgagctccatgacagacttctcagcgcagaaagagccgttacaggctacagagatccctacactgagcagactatttcgttgttccaggctatgaagaaggagcttatcccaacggaggaggcactgcggttgctggacgctcaactcgccactggaggaatcgtggaccctcgactgggtttccatctgccgctggaagtggcttatcagagaggctacttgaacaaagatacccatgatcagctgtcagaaccctctgaggtgaggtcctacgtggatcccagcaccgatgagcggctgtcgtatactcagttgttacgcagatgcagacgcgacgatggcacaggtcagctcctcctccctctatcggacgccaggaagctgaccttcaggggtctgcgaaagcaaatcacaatggaagaactagtgaggtcgcaagttatggacgaggcgactgcactccagctgcgcgagggactaaccagtattgaggaggtgactaaaaacttgcagaaattcttggagggaacatcttgtatagcaggagtgttcgtcgatgcaactaaggagcgcctgagcgtctatcaggccatgaaaaaaggtattattcggcccggcaccgcattcgagctcctggaggcgcaagctgccactgggtatgtgattgatccgatcaaaggtctgaagctcaccgtggaagaagcggtcaggatggggattgtaggtcccgagttcaaagacaagcttctcagcgccgagagagcggtcacaggttacaaggacccttactctgggaaactgatttcactgttccaggcgatgaagaaggggctgatcctcaaagatcatgggatccgcctcttggaggctcagattgcaaccggcggcatcattgatccagaggagagtcaccgactaccagtggaagtcgcttacaagagagggctgttcgatgaggaaatgaatgagatcttgactgacccctccgacgatactaagggcttcttcgacccaaacacagaggagaatctgacgtacctacagctgatggagcgctgcatcactgaccctcaaacgggactgtgcctgctgcccctaaaagaaaagaaaagagaaagaaagacatcctctaagtcctcggtgcgtaagaggcgtgtggtgatcgtcgaccccgagactggcaaagaaatgagtgtttacgaagcatacaggaagggcttaatcgatcaccagacctacctggaactatcagagcaggaatgcgaatgggaagagattaccatctcgtctagcgatggagttgtcaaaagtatgattattgaccggcgctcaggccggcagtacgacatcgacgatgccattgctaaaaatctgatcgaccggtccgccctggatcagtacagagcgggcacactttctatcacagagtttgcagatatgttatctgggaatgctggcggattccgatccagatcaagttcagtgggctcttcctcctcttatcccatctctcccgcagtttcgcgaacccagttggcaagttggagcgaccctaccgaggagaccggcccagtggctggcatacttgacaccgaaactctcgagaaagtatcaattactgaggctatgcaccgcaatttggtggacaatataaccggacaaaggctgttagaagcccaggcctgtacgggggggatcatcgacccctcgacaggcgaaaggttccctgtcacagacgccgtgaacaaggggctagtggacaagataatggtggatcgtatcaatttagctcagaaagcattttgcggttttgaggaccctcgcaccaaaacgaagatgagtgctgcacaggccttgaagaaaggctggctttactacgaggctggccaacgatttctggaggtacagtacctgactggtgggttaatagagcctgatactccagggagagttcctctcgacgaggctttgcaaagaggtacagtggacgccagaaccgcccagaagctccgcgacgtgggagcctactcaaagtatctgacgtgccctaagacaaaactcaagattagctacaaggacgcattagatcggagtatggtggaagagggcaccggcctgagactattagaagccgccgcgcagagcactaaaggctactacagtccctactctgtgtctggatccggctctaccgcaggaagcaggactggcagcagaaccgggtcccgggccggcagtagacgcgggagtttcgacgccactgggtctggtttttcaatgaccttttctagttccagttactcctcgagtggctatggtaggagatacgccagcggttccagtgcctctctggggggcccggaatctgctgttgcatag

SEQ ID NO: 262144 - DNA, 13644 bp, Artificial Sequence
  derived and/or modified sequence
atggaaccttcaggtagtctctttccttctctcgtcgttgtgggccacgtcgttactctggccgccgtgtggcactggcgtagaggccgcaggtgggcgcaggacgaacaggatgaacgcgaccgggttcagaaaaagaccttcacaaaatgggtgaacaagcatcttatcaaagcccagaggcatatctccgatctctacgaggacctcagggacggtcacaacctaattagcctgctggaggttctcagcggcgactcactccctagagagaaagggaggatgcgctttcacaaattgcagaatgtgcaaatagccctcgactacctcaggcaccgccaggtgaaactcgtgaacatcagaaacgacgatatcgcagacggcaaccccaaactgaccctcggattgatctggacaattattctgcacttccaaatttctgacattcaggtgtctggacaatcagaggacatgactgctaaggagaaactcctgctctggagtcaaagaatggtggaaggataccaaggactgcggtgcgataatttcacctctagttggcgcgacggtagactgtttaacgctatcatccatagacataagcccctcctgatcgacatgaataaggtataccgccaaacaaacctcgagaatctggatcaggctttctcagtcgctgagcgggatcttggagtcacccggctgcttgacccagaagatgtggacgtgcctcagccagatgaaaagtccataattacctatgtatcaagtctatacgacgccatgcctcgagtgcctgacgtgcaggacggcgtgagggccaatgaactccagctccggtggcaggaatatagagagctggtgctcctgctgctgcagtggatgagacaccacacggcagccttcgaagaaaggagattccccagcagttttgaggaaatcgaaatcctgtggtcacaatttctcaaattcaaggaaatggagctacctgccaaggaagccgataagaataggtcaaagggaatctaccagagcctagaaggcgccgtccaggcagggcagctgaaagtccctcctggctaccatccattagacgttgagaaggaatgggggaaactgcacgtggccattttagaacgagaaaaacaacttcgaagtgagttcgagaggctagagtgccttcagcgtattgtcacaaaattacagatggaggctgggctgtgcgaggagcaactgaaccaagctgatgcattgctccagagtgatgtgcgcctgctggccgctggcaaagtgcctcagcgggccggggaagttgagcgagacttagataaagccgactctatgattaggctcttattcaacgacgtacagactctgaaggatggtcggcacccccaaggtgagcaaatgtacaggagggtgtaccgcctccacgagaggcttgtcgccatcagaaccgaatataatctgcgcctcaaggccggagtagccgcacctgccacccaagtagcccaggttacgctgcagagtgttcagcggcgaccagagctagaggactcaacactccggtatctgcaggacttactggcctgggttgaggagaaccagcaccgcgtggacggagcagagtggggcgtggatctcccttccgtcgaggctcagctgggttctcatcggggattgcatcagagtattgaggaatttcgtgctaagatcgaaagagctaggagtgatgagggacagttaagtccagctaccagaggcgcttatagagactgtctagggaggctggacttacagtacgccaagctcctgaacagctccaaggccagactccgaagcctggagtcactgcattcattcgtagctgcagcaaccaaggaactaatgtggctgaatgagaaggaggaagaagaggtggggttcgactggagcgacaggaatacgaatatgactgctaagaaagagagctactcagctctgatgagagagctggagctgaaagagaagaagatcaaagaactgcaaaacgcaggcgacagattactgcgtgaagaccatccagcccggcctaccgtggagtccttccaagctgctctccagacacagtggtcatggatgctccagttatgctgttgcatcgaagcacacctgaaagaaaacgcggcctatttccaattttttagcgatgttcgcgaggccgaagggcagctacagaagctgcaagaggccctgcgtcgaaaatacagttgcgatcgttctgccaccgtcacccgcctagaggacctgcttcaagacgcccaggatgagaaagaacagctgaatgagtataaagggcatttgagcggtcttgctaagcgcgcaaaggccgtggtccaactgaaaccgagacaccctgcccacccaatgcgcgggcggcttccattactagctgtttgcgactacaaacaggttgaggtgaccgtccacaagggtgatgagtgtcaacttgttggccctgcccagccatcccactggaaggtactgagcagctctggaagcgaggcggccgtcccttccgtgtgttttctggtcccccctcctaaccaggaagcgcaggaggccgtcaccagactcgaggcccagcaccaagcactcgtgacgctgtggcaccagctgcacgtcgatatgaaatccctgctagcctggcagagcttgaggagagacgtacagctgattaggtcctggagccttgctaccttccggacactgaagccagaagaacaacgacaggccctgcactctctagagctgcattaccaagctttcttgagggattctcaggatgcgggggggttcggccccgaggatcggcttatggcggagcgagaatacggaagttgctctcaccactatcagcagttactgcagagccttgagcagggtgctcaggaagaatctagatgccaaagatgcatctctgaacttaaagatattaggctacaacttgaagcgtgcgagacacgcactgtgcatcgtctgcgcctgcctctggacaaagaacctgccagagagtgcgcacaacgcatagcagagcaacagaaagcccaagctgaggtggaggggttaggaaaaggtgtggcccgactgtcagctgaagctgaaaaagttctggcactgcctgagccttccccagccgcaccaactcttcgttcggaactcgagctgacactaggaaaactggagcaggtgaggtccctgtctgccatttacctggaaaagttgaaaacaatcagcttggttataagaggcactcaaggcgccgaggaagtgttgagggcacatgaagagcaactgaaggaggcacaggcagtcccagcgacacttccggaactggaggcgacaaaggcctccctgaaaaagctgagggctcaggccgaggcccagcagccaaccttcgacgcgctgcgtgacgaactgagaggtgcccaggaggtgggggaacggctgcaacagaggcatggcgagcgggacgtggaagtcgagagatggagagaaagggtcgcacaattgctggaacgatggcaggctgtcctggcacagacggatgttagacaacgggagctcgaacagctgggtcgccagcttagatattatagggagtctgcagatcccctcggggcatggctgcaagacgcaaggaggcggcaagagcagattcaggctatgcccttggccgacagccaggccgtgagggagcagctgcgccaagaacaagcacttttggaggagattgagcgccatggggagaaggttgaagagtgccagcggtttgcaaaacagtatatcaatgcaattaaggattacgagctgcagctggtgacttacaaggcccagctggaacctgtagcctctcccgccaaaaagcccaaagtgcagtccggttctgaatctgttatacaggagtacgttgacttgcggacacattactctgaactgaccactctgacatcccagtacattaagtttatttccgaaactctgcgtcgaatggaggaggaagagcgtttagccgaacagcagagggccgaagagagagagagacttgcagaggtggaggccgccctagaaaagcagagacagttagccgaggcacacgcacaagctaaggcccaggcagagagggaggctaaagaactgcaacagagaatgcaagaggaggtggtgaggagagaggaggcggctgtcgacgcacagcagcagaaacgctctatccaggaggaactgcaacagcttagacagtcttctgaggccgaaatccaggcgaaggctcgtcaggccgaggcagccgaacgcagtagactccgtatcgaagaagagatccgagttgtcaggcttcagctggaagccactgaaaggcagaggggaggtgcagagggagaactacaggcactgcgcgcaagggccgaagaagcagaagcccagaagagacaggcccaagaagaggcagaaaggcttcgcaggcaagtgcaggatgagtcacagaggaaaaggcaggccgaggtcgagctggcctctagggtcaaagccgaagccgaagcagcgagggaaaagcaacgcgctctgcaagcactagaagagcttaggctccaagcagaggaggctgaacgccgactcaggcaggctgaagtggaacgtgctaggcaagtgcaggttgccctagaaaccgcccaacgttcagctgaggcagagctacaatccaagcgtgcttcattcgccgaaaagacggcccagttggagcgctccctgcaggaggaacacgtggccgtcgcccagctccgggaggaggctgagcgccgggctcaacaacaggccgaagccgagagggcacgcgaggaggcagaaagggagctggaaaggtggcagttgaaggcgaatgaagcgctgaggctgagactccaggcagaggaagtggctcagcaaaagagcctggctcaggccgaggctgagaagcaaaaagaagaggccgaaagagaagcccggcggcgagggaaagctgaggaacaggcagttcggcagcgggagctcgctgaacaggaactcgaaaagcagcgtcagctcgctgaaggcacagctcagcagcggctggccgccgagcaggagctcatccgcttgcgcgcggagacagaacaaggggaacagcagaggcagctccttgaggaggaattggccagactgcagagagaggccgcggcggcgacccagaaaagacaggagcttgaggccgaacttgcgaaagttagggcagaaatggaagttctgctggcgtccaaagcgagagccgaggaagagagtcggagtacctcagaaaaatctaaacagagactggaagccgaggctggccgtttcagggaactggccgaggaggctgctcggctgcgggccctggccgaggaggccaaacgccagaggcagctggctgaagaggacgctgcgcggcagagggcagaggctgaacgtgttctcgcggaaaagttggcagctatcggtgaggccacccgcctgaagacagaggcagagatcgcactgaaagagaaggaggctgaaaacgaaaggttacgccgcctggcagaggacgaagcattccagcggcggagactggaagagcaggcagcccagcacaaagccgacatagaggaacggctggcacagctgagaaaagcttcggatagtgagctagaaaggcagaaagggctcgtggaggatacacttaggcaaaggagacaagttgaagaggaaatccttgccctgaaagccagtttcgagaaggcggcggctgggaaggccgaactggaactggaactgggccggatccggagtaatgcagaagatacgctccgaagtaaagaacaagcagagctggaagcagcgcggcagagacagttagcagcagaagaggaacggaggcgtcgagaggcagaggaacgcgtacagaagtctctggcggctgaagaagaggccgctcgccaacgaaaagctgccctggaagaggtcgaacgtcttaaagctaaagtggaggaggcccggcgcctcagagagagggctgagcaggaatcagccagacagcttcaactggcacaggaggccgcacaaaaaaggctacaggccgaggagaaggctcatgctttcgctgtgcagcagaaggaacaagaactgcaacaaacgcttcaacaggaacagtccgtactggatcagctgagaggcgaagccgaggctgcccgacgcgctgccgaggaagcagaggaggcccgcgtgcaggccgagcgggaagcagcccagagtcggagacaggttgaggaagcagagaggctgaagcagagcgccgaagagcaggctcaggctagggcgcaggcccaagccgcagcggaaaaactgaggaaggaagccgagcaggaagctgccagaagagcccaggctgagcaagctgccctgcggcagaaacaggccgcggatgctgaaatggagaagcacaagaaatttgctgagcaaacccttaggcaaaaagcccaggtcgaacaggaactaaccaccctccgattgcaactagaggagactgatcatcagaaaaacctgctggatgaagagttgcaaagactcaaggccgaggccaccgaggccgccaggcagaggtctcaggtcgaggaggaattattcagcgtacgagttcagatggaagagttatccaagcttaaagctcggatcgaagccgagaaccgcgccctgattttgcgcgacaaggacaacactcagaggttcttgcaggaagaggcagagaagatgaaacaagtggctgaagaagcggctcgattgtcagttgccgcccaggaagccgcccggctacgccagttggccgaggaagacctcgcccaacagcgggcccttgccgagaaaatgctgaaggaaaaaatgcaggctgtccaggaggcaaccaggttaaaggctgaagctgaattgctgcagcaacagaaagaactggcccaggagcaagctagaagactgcaggaggataaggagcagatggcccagcagcttgccgaggaaacgcagggtttccaacggaccctggaagccgagcgccagcggcagctggagatgtctgctgaggccgagcgactgaagctcagggtggcggagatgtcacgtgctcaagcacgggcagaagaggacgcgcagcgcttccgcaagcaggcagaggagatcggggagaagctccaccggaccgagttggcaacccaggaaaaagtaacactcgtgcagacgctcgagatccaaagacaacaaagcgaccatgacgcagaacgactcagagaagcgattgcagagctcgagagggaaaaggagaaactgcaacaggaagcgaaactgctgcaacttaaaagcgaagaaatgcagactgtccaacaagaacaacttctgcaggagacacaggccctccagcaaagttttctgagcgaaaaggatagcctgttgcaacgcgagagatttattgaacaagaaaaggcaaagctcgaacagctcttccaggatgaggtggctaaggcgcagcagctacgagaggaacagcagcgccagcaacagcagatggagcaagagcggcaaagactggtagcctctatggaggaggccaggcggcgtcaacacgaggcagaagagggggtgcgcagaaaacaagaggaactccaacagctcgaacagcagcgacggcagcaggaggaactgctcgccgaggaaaatcaacgactgcgcgaacagttacaactgttggaagagcaacacagagctgctctggcgcatagtgaagaggtgactgccagtcaagtagctgccacaaagacactcccaaacggacgggacgctctggatggacctgccgccgaagcagagcctgagcattcctttgatgggttgagaaggaaggtctctgctcagcgcctgcaggaggcagggatcttgagtgccgaagagctgcagagactcgcacaaggccacacaaccgtcgacgaactagccaggagggaggacgtccgtcattacctccagggaagatcttccatagccggtttgctgctcaaagcgacaaacgagaagctgagtgtgtacgcagctttgcaacgacagctgctgtctccagggaccgctctgatactactggaggcacaggccgcctctggtttcctcttggatcctgttcgaaaccgacggctgacggtcaacgaggccgtcaaggagggggttgtcggaccggagctccaccacaagctcctgtccgcggaacgagctgtgactggctacaaggatccatacaccggccagcaaatttctctttttcaggcaatgcaaaagggacttatcgtaagggaacatggtatcaggttgcttgaagcacaaatcgccaccggtggggtgattgaccctgtgcatagccatcgggtgccggtggacgtcgcgtacagacggggctattttgacgaagagatgaatcgagtcctggctgatcctagcgatgataccaaggggttcttcgaccctaacacacatgagaatctaacatacctgcagctgctggagcgctgcgtagaggacccggagaccggcctgtgcctgctgccactgaccgacaaagccgcaaaaggcggagaactagtctatacagactcagaggcccgcgacgtgttcgaaaaggccactgtttccgcccctttcggcaagtttcaaggcaaaactgtcaccatctgggagatcataaactcggagtatttcaccgccgaacagcgccgcgacctgttgaggcaattccgcaccggtcgcatcacagtcgagaaaatcatcaaaattattatcactgttgtggaggagcaggagcagaagggccgactgtgctttgagggattgaggagtctggtgccagcagcagagttgctggagtctagggtgatcgacagagagctctaccagcagttgcagaggggtgagaggagcgtgagagatgtagccgaagtggacactgtgcgccgcgccctgagaggagccaacgttatagccggcgtttggctcgaggaggcaggccagaagctttccatctataatgccttaaagaaagatctgctcccctcagacatggccgtcgcactgcttgaggctcaggcaggaaccgggcacatcatcgaccccgctaccagtgccaggctcactgtggacgaggccgtcagggccggcctagtcggaccagagttccatgagaagctcctcagcgcagaaaaggccgtcacgggctatcgggatccgtatactggacaatcagtaagtcttttccaggctctcaagaaaggacttatacccagggaacagggactgcggctgttagatgctcagctttccacgggagggattgtggacccgtctaagagccaccgcgtcccgctggacgtggcttgcgccagaggctgcttggacgaggagactagccgcgccctgagcgcccccagagccgacgcgaaggcgtactccgaccctagcaccggcgagccagcaacttatggcgagctacagcaaaggtgtcggcctgatcagttaaccggcctcagccttctacctctcagtgagaaagcagctagggcgcgccaggaggagctgtacagcgagctgcaggctcgcgagacttttgagaagacccccgtggaagtgccggtaggtggctttaaaggacggactgtgaccgtatgggaactcatcagctcagaatattttactgccgagcagcggcaggaactcctaagacagttccggaccggcaaagtcaccgtggaaaaagtgatcaagatcctaatcaccatcgtcgaggaggtcgaaacactcagacaagagaggttgagcttctcgggcttacgcgcccctgtgcccgcctcagagctcctggcgtccggagtgctgagcagggcgcagttcgaacagctcaaagacggaaagaccaccgtaaaagacctcagcgagctggggtctgtccggactctgctccagggctctggatgcctggccggcatttatttagaagacaccaaggagaaagtttccatatacgaggcaatgagaaggggcctgctcagagctacaacggcagcccttctgctggaggctcaggcagctaccggctttctggtggaccctgtacgcaatcaacgtctgtatgttcatgaagcagtgaaggccggtgtggtgggtccagaactgcacgagcagctgctgtccgccgaaaaagccgtcacaggatacagagacccctacagcgggtccacaatttccctgttccaggcaatgcaaaagggattagtcctcaggcagcatggaatacgtctgctggaggctcaaatagctactggtggaatcattgatcccgtgcattcacaccgggtcccagtggatgttgcctatcagagaggttatttctccgaggagatgaacagggtgttggccgacccaagcgacgacactaagggcttctttgaccccaatacccatgaaaacctcacctatcgtcagcttctcgaacggtgtgtagaggaccccgagacggggttgagattgctgcctctgaagggcgccgaaaaagcggaggtggtggagacgactcaggtgtacaccgaagaagaaacacgtagggcgtttgaggagacccagatcgacattcctggaggaggcagtcacggcggttcaaccatgagcctctgggaggtgatgcaaagtgacctcatcccagaagagcagcgggcccagctaatggcggatttccaggctggtagagtcaccaaagaacggatgattatcattatcattgagatcatagagaagaccgagattattcgccagcaaggcttagcctcctacgattatgttaggcgcagactgactgcggaggacctgttcgaggcaagaattattagcctggaaacctacaatctccttcgggaggggacaagatccttgcgcgaggcccttgaggctgagtctgcctggtgctatctgtacggcaccggaagcgtggcaggagtgtacctgcccggatcaagacagacgctgtcgatctaccaagccctgaagaagggtttactgtcagccgaggtggcgcgactcctgttggaggctcaagccgctaccggatttctcctggatcccgtgaagggggagaggctcactgtcgatgaggcggtgcggaagggcctcgtggggccagagctccacgataggttgctgtctgcagagcgggccgtgaccggatatcgcgacccttacaccgaacaaacaatcagtctgttccaggctatgaagaaggagctgatacccacagaggaggctttaaggctcttagacgcacagttagccactggtggaattgtagatccaaggctaggtttccacttgccattagaggttgcctatcagagagggtatcttaataaagatacacacgatcaactgagcgagccaagcgaggtaaggtcttacgtggatccgtcaacggatgaacgactgtcctatacacagctgctgaggcgatgccgcagggacgacggcacaggccagctgctcttaccgttatcagacgctaggaagctgacatttaggggcttacgaaaacagattacgatggaggagctggtgagaagccaggtgatggatgaagctaccgcgctccagcttcgagaaggactcacatcaatagaggaagttaccaagaacctacaaaagttcctggaaggaacttcttgcatagctggtgtcttcgtagacgctaccaaagagcgactatcggtctaccaggcaatgaaaaaaggcatcatccgcccaggcacggcatttgagctgctggaggcccaggcggccacaggctacgtgattgatcctatcaaggggctgaagcttactgtggaggaggctgtgcggatgggcatcgtgggaccagaattcaaagacaaactgctgtcggccgagagggcagttacgggatacaaggatccatactctggcaagctcatcagtctgtttcaggccatgaaaaagggcctgatcttgaaggaccatgggatccgattactggaagcccagatagcgactggcggcatcatagatcccgaggagtcgcacaggctcccagtggaggtggcttacaagcgcggattgttcgacgaggagatgaacgagattctgacagacccttcggatgatacgaagggcttctttgaccctaacaccgaggaaaacttaacatatctgcagctcatggagcgctgtattacggacccacagacgggcctgtgtcttctgccgctcaaagaaaaaaagcgggagcggaaaacgtcttctaagtccagtgtacgcaaacggcgagttgtcatcgttgatcctgagaccggcaaggagatgtccgtgtacgaagcgtatagaaaaggtttaattgatcaccagacctacctagagctcagcgaacaggagtgcgagtgggaagaaattaccatttcctcatccgatggcgtcgtgaaatcgatgatcatcgaccggcgatccgggcgccagtacgatatcgatgatgccatcgcaaagaacttgatcgataggtcagcccttgaccagtaccgcgccggtacgctgagtattaccgaatttgctgacatgctgagtggaaatgcaggcggcttcaggagtcgttcctcgagcgttggatctagttcaagctaccctatctcgccagcagtgagcaggacacaactcgcctcatggtcagatcctaccgaggaaacgggaccagtggccggaatcctcgataccgagacgctggagaaagtgtccatcactgaggctatgcatcgaaatctagtggataacataaccggacagagactgcttgaggctcaggcctgcaccggcggaataatcgatccatctaccggcgagagatttcctgtgacggatgcagtgaataaaggcctcgttgataagataatggtagaccgcattaacctagcgcagaaggccttttgcggctttgaagatcccaggactaagactaagatgagcgccgctcaagcattgaaaaaaggatggctgtattacgaagccgggcagcgcttcctggaagtgcaatacttgaccggggggctgattgagcctgacacacccggacgggtgcccctcgacgaggcactgcagcggggtacagtggatgcccgtactgcccagaaactccgggacgtcggcgcctactccaaatatctgacttgccccaaaacaaagctcaagatcagttataaagatgcactggatcgttctatggtcgaagaggggaccggattacggttgctggaggcagcagcccaatccaccaaggggtattactccccttactcggtgtcaggcagtgggagcaccgctggcagcagaaccggctctaggacaggtagtagggccgggtccagacgaggctcttttgacgcaactggctccggattcagtatgacattttccagcagctcctattcaagttctggctatggccgcagatacgcttccgggtccagcgcgtccctgggaggccccgagtcagctgtggcatag

SEQ ID NO: 262145 - DNA, 13578 bp, Artificial Sequence
  derived and/or modified sequence
atggacccctcacgggccatccagaacgagatctcttcgctaaaagacgaacgcgatcgggtgcagaaaaaaaccttcacaaaatgggtgaataaacaccttattaaagctcagcggcatatctctgacttgtacgaggatctgcgcgacggacataacctcatctccctgctggaggtcttgagtggtgactcattgcctcgagagaaagggagaatgcggtttcacaaactccagaatgtgcagatagccttggattatctgcgacaccgacaagtcaagctggtcaatattagaaacgatgacattgccgacggtaatcctaagctgacgctgggattgatctggacgatcattctgcactttcagatttccgacattcaagtgagtggtcagtcagaggatatgacggccaaggagaagttgctgttatggtcacagcgcatggtggagggttaccagggactgcgatgcgacaactttacctccagctggagagatggcagactgtttaatgccatcattcaccggcacaagcctttactcatcgacatgaacaaggtttaccgtcagacaaacctcgagaatctcgatcaggccttcagtgtggccgaaagggatctcggcgttacccgactgcttgacccagaggatgttgacgtcccccagccggacgaaaagtcaatcataacctacgtttctagtctatacgacgcgatgccaagagtgccagacgtacaggatggagttcgggctaatgaactccagctgcgatggcaggagtatagggagttggtcctgctgctgctacagtggatgaggcaccacaccgccgcctttgaggaacggcgatttccaagcagcttcgaagagatcgagatcctctggtcccagtttctaaagtttaaagagatggagttaccagctaaggaagccgataagaaccggtccaaagggatctaccaatcactcgagggggccgtacaggcaggtcagctgaaggttccccccgggtaccaccctcttgacgtggaaaaggaatggggaaaattacatgtggccatcttggaacgggaaaagcagctccggtccgagtttgaacgcttagagtgtcttcagaggatagtgacgaaactccagatggaggcagggctgtgtgaggagcagctaaatcaggccgacgctctgctccagagtgacgttaggctgcttgccgcggggaaggtgccccaacgggccggcgaggttgaacgcgatctggataaagcagatagtatgatcaggctgcttttcaatgacgtgcagactttgaaggatggacgacacccacagggcgaacagatgtaccgtagggtgtacagattacatgagaggctggtggcaattaggaccgagtacaatctgagattgaaggccggggtggccgcccctgcaactcaagtggcccaggtgaccttgcagtcagtccagagaaggcccgaactggaggatagcacgctgaggtatctgcaagatctcctcgcgtgggtggaggaaaaccagcaccgggtggatggagccgaatggggtgtggaccttcctagtgttgaggcccagctgggcagtcatagggggctccatcagtcgattgaggaattccgagcaaaaatcgaaagggcccgctcggacgagggtcagctaagtccagctaccaggggggcctacagagactgtttaggcaggttggatctacaatacgccaaactactgaacagttccaaagccaggttgcgatccctggagtcgctgcacagtttcgtggcagccgcaactaaagaactgatgtggctgaacgaaaaagaagaagaagaagtggggtttgattggtccgataggaacacaaacatgaccgcaaagaaagagagctacagcgcccttatgcgggaactcgagctcaaggaaaagaagattaaggagttgcagaacgctggcgacagattacttcgagaggatcatcccgcaaggccaaccgtggaatcctttcaagccgccctacagacacagtggagttggatgctgcagttgtgctgctgcatagaggcccacctgaaggaaaatgctgcctacttccagttcttctccgatgtgagggaggcagagggacagctgcagaaattgcaagaggccctgcggaggaaatacagctgcgaccgttctgccactgtaacccgcctcgaagacctgcttcaggacgctcaggacgaaaaggagcagcttaatgagtacaagggacacctgagcggcctggccaagagggctaaagccgtcgtacaactaaaaccccgacacccagcccaccccatgcgcggaaggctgcctctcctggctgtctgtgactataagcaggtggaggttaccgtccacaagggcgacgagtgccagctggtgggacctgctcaaccaagtcattggaaggtgctcagttcctcgggcagcgaggccgccgttccatcagtgtgctttctggttccacccccaaaccaagaagcacaggaggctgtgacccgcctggaagcacagcaccaagctctggtaacgctttggcaccagcttcatgtcgatatgaagtctctgctggcttggcaatcactgcgccgggacgtgcaactgattcggagttggagcctggcaacatttcggactctgaagcctgaggagcagcgtcaggccctgcattcactagaacttcactatcaggccttcctgcgcgatagccaggatgcaggagggtttggtcctgaagaccgactcatggccgaaagagaatatggatcatgcagccaccattatcagcagcttcttcagtccttggaacagggggcccaggaagaatctagatgtcagcggtgcatttctgagcttaaggacatacgcttacagctggaagcctgcgaaacacgtacggtgcacaggcttcggttgccactggacaaggaaccggctagggagtgcgcccagaggatcgcggaacagcaaaaggcgcaggccgaggttgagggccttggaaaaggagtggcaagactgagcgctgaggccgagaaggtcctggcactgccagaaccttcgccagccgcgcccaccctgcgcagcgaactggagctaactctgggcaaactggagcaggttcgatcactgagtgccatctaccttgagaaactgaaaaccatcagtctggtgatcagaggcacacagggggccgaagaggtcctgagagcccacgaagagcagctgaaggaggctcaggcagtccccgcaactttaccagagttagaggcaacgaaggccagtctgaagaaactcagagcacaggctgaagcccagcagcccacttttgacgctcttcgggatgagttacgaggcgcccaagaggttggtgagagactgcagcagcgacatggggaaagagatgttgaggtcgaaagatggagggaaagagtggcgcagctgctggaaagatggcaggcagtgctggcccaaactgatgtccgtcagagggagctcgagcagctgggtagacagctgcggtactatcgtgaatctgccgatccattgggcgcatggttgcaagacgcccggcgtagacaggaacagatccaggccatgccactcgccgactcccaggctgtgcgtgagcagctgcggcaggaacaggccctcctcgaggagatagagcggcatggtgagaaggtcgaggagtgccagagattcgccaagcagtatattaatgctattaaagattacgagctgcagttggttacgtataaagcgcagctcgagcccgtcgccagtcccgccaagaaacccaaggtccagtcaggatccgagtccgtgatccaggagtatgtggacctgcgcacacactatagcgaactgactacactgacttcccaatatattaagtttatttcagagactctgagacgcatggaggaagaggaacgcctggcagagcagcaacgggccgaggagcgggaaaggttggccgaggttgaggctgcacttgaaaagcaacggcagctagccgaagcgcacgctcaggccaaagcccaagccgagcgagaagccaaggaactgcagcaaaggatgcaggaagaggtggtgaggagggaggaggccgcagtggatgcacagcagcaaaaacggtctatccaggaagagctccaacagctgcgtcagtcgagcgaggccgaaatccaagccaaggcccgccaggccgaagctgccgagcggagcaggctccgcattgaagaggaaattagggtcgtgagactccagttagaggccacggagcgacaacgaggcggcgcagaaggggagctgcaagccctgagggcgagggccgaagaggccgaagcccagaagcgccaggcgcaggaagaggcagagaggctccggaggcaagtgcaagatgagtcgcagagaaaacggcaggccgaggtcgaacttgcaagccgcgtgaaggcagaggccgaggccgcacgggaaaagcaacgggccctccaggctctggaggagttaaggctgcaagccgaagaggccgagagacgcctcaggcaggcagaggtggaacgagccaggcaggtccaggtggcactggaaaccgcacagcggagtgctgaggctgagctgcaaagcaagcgcgcaagttttgccgaaaaaaccgcacagttagagcggtccctgcaggaggagcacgtcgccgtcgctcagttgcgggaagaagcagagcgccgggctcagcaacaggccgaagcagagagggcacgtgaagaggctgagagagaactggagagatggcagttgaaagccaatgaggctctgagacttcgcctccaagcggaagaggtggcacagcaaaaaagtcttgctcaggccgaggctgagaagcagaaggaggaggcagaaagggaggctcgcaggcgaggaaaggccgaggagcaggccgtgcgccagagagaactggccgaacaggagctggagaagcaaagacaactggcagaagggacggctcagcagcgtcttgccgcagaacaggagctaatcagactgagggccgaaactgaacagggagagcagcagcgacagctgctggaagaggagctggcccggttgcaacgcgaagccgccgccgccactcaaaagcgacaagagcttgaagccgagctggccaaggtcagggcagagatggaggtactgttagctagtaaagctcgggccgaggaggagtctaggtcaactagcgaaaagtctaagcaaaggcttgaggcagaggcagggcggtttcgggagctggctgaggaagccgcgaggctgagagccctggccgaggaagcaaaacggcaacgccaactagccgaagaggatgcggcacggcagcgagcggaggccgagcgggtgttggcggagaagctcgccgcaatcggcgaggctacacgactaaagaccgaagctgagatagcgctgaaggaaaaggaggccgagaacgagcgacttagaaggcttgcagaagacgaggccttccagcggcggcgcctggaagagcaagcagctcagcataaagcagatatagaggaaaggttggcccagcttcggaaggccagtgacagcgaactggagcgccagaaggggttagtggaagatacactgaggcagaggagacaggtggaggaagagatactcgctctcaaagcctcctttgagaaggctgcagcggggaaagcagagcttgaactagaactgggcaggattagatcaaacgctgaagacaccctgaggtcaaaggagcaggccgagctcgaagccgccagacaacgacagctggcagctgaggaggagcggagaaggcgcgaggccgaggagcgcgtgcagaaatcacttgccgccgaggaggaagcagcccgtcagagaaaagctgctctagaagaagtagagagactgaaagccaaggtcgaagaagcgcgccggctccgggaaagggcagagcaggaatcagcacgccagctgcagctggcgcaggaggccgcgcagaagcgccttcaggctgaggagaaagcccacgcatttgccgtccagcagaaagagcaggagctccagcaaacactccagcaggagcaaagcgtcctggaccaactgcgaggcgaagcagaggccgctagacgcgcggccgaggaggcagaggaggcaagagtgcaggcagagagggaggcagctcagtccagaaggcaggtagaggaagccgagaggctaaagcagtcggctgaggagcaagctcaggcacgtgctcaggctcaagctgcggctgagaagctgagaaaggaggcagaacaggaagctgcgcgtagagcccaagctgagcaagcggcgctacgtcagaagcaggctgccgatgccgaaatggaaaagcacaagaagtttgccgagcagactctgaggcagaaggcccaggtcgagcaggagctcacaacactgagactacagctggaggagacagatcatcaaaaaaacctccttgatgaagaacttcagcggctgaaggccgaggccaccgaggccgcacggcagcgcagccaggtggaagaggaactgtttagcgttcgagtgcagatggaggaactttcgaaactgaaagctcgaatcgaagcggaaaatcgcgctctgattctgagggacaaagataatacacaacggtttctccaggaagaggccgaaaagatgaagcaagtagcagaagaggccgccagactgtccgtcgcagcacaggaggcagcgagattgcgtcaacttgccgaggaagatctggctcagcagagagcactagcagagaagatgctgaaggagaagatgcaggcagtgcaggaagccaccagactaaaggctgaagccgagttactccaacaacagaaagagttagctcaggagcaagcaagaaggcttcaagaggataaagaacaaatggcccaacagttggcggaagagacacagggcttccagcggactctcgaggccgaaagacagagacaactcgagatgtctgccgaggctgagagattgaaactgcgtgtcgccgagatgagccgcgcacaggctcgggccgaagaggacgctcagagattccgtaaacaagccgaggaaattggtgaaaagctgcatcggaccgaattggctacacaggagaaggtcaccctggtccaaacattagagatccaaaggcagcaatctgatcatgacgcagaaaggctacgggaggccatcgctgaactagagcgggagaaggaaaaactgcagcaggaggcaaagctactccaactgaagtcggaggagatgcagacagtccagcaagagcagctccttcaggagactcaagccctccagcagtctttcctatccgaaaaagatagcctgttacagcgcgaaaggttcatcgagcaggagaaagcaaaactcgaacagttgttccaagacgaagttgcaaaggcccagcagctgagggaggaacagcaacgacaacaacagcagatggaacaggagagacagaggcttgtagcttccatggaggaagctcgcagaagacaacacgaggcagaagaaggggtccggcggaaacaggaagagttgcagcagttagaacagcaacgaagacaacaggaagagctcctcgccgaggaaaaccagcggcttagagagcagctgcagttactggaagagcagcatagggcagccctcgcgcattccgaggaggttacagcgtcccaggttgctgccacgaaaacactgcctaatggacgggacgccctcgacgggcccgcagcagaggccgagccagagcatagctttgatggcctccgacgcaaagtgagcgcacagcgactccaggaagccggtatcctctctgcggaggagcttcagagacttgcccaagggcacaccacagtggacgaacttgcaaggcgtgaggatgtccgacattatctgcaggggcgttcctccatcgccggtcttctactgaaggctactaatgaaaaactgtcagtttacgcggccttgcaaaggcaacttctttcaccagggactgcactgatcctgctcgaagctcaagccgctagcgggtttctgctggaccccgtcaggaataggagacttaccgttaacgaagcagtgaaggaaggtgtggtcggtccagagttacatcacaagctgttatccgccgaacgtgccgtgacagggtataaggatccttacactgggcagcaaattagtctttttcaggcaatgcaaaagggccttatcgtacgggagcacgggataagattgttagaagctcagattgccacaggaggcgtaattgacccagtccactctcatagggtccctgtcgatgtagcatatagacgggggtactttgacgaagagatgaaccgggtactggcggacccgtccgatgataccaagggcttttttgatcccaatacacacgagaacctgacatacctccaactcctggagcgatgtgtggaagatcctgagactggactgtgcctgttgccattgacagataaagctgccaagggcggagaactggtttataccgactcagaggcccgtgatgtttttgaaaaagccaccgtgtccgcgccattcgggaaattccaggggaaaacggtcaccatatgggagattatcaatagcgagtattttaccgcagaacagcgccgggacttgctgagacagttcagaacaggtaggattactgtggaaaagattattaagataataatcaccgtcgtggaagagcaggaacaaaagggacggctttgttttgaaggcctgcggtccctggtccctgccgccgagctacttgagtcccgggtcattgacagggaactctatcagcaactgcagcggggagagcggtccgtacgtgatgttgcggaggtagacactgtgaggcgagctctcaggggggctaatgttatcgcaggagtgtggctcgaggaagcgggccaaaagctgtcaatatataatgcactcaagaaagatctcttaccatccgatatggccgtggcccttctagaagcccaggctggaaccggccatattatcgatcctgcaacctcagccagactgacagtcgatgaggctgtgcgggccggtctcgtcggccccgagttccatgaaaaactactgtcggcggaaaaggccgtgactggctacagagacccctatactggccagagcgtatctctgtttcaagccttaaaaaaaggcctgatacctcgagaacagggactccgcctgctcgacgcccagctctccacggggggaattgtagacccttctaaatctcaccgcgtgcctctcgatgtcgcttgcgcaagagggtgcttagacgaggaaacctcaagggcattgagcgcgccccgggccgacgccaaggcttacagtgatccgagtaccggggagccagccacatatggggaactgcagcagagatgtagacctgaccaacttactggcctgagcttgctgcccttgtccgagaaggccgcccgcgctcggcaagaagagttgtattccgaactccaggcgcgggagacttttgaaaagactcctgttgaggttcccgtggggggatttaagggtcgcactgtaaccgtgtgggagctcatctcctctgagtacttcactgccgaacaacgacaggaactccttagacaatttaggactggaaaagtcaccgtagagaaggttatcaaaatcctaatcacgatcgttgaagaggttgagactctaagacaagaacgtctttcgtttagtggtctgcgcgcccctgttcctgcttcagagctgctggctagtggcgtcctgagccgtgcccaattcgagcagctgaaggatggcaaaactactgtgaaagatctctcagagctcggatcagtgcgaacactcctgcagggttccgggtgtctggccggtatctacctggaggacacgaaagagaaagtgtctatttatgaagcgatgcgtcgcgggcttttacgtgcgaccacagccgcccttctgcttgaagcccaagccgccacagggttcctcgtggaccccgtccggaatcaacggctctacgtccacgaggccgtgaaggccggggtggttggtcccgaactccatgaacaactgctgtcagctgagaaggccgtaacaggctacagggatccatatagcgggagcacaatttcactgtttcaagccatgcagaaggggctcgtgttgcggcaacacggtatcaggctgttagaggctcagatcgccaccggtgggattatcgaccccgtgcattcccatagagtgccggtggacgtggcttaccagcgtggttactttagcgaagagatgaatagagtgctagctgacccctccgacgacacgaaaggattttttgatccaaacacgcacgagaacttgacttatcggcagctgctggaacgatgtgtcgaggatcccgagactgggttgagacttcttccactcaagggggcggagaaggcagaggtcgtcgagacaactcaggtgtataccgaagaggagactcggcgggcattcgaagagacacagattgacatcccagggggcgggtctcacggcgggtcgacaatgagtctctgggaggtcatgcaatcagacctaattccagaggaacagagggcccagctgatggcagactttcaggccggccgagtgaccaaagaacggatgattatcatcatcatcgagatcattgagaaaacagagatcatccgacaacaggggttagctagttacgactacgtgagacggcgcctgacggccgaggacctgttcgaggcacgaataataagcctagaaacatacaatctcctaagggagggcacccggagccttcgggaagctctggaagcggagtcagcctggtgttacctgtatggtactggctcagttgcgggcgtgtacttgcccgggtcccggcagacgctttctatctatcaagccttgaaaaagggtctccttagtgccgaagttgcccgtctgctgctggaagcacaggccgcaacaggcttcttgctggatcctgtgaaaggagagcggctgacagtcgatgaggcagtcaggaagggcctggtcggccccgagctgcacgacaggttactgtctgcagaacgagctgtgacaggctacagggacccttataccgaacagactattagtttgttccaggcaatgaaaaaggagctcatccctacggaggaagcgctcagattgctggacgcccagctggctaccggcggcatcgtcgatcctaggttggggttccatctgccactggaggtggcatatcaaaggggctacctcaacaaggacacccacgaccagttatccgagccatctgaggtccgatcttacgttgatccgagcaccgatgagcgcctgtcatacacacagcttctgcgaaggtgtagacgggatgacggtaccgggcaattgttattgcctttgtccgatgcacggaaactgacatttcggggcctgcgcaagcaaatcaccatggaggagcttgtgagaagtcaggtcatggatgaagccactgctctccaattgcgggagggactgacatctattgaggaagtgactaaaaatcttcagaagttcttagagggtacatcatgtatcgccggagtttttgtcgacgccacaaaagagcgactatctgtgtaccaagctatgaagaaaggcatcatcagacctggtactgcatttgagcttcttgaggcccaggccgcaactggctacgtgatagacccaatcaagggtctcaaattaacagttgaggaggctgtgcggatgggcatcgtcgggcccgagttcaaagacaaactgctgtccgcagagcgcgctgtaacaggttacaaagatccgtacagtggcaaattgatttcgctctttcaggcaatgaaaaaggggctgattctgaaggaccatggaatacgcctcttggaggctcagattgctaccggaggaatcattgatccggaagagtctcacagactcccagtagaggtggcctacaagcgggggctgtttgatgaagagatgaatgagatcttaaccgaccctagcgatgacacgaaaggcttttttgatcccaatacagaagagaatcttacatatcttcagctgatggaacgctgtatcaccgacccacagactggcctatgccttcttcccttaaaagaaaaaaaaagggaacggaaaacttccagcaaatcatctgttaggaaaagacgcgtcgtgatagtggacccagagacaggaaaggaaatgtccgtgtatgaagcctacagaaagggtctcatcgaccaccagacctacctggaattaagtgaacaggagtgcgagtgggaagaaatcaccattagtagctctgatggagtcgtcaagtccatgatcatcgacagaagaagcgggcgccagtatgatatcgatgatgccatcgccaaaaaccttattgacaggtctgcattagatcagtatcgggccggtacacttagcatcaccgagttcgctgatatgctgagtggcaacgctggaggctttcgctctcgcagttccagcgtggggtcctcttcttcatatccaatctcccccgccgtcagccggacacagctggcatcatggagcgaccccaccgaggagaccggccccgtcgctggcattctcgacaccgaaactctggagaaagtgagcatcaccgaggcaatgcatcgaaacctcgtggataacatcacaggacaacgacttctggaggctcaagcttgtaccggtggcattattgatccctccacaggtgagcgcttccccgttacagacgccgtgaataaaggcttggtcgacaagataatggtggaccgtataaacctagctcagaaagctttctgtggctttgaagacccgcgaactaagaccaaaatgtctgcagctcaggcccttaaaaaaggctggttgtattatgaggctggccagaggttcctggaggtccagtatcttacaggaggtctgatcgagcctgacacgcctggtcgggtgcctctcgacgaagcccttcagcggggaaccgtggatgcccggaccgctcaaaagctgcgcgatgtcggagcatattctaagtacctgacctgcccaaagaccaagctgaagatatcctacaaagatgccctagatagaagcatggtggaggaaggcactggtctccgacttctcgaagccgccgcccagtctactaaagggtactacagtccttactcagtttcgggcagtgggtcaacagcgggatcaagaacagggtcgcgcactggttcccgggcagggtcaaggcgcggctctttcgatgccacaggctcggggtttagtatgaccttcagttccagttcctactcgtccagcggctacggcagacgctatgcctctggatcatcggcctccttgggtgggcctgaaagcgccgtggcatag

SEQ ID NO: 262146 - DNA, 13602 bp, Artificial Sequence
  derived and/or modified sequence
atggccggccccctccctgacgagcaggacttcatccaggcctatgaggaagtgcgcgaaaagtataaggacgagagggaccgtgttcagaaaaagacgtttaccaagtgggtgaataaacacctcatcaaagcccagagacacatctccgatctgtacgaggaccttcgagacggccacaacttgatcagcctgctggaggttctgagtggggacagcctccccagagagaaaggaagaatgaggttccataaactccagaatgtccaaattgccctggactatctccgccaccgccaggtgaagttagtgaacatccggaacgatgatattgccgatgggaaccccaaactaacacttggcctcatttggaccattatcttgcatttccaaatatccgacatccaggtttccggtcagagtgaagacatgactgctaaggagaagctcctgttgtggtctcaacgaatggtggaagggtaccagggcctgcggtgcgataatttcacaagtagctggcgggatgggcggttgtttaacgcaataatccacaggcacaagccactgctgattgacatgaacaaagtctataggcagacaaatctagaaaaccttgatcaggcgttcagcgttgcagaacgtgaccttggagtcactcgactcctggatcccgaggacgtggatgtcccgcagccggacgagaagtccattatcacttacgtgtcctccttatatgacgcaatgccccgggtgccggatgtgcaagatggtgtgcgggctaacgagttgcagttacggtggcaagaataccgggaactggttcttctgctgctgcagtggatgcgccatcacaccgcggcctttgaggagaggcgtttcccatcctccttcgaggagatcgagattctttggtcccaatttcttaaattcaaggagatggagctgccagctaaagaggcagataaaaacaggtcaaagggaatctatcagtcactagaaggagctgtccaggccggccagttgaaagtgcctcctggttaccaccctctggacgtggagaaggaatggggcaaactgcacgtagcgatcttggaacgcgaaaagcagctaagatctgagttcgaacggttggaatgtttgcagcggatagtcaccaagctgcagatggaggccgggctctgcgaggagcagcttaatcaggcagacgcgctgttgcaaagcgacgtaaggttgcttgccgctgggaaggtgccccagcgcgcaggagaggtggagagggacttggataaggccgactctatgattcgcctgctgtttaacgacgtgcagactttgaaggacggccgccaccctcaaggggaacagatgtataggcgtgtttacagacttcacgagcgtctggtcgctatcaggaccgagtacaatttgcgacttaaagctggcgtggcagctcccgccacccaggtggcccaggtgactttgcagagcgttcagcgccggcctgaactggaagattctacgctccgctacctgcaagacctgcttgcttgggttgaggagaatcagcacagggtcgacggagccgaatggggggtggacctgccatccgtagaagcccagttggggtcgcatcgtggactccaccagtccatcgaagagtttcgcgcaaagatagaaagggctaggagtgatgaggggcagctgtccccagcaacccggggggcttatagagattgtctgggacgactcgatttgcaatacgcgaagttgctgaacagtagtaaggccagactcagaagtctggagtctctccacagctttgtagcagcagccacaaaggaattaatgtggctcaacgagaaggaggaggaggaggtcgggttcgattggtccgatcgcaatacgaacatgacggccaagaaggaaagctacagcgctctgatgagggagctagaactgaaggagaaaaagattaaagaacttcagaatgccggggaccgcctacttagagaggatcaccctgctaggcccacagtggagtcttttcaggcagcgctgcagactcaatggtcctggatgctgcagctttgctgctgtatagaagcccacctgaaggagaatgcggcctacttccagtttttcagcgatgtaagagaggcagaggggcagctgcagaagctgcaagaggcattgagacgcaagtattcttgtgaccggtcagctacagtcactaggctggaggatctgttgcaggacgcacaggatgagaaagagcaattgaacgaatacaagggacatctgagtggactcgctaagcgtgcgaaggcggttgtccagcttaagccacgacatcctgctcatcctatgcggggaaggctcccactcctggctgtttgtgactacaaacaggttgaggttaccgtgcataagggtgacgagtgtcaattggtgggcccggcacagccttctcattggaaggtgctcagcagttcaggtagcgaggcagctgttccatccgtgtgcttcctagtgccaccccccaaccaagaggcccaagaggccgtgaccaggctcgaggcacaacatcaagctttggtgactctgtggcatcagcttcacgtcgatatgaagtctcttcttgcctggcagtccctgcggcgagatgtgcagctgatcagatcctggtccctcgcaacttttcgcactctcaaacctgaagagcagaggcaggcccttcatagccttgaattgcactatcaggctttccttagggattctcaggatgccggtggatttgggcctgaagatcgtcttatggccgaacgggaatatggctcttgctcccaccattatcagcagctgctgcagagtctggagcagggtgcccaagaggaatcacgttgccagcgttgcatttcagaattaaaggacatccggctccagttggaagcatgcgagactcgcactgtgcatagactgcggctaccattggacaaagaacccgctcgcgagtgtgcacagaggatcgccgagcagcagaaagctcaggccgaggtggaggggttgggcaaaggagtagcccggctcagtgctgaggccgaaaaggtcctggctttgccagaaccttcaccagccgccccgacactgaggtcggaattagagcttaccctgggaaaactggaacaagtgcgctcccttagtgccatctatctagaaaagctaaagacaatatctctggtaattcgcggtacacagggcgcagaggaggtgctgagggcacatgaggagcagctcaaggaagcacaggccgtgcccgccacactgcctgaactggaagcaaccaaggcatcgcttaaaaagctgcgcgcccaagcggaggcgcagcagcctacttttgatgcccttagggacgaactgcgtggagcacaggaggtgggcgagaggctgcagcagagacacggggagcgggacgtggaggtggaaaggtggcgggaaagggttgcacaactgctcgaacggtggcaggcagttcttgctcaaaccgacgtgaggcagagggagctggaacaactgggccggcagttacggtactatcgggagagcgccgacccactgggtgcctggctccaagatgcaaggcgcagacaggagcagattcaggccatgccgcttgctgacagtcaggccgtacgggagcaattaagacaagaacaagcgttactggaagagattgaaaggcacggtgaaaaggttgaggagtgtcagagattcgctaagcaatacataaacgccatcaaagattatgaactgcagctggtcacctacaaggcacagcttgagcctgtggcttcccccgccaagaagcctaaagtgcaatcagggtctgagtcagtcatacaggaatacgttgacttgagaactcattactccgaactgacaacgctaaccagccagtatatcaaattcatttctgagaccctacgaagaatggaggaggaggagcgcctcgctgaacagcaacgcgcagaagaacgggagagactcgcagaagtcgaagctgccctagagaagcagcgacagctggctgaggcacatgctcaggctaaggcgcaggccgagagggaggctaaagaattgcaacagcgtatgcaggaggaggttgtgcggcgcgaggaggccgctgtggacgctcagcagcaaaaacgaagtatacaggaagagctgcagcagctgagacagtcgtccgaggctgagattcaggccaaagctcgccaggctgaggcagctgagcgctctcgtctgcgtatcgaagaagaaatcagggttgtgcggctgcaattggaggcaaccgagcgtcaacggggaggagccgaaggagaacttcaggccctccgggccagggctgaggaagcagaggcacagaagcgacaggcccaggaggaggcggaacgattacgccgtcaagtgcaggacgagtcacagcgaaagagacaggccgaagtggaacttgccagccgcgttaaggctgaggctgaggccgcccgggagaaacagcgggcactgcaggccttggaagaactgaggctccaggcagaggaagccgagagacggttgaggcaggctgaggtggagcgggctcggcaggtccaggtggccctggagacagcgcagcgcagcgccgaggccgaactccagtccaaacgcgcttctttcgctgagaaaactgctcagctggagagatctctgcaggaggagcacgtcgctgttgcacagctgagggaagaggccgagcggagggcgcagcaacaagcagaagcagaacgggccagggaggaggcggagcgagagctggagaggtggcaactcaaggccaacgaggctctcagattgcgccttcaggccgaggaggtcgctcagcagaagagcctcgcgcaggctgaagccgagaagcagaaggaagaagccgaacgtgaggcacgcaggaggggaaaggcggaggaacaggcagtgagacagcgcgaactggccgaacaagaactcgaaaagcagcggcaactggcagaagggaccgcccagcagcggcttgcggctgaacaagagcttattaggctgcgggcagagaccgagcagggggagcagcagaggcagcttctcgaggaggaactcgcccgcctgcaaagggaggctgctgccgcaactcagaagaggcaggaattggaagctgaactcgccaaagtccgtgccgagatggaagtcctgctagcctctaaggcccgcgccgaggaagaatcgcgaagtacatctgaaaaatccaaacagaggctcgaagcggaagccgggagatttagggaacttgctgaggaggctgcacggctacgcgcattggctgaagaggcaaaaagacagcgtcagcttgccgaagaagatgccgctagacagagagctgaggcggaacgagtactcgctgaaaaactggcggccatcggagaggccacacggcttaaaactgaagccgaaattgcactaaaggaaaaggaagcagagaatgaacgtctgcggcgcttggcggaagacgaagccttccaacggaggagactggaggagcaggcagcacagcacaaagcagacattgaagaaagactcgcccagctcaggaaggcctctgacagcgaactggagcgacagaaaggactggtggaagataccctaagacaacggcggcaggtcgaggaagagatcttggccctgaaggcatcattcgaaaaggctgccgctggaaaggccgaactggagctcgaactgggcagaatccggagtaatgcggaagatactctacggagtaaggagcaggccgaacttgaggccgcgcggcagaggcagctggccgcagaagaagaacgacgtcggagagaggcagaagagagggtccagaaatcactggcagcggaggaggaggcagccagacaaaggaaagccgcccttgaggaagttgagcgacttaaggcgaaagttgaagaggcccgaagactgcgcgaaagggctgagcaggaaagtgcccgacagttacagctggcccaggaagccgcccagaaacgcctgcaggccgaagagaaggcccatgctttcgcggttcaacagaaagagcaggagctccagcagaccctccagcaggagcagtccgtgctggatcaattgcggggcgaagccgaagccgcgcgaagggctgccgaggaggcggaagaggctagagtacaggccgagagagaagccgctcagtcccggaggcaggtagaggaggccgagcgtctgaagcagtcggctgaggagcaagcacaggcgcgggctcaggcccaagcagcggcagaaaaacttaggaaggaagctgaacaggaagcggcacgacgcgctcaagccgagcaggccgccctgcgccagaagcaggcggcagatgctgaaatggaaaaacacaagaaatttgcggagcaaacactgcgccagaaggcgcaggtggagcaggaattgactactctgcgtcttcagctcgaagaaaccgatcaccagaagaatctccttgatgaggaactgcaacgcctgaaggccgaagccacagaagctgctcggcagcgcagtcaggtcgaagaagagttgtttagcgtgagggtgcagatggaggagttgtctaaattgaaggcgagaatcgaggctgaaaaccgcgcattaattctgagagataaggataatactcagagattcttgcaggaggaggctgaaaagatgaagcaggttgccgaggaagctgcccgcctttccgtagcagcacaggaagccgcccgtctacgacaattggccgaggaagatctcgcccagcagcgcgccctggctgaaaagatgctgaaagagaagatgcaggccgtccaggaggccaccagactcaaagccgaggccgaattgctgcagcaacagaaggagctggcccaggaacaggctagaagactacaggaagataaagagcagatggcgcagcagttagctgaggagacccagggttttcagcggacacttgaggcagagcggcagaggcagctagaaatgtctgcagaggctgaaaggttgaagctgcgtgttgcagagatgtcccgggcacaggctagagccgaagaagacgctcagcgctttaggaaacaggccgaggaaatcggcgagaaactgcaccggacagagctcgcgacccaggaaaaggttacgctggttcaaactctcgaaatccagaggcaacaatcagatcatgatgctgagcgcctgcgagaagctattgcggaactcgaacgggagaaagaaaaactgcagcaggaggcaaagctgttgcagttaaagtccgaggagatgcagaccgtacagcaggaacagttgctccaggaaacgcaggccctgcaacaaagctttctgtccgaaaaggactccctcctgcagcgggaacgcttcattgagcaggagaaagcgaagctcgagcagctgttccaagatgaggtggctaaagctcagcaattacgtgaagaacagcagagacagcagcaacagatggagcaggagagacagcgcctagtggccagcatggaggaggcacgacgtcgccagcacgaagcggaagaaggtgttcgacgaaagcaggaggagcttcagcagcttgagcagcagcgtcggcagcaggaggagctcttggccgaggaaaaccagagactgcgtgagcagcttcaactgttagaagagcagcaccgagccgcacttgcccacagcgaagaagtgacagcaagccaagttgccgccacaaaaacactgcccaacggccgcgacgccctggacggaccagctgccgaggcggaaccagagcattcattcgatggcctccgtcggaaggtgtctgcccagaggctgcaggaagccggcattctgtccgcagaggaactgcaacgcctggctcaaggacacaccactgtggatgagctggctcgcagagaggatgtccggcactatcttcagggaagatcctctattgcaggcctcctgctcaaggcgactaacgagaagctcagtgtctacgcggccttgcaacgccagctgctttcacctggaacagcccttatcttgctagaggcacaggcggcgagcggctttcttctggaccctgttcggaataggcgtctgacagtaaatgaagccgtcaaagaaggcgttgtgggacccgagctccatcacaaactactgtcagccgagcgggcagtcacaggatataaagacccatatacagggcagcagatttccctgttccaggccatgcagaagggactgatcgtcagagagcatgggattcggttgttggaggctcagatagcgaccggaggcgtcatcgatcccgtgcattcccatcgggtgcccgtcgacgtggcctatagaagaggttactttgacgaggagatgaatagagtgctggctgacccgtcagatgatacaaagggattcttcgatcccaatacccatgagaacctgacatacttgcaattacttgagaggtgcgtggaggatcccgaaaccgggctctgtctgcttcccctgaccgacaaagccgcgaagggcggagagctggtatatacagactcagaggccagggacgtgtttgagaaagcaaccgtatcggctccattcggaaagtttcaggggaagactgtgaccatctgggagattataaacagcgagtatttcaccgcagagcagaggagggacctgctgcggcagttccgcacaggacgcattactgtcgagaaaattataaaaattatcatcaccgtggtggaagagcaggaacagaaaggtcgcctgtgctttgaggggctcaggagcctcgtacccgccgctgaactgctggagagccgggtcattgacagggaactgtaccaacaactccaacggggggagcgaagcgtgagggatgtggccgaggtggacacggtgagacgggccctgaggggcgcaaacgtaattgcgggtgtttggctggaggaagctggccagaaattgagtatttataatgccttaaagaaagatctgcttccctctgatatggctgtcgcactgctagaggcgcaggccggtaccggtcacatcatcgacccagccacctctgcgagactgaccgtagacgaggccgtcagagctgggctggtcggtcccgagtttcatgaaaaattgctgtccgctgaaaaagccgtgacaggatatcgtgacccgtatactgggcagtccgtgagtctttttcaggctctgaagaagggcctgatccctcgggagcaagggttgcggctgcttgacgcccagctcagcaccggaggtattgtggaccctagtaaaagtcatcgagtgcctctcgatgtggcgtgtgccaggggctgcctggatgaggagacttccagggcactaagcgccccgcgcgccgacgccaaggcttattctgaccccagtactggggaacctgccacctacggagagctccagcagaggtgccggcccgatcagctcaccggattgtcgctgctccctcttagcgaaaaagctgctcgagcccggcaggaagagctttacagcgaattgcaggctagggaaacctttgaaaagacacccgtagaggtccctgtgggagggtttaaaggacgaaccgttaccgtctgggaactgatatcaagcgaatactttaccgcagagcaacggcaggaacttcttagacagttccgtacaggaaaggtgacagtggaaaaggtcatcaagatcctgatcacaatcgttgaggaagtcgagacactgaggcaagagcgcctgagcttcagtggactgagagccccagtgcctgcttcggaactgctcgctagtggagtgttgtcccgtgcccaattcgagcaactgaaggatggcaagaccaccgtgaaggacctatccgagctcggatcagtccggaccctattacaaggatccggctgcttggctggaatctatctggaagatacgaaagagaaggtgtccatctacgaggctatgcgccgcggcctccttagggctaccacagcagctctgctcctggaagcccaggccgctactgggttcctggtcgatccagttcgaaaccaacgcctctatgtgcacgaggctgtgaaggcaggcgtcgtcgggcccgaactgcacgaacagctgcttagcgcagaaaaagccgttacgggctatagggacccctatagtggttccacaatcagtctcttccaggctatgcagaagggccttgtgcttcgacagcatgggatcagactgctggaagctcaaattgccactggggggatcattgatccagtgcacagtcatcgtgtccctgtggatgttgcgtatcagcgcgggtatttttccgaagagatgaacagagtcttagcagatccctccgatgacacaaagggcttctttgacccgaatacccatgagaatctcacctaccgtcaattattagagcgctgtgtcgaagacccagagaccggacttagactgctgcctttaaaaggggccgaaaaggcagaggtagtggaaaccacccaggtgtacacagaggaggaaacaagacgcgcattcgaagagactcaaattgatatcccaggaggaggatcccatggaggatccactatgtcgctgtgggaagtcatgcagagcgatctgatacctgaagagcagcgtgctcagttgatggctgactttcaggcgggaagagttaccaaagaacgtatgatcattattatcatcgaaattatagagaagactgagatcattcgtcagcaagggcttgccagttacgattacgttcggagacggttgaccgcagaagaccttttcgaggcaaggatcatatcgctggagacttacaacctcctgagagaggggacacggtcactcagggaggccctggaggcagagagcgcctggtgctacctctatggtactggctcggtggccggagtctacctccccgggagtaggcagacactgtcgatctaccaagcgctgaagaagggtctgctgtctgccgaggttgcgcgattgttgttggaggcccaggcagccacgggttttctcctcgatccagtgaagggcgaacggctgaccgtagatgaggcggttcgcaaagggctggtcggaccagaactccatgaccgcctgctttctgccgagagggcggtgacgggataccgcgatccatacaccgaacagaccataagtctcttccaggccatgaagaaggagctcatcccaacagaggaagcattacgcctccttgacgctcagctcgccacaggcgggatcgtggatccccggctgggttttcacctgcccctggaggtggcctatcagagaggttacctcaataaagacactcatgatcagctgtctgagcccagtgaagtaaggtcctacgtagaccctagcaccgacgagcgtctgagttacactcagcttcttcgccgctgcaggcgggacgatggaactggtcaactccttctgcccctatccgatgcccggaagctgacttttcgcgggttgagaaagcagatcacgatggaagaactggtgcgcagtcaggtcatggacgaagcaacggcgctgcaactgagagaagggttaaccagcattgaagaggtgacaaagaaccttcaaaaattcctcgaaggaacatcctgcatagccggggtgtttgtggacgcgaccaaagaacggctaagtgtctaccaggcaatgaagaagggaatcatcaggccaggaactgctttcgaacttcttgaagcccaggcagccacaggctacgttattgatcctatcaaggggctcaaacttacagtggaggaggccgtacgcatgggcatcgtcggacctgagtttaaggacaagctgctgtcagctgagcgagctgtgacaggctataaggatccgtacagcggaaagctgatctccctctttcaagccatgaagaagggtctgatcctgaaggaccatggcattcggcttctggaggctcaaatagcaaccgggggcattatcgaccccgaagagagtcacagactacctgtcgaagtggcatacaaaaggggccttttcgatgaagaaatgaatgaaatcctgacagacccatctgatgatactaagggcttctttgaccccaacacagaagaaaacttaacatacttacagttgatggaacgctgtatcactgaccctcagacgggactgtgtctactgcctctcaaagagaaaaagcgagaaagaaagacctcttctaagtcctcggttcgcaaaaggcgggtagtgatagtcgatcccgaaacaggtaaagaaatgagtgtgtatgaggcttataggaagggcttgatcgaccaccagacatacctggagctgtctgagcaagagtgcgagtgggaagagattactatcagctctagtgacggagtggtcaagtccatgattatcgatcgtcggagtggccgccaatatgatatcgacgacgccatagctaaaaacctcattgatcgatcagcactggatcagtacagagccggtacgctaagcatcacggaattcgccgacatgctcagcgggaacgcgggcggctttcgaagtcggtcttcctcagtgggctctagctcctcctaccctatatctcccgcagtctccaggactcagcttgcttcatggtctgaccctaccgaggagacaggccctgtggcagggattctcgacactgagactttggaaaaagtcagtattaccgaggcaatgcacagaaatctggtggacaatattaccggacagaggctgctcgaggctcaagcctgtacgggcgggatcatcgacccaagcactggtgagcggttccctgtcacagatgctgtaaacaaggggctggtggacaagatcatggtcgatcggatcaatttggcccaaaaagctttctgtggcttcgaagatcctcggaccaaaaccaagatgtcggcagctcaagccttgaagaagggctggctttattacgaggcggggcagaggtttctggaagtgcagtatttgactggcgggctgatcgagcccgacactccaggccgggtaccactcgatgaagcattgcagcgggggacggtcgacgcacgcaccgcccaaaaactccgtgatgtcggcgcatacagtaagtatctcacatgtcctaaaacgaagttgaaaatttcgtataaggacgctcttgaccggtctatggttgaggaaggcacaggtctgaggctcttagaagctgccgctcagtccaccaagggatattactctccctactccgtatccgggagtggctcgacggcaggttctagaaccggatcgaggaccggaagcagagctggttccaggcggggcagcttcgacgccactggatctggcttcagcatgacattctctagttcctcatactcctcgtcaggatacggtcgaagatatgcctctggcagctcagcttcactcgggggcccagagtccgcagtggcatag

SEQ ID NO: 262147 - DNA, 13656 bp, Artificial Sequence
  derived and/or modified sequence
atgtcaggagccggcggagcattcgctagccctcgcgaagtgctgctggaaaggccctgctggttagacgggggttgtgaacctgcccgcagaggatatctataccagcagctgtgttgtgttgatgaacgagatcgcgttcaaaaaaaaacctttaccaagtgggttaataagcacctgattaaggcgcagcgccacatttccgatctctacgaagatctccgtgatggacacaatctcatttccctgctggaagttttgagtggagatagcctcccgcgcgagaaggggcgaatgcgctttcacaagctgcaaaacgttcaaatagctctcgattaccttcgtcatagacaggtgaagctggttaatatccgcaatgacgacattgcagacgggaatccgaaactaacacttgggttgatctggaccattattctgcacttccagatatccgacatccaggtgagtgggcagtccgaagacatgacagccaaggaaaaactcctcctctggtcgcagcgcatggttgaaggctatcaggggctgaggtgtgataactttacatcttcttggcgcgatggcagattattcaacgctattatccaccgccataagcccctcctaatcgatatgaataaagtttacaggcagaccaacctagagaatttggatcaggcttttagtgtcgcagagagggatttgggtgtcactcggctcctcgatccagaggacgtcgatgtccctcagcccgatgagaagtccatcattacgtacgtcagcagcctctatgacgcgatgccgcgcgtccccgatgtgcaggacggcgtcagagccaatgaacttcagctcagatggcaggagtatagagagctggttttgctgcttctgcagtggatgcggcaccacacggctgcttttgaagagaggagatttccgtcaagttttgaggagatagaaatcctgtggagtcagtttctcaagttcaaggagatggagttacctgctaaggaggctgacaagaaccggtccaaaggcatttaccagagtttagagggcgccgtccaggccgggcagttgaaggtgcctcccggataccaccccctcgatgttgagaaagagtgggggaaactgcacgttgccattttggaacgcgagaaacagctacgctccgagtttgagcgactggaatgcctgcagcggatagtcaccaaactgcaaatggaggccggcctgtgcgaggagcaacttaaccaggcagacgccctgctgcaaagcgatgtgagactcctcgccgcagggaaggtgccccagcgggcgggggaggtggaaagagatctggacaaggctgactccatgatcagattgctctttaatgatgttcagacgttgaaagacggccggcacccacagggggagcagatgtaccggcgagtgtatcgactacacgagaggttggttgccattcgaaccgaatacaatctccggctgaaggcaggagtggccgcaccagccacacaggtggcacaagtgaccctccagtccgtgcagagaagacctgagctggaagactccaccctcaggtacctgcaggacctgttggcttgggtggaagaaaaccagcatcgtgtggacggcgccgaatggggagtcgacctgccttccgtggaggctcaactgggatcccaccgaggcttgcatcagagcattgaagaattccgcgccaagattgagagggcccgcagcgatgaaggacagctgtcacctgctactagaggagcttatcgagattgcctgggcagactcgacctgcaatatgcgaaattgctaaattcatccaaggcccgtctgaggtctctagagtctttacactcgttcgttgcagccgccacaaaagagctcatgtggctcaatgagaaggaagaagaggaagtcggatttgattggtctgatcgaaacacgaacatgactgccaaaaaagagtcctactccgcactgatgagggagctggaacttaaggagaagaagattaaggaattgcagaatgccggggaccggctgctacgcgaagaccaccccgctaggcctaccgttgaaagcttccaggccgcattgcaaacgcaatggtcctggatgctgcagctgtgttgctgtatcgaggcccacctgaaggaaaacgcagcttacttccagttctttagcgacgtccgagaagcggaggggcagctccagaagcttcaggaggcactgaggcgcaagtattcatgcgatcgatccgccactgtcacacgattagaagatctactccaggacgcccaagacgaaaaggaacagctgaatgagtataagggacatttgtccgggctcgctaagcgtgcaaaggccgtcgtgcaattgaaaccccgacaccccgcacacccaatgcgtggacggttgcccctgcttgctgtgtgcgactataaacaggtcgaggttactgtccacaaaggagatgaatgtcagttggtggggcctgcgcaaccctcacactggaaagtgctatcttcctccggaagcgaagcagctgtaccatccgtgtgttttctcgtaccccccccaaatcaggaggcacaggaggccgtgacgcgtcttgaagctcagcaccaggcactggtcaccctctggcaccagttgcatgtggacatgaagagcttgcttgcgtggcaatcactgcggagagacgttcagctgattaggtcttggagtttagcgacttttagaaccctcaaaccggaggaacagaggcaggctctgcactcccttgagttgcactatcaggccttcctcagggactcccaagacgccggaggatttggtccggaagaccgcctgatggcagagcgggagtacggatcttgtagtcaccactatcagcagctcctacagtccctggaacagggtgcccaggaagagtcacggtgtcaacggtgtatctctgaactcaaggatatccgcctgcaactggaggcgtgcgagactcgcaccgtccacagacttagactgcccctcgataaagaaccagccagagaatgcgcacaacggattgcagagcagcagaaggcccaggccgaggtggagggactcgggaagggcgtggcaagactgtctgcggaggctgagaaggtgctagctttgcctgaaccgtccccagcggcgccaacccttagatctgagctcgagctgaccctaggcaaactggaacaggtgagatctttgagtgccatttacttggaaaagcttaagactataagccttgtaatccggggtacccagggagctgaggaggtccttagggctcatgaagaacagctcaaggaagcccaggccgtgccagcgacactcccagaactagaggcaactaaagcgagccttaagaagcttcgcgctcaggcagaggcgcaacagcccacatttgacgccctgcgcgacgagctccggggcgctcaggaagtgggggagcgattgcagcagcggcacggagaaagggatgtagaggttgagcggtggagggaacgcgtggcccagttgctggagcgctggcaggctgtcctcgctcagactgacgtgcgccagagggaactggagcagctcggccgccagttgaggtactacagagaaagcgcagatcctcttggagcctggctgcaggatgcacgccgccgccaggagcaaatacaggccatgcctctggccgattcacaagctgtccgcgaacaactcaggcaggagcaggcgctgctggaagagatagagaggcatggagaaaaggtggaagaatgccagaggttcgcaaagcagtatataaacgccatcaaagactacgaactgcagctggtaacctacaaggcccagctggagccagtggctagccccgccaagaagcctaaggtgcagagcggctcagagtctgtcatacaggagtatgtggaccttagaacacactattccgaactgacaactctgacgtcccaatatatcaagttcatttcagagacacttcgacggatggaagaagaagaacgcctcgccgagcagcagcgcgcagaagaaagagaaaggctggccgaagtcgaagccgcactcgaaaagcagcgccaactcgctgaggcacatgcacaagctaaggcacaggccgagagagaagccaaagaactgcagcagcggatgcaagaagaagttgtccggcgtgaggaagctgctgtcgacgctcaacagcagaaacggagcatccaggaggagttacagcaactgaggcagagcagcgaggccgagatccaagccaaagctagacaggctgaagccgccgaacgttcccgtctccggatcgaagaggaaatacgagtggtgaggctgcaattggaagccacggagaggcagagaggtggggccgaaggagaactgcaagcgcttagggctagagctgaggaggccgaggcacagaaacgacaagcccaggaggaggccgagcgtcttagacgacaagtccaggacgagtctcagaggaaaaggcaagcggaggtggagcttgcatctcgcgtcaaggcagaagccgaggccgcccgtgagaaacagcgagcactacaggccctcgaggaactcagactgcaggccgaggaagctgaacgcaggctacgacaggcggaagtagagcgagctagacaggttcaagtagcccttgaaacagcacagcgctccgcagaggcggagttgcagagcaagcgcgcctctttcgccgaaaaaaccgcccaactcgaacgctcactgcaggaagagcacgtggccgtggctcagttgcgtgaagaggcagagcgtcgcgcgcaacagcaggccgaggccgaaagggccagggaggaagccgagcgcgagctcgaacggtggcagctgaaagccaatgaggccctccgcctgcggctgcaagctgaggaggttgcccagcagaagtcactggcgcaggcagaggctgagaagcagaaggaggaagcagagcgggaagcaaggcggagggggaaagccgaggagcaggcagttcgtcaacgggagctcgccgagcaagagctcgaaaagcagaggcaactggccgagggcaccgcccagcagaggctcgccgccgaacaggagctgatccggctgagggccgagacggaacaaggcgagcagcagcgccagctgctcgaggaagaacttgccaggctccagagggaagcggctgcagcgacccaaaagcgtcaggagctcgaggccgaattagccaaggtccgagctgagatggaggtcctgttagcaagcaaggctcgcgcagaggaagagtccagaagcacctcagagaagagcaaacagagactggaggcagaggcaggtaggtttcgcgagctggccgaagaggctgctcgtttgcgcgctttggctgaggaagccaaaagacagcgccagcttgccgaggaggacgcagcacggcagcgcgctgaggctgagcgagtgctagccgagaaactcgcagcaatcggcgaagcaactaggctgaagaccgaagcagagattgccttaaaggaaaaagaggcggaaaacgagcgtctccgccggctggccgaggacgaggcgtttcaacggcggaggcttgaagagcaggccgcccagcataaagccgacatcgaagagaggctcgctcagctccgcaaggcctcagattccgagctggaaaggcaaaagggacttgtggaagatacacttaggcagcgcaggcaggtcgaagaagagattctggcattgaaagcgtccttcgagaaggccgctgcgggcaaagccgagctcgagttggagctcggccggattaggtccaacgctgaagatacactccggagcaaggaacaagctgaacttgaagcagcaagacagcgccagctcgccgctgaggaagagcggaggcggcgggaagcagaagagcgggtccaaaagtccttagctgcggaggaggaagctgccagacagaggaaggccgctctggaggaggtggagcggctgaaagccaaggtcgaggaggcacgcagactgagagagcgcgcagagcaggagagtgcccgccagttgcagcttgcccaggaggcagcacagaagcgtctgcaggctgaagaaaaggcccatgccttcgcagttcagcaaaaggagcaagaactccagcaaacgttgcagcaggagcagtctgtgctggatcagctcaggggtgaggccgaggccgccaggcgggccgctgaggaagctgaggaagccagggttcaggccgagagagaggcagctcaaagcagacgccaggtagaagaagcggaaaggctcaaacagagtgctgaagagcaggctcaggctcgggcccaggctcaggctgcagctgaaaagctgaggaaggaggccgaacaagaggctgcccgcagggcccaggccgagcaggctgcgctacgccagaaacaggctgctgacgcagagatggagaaacacaagaagttcgcagagcagaccctcaggcagaaggcccaggtcgagcaagagcttacaacgctgcgcctacagctggaggagactgatcatcaaaagaacttgttggacgaggagcttcagcgcttgaaggcagaggctactgaggccgctcggcagaggtcacaggtcgaagaggagctgttttccgtgcgggtgcagatggaggaactgtccaagttgaaagcccgcatcgaagccgagaaccgggctctgattctaagagataaggacaacacacagaggttcctccaggaggaagcggaaaagatgaagcaagtggcagaggaagcggctcgactgtccgtcgctgctcaggaggcggcacgactcaggcagctagccgaggaggacctggctcaacagcgtgctctagctgagaagatgctcaaggagaagatgcaagcggttcaggaggccacccggcttaaagctgaagcagagctgctccaacagcagaaggaactggcacaggaacaagcacgcaggctccaagaggacaaggagcagatggcccagcagctggccgaagagacccagggatttcaaaggactttggaggcagaaagacaaaggcaattagaaatgtcagccgaagcagaacggctgaagctccgcgttgctgagatgagccgggcgcaagcccgggccgaggaagacgcacagcgcttcagaaagcaggccgaggaaatcggggagaagctgcaccgcaccgaactggcaactcaagagaaagtcacattagtgcagaccttggagatacagcggcagcagagcgaccacgatgcagagcgcttgcgcgaggcaatcgcagagctggaaagggaaaaagagaagctgcagcaagaggccaagctgctgcaactgaagtcagaagagatgcagaccgtgcaacaggaacagctgttgcaagaaacacaggctctccagcagtccttcctttcagaaaaagacagtctcctgcagcgggagcgttttatcgaacaggaaaaggctaagctcgaacagctcttccaagacgaagtggcgaaagctcagcagctgagggaggagcagcagcggcagcagcagcagatggagcaggaacggcagcggctagtggcaagtatggaggaggctagaaggaggcagcatgaggccgaggagggcgtgcgaaggaaacaagaggaactgcaacagttggaacagcagcgacgacaacaggaggagttactggctgaagaaaatcaacgcctccgagaacagcttcaattgctggaggaacagcaccgagcagccctcgctcacagtgaagaggttaccgctagccaagtagccgcaaccaagaccctgcccaatggcagagacgctctcgatggacctgccgcagaagcagagccggaacattctttcgatggcctcaggcggaaagtcagtgctcagagattacaggaggcaggaattttgtccgccgaagagctccagcgtctggcccagggccacacaaccgtcgacgagctggctcgcagggaggatgtccgccattatttgcagggccgcagttcaatagccgggctcctgttgaaggccaccaatgagaaactgtctgtatacgccgccctgcagaggcagctccttagtcctggcactgcactgatactgctcgaagcacaagccgcctccgggtttctcctggacccagtgaggaatcgtaggctcaccgtgaacgaggcagtgaaagaaggcgtggtgggacccgaactgcaccataaacttcttagcgcggagcgcgcagtgaccggatacaaggatccttacaccggccagcagatctctctgtttcaggccatgcagaaaggcttgatcgtgcgcgagcacggcattagacttttggaagctcagattgccacagggggagtgatcgatccggtccattcccaccgggtccccgtagacgtcgcatataggaggggttattttgatgaggaaatgaaccgcgtgttggctgacccatcagatgacacaaaagggttctttgatcccaatacccacgaaaatctaacgtacctgcagctcttagaacggtgcgtcgaggacccagaaacaggcttgtgccttctgccactgacagacaaagcggctaaaggtggcgagttggtctacaccgactctgaggccagggacgtgtttgaaaaggctaccgtttctgcgccttttggaaagttccaaggaaaaactgtaaccatttgggagattattaactctgagtactttactgcagagcagcgtcgtgacttgcttcgccagtttcgcacaggccgaattacggtcgaaaagatcattaaaatcataattacagtagtggaggaacaggagcagaaagggcgcctctgttttgaaggactgaggtctcttgtcccggcagccgagctcctagagtctcgagttatcgatagggagctgtatcagcagctgcagcgcggggagcgttctgttcgtgatgttgcggaggtggacactgtgcgtagagctctgaggggcgcaaacgtcatcgctggagtatggcttgaggaggcaggtcagaaactgtccatctataacgccttaaaaaaggacctcttaccatctgatatggccgtggccctgcttgaggcacaggccgggaccgggcacattatcgatccggccacctccgctcgcttgactgtcgacgaagctgtgcgagcaggcctggttggacccgagtttcacgaaaagctgctctctgccgagaaggccgttacagggtacagagacccatacaccgggcagtctgtgtctttattccaggcactcaagaagggattaattccgagagagcagggactgcgactgctcgatgcacagctctccacaggcgggattgtagatccttctaagagccatcgtgtccccctcgatgtggcctgtgcgcgtgggtgcttggacgaagagaccagccgcgcactgtcagccccaagggccgacgctaaagcttactctgacccctcaaccggtgagccagcgacctatggcgagctacagcagcgatgcaggccagatcagctaaccggcctttctcttctgcccctgtcagaaaaggctgcaagagctagacaggaagagctttattccgagttgcaggcccgagaaacattcgagaagactcctgtagaggtgcccgtcggaggcttcaagggcagaactgttaccgtgtgggagctgattagttcagaatatttcaccgcagaacagaggcaggaactcctgcggcagtttagaaccgggaaggtgaccgtggagaaggtaattaaaattcttattaccattgtggaggaggttgagacccttagacaggaaaggctgtctttcagcggactacgggcccctgttccagccagcgagcttctggctagcggagtgcttagcagggcacagttcgagcagctgaaggatggaaagacaacagtcaaagacttgagtgagcttgggagcgtcaggacgctgctccaaggttcaggttgtctggctggaatttacttggaagacactaaggaaaaggtttccatttacgaagccatgcggcgtggactactacgcgctacgaccgctgctctgctgctcgaagcacaagctgcaaccggctttctggtcgacccagttcgtaatcagagactctacgtgcacgaggccgttaaagccggtgtcgtaggccccgagttgcatgaacagttactctccgccgaaaaggcagtaacaggataccgcgatccttattccgggtccacaattagtcttttccaggctatgcagaaaggcctggtcctacgtcagcatgggatccgtctcttggaggcccaaattgccactggaggaataatcgatcctgtgcattcacaccgcgtaccagtagacgttgcgtatcagagaggctacttcagcgaggagatgaaccgagtgctcgccgatcctagtgatgacaccaagggtttttttgatccaaacactcatgagaacctcacttatcgccaactgcttgaacgctgcgtggaggaccctgaaactggtctgagattgctccctctgaagggagccgaaaaggctgaggtcgtggaaactacgcaggtgtacacggaggaagaaacacgcagggcctttgaggaaacacagattgacatcccagggggaggaagtcatggagggtcaaccatgagcctatgggaagtcatgcagtccgacctgatcccggaggaacagcgagcacagctgatggctgattttcaggccggccgcgtcactaaggaaaggatgattattattatcatcgaaatcattgagaaaacagaaatcatccgtcaacagggcctggcttcctacgattacgtccgtcggcgcctgacagcagaggatctgtttgaagctaggattatttccctggagacatataatctgctgagggaaggtacacggagtttaagggaagccctcgaggcagagtcagcctggtgctatttgtacggcaccggatcagtggccggggtgtatctgcccgggtcacggcagacactatccatttatcaggcactaaagaaaggccttctgtctgcagaggttgctagactcctccttgaggcccaggctgccaccggattcctgttggaccccgtgaagggagaaagacttacagtggatgaagctgtacgtaaagggctggtaggacccgagctccatgaccgcttgcttagtgccgagcgcgcagtgacaggttacagggatccctatacggaacagaccatctcgcttttccaggccatgaaaaaagaactcataccaactgaagaagcattgcggctcctagacgcacaactggccaccgggggcatcgtggatccgcgcctgggctttcacctgcccttggaggttgcctatcagcgcggatatttgaacaaagacacacatgatcagttgagcgagccatcagaggtgagaagttacgtggacccgtctactgacgagcgacttagctatacacaacttctgcgtcgctgcaggagagatgatggtactggccagcttttgctccctctctcagacgctaggaaattaacattccgtggactgagaaaacagattactatggaggaactggtgcgtagccaagtcatggacgaggccacagccctgcaactgagagagggccttacgagcattgaggaagtgaccaagaatcttcagaagtttctcgaagggactagttgtattgccggggtgttcgtcgacgcgacaaaagagaggctgagcgtttaccaggccatgaagaagggaatcatccgtcctggcaccgccttcgagctgttggaggcacaggcagctacgggctacgtgatcgacccgattaaagggctgaaactcactgtggaagaagctgtgaggatgggcatagttggacctgagtttaaagacaagctgctgtccgcggaacgcgctgtcaccggatataaagatccatattccggcaagctgattagcctgttccaggcgatgaagaagggcttaatcctcaaggaccacggcattaggttgttggaagcccagattgcgacgggaggaattatcgacccggaagagagccatcgcctccctgttgaggtggcatacaagagggggctgtttgacgaggaaatgaacgagattttaacagacccaagtgacgacaccaaaggattctttgatccaaacaccgaagagaacctcacctacctgcagctgatggagagatgtattaccgaccctcagaccggcctgtgtttgcttcccctaaaggagaaaaaacgcgagcgcaagacttcctcgaaaagtagtgtgcggaaaagaagggtggtcatagtggatcctgagacagggaaggagatgtccgtatatgaggcctatcgaaaaggactaatagaccatcaaacgtacctcgagctgtctgagcaggagtgtgagtgggaagaaattactattagcagtagcgatggtgttgtgaagagtatgatcatcgaccgccgcagcggaagacagtacgatattgacgacgccatagccaagaaccttatcgatcgttcagcactggatcagtacagagccggcactttatccatcaccgagtttgcagatatgctcagtggaaacgccggcggcttcagatctcgtagctcttctgtcggttcatcttcttcttatcctattagcccagctgtgtctcgaactcagttggctagctggagtgaccctacagaggagaccgggcccgtcgcaggtatcttggacaccgagactctggaaaaggtctctatcacagaagctatgcaccggaatcttgtcgacaacatcacaggacagaggcttctggaagcgcaggcgtgcaccggcggcattatagacccctctaccggtgagcgtttccccgtgaccgacgctgtcaacaaggggctggtcgataagataatggtcgatcggatcaatctggcccagaaagcgttctgtgggttcgaagatccgaggacaaaaacaaagatgtcagccgcacaagctctcaaaaagggatggctctactatgaggctggccagagatttctggaagtgcagtacttgactggcggactcatcgagccggatactcctggccgcgtgccccttgatgaggcactccagcgtgggacagtcgacgcaagaacagcccagaagctgagagacgtgggtgcctactccaaatacttaacctgccccaagaccaagctgaaaatctcttataaagacgcacttgatagatctatggtggaggagggcaccggcctgcgtttgctggaggcggctgcgcagtcgactaaaggatattactcaccatattctgtgagtggcagcggctccacggccggctcgcgtaccggatcccgtacagggtctcgcgcaggcagtcgccggggttcatttgatgctacagggtccggatttagcatgacattctccagcagctcttattcatccagtggctatggccgccgctatgctagcggaagcagtgcatctctggggggtccagagagcgccgtggcctag

SEQ ID NO: 262148 - DNA, 13548 bp, Artificial Sequence
  derived and/or modified sequence
atgaagattgtgcctgatgagagagatcgggtgcagaagaagacctttaccaagtgggtgaataagcatctgattaaagctcagcggcacatcagcgatctgtatgaagatttacgggatggacacaatctcatctctctgctggaggtgttgagcggggatagcctacctagggagaaggggcgcatgagatttcacaaactacagaacgtgcagatcgccctcgactatctcaggcatcggcaggttaagttggtgaatatccggaatgatgatatcgccgacggaaaccctaagttaacactggggctgatctggacaatcatccttcacttccagatcagtgacatccaggtctcgggccaatcagaggatatgactgctaaagagaagctgcttctctggagccagcgcatggtagaaggctaccagggtctgcggtgcgacaactttacctccagctggcgcgatggacgtctcttcaatgccataatccacaggcacaagccgttgctgattgatatgaacaaggtttatcgtcaaactaacttagagaacctggaccaggccttttctgtcgccgaacgcgatcttggggtgacccgtctgctcgaccccgaagacgtggacgttcctcagccggatgaaaagtccatcattacctatgtgagcagtctctatgacgccatgcccagagttcccgacgtgcaggacggcgtccgagcgaacgagctgcagctccggtggcaggaataccgcgaactcgtccttctgttattgcagtggatgaggcaccataccgctgccttcgaagagagacgctttcccagctcgttcgaggaaatcgaaatactctggagccagttcctcaagtttaaggaaatggagcttcccgcaaaggaagcagataagaaccgctccaaaggcatctatcagtccctcgagggagcagttcaggcaggtcaactgaaggtgcctcccggctatcatcccctggacgtggagaaggaatgggggaagcttcatgtggctatattggagcgagagaagcagttgcggagtgaattcgagagattagagtgtttgcagagaatcgtaaccaagcttcagatggaagctgggctgtgcgaggagcagctcaatcaggcagatgccctactccaaagcgacgtgcggctgctggctgccgggaaagtgccccagagagccggcgaagtagaaagggatcttgacaaggctgattccatgattcgactcctcttcaatgacgttcaaactctgaaggacggtcggcatccacagggggaacagatgtataggcgagtttacaggctacatgagcggttggtggccatccgaaccgagtataacctacgactgaaagccggagtggccgccccagccacccaggtggcccaggtgacgctgcagtctgtacaacggcgtcccgagctggaggactcgaccctccgatacctacaggacttgctggcctgggtcgaagagaatcagcaccgtgtggatggagctgaatggggggtagatcttcctagcgtggaagcgcagttgggaagtcatagaggtctgcatcagtcgatcgaggagttccgggccaagatcgagcgggcccgttccgatgaagggcagttgtcccccgcaacccgtggcgcctatcgcgactgcctcgggcgcctggacctgcaatacgccaaacttctaaacagctccaaagccaggctgaggtcactggaaagtttgcacagtttcgtggcggccgctactaaggagctaatgtggctgaacgagaaggaggaggaggaagtcgggttcgattggtccgaccgaaataccaacatgactgctaaaaaagaatcctactccgcactgatgagggagctcgagcttaaggaaaaaaagataaaggagcttcagaatgcaggcgaccgtttactccgcgaagaccaccctgctagaccaactgtggagagcttccaggcggccctgcagacccagtggtcctggatgctgcagctctgctgctgcatcgaggcgcatctgaaagagaatgcagcctacttccagtttttcagcgacgtacgggaggccgaagggcaacttcagaagttacaagaagccctgcgccggaagtatagctgcgatcggagcgctactgtgactagattggaggatctactacaggacgcacaggacgagaaggagcaactgaacgaatataaagggcatctcagcggtctggcgaagcgcgcgaaggcggtggtgcaactgaagcctcggcacccggcccacccaatgagggggaggctgcctcttctggctgtgtgcgactacaagcaggttgaagtcactgtgcacaagggtgacgagtgtcaacttgtgggaccggcccagcctagccattggaaagtcttatctagttccggatctgaagccgccgttccttctgtgtgttttctggtcccgccccccaatcaggaagcccaggaagcagtcaccagacttgaagctcaacaccaggcccttgtcaccctctggcatcaactccatgttgacatgaaatctctgctcgcctggcagtcccttaggagagacgtgcagctcataaggagttggagcctggctacatttaggaccctgaaacccgaagagcagcgccaagccctccattcgctggagctccattaccaagctttcctgcgtgattcacaggatgctggaggctttgggcctgaggaccgactgatggccgaaagagaatacggcagctgttctcatcattatcagcagctgctccaatctcttgagcagggcgcacaggaagaatcccggtgtcagcgctgcatatccgagttgaaggatatccgactgcagctggaggcctgcgaaaccagaaccgtgcaccgtcttagacttcccctcgataaggagcctgctagggagtgcgcacagaggatcgcagagcaacagaaggcacaggcagaagtggaaggcctcggaaagggggtcgcaagactgtcggctgaggccgagaaggtgctagcactcccagagccttcacccgctgcgcccaccctgcggtctgagctggagttgaccctgggcaaactcgaacaagtgcggtcactgtccgctatatacctggagaagctcaagacaatttctctcgtaattagaggcacacaaggcgctgaagaggttctcagagcacatgaagaacaactgaaagaagcacaagcagtgccggctacgctccctgaactggaggccacaaaggcttccctgaaaaaactcagagctcaggccgaggcccagcagccaactttcgacgcgctgcgggatgaattacgcggcgctcaggaagttggggagcggctgcagcagagacatggcgagcgggatgtggaagtagagcggtggcgggaaagagttgctcagttattagagaggtggcaggcagtgctggctcagaccgacgtgaggcaacgagagttggagcagcttggccgccaactacggtattatcgggaaagtgctgaccctcttggcgcctggctgcaggatgccagaaggcgtcaggaacagattcaggcaatgccacttgcagatagtcaagcggttcgagagcagctgcggcaggagcaggcactactggaagagatagaaagacacggggaaaaggtggaagagtgccagcgatttgccaagcagtacatcaatgctataaaagactacgagctgcagcttgttacttataaggcccagttggaacccgtggctagccccgcaaaaaaaccaaaggtgcagagcgggtcggagtcggtgatccaggagtacgtcgacctccgtacacactactccgagctcaccacgttaaccagccagtatattaagtttatttcagaaacactccgccggatggaagaagaggaacgcctcgccgagcagcagcgggccgaagaaagagagagacttgccgaggtagaggctgccctagagaaacaaagacagctggccgaggctcacgcccaggcaaaagcgcaagcggaacgggaggcaaaagaattgcagcagagaatgcaggaggaagtagtgagaagggaagaggctgccgtggatgctcagcaacaaaagagatcaatccaagaagagctccagcagctgcgtcaatctagcgaagcagagatccaggccaaggcacgccaggcagaggctgccgaacggagtcgcctgaggattgaagaagagattcgtgttgttaggctgcagctggaagctacggagagacagagaggaggtgcagagggagaactgcaggccctgcgcgcaagagctgaagaagctgaagctcaaaagagacaggcccaggaggaagcagaacggttaagaaggcaggttcaggatgaatcacaacgcaaaagacaggcggaagtggaactcgccagccgagttaaggccgaagcagaggcagcaagagaaaagcagcgagctctccaggcccttgaggagctgcgcctgcaggcagaagaggccgaacggcgcttgaggcaggctgaggtggagcgtgccaggcaagtgcaggtggcactggagactgcccagagatctgccgaggctgagttacaatctaaacgggcctcctttgccgagaagacagcacagcttgaacggtctctgcaggaggaacacgtggccgtggcgcagttgagggaggaggccgaaaggagggctcagcagcaagccgaagcggagcgcgcccgggaggaggctgagagagagctcgaaaggtggcagctgaaagcaaacgaggccctcagactgcgattacaggcagaagaggtggctcagcaaaagtctctggcccaggccgaggcagagaaacagaaagaggaggccgaaagagaagcacgcagacgagggaaggccgaggagcaggcagtcagacagcgggagcttgcagaacaggagctagagaagcagcgccagctggctgagggcactgcccagcaacgtctggcagcagagcaggagcttatccggctgcgggccgagacggagcaaggcgaacagcagcgacaacttctcgaggaagaactggcccgacttcagagggaggccgcggccgcaacccagaagcgccaagagctggaggccgagctggctaaggtcagggctgagatggaggtgctgctagcctctaaggcccgcgctgaagaggagagccgatctacatcagagaaatctaaacagcgactggaagcagaggccggaagatttagggagctcgccgaagaagctgcccggctgagagcattggcagaagaagccaagaggcagcggcagttagcggaggaggacgcggcaagacaaagagcagaagcggaaagggttctcgctgaaaagctggccgctattggagaggcaactaggttaaagactgaagcggaaatcgccctgaaggagaaggaggccgagaatgagcgcctccgcagattggccgaggatgaagcgttccagcgtcgaaggttggaggagcaagccgcccagcacaaggctgatatagaagagaggctagcgcagctcaggaaggcctctgattcagagcttgagcggcagaaggggctggttgaagataccttgcgccagcgccggcaggtcgaggaagagatcctggccctcaaggccagcttcgagaaggcagccgctgggaaggcggagttagagctggaactcggcaggattcgatccaacgcagaggacactcttcggagcaaagagcaggcagaactggaggctgcacgacaacggcagctcgctgctgaggaagagagacgaagacgcgaagccgaggagcgagtacagaagtcattggcggccgaggaagaggccgctaggcagcggaaggccgccttggaagaggttgagcggctaaaggctaaggtggaagaagctcggcgcctacgggagagagcagagcaggaaagtgctcgccagctgcagctcgcacaggaggctgctcagaaaaggctgcaggccgaggaaaaagcccacgccttcgccgtacaacagaaagaacaggagctgcagcagactcttcaacaggagcagtccgttctggaccagctccggggcgaggcagaggcagcgagacgggctgccgaggaggcagaagaagcccgcgtccaagcagagagagaggccgcccagagcagaagacaagttgaggaggcagaaaggcttaaacagagcgcagaagaacaggcacaagcgagggcacaggctcaggcggcggctgaaaagcttcgaaaagaagctgaacaggaagccgcacgaagagctcaggcggagcaagccgctcttaggcagaagcaggcagccgacgctgagatggaaaagcacaagaagtttgccgagcagaccctgaggcagaaggctcaggtggagcaggagttaactacactgagactgcaactggaggagacagatcaccagaaaaatttgctggatgaagagctgcagcggctgaaggcagaggccaccgaggccgctcggcaaaggagccaggtggaagaagagctgtttagcgttcgcgtgcagatggaagagctatcaaaacttaaagcacggatcgaggcagagaatcgggctctgattctgcgggataaagacaatacacaacgctttctgcaagaggaggccgaaaaaatgaagcaggtggctgaggaagctgcaaggctgtctgtcgcagcccaggaagctgcccggctgcgtcagctcgcagaggaggacctcgctcagcagcgtgccctggctgagaagatgctgaaggaaaagatgcaagcggtgcaggaggcaactcgactcaaggctgaggctgaactgttgcaacagcagaaggagttagcgcaggagcaggccagacggctccaggaggacaaggaacagatggcccagcagcttgccgaggagacacagggttttcagaggacactagaggccgagaggcagcggcagctggaaatgagtgccgaggcggaaaggcttaaactaagggtagccgagatgtcaagagcccaagcccgcgcggaagaggacgcacaacggttccgcaaacaggccgaggaaatcggagaaaaactgcaccgaacagaactggccacccaagagaaggtaacactcgtgcaaacgctggagatccagcgacagcaatctgatcacgacgcagagcgtctgagggaagcgatcgccgagctcgaacgtgagaaggagaagttgcaacaggaagcaaagctgcttcagctcaaatctgaagaaatgcaaacagtgcagcaggagcagctgttgcaagaaactcaagccttgcagcaatcgttcctctcagagaaagactcccttctgcaaagagaaagattcatcgagcaggaaaaggccaagctagagcagctctttcaagatgaggtagctaaagcccagcaactacgcgaggagcaacagagacaacagcaacagatggagcaagaaaggcagaggctcgtggcatccatggaggaagctagaagacggcagcatgaagccgaagagggcgtgcggcgcaagcaggaggagctgcagcaattggaacagcagagacgccaacaggaagagttgctggcagaggagaatcaacgcctgagggagcaactgcaactgttggaggagcagcaccgtgcagccctggcccattccgaggaggtcacagcctcccaggtggctgctactaagactctacctaacggaagagacgctttagacggccccgctgccgaggctgaacctgagcatagctttgatggtctgcgccggaaggtctctgcacagcgcctccaggaggcagggatccttagcgccgaagaactgcagcggttggctcagggtcacaccaccgtggacgagctggctcggcgggaggacgttaggcactatctccaaggtcgttctagcattgccgggttacttcttaaagcaaccaacgaaaagctaagtgtgtacgctgccctccagcggcagctgctttcccccggaactgcattaatcctgttagaagcccaggccgcatcgggtttccttttggatccggtacgcaaccggagactgacagtgaacgaggccgtgaaggaaggtgtggtgggcccagagctgcaccataagctgctgtcagccgagcgagcggtgactgggtataaggacccttatacaggtcaacaaatctccctctttcaagcaatgcagaagggtcttatagtccgtgagcacgggatacgtcttctcgaagcgcagatcgctaccggcggcgtgatagacccagtccacagccacagagtccccgtggacgtggcctatagacggggctacttcgatgaggaaatgaatagggttcttgctgatccctcggacgacactaaagggttcttcgatccaaacacccacgaaaacctcacatacctgcagctcctcgaacgttgcgtcgaagacccagaaacgggcttgtgcctgctgccgctgacagataaggcggcaaaagggggtgagctggtgtacacagactccgaggctagggatgtattcgagaaagcgaccgtcagcgccccgttcgggaagttccaggggaagaccgtcaccatttgggagatcatcaacagtgagtacttcacagctgagcagcgaagagaccttttaaggcagtttcgcactggccgtatcactgtggaaaaaatcataaagattatcatcaccgtggttgaggaacaagaacagaagggcagactctgctttgagggactgagatcattggttcctgctgcagagctgctggagagccgagtcattgacagggaattgtaccaacagctacagcgcggggagagaagcgtgcgagatgtcgccgaagttgataccgtacgaagagcacttaggggggccaacgttattgcaggtgtgtggctcgaggaagcaggacagaagctttctatctacaatgccctgaagaaagatctgttgccctctgatatggctgttgccctgctggaggctcaggccgggacgggtcacatcatcgatcccgccacaagtgccagattaacagtcgatgaagccgtacgtgctggactggtggggcctgaatttcacgagaagctgctgagcgccgagaaggctgtaaccgggtaccgtgatccatatactggccagtcggtatcgttgttccaggcactgaaaaagggactcatcccccgagaacagggattgcgcctgctggatgcccagctgtcaaccgggggtattgtggatccctcgaagtctcatcgagtgcctctggatgtggcttgtgcgcgcgggtgtcttgatgaagaaacttcaagagcactgagcgcccctcgggcagatgcaaaagcctattcggatccctctaccggggagcccgccacctatggagagcttcagcagaggtgtcgccctgaccagcttacaggcctgtccctcctgcccctttccgaaaaggcggcccgggcccggcaggaggagctgtactctgagctgcaggcgcgggaaacttttgaaaaaacccccgtagaggtcccagtcggtggcttcaaggggcggaccgtcaccgtctgggaacttatttccagtgagtactttaccgctgagcagcgccaggagttattaaggcagttcagaaccggtaaagtaaccgttgagaaggtcattaaaatccttatcacgattgtagaagaggtagagaccctaagacaggagcggctgtcattctccggcctgcgcgccccagtcccagccagtgagttgctcgcctccggcgttctatccagagcccagttcgaacagcttaaggatggtaagacgacagtgaaagacctgagtgagcttggttctgttcggaccctgctgcagggcagtggttgtctagcgggtatttacctagaggacaccaaggaaaaggtgtcaatctatgaggccatgcgtcgtggcctgctcagggctactactgctgcgctgctcttggaggcccaggctgccacagggttcttggtggatcccgtcagaaatcagaggctgtatgtgcacgaggctgtgaaggcaggcgtagtcgggcctgagctccacgagcagctactgtctgctgagaaggctgttacgggttacagagacccttacagcggtagtactattagcttgtttcaggctatgcagaaaggtttagttcttcggcagcacggcatcagactccttgaagcacagattgcgacaggcggcattatcgacccggttcattctcaccgagtgccggtcgacgttgcatatcagcgtggctattttagcgaggaaatgaaccgagttttggcagacccatccgatgacaccaaagggttcttcgaccctaacacccacgagaatttgacctataggcagcttctagagcggtgtgtggaagatccagaaacagggttgcgcttacttcccctgaagggtgcagagaaggccgaggtggttgagaccactcaggtttatactgaggaggaaactagaagggccttcgaagagacccagatcgatataccaggcggcggctcccacggagggagtactatgagcctgtgggaggtcatgcagagcgatctcatacctgaggaacaaagggcccaattgatggctgacttccaggctggccgggtaaccaaggagcgcatgataataataattatcgagattattgagaaaaccgagattatccggcaacagggcctcgccagttatgactacgttcgtcgcaggttgacagctgaggatcttttcgaggcgcgcattatctccttggagacttataacctgctacgcgagggcaccagatccttgcgagaggcactggaagccgagtcagcatggtgttatctgtacggcaccggcagtgtggccggcgtgtatctccccggctcacgccaaacactaagcatctatcaagctctgaagaaggggctgcttagcgcggaagtagcacgacttttgctcgaggcccaggccgctactggatttctcttggaccccgttaagggcgagagactcacagtcgatgaggcagtgagaaagggtcttgtgggacctgagctccacgataggctgttgagcgccgaaagagctgtgacgggctatcgggacccttacacagagcagactatttcactgttccaggccatgaaaaaagaattgatccctactgaggaagcactcaggcttctggacgcacaacttgcaactggtgggatcgtcgacccccgtttgggcttccatctccctctcgaggtcgcttaccagagagggtacctgaacaaggacactcacgaccagttatccgagcctagtgaagtgcggagttacgtggacccaagcaccgacgagagactatcttacacccagttgctaaggcgatgtcgaagagacgacggaaccggccaactgttgttaccactgagcgacgctcgcaagctcaccttcagagggcttagaaaacagattaccatggaggagctggtcaggagccaagttatggatgaagctacagctctgcagctgagggagggacttaccagtatcgaggaagtgacaaagaacctgcagaagttcctcgaaggaacttcatgcatagctggcgtgtttgtggatgccaccaaggagcggctctccgtgtaccaggccatgaagaaagggatcatacgacctggcaccgcttttgaattgcttgaagcccaagcagctaccgggtatgttattgacccaatcaagggtctgaaacttacggtcgaagaggccgtcagaatgggtatcgtgggaccagagttcaaggacaagctcctctctgccgagcgcgccgttaccggttataaagacccatatagcggcaaattaatctctttgtttcaagcaatgaagaaaggcctaattctgaaagatcacggcatcagactgctggaagcccagattgccaccggcgggattattgatcccgaagagtcccatagactgccagtcgaagtggcttacaaacggggtctcttcgacgaggaaatgaacgagatactcacagatccatcggatgatactaagggcttctttgatcccaataccgaagagaatctgacctacctgcagctaatggagcggtgcatcacggatccacagaccggactgtgccttcttcccctaaaagaaaagaagagggagagaaagacttcaagcaaatcgagcgtgcggaaacgacgtgtcgttatcgtcgatcctgagacaggcaaggagatgtccgtttacgaggcttaccggaaagggctaatcgatcatcagacttatctggagttatctgagcaagaatgcgagtgggaagagattacaattagtagctcagatggtgttgtcaaatccatgatcattgatcgaagaagtggaaggcagtatgacattgatgatgccattgccaaaaacctaatagatcgctccgcgctggatcagtatcgggcaggcactctttcgattacagaattcgccgacatgctctctggcaatgccggaggcttcagaagtaggtcatccagcgtgggttcatcctcctcatatccaatcagccccgccgtttcacgaacgcaactcgcttcttggtctgatccaacggaagagaccggtcccgtagccggaattttggatacagaaaccctggagaaggtgtccattacggaagccatgcaccgaaaccttgtcgacaacatcacaggccagagacttctcgaagcccaagcttgtaccggtgggataatcgacccatcaaccggcgagagatttcccgtgacagacgctgtgaacaagggactggtggataaaatcatggttgatcgaatcaacctggcccaaaaagcattttgtgggttcgaggacccgcggaccaagacaaagatgagcgcagcccaggctcttaaaaagggatggctgtattatgaggccggacagcgattcttggaggtgcagtacctgaccggcggtctgatcgagccagataccccagggagagtccctctggatgaggctctgcagcgggggacagttgacgcacgaaccgctcagaagctgagggatgtcggagcatactccaagtaccttacatgtcctaagactaagttaaaaatttcctacaaggatgccctggataggtctatggtcgaagaaggtaccggcttgcgcctgttagaagctgccgcccaatctaccaaaggctactattctccatatagtgtctccggttctgggagcactgcgggcagtagaaccggcagcagaaccggatcaagggctggttctcggagaggctccttcgacgccactggatctgggttttcgatgaccttctccagctcttcttacagctccagcgggtacggtcgaagatacgccagtgggtcatcagcctctctgggggggcccgagagcgctgttgcctag

SEQ ID NO: 262149 - DNA, 13725 bp, Artificial Sequence
  derived and/or modified sequence
atgagtggagaagacgcagaagttagggcggtgtccgaagacgtgtcgaatggaagttccggatctcctagcccgggagataccttaccttggaatctgggcaaaacacagaggagcagacggagcggcggcggcgccggcagcaatggaagtgtgttggacccggctgagagggccgtcattcggattgccgacgaaagagaccgggtacagaaaaaaactttcactaagtgggttaataaacatttaattaaggcccagcgccatatcagtgatctgtatgaagacttgagagatggacacaatctgatttctcttctggaggtactcagtggagattccctcccaagggagaagggccgcatgcgtttccataagctccaaaatgtccaaatcgcgctcgactacttgaggcataggcaggttaagcttgtcaatatccgaaacgatgatattgctgatggtaatccgaaactaaccctcgggcttatctggactatcatcttacattttcagattagcgacattcaggtgagtgggcagtccgaagatatgacagcaaaggaaaaactgttgctgtggagccagcggatggtggagggataccaggggctccgctgcgacaatttcacctcttcatggcgagatggccggctctttaatgctatcattcaccggcataaacccctgctgatagacatgaataaggtgtaccgccagactaacctggagaatctggaccaggcgttcagcgtggccgaacgggacttgggggtcactaggctgctggatccagaagacgtggacgtgccccagcccgacgagaaatcaatcatcacctacgtctcctcactgtatgacgctatgccgcgggttcccgacgttcaagatggagtccgggccaacgaactgcagctgcgatggcaagaatacagagaattagtgttattgctgctgcaatggatgcggcaccatacagctgcgttcgaagaacgtcgattcccttctagcttcgaagagatcgagattctgtggtcccaatttctgaagttcaaagaaatggagcttcccgccaaggaagccgataaaaacaggtcgaaaggaatataccaaagtctggagggcgctgttcaggccggacaattgaaggttccaccagggtaccacccattggacgttgagaaggagtgggggaagctgcatgtggcaatcctggagagagagaaacagctccggagcgagtttgaaaggctagagtgcctgcaacgaatagttacaaaactgcagatggaggcggggttgtgcgaagaacagttgaaccaggcggacgccctgctacagtctgacgtgcggctgctggcagcaggaaaagttccacagcgggcaggcgaagtcgagagggatcttgacaaagctgactctatgatccgcctgctgtttaacgatgtccagacgctcaaagacggacgccatcctcaaggtgaacagatgtatcggcgcgtctacagactacatgaaaggctagttgccatccggaccgagtacaatctccgcctgaaggctggtgtggcagcgccagcgacacaagtggcacaggtaactcttcaaagcgtgcagcggcggcctgaactggaggactccaccctgcggtacttgcaggatctgctggcctgggtggaagaaaatcagcaccgagtcgacggggcggagtggggtgtggatcttccgagtgtcgaggcgcagcttggcagccacagaggcctgcaccagtcgattgaagagtttagggctaaaatagagagagcacgatctgacgaaggccagctatcaccagccacaaggggagcctacagagattgtctggggcggctggacctacagtacgcaaaactcttgaatagcagtaaggctcgcctgcgtagccttgaatccctccactcatttgtggcagctgctactaaggagttaatgtggctaaatgagaaggaagaagaagaagttgggtttgattggtcggaccggaatacgaacatgaccgccaaaaaggagtcgtactcagctctgatgagagagcttgaactcaaggaaaagaagatcaaggagttgcaaaacgcaggagaccgcctactacgtgaagatcatcccgcccggcctaccgtagaaagcttccaggccgccctccagactcaatggagctggatgctccagctgtgttgctgcatagaagcgcatctgaaagaaaacgccgcctactttcaatttttttcagacgtgagggaagccgagggtcagttacagaaacttcaggaggccctgcgacggaaatattcctgtgatcgcagcgccaccgtgaccagattggaggacctcctgcaggacgcacaggacgagaaagaacaactgaacgagtataaaggccatcttagcggtctcgccaagcgggcaaaggccgtggtacagctgaaaccgcgtcaccctgctcaccccatgcgtggcaggctccccctgctcgccgtgtgtgactacaagcaggtcgaagtgacggtccacaagggggacgagtgccagttggttggtccagcccagccatctcactggaaagtgttatcctcctctggatccgaggccgccgtacctagcgtgtgcttcctggtcccccccccaaaccaagaggctcaggaagccgtgacgcggttagaggcccaacatcaagctcttgttaccctgtggcatcagctgcatgtggatatgaagtctctcttggcctggcagtcactcagaagagacgtacagctcattaggtcttggagcctggccaccttcagaaccttaaaacccgaggagcagcgacaggccctgcattctctcgagcttcattaccaggctttcttacgcgattctcaagacgcagggggatttggcccagaggaccgactgatggctgagagggaatatggatcttgtagccatcactaccagcaattgctccaaagcctcgagcaaggtgcccaagaggagtccaggtgccagcggtgtatatcggaactgaaagatattcgcctgcagcttgaagcctgtgagacccgaacggtacatcggcttaggttgccattggataaagaacctgccagggagtgcgcgcagcgcatcgcagaacagcaaaaagcccaggctgaagtcgagggtctaggaaaaggggtggccagattgtcagcagaagccgaaaaagtgctagcactgcccgaaccatcaccagccgccccgaccttgcggagcgaacttgaactcaccttaggcaaactcgaacaggtgaggagtctaagtgcaatttatcttgagaagctgaagaccatctccttggtcatcagagggacacagggtgccgaggaagttctgagggctcacgaagaacaacttaaggaagcccaggccgttcctgccacccttcccgaactcgaggcgaccaaagcgtctctgaagaaacttcgagcccaggcagaggcccaacaaccaacctttgacgccctacgcgacgagctcaggggagcacaggaagtgggggagagactccagcagcggcacggtgagcgggatgttgaggtggagaggtggagagaaagagtggctcagttgttggagagatggcaggctgttctggctcagacggacgtcaggcagcgcgagcttgaacagttggggcgtcagctgcgttactaccgggaatccgccgatccccttggtgcctggcttcaagacgctcgtcgtcggcaagagcagatccaagcaatgccactggccgattcacaagcagttagggagcagctcaggcaggaacaggcactgctggaagagatcgagcgccacggcgagaaggtggaagagtgtcagagattcgctaaacagtacatcaacgcaattaaggactacgaattgcagctggtgacatacaaagctcagctcgagcccgtggcatcccccgcaaaaaaacctaaagtgcaaagtggatccgaatcagtcatacaagaatacgtggatttgcgcacacactattccgagcttacaacattgacctctcagtacatcaaatttatttcagagaccctgagacgcatggaggaagaggagaggttggccgaacagcagcgagccgaggaacgtgaacgcctggctgaagttgaggccgccttggagaagcaaaggcagttagcggaagcccatgcccaggccaaggctcaagccgagagagaagcaaaggagctccagcaaagaatgcaggaggaggtggtgcggagggaagaagcagcggtggacgcccagcagcagaaacgctcaattcaggaggagcttcaacagttgaggcagagttccgaggcagagattcaagctaaggcccgccaggctgaagccgctgagcgctcgaggcttcgtattgaggaggagattcgcgttgttagactgcagcttgaagcgacagaaagacaacggggcggagcagagggcgagctgcaggctttgcgcgcccgggcagaagaagcagaagcccagaagaggcaggcccaagaggaagctgaacgtttaaggcgtcaagtgcaggatgaaagccagcggaaacgtcaagcagaggtggaattggcctctcgagtcaaggccgaggcagaagctgcccgggagaagcagagagctctgcaggccctggaagagctgcgcctgcaagcagaggaggccgaaaggagactccgacaggcagaggtggaaagagcccggcaagtccaagtcgcccttgaaactgctcagcggtcggctgaagctgagctccagagcaagcgcgcttcctttgctgagaagaccgctcagctcgaacggtcacttcaagaggaacatgtcgccgtggcgcagttgagggaggaggccgagcgcagagcacagcagcaggcggaggcggaacgcgctagggaggaagccgaacgcgaactggaacggtggcagttgaaggctaatgaagcactgagactgcggctgcaagccgaggaggtggcccagcaaaagagcctagcacaagcagaggccgaaaagcagaaagaagaggcagagagggaggcgcgcagaagaggaaaagcagaggagcaggccgttagacagcgtgaactggccgaacaggagctcgagaaacaacgccaattagctgagggaacagcccaacagaggttggcggcggagcaggaactcattagacttagagcagagactgaacagggggagcaacagcgccagctgttagaggaagagctcgcacgcctgcagagagaagcggcggcggcgacacagaagcgccaagagctcgaggcagaactggcaaaggtcagagctgaaatggaggtcctgctcgccagtaaagctcgcgctgaggaagagtctcggagcactagcgaaaagtctaaacagagactcgaagctgaagcaggccggttcagagagctggccgaagaggccgcccggctcagagcccttgccgaagaggctaaacggcagaggcagctcgcagaagaggatgccgcccgccagcgcgctgaggctgagagagtgctggctgagaagctcgccgccattggagaggcaaccaggttgaaaacagaagcagagattgcccttaaggaaaaggaagcagaaaacgagcgcctgcgacggctcgctgaagacgaagccttccagagaagacggttggaagaacaagctgcccagcataaggcagatattgaggaacgtctggcccagctgcgaaaggccagcgattcagaactggagcggcagaaaggtctcgtggaggacactctcaggcaaagacggcaggtggaggaagaaatcctggcccttaaggcatcattcgagaaagccgcagccggaaaggctgagctggagttagaactgggaaggataagatccaatgccgaggacacattgagatcgaaggaacaagccgaactcgaggcagccagacagagacaactagctgccgaggaggagaggcgaaggcgtgaagccgaggagcgcgtccagaaaagcctggccgccgaagaagaggccgcgcgtcaacggaaggctgccctcgaggaggtcgagcggctgaaggctaaggtcgaggaggcccgcaggctgagggaaagagctgaacaggagtccgctcggcagttgcagctggcacaggaggctgcacagaagcgcctacaggccgaagaaaaagctcatgccttcgccgtccagcagaaggagcaggaacttcagcagacgctgcagcaggaacaatccgttctcgatcagctgaggggagaggctgaagctgctagacgggcagcggaagaagcggaggaggcacgggtgcaagccgagagggaagcagcacagtcgcgccggcaggtcgaggaggccgagcggctgaaacagtctgctgaggagcaggcccaggcaagggcccaggcgcaggcagccgcggaaaagcttcgtaaggaggccgagcaggaggcagctcggagggcgcaggccgaacaggctgccctccgccaaaagcaggccgccgacgccgaaatggaaaagcacaaaaagttcgccgagcaaacacttcggcagaaggcacaggtggaacaggagcttaccaccttaagactacagctggaggagaccgaccaccagaaaaatcttctcgatgaagagttacagcgcctgaaagcagaggcgaccgaagcggcgcgtcagcggtcccaggtagaagaggagctctttagcgttagggtccagatggaagagttgagcaaactgaaggcaagaattgaagcagagaatagggcactaatccttcgggataaggacaatactcagcggtttctccaggaggaggctgaaaagatgaaacaagtggccgaagaggctgcacggctcagcgtcgctgcacaggaggccgcccgcctgagacagctggcggaggaggatctggcccagcaacgagccttagctgagaagatgctgaaagagaagatgcaggcggttcaggaagctacccgactcaaggccgaggcagaactgttacagcagcagaaggagctcgcccaggagcaagctagaaggctgcaggaggacaaagagcagatggctcaacaactcgctgaagagacccagggatttcagaggacactagaggcggagagacagcggcagcttgaaatgagtgccgaggccgagcggctgaaacttcgagtcgctgagatgtctagagcgcaggctcgcgcagaggaggatgcacagcgtttccgcaaacaggccgaggaaataggggagaagctgcatcgaacagagctggctacgcaggagaaggtgacgcttgtgcaaaccttggagatccagagacagcagtctgaccacgacgccgaaaggcttagggaggccatcgccgagctcgaaagggagaaagaaaaattgcagcaggaggcaaagctgctccaactcaaaagtgaggagatgcagaccgtacagcaagagcagctgttgcaggagacccaagccttacagcagtcattcctgtccgagaaggactctctgctgcagagggaacgtttcattgagcaggaaaaggccaagctggaacagctgttccaggacgaagtggccaaggcacagcagttgcgggaggaacagcagcggcagcaacaacagatggagcaggagcggcagagattagtcgctagtatggaagaggcacgacggagacagcatgaagccgaagaaggagtccgcaggaaacaggaagagcttcaacagctcgaacagcagcgcaggcagcaggaagagcttctcgcggaggaaaatcagcgactgcgagagcaattgcagctgttagaagaacagcacagagccgctcttgcccacagtgaagaagtaactgcatcgcaggtggccgctactaagaccttgcccaatggtcgagatgccctcgatggccctgcggcagaagccgagccagagcacagcttcgatgggctgcggcgtaaggttagcgcccagaggctccaggaggccgggatcctgtctgcggaagagctccagcggttagctcaaggccacacaacagtggatgagttggcgcgccgtgaggatgtccgtcactacctgcagggcagaagctccattgccggcctattgcttaaggctacgaatgagaagctctccgtctatgcagcactgcagagacagctgctttctcctgggacggcacttatcctgctcgaagcacaggcagcatccggatttctgctcgatcccgttagaaaccgccggctcaccgtgaacgaggcggtcaaagaaggggtggttggccctgaacttcaccacaagctgctgtctgccgagcgcgctgtaacaggctataaggacccttatacaggtcagcagataagtctatttcaggctatgcagaaaggcctcattgtgagagagcatgggattcgcttgctggaggcgcagatcgctaccggaggagtaattgacccagtacactcccaccgtgtccctgtggatgtggcctaccgacgcggctatttcgacgaggaaatgaatagggtgcttgcagacccttctgatgatactaaagggttttttgaccctaacacacacgagaacttaacatacctacagctgctggagcggtgtgtggaggaccccgaaactggtctgtgcttgttaccccttacagataaagccgccaagggcggcgaattggtttacaccgacagcgaagctcgggatgtgttcgagaaggcaaccgtgtctgcccccttcggaaaatttcagggcaagaccgtgaccatctgggagattataaactccgagtacttcacggcagagcagcgtcgcgatctcttacgccagtttcggaccggtcggattacagttgagaagatcatcaagatcataattaccgtggtcgaggagcaggaacaaaagggtagactgtgcttcgagggactacgaagccttgtacctgccgctgagttactggagagcagggtaatagacagagagctctaccagcaactgcaaaggggtgagcgcagtgtgcgggacgtggccgaggtagacactgtgaggcgggccctccgtggcgccaacgttatcgctggtgtctggctggaggaggcgggacagaaattatcaatctataacgcgttaaagaaggacctgctgccaagcgacatggctgtagcactcctggaggcccaagccgggactggtcacatcattgaccccgctacatccgcaagactgacggttgatgaagccgtccgcgcgggtctagttgggcctgaatttcacgaaaagctcctctctgcagaaaaagccgtcacaggctaccgggatccttataccgggcaatccgtatctcttttccaggcactgaagaaagggcttattcctcgagaacagggtctacgactcctggacgcgcagctgagcactggaggaatcgttgatccaagcaagtcgcatagagttcctctggatgtcgcttgtgccagagggtgcctggacgaagaaactagccgggcactgagcgcccccagagccgatgctaaagcttattctgacccatccaccggcgaaccagctacttacggcgagctgcagcagcgatgccgccccgaccagctgacaggactgagcctcctcccacttagtgagaaggcggcaagagcacgacaagaagaactgtactcggaactgcaggctagagaaaccttcgagaagacacccgtcgaggttcccgtcggcggctttaaagggaggacagtaaccgtgtgggaactcatttcatccgaatactttaccgcagaacagcgtcaggagcttctccgccagttcaggactggaaaggtgacggtggaaaaggtgatcaagattctcatcaccattgtcgaggaggtcgagacattaagacaagaaaggcttagcttttctggtctccgggcccctgtcccggcctccgagctcttggcaagtggggtcctgtcccgggcgcaattcgagcagctgaaagatggaaagaccaccgtgaaagatcttagtgaattgggctccgttcgcaccctgctgcagggtagcggctgtttggccgggatttacctggaggatactaaagaaaaagtgtccatttacgaagcaatgagaaggggactgctgagagcgactacggctgcacttttattggaggcgcaggcggctaccggattcctcgtggacccggtgagaaatcagaggctgtatgtgcatgaggctgtgaaggccggtgtggttggtcccgaacttcacgagcagctgctcagcgcagaaaaggccgtaactggttaccgggacccctactcaggttcgacaatcagcctctttcaggccatgcagaagggcctggttctgcggcaacatggcattcggttgctggaggctcaaatagctacaggcgggattatagacccggttcattcacaccgtgtaccagtggatgtggcctaccaaagagggtatttttcagaggagatgaatagagttcttgccgacccttccgatgataccaaagggttcttcgacccgaacacccacgaaaacctcacatataggcagttactggaacgctgcgtggaggacccagagacaggactgcgacttctccccctgaagggtgccgagaaagcggaagtggtggagacgacacaggtatacaccgaggaggagactcgcagagcattcgaagaaacacagattgatatccctggcggaggctctcacggcggtagcacaatgtctctgtgggaggtgatgcagagtgatctgatcccagaggagcaacgtgcccaactcatggccgattttcaggcagggcgcgtcacgaaggagcggatgatcattatcatcatcgaaattatcgagaaaaccgagattatcaggcagcaggggctggcctcttacgactacgtgcggagacgcctgaccgctgaggatctctttgaggctcgcataatcagcctggaaacatacaacttattgagagaaggcacacgatcactgagggaagctctcgaggcggagtccgcctggtgttatctctatggtactggctcggtcgcaggggtatacctccctggatcccggcagaccctgtctatctatcaggctctcaagaagggcctgctgtctgccgaggtggctagactactactcgaagcacaagccgccaccgggttcttgcttgatccagtaaagggagaaagactcactgtggatgaagcggtacgcaagggtttagtgggcccagagctccacgacaggttgctgtctgctgagagagccgttacaggatatcgcgatccttataccgaacagactatctccctctttcaggcaatgaaaaaagaactgatccccacggaggaggcacttagactcttagacgcccagctagcgacgggcggcattgttgatcccagactgggttttcacctacccctggaggtcgcttatcagaggggctatctgaacaaagacacccatgaccagctcagtgaaccctccgaagtcaggtcttatgtcgaccccagtaccgacgagagactgtcatatactcaattacttaggagatgcagaagagacgatggaactggccagctcctgctgccattatcagacgcacggaagttgacattccgtggattaagaaagcagattactatggaggagctggttaggagtcaagtgatggacgaagccaccgccttgcagctgagggagggactgacttccatcgaagaggttacaaaaaatctgcagaagtttctcgagggcacctcttgcatcgctggagtattcgtagacgccaccaaggagaggctcagtgtatatcaggccatgaagaaggggattattagacccggcacagccttcgaactcttagaagctcaagccgcaactggctacgtgatcgacccgattaaaggacttaaactcaccgttgaggaagctgtgagaatggggattgttggccccgaattcaaagacaagctgctgagcgcagaaagggcagtcacgggatacaaagatccctactctgggaaactgattagtctttttcaggcgatgaagaagggcctaatcttaaaagaccatggcatcaggttactggaggcgcagattgctacaggcggaatcattgacccggaggagagccaccggcttcctgttgaagtcgcatataaaaggggcctgtttgatgaggagatgaatgaaatcctcactgacccgtctgacgataccaaaggcttcttcgacccaaatacagaagagaatctgacttacctgcaactcatggagaggtgtattactgatccccagactggattgtgcttactgccgttaaaggagaaaaaaagggaacgcaagaccagttcgaagtcatccgtgcggaaacggagggtggtgattgttgatccggagaccggcaaggagatgtcagtctatgaggcgtacaggaaaggattgatcgaccaccaaacttatctagagctgtcagaacaggagtgcgaatgggaggaaattacaatcagctcttcagacggagtggtcaagtcaatgatcattgaccgcagatcaggtaggcagtacgatatcgacgatgcaattgccaaaaacctcatcgacaggagcgctctggaccagtatcgtgccgggacgctctcaattacagaattcgcggacatgttgtccggaaatgctggcggcttccgaagccggagctctagcgtgggatcaagcagcagctatcctatctctcccgctgtttcccggacccaactagcgtcctggtcagatcctaccgaagagaccgggcccgttgcaggcatcttagacacagagaccctggaaaaggtttccataacagaagcaatgcatcgtaatctggtggacaatatcaccggacagcgtttgctggaggctcaagcctgcactgggggcatcatcgacccatctaccggtgaaaggtttccagtgaccgacgccgtaaacaaaggccttgtagataagattatggtggataggatcaatctggctcagaaggccttctgtggctttgaggacccccgcactaaaaccaagatgtctgccgcacaggcgctcaagaaggggtggttgtattatgaggctggacaaagatttttggaagttcagtacctcaccggtggcctgatagaacccgacacacccggcagagtccccctcgacgaagccctccaacggggtacagtagacgcacggactgcccagaaacttagggacgttggggcttacagtaaatatttgacctgcccaaagactaagttaaagatatcttataaggatgccttagaccggtcaatggttgaggaggggacgggattacgattgttagaggccgccgcgcagtccactaagggttactattcgccttattcggtcagtggcagcggaagcactgcgggcagccgaacagggtcacggaccggttccagggcgggaagcagaagaggcagcttcgacgccaccggctctggctttagcatgacattcagctcttctagctattcttcgtctgggtacgggcgccggtatgccagcggctcttcagcatcgctcgggggacccgaatccgctgttgcttag

SEQ ID NO: 262150 - DNA, 13713 bp, Artificial Sequence
  derived and/or modified sequence
atgagtggagaggatgctgaggtgcgggctgtgtcagaagatgtgtccaacggaagctcgggctccccctcccctggggatacccttccctggaacctggggaagactcagaggtctcgacgatcagggggaggtgccggatccaacggctctgtcctcgatcccgcagagagagcagtaatcaggattgctgacgaaagggatagggttcaaaagaaaacattcacaaagtgggtcaataaacacctgattaaagcccagcggcatattagtgacctgtatgaagatctacgggatggacacaacctgatttcactcctggaggttctgagcggggatagtttgccccgggagaaaggcaggatgaggtttcacaagctccagaacgttcagattgctctggattatcttagacatcgacaagtcaagctggtgaacatacgtaacgacgacatcgccgatgggaacccgaaactgaccctcggattgatctggaccattatcctgcatttccagatctctgatattcaggtaagcgggcagtccgaggacatgaccgcaaaagagaaactcctgctgtggagccagcggatggtggagggttaccaagggctacgctgtgataacttcacaagctcctggcgggatggtcgcctgttcaacgctatcatccacaggcataagcctctgctgatcgatatgaacaaagtctacaggcagacaaacctagaaaacctcgaccaggctttctctgtagctgaacgggacttaggcgtgacgcggttgctcgatccggaagacgtggacgtcccccagcccgatgagaaaagcataattacatacgtgtcatcactctacgatgcaatgccacgggtgcccgacgtgcaggatggagagctgcaactgcgatggcaggagtaccgcgagctggtgctgctactgttgcagtggatgagacatcacaccgccgcttttgaagagcgccgcttcccctcgtcattcgaagaaatagagatactgtggtcgcaattcctaaagtttaaggagatggagctacccgcaaaggaggccgacaaaaaccgcagtaagggcatctaccagtccttagagggagccgtgcaggctggacagcttaaggtcccgccgggctatcatcctctggatgtggaaaaggaatggggaaaactgcatgttgcgatcctcgaacgcgagaaacagttgcgcagtgagtttgagagactggaatgtctacagcgtattgtgacaaagctgcagatggaagcgggtctttgtgaggagcagctgaatcaggccgatgccctgttgcagagtgacgtcaggctactcgctgcgggcaaggtgcctcaaagagcaggtgaagtggagcgcgatctcgacaaagccgatagcatgattagactgctctttaatgacgtgcaaacacttaaggacgggcggcatccccagggggagcaaatgtataggcgagtgtacagactccatgagcggcttgtcgcgatcaggactgaatataacctgcgcctcaaggccggcgtggcggcccctgcaacccaggtggcgcaggttaccttacaatctgtccaaaggcggccagaactggaggacagtactttgcgctacctgcaggatcttttggcatgggtcgaagaaaatcagcatcgcgtcgatggcgcagaatggggcgtcgacctgccatcagtggaggcccaactcgggtcccaccggggcctccatcagtctattgaggaatttcgcgcgaaaattgaacgcgcccgcagcgatgaaggtcagttatctccagctacccgtggtgcttacagagactgcttgggccggttggacctgcagtatgccaagctgctcaactccagcaaagctaggctgcgcagtctggagtcattacactcttttgttgccgccgcaacaaaggagttgatgtggctcaacgaaaaggaggaggaggaagttggattcgattggagcgaccgaaacacaaacatgaccgcgaaaaaggagtcttactcagctctgatgagagaactagagttgaaagaaaagaaaattaaagagttgcagaatgccggcgaccggctgctacgggaggatcacccagctaggccaacagtggagtcattccaggccgctctgcagactcaatggtcctggatgctgcagctgtgttgctgtattgaggctcatttaaaggagaacgcggcgtacttccagtttttttccgatgtgagagaagcagaggggcaattacagaagttgcaggaggctctgcgacgcaaatactcctgtgaccgctcggcgacagtcactcgacttgaggacctactgcaggacgcccaggatgaaaaagagcagttaaatgaatacaaaggccacttatcaggactggcgaaacgcgccaaggctgtggtgcaattaaagccgcgtcacccagcccaccctatgcgcggaagactgcccctcctcgccgtctgtgactataaacaggttgaagtcactgtccacaaaggcgatgaatgccagcttgttggcccagcccagccatctcactggaaggtgctgtcatcgtccggatccgaggccgccgtccccagtgtgtgcttcttggttcccccccccaaccaggaagctcaggaggccgtgacgagactggaggcgcagcaccaagcacttgttactctgtggcaccagctccacgtggacatgaagagcctgttggcctggcaaagccttcgcagagatgtacaactgatccgaagctggagcttggcgactttcaggaccctcaaaccagaggaacaacgtcaagcattgcacagcctcgaacttcactaccaagcattcctgagggactctcaggacgccggcgggttcgggcccgaggatagacttatggctgagcgagaatacgggtcttgctcacatcattatcagcagctgctacagagtttggaacagggcgcccaagaggaaagccgatgccagaggtgtataagcgagctgaaagatatccggctgcagctggaagcttgtgagacaaggacagtgcataggctgaggctgccactggacaaagagcccgctagggagtgtgcccagcggatagcagagcagcagaaggcccaggcagaagtggagggattgggtaagggagtggcaagattgtctgcggaagcagaaaaggttctcgccctcccggaaccttcgcctgccgcaccgactttgagatcagagttagaactgactttggggaagttggagcaggtccgaagcctgtccgccatctacctggagaagctgaagaccattagcctggtgattcgcgggacacaaggggcggaagaggttctgcgcgcgcatgaagaacagctgaaggaagcacaggcggtaccagcgaccctgcccgagctcgaggcaaccaaggcaagcctgaagaagcttagggctcaggccgaggcacagcagcctacgttcgacgcactgcgggacgagcttaggggggcccaggaggtgggggagcggttgcagcagcgtcacggcgaacgagacgtcgaagttgaacgctggcgcgaacgcgtcgcacagcttctggagagatggcaggccgtactggctcagactgatgtcagacagcgggagcttgagcagctggggaggcaactcaggtattacagagaaagtgccgacccactgggagcctggttgcaggatgcgagacgtcgacaggaacagattcaggcaatgcccctggctgacagtcaagctgttcgggaacagttacggcaggaacaggctcttctggaggagatagagcgccacggtgagaaagtggaggagtgtcaaaggtttgccaaacaatatatcaacgccatcaaggactacgagctgcaactggtgacctataaggcccaactggaacccgtggcctccccagccaagaaaccaaaagttcagtcagggagtgagagcgtcatacaagagtacgtggacttaagaacgcattacagcgagctgacaacacttaccagccaatatatcaagttcatcagtgaaacacttagaagaatggaagaagaggagagactggccgaacagcagcgtgccgaggagcgggaacgcctcgccgaagttgaggcagctctggagaaacaacgtcaactggccgaggcccatgcacaagccaaagcacaggccgaacgagaagccaaggagctgcagcagcgaatgcaagaagaggtggtcaggagagaggaggccgccgtagacgctcagcagcagaaaaggtccatccaagaggaactgcagcagttgcggcagagcagtgaggcagaaatccaagctaaagcacgacaggctgaggccgcagagcgcagtcgcctgagaattgaagaagagatccgagtagttcggttgcagcttgaggccacagagaggcagcgcggcggcgctgagggagagcttcaggctcttcgggcccgggcagaagaggccgaggcacaaaagcggcaagcgcaggaggaggctgaacgcctgcgccgtcaggtgcaggacgagagtcagcgcaaacgacaggctgaggtcgaactcgcctcacgagtcaaggctgaagctgaagctgctcgggaaaagcaacgtgcccttcaggccttagaggaactccgactccaggctgaagaagcagaaaggaggctacgccaggcagaagtggagcgtgcccggcaggtgcaagttgcattagagacagcccagagatcagccgaggcggagctgcaatctaagcgggcttcattcgcggagaagacggcgcagctggaacggtcgctccaggaagaacacgtcgccgtggcacaattgcgagaggaagccgagcggagggcacagcaacaagcagaggccgagagagcgcgggaggaggcggagagggaactggaacgctggcaactgaaggccaacgaggcattgcgcttacgcttgcaggctgaggaggtggcccagcagaaatccttggcccaggcggaagctgagaaacaaaaggaggaggccgaacgggaagcccggagaagaggcaaagccgaagagcaggccgttcgccaaagggagctggcggaacaggaacttgagaaacagcgtcaactggctgagggcaccgcgcagcagcggctggcagcggagcaggaactcatacgtctccgcgctgagacagagcagggtgaacagcagaggcaattgctcgaggaagagctggcgagactgcagagggaagccgcagcagccacccagaaaagacaggaactggaagcggaactggccaaggtgcgcgccgagatggaagtgctgctggcttctaaggctcgtgcggaggaggaatccagatcaaccagtgagaaaagcaagcagaggttagaagccgaggcaggacgctttcgagagctggctgaggaggccgccaggttaagagcactggctgaagaggccaaaaggcagaggcagttagctgaggaggacgccgccagacaaagagccgaggctgaaagggttttggcggagaaactcgccgcaattggagaggccactaggctgaaaacagaggcagagattgctctcaaggagaaagaggcagagaacgagaggctccgccgtttggcggaggatgaagctttccaaaggagacgactggaggaacaggccgcgcagcataaggcagacattgaggaacgactcgcccagctgagaaaggccagcgattctgaactggagagacagaaagggctggtggaagatacgctgcgacagcggaggcaggtcgaggaggaaatcctcgcacttaaagcaagttttgaaaaagcggccgcggggaaggctgagctggagcttgagctaggccgcattcgctcaaacgctgaggacacccttcggagcaaagagcaggctgaactcgaggcagcacgccagagacagcttgcagccgaagaggagaggaggcgcagagaggccgaggagcgcgttcagaagagtctggccgcagaggaagaggctgcacgccagagaaaagccgccctggaagaggttgagcgtctgaaggccaaagtcgaggaagctcggcggctgagagagagggccgagcaggagagtgcccgccaactgcaactggcccaggaggccgcccaaaaacggctccaagccgaagaaaaagcacatgcatttgcggtacagcagaaggagcaagagctgcagcagactctgcagcaggaacagtccgtattggaccagttaaggggggaggcagaggctgcaaggagggccgctgaagaggcggaagaagcgagggtgcaagctgagagggaggcggcacaatcccgtcgccaggttgaggaagcagagcggctgaagcaatcagccgaagagcaggcccaggcccgcgctcaggctcaggcggccgcagagaagctgcgcaaggaagcagagcaggaagcagccagaagagcccaggctgagcaggccgccctgcgccaaaaacaggctgccgacgccgagatggaaaaacataagaagttcgctgagcaaaccctgagacagaaggctcaggtcgagcaggagttgacaaccctgaggctccaactcgaagagacagaccaccagaaaaacttactggatgaggagttgcaacgattgaaggccgaagcaactgaagccgcacgtcagcggtcccaggttgaagaggagcttttttcggtcagggtgcagatggaggagctgagtaaactgaaggctcgaatcgaggctgaaaaccgggctctcattttgagagacaaggataatacacaacgattcctacaggaagaagcggagaagatgaaacaggtggccgaagaagccgctaggctatctgtggccgcacaagaggcagccagactacgtcagctcgccgaggaagatctggcccaacagagggctctcgctgagaagatgttgaaagagaagatgcaggccgtccaagaagccaccagactgaaggcagaggccgaactcctgcaacagcagaaggagttggcacaggagcaggctagaagattacaggaagacaaagagcagatggcccagcaactggccgaggaaactcaaggatttcagaggaccctcgaggccgagcgccagcgtcagttggaaatgtcggccgaggccgagaggctcaaactgagagtggcagagatgagcagagcacaggccagagctgaagaggacgcccaaagatttcgcaagcaggcggaggagatcggggagaagctccatcgcacagaactggctactcaggaaaaggtcaccctcgtgcagacactggagatccaacggcagcaatccgatcacgacgccgagaggttgagggaggcaattgcagagctggagcgggagaaggaaaagctgcagcaggaggcaaagttattacagcttaaaagcgaagaaatgcagacagtgcagcaagaacaactcttgcaagaaacacaggctcttcagcagagctttttgtcggagaaagattctctgcttcagagagagcgcttcatcgagcaagaaaaggctaagctggaacaacttttccaagatgaggtggctaaggcccagcagctgagggaggagcagcaacgccagcagcagcaaatggaacaagagcgccagagacttgtagcatctatggaggaggccagacgcaggcagcacgaagcagaggagggtgttaggcggaagcaggaggagctgcaacagctcgagcaacagcgccgacagcaggaggaattgctggcggaggagaatcagcgattgcgcgagcagttgcaattgttggaggagcaacacagggctgccctggcacattccgaggaggtgactgccagccaagttgcagctactaagaccctgcccaacgggagagatgcactggatggccctgctgctgaggctgagcccgagcattcattcgatgggcttcgacggaaagtgagtgcacagagacttcaggaggcaggaatcctgagcgctgaggagctgcagcggctggcccaggggcatacgaccgtcgatgagcttgccagacgcgaggacgtacggcactatctgcaggggaggtcttctattgcagggctgctgctaaaagccaccaatgagaaactctctgtgtatgccgccctgcagcgccaattgcttagtcccggtacggctctcatcctgctggaggcccaagccgctagtgggttcctgctggatcccgtgaggaacagacggctgactgtgaacgaggccgtgaaggagggagtggtgggtcctgagctccaccataagctgctgagtgcagagagagccgtgaccgggtataaagacccctacactggacaacagatctcgctgtttcaggctatgcagaagggcctgatcgtgcgcgagcatggcattcgcctacttgaggcccaaatagctacagggggggtgatagacccggtgcatagccaccgcgtgccggtggatgtggcatacagaaggggttacttcgatgaagagatgaatagggttcttgctgacccttccgacgacacaaagggcttcttcgatcccaatacacacgagaatctaacctacctgcagcttcttgagcgttgtgtcgaggatcctgagacgggcttatgcctcctcccattaaccgacaaggcagctaagggcggagagctggtctacacagattcagaagctcgggatgtctttgaaaaggctactgtatcagccccgtttggaaagtttcagggaaaaactgtcacaatatgggagattataaatagtgagtattttactgcggagcagaggcgggatcttctgagacaattccggaccggtcggattacggtggaaaaaatcataaagatcattattactgtggtggaagagcaggagcagaagggacgactgtgttttgagggtctccgtagcctagtgcccgcggctgaactgctggaaagccgcgtgatagaccgcgaactctatcagcagttgcagagaggggaacggagtgtaagagacgttgccgaagtagatacggtgagaagagcgttgcgcggggccaacgttatcgctggagtgtggctggaggaagccgggcagaagctgagcatctacaatgcattaaagaaagacctcctcccatccgatatggccgtggctcttttagaggctcaggctgggaccggacacataatcgatcccgctacttccgccagactgactgttgacgaagctgttcgcgccgggctggtagggccagagtttcatgagaaattgttgagcgctgaaaaagcagtgactggatatcgcgacccatacacagggcagagcgtgagcctcttccaggctctaaagaaaggactcatcccgagagaacaggggttgcgcttgctggatgctcagctcagcactggtggaatcgtcgatcctagtaagtcccatagagttcccctggatgtagcttgcgcacggggatgtctagatgaggaaacaagcagggccctgtccgctccacgagccgacgccaaggcatactccgaccctagtactggggagccagccacgtatggagagttgcagcaacgatgccggcccgaccagctgaccgggctgtccctcttgcctcttagtgagaaggcagctcgggctaggcaggaagagctgtattctgaattgcaagccagggagacgtttgagaagacacctgtagaagtgcctgtgggcggcttcaaaggcagaacagtgacagtgtgggagctgatcagctctgaatacttcacagcagagcaaaggcaggagctgctgagacagttccggaccggaaaggtaacagtggagaaggtcattaagatcctgatcaccattgtggaggaagtcgaaactctgcggcaagaaagactttccttctctggactccgagcaccggttccagccagcgagctgctcgcctccggtgtcctttccagggcccagtttgagcagctgaaggacggaaagaccacagtcaaggatcttagtgaattgggtagcgtacgcaccctccttcagggcagcggatgtctcgctggaatttatctggaagacaccaaggagaaagtgtccatttacgaagccatgcggcgcgggctccttcgggccaccactgcagccctgctgcttgaggcccaggctgccaccggctttttggtagaccctgtgcgcaatcagcggctttatgtacacgaagcagtgaaagctggcgtggtgggacccgaactacacgagcagctcctctcagctgaaaaggctgtgaccggttacagggatccatattcagggagcacaatctcactattccaggctatgcagaaagggctcgtgctgcgccaacatggaatcaggttgctcgaggctcagatcgcaactgggggcatcatcgacccggtgcactcccaccgcgtccctgtggacgtggcgtaccagcggggctatttcagtgaggaaatgaaccgagtgctggccgacccctcagatgacaccaaaggatttttcgacccaaacacccacgaaaacctgacttatcgtcaactgctagaaaggtgcgtcgaagaccctgagacaggtcttcgtcttcttccattgaagggggcagagaaagctgaggtagtggagacgacacaggtctatacagaggaggaaacccggagggctttcgaagaaacgcagattgacatccctggcggggggtcgcacggtggctccactatgtccctctgggaagttatgcagtctgatcttattcctgaggaacagcgagctcagctgatggcagattttcaggctgggcgagtgaccaaggagcgcatgatcatcatcattatcgaaataatcgagaagacagaaattataaggcagcagggtctcgcctcatacgattatgttcggcgtcggctaactgctgaggacctcttcgaagcccgtatcattagcctggaaacgtacaatttgcttagggagggaactcgctcactgcgagaagccctggaggccgagtctgcatggtgttatctttacggaactggctcagtggccggtgtgtacctgcctggctctcggcagaccctcagtatttatcaagcgctgaagaagggccttttgagcgcagaagttgcccgcctgctgctggaggctcaagccgccacgggattcctgttggatcctgtgaagggcgagaggctgaccgtcgacgaggcggtgagaaaaggattagtcggcccagaactccatgacaggctgttgtccgctgagagagcagtgactggctacagggatccgtacactgagcagacgatctccctattccaggctatgaagaaggagctgatcccgacggaggaggctcttcgattgctcgacgcacagttggctacagggggaatcgtggaccctcgcctgggattccatctccccctggaggtggcctatcagcgcgggtatcttaacaaagacactcacgatcagttgtcagagcctagtgaagttcgatcctatgttgatccatccaccgatgaacgcctctcctatacacaacttctgcgcaggtgcagaagggacgacggaaccgggcagctgctactgccgctgagcgacgctcggaagctgacctttcgtggattgcgaaagcaaattacaatggaggaacttgtccgatctcaagtgatggatgaagcaactgcgttgcaactcagagagggccttacatcaattgaggaggtgactaaaaatctgcaaaagtttctcgaggggacctcctgcattgccggcgtgtttgtcgacgccacaaaagagagactctccgtctaccaagcaatgaagaagggaatcatccgccctgggacagcttttgagttactggaagcccaggccgccacaggctatgtgatcgaccctatcaaggggttaaaactcacagtggaggaagccgtgcggatgggcatcgtgggccctgagttcaaagacaagttactcagcgcggagagggctgtcacagggtacaaagacccatactctggcaaactcatttcccttttccaggcaatgaaaaaggggttgatcctgaaggaccacggcatcaggctgctagaggctcagattgctaccgggggaatcatagatcccgaggaatctcaccgtctgcctgtggaagtggcctataagcgaggtctgttcgacgaggagatgaacgaaatactcactgacccatcagacgatactaaaggttttttcgaccccaatactgaggagaacttaacctaccttcagttaatggagcgctgcattacagacccccagaccggactttgtctgctccctctgaaagagaagaaaagggaacggaagactagctctaagagctccgtgcgcaagcggcgcgtggtgatcgtcgatccagaaacgggaaaggaaatgtcggtatatgaggcttaccggaaaggtttgattgatcatcaaacctatctcgaactatccgagcaggagtgcgaatgggaggaaattacaatcagttcttctgatggcgtggttaaaagcatgattatcgataggcgctctgggaggcagtacgatattgacgacgctatcgccaagaacttgatagaccggtcagcccttgatcagtaccgggcgggaacactcagcataacggagttcgctgatatgctgtccggcaatgccggtggatttagatcccggtcttcaagtgtgggctcatcttcctcataccctatttcacccgccgtgtcccggacccagctggcaagctggtccgacccaacggaggaaacagggccggttgcaggcatcctggacactgaaaccctggagaaagtgagcatcaccgaggctatgcatcgaaatcttgtggataacataaccggtcagaggcttttggaagcccaggcatgtacggggggaattatcgatccctctacaggagaacgatttcctgtgacggacgctgtgaacaaaggcctggtggataaaatcatggtggacagaatcaacctggcccaaaaggctttctgtggattcgaagacccccgcactaaaacaaagatgtcagccgcacaagctctgaagaaaggatggctttactacgaagccggtcagcggttcctggaggtacagtacctgacaggcggcctcatcgaaccggataccccaggacgggtcccgcttgacgaggccttgcagcggggaacggtggatgcacgtaccgcgcagaagcttcgagatgtcggagcctatagtaaatatctgacgtgccctaagaccaagctgaagattagttataaggacgcccttgaccgaagtatggtcgaagaggggacaggtctgaggttgctagaagctgccgcccagtcgactaaaggatattacagcccatatagcgtgagcgggtcagggagtactgccgggagccgcactgggtcacgcactggctccagggctggttcgcgcagggggagcttcgacgctaccggcagtggattctcaatgactttcagctcctcctcctattccagttccggttacggacgacggtacgctagcggatcttccgcatccctggggggccccgaatctgcagtcgcttag

SEQ ID NO: 262151 - DNA, 14055 bp, Artificial Sequence
  derived and/or modified sequence
atggtggccggcatgctgatgccccgggaccagctgcgggccatctatgaggtgctcttccgggagggcgtgatggtggccaagaaggacagaagacccaggagcctgcacccccacgtgcctggggtgaccaacctgcaggtgatgagggccatggccagcctgcgggcccggggcctggtgcgggagacctttgcctggtgccacttctactggtacctgaccaatgaaggaattgcccacctgcggcagtacctgcacctgcccccagagatcgtgcctgccagcctgcagagggtgagaagacctgtggccatggtgatgcctgcccggaggacccctcatgtgcaggccgtgcagggccccctgggcagcccccccaagaggggccccctgcccacagaggagcagagggtgtacagaaggaaggagctggaggaggtgtccccagagacccctgtggtgcctgccaccacccagaggaccctggcccggcccggccctgagcccgccccagccacagatgagcgggacagagtgcagaagaagaccttcaccaagtgggtgaacaagcacctgatcaaggcccagaggcacatcagtgacctgtatgaggacctgagagatggccacaacctgatcagcctgctggaggtgctgagcggggacagcctgccccgggagaagggccgcatgaggttccacaagctgcagaatgtgcagatcgccctggactacctgcggcaccggcaggtgaagctggtgaacatcagaaatgatgacattgctgatggcaaccccaagctgaccctgggcctcatctggaccatcatcctgcacttccagatcagtgacatccaggtgtctggccagagcgaggacatgacagccaaggagaagctgctgctgtggagccagaggatggtggagggctaccagggcctgcgctgtgacaacttcaccagctcctggagagatggccgcctcttcaatgccatcatccaccgccacaagcccctgctgattgacatgaacaaggtgtaccggcagaccaacctggagaacctggaccaggccttctctgtggccgagcgggacctgggcgtgacccggctgctggaccctgaagatgtggatgtgccccagccagatgagaagagcatcatcacctacgtgagcagcctgtatgatgccatgccccgggtgcctgatgtgcaggatggagtgcgggccaatgagctgcagctgcgctggcaggagtaccgggagctggtgctgctgctgctgcagtggatgaggcaccacacagctgcctttgaggagcggcgcttccccagcagctttgaggagattgagatcctgtggagccagttcctgaagttcaaggagatggagctgcctgccaaggaggccgacaagaacagaagcaagggcatctaccagagcctggagggcgctgtgcaggccggccagctgaaggtgcccccaggctaccaccccctggatgtggagaaggagtggggcaagctgcacgtggccatcctggagcgggagaagcagctgcggagtgaatttgagcggctggagtgcctgcagagaattgtgaccaagctgcagatggaggccggcctgtgtgaggagcagctgaaccaggctgatgccctgctgcagagtgatgtgcggctgctggccgccggcaaggtgccccagagagctggggaggtggagcgggacctggacaaggctgacagcatgatccggctgctcttcaatgatgtgcagaccctgaaggatggccgccacccccagggcgagcagatgtacagaagagtgtaccgcctgcacgagcggctggtggccatcagaacagagtacaacctgcggctgaaggccggcgtggccgccccagccacccaggtggcccaggtgaccctgcagagcgtgcagaggaggcctgagctggaggacagcaccctgcgctacctgcaggacctgctggcctgggtggaggagaaccagcaccgggtggatggagctgagtggggcgtggacctgcccagcgtggaggcccagctgggcagccaccggggcctgcaccagagcattgaggagttccgggccaagattgagcgggcccggagtgatgagggccagctgagccctgccaccaggggggcctacagagactgcctgggccgcctggacctgcagtatgccaagctgctgaacagcagcaaggcccggctgcggagcctggagagcctgcacagctttgtggccgccgccaccaaggagctgatgtggctgaatgagaaggaggaggaggaggtgggctttgactggagcgacaggaacaccaacatgacagccaagaaggagagctacagcgccctgatgagggagctggagctgaaggagaagaagatcaaggagctgcagaatgctggggaccggctgctgcgggaggaccacccagcccggcccaccgtggagagcttccaggccgccctgcagacccagtggagctggatgctgcagctgtgctgctgcatcgaggcccacctgaaggaaaatgctgcctacttccagttcttcagtgatgtgcgggaggccgagggccagctgcagaagctgcaggaggccctgcggaggaagtacagctgtgacagaagtgccaccgtgacccggctggaggacctgctgcaggatgcccaggatgagaaggagcagctgaatgagtacaagggccacctgagcggcctggccaagagggccaaggctgtggtgcagctgaagcccaggcacccagcccaccccatgaggggccgcctgcccctgctggccgtgtgtgactacaagcaggtggaggtgacagtgcacaagggagatgagtgccagctggtgggccctgcccagcccagccactggaaggtgctgagcagcagcggcagcgaggccgctgtgcccagcgtgtgcttcctggtgcccccacccaaccaggaggcccaggaggccgtgacccggctggaggcccagcaccaggccctggtgaccctgtggcaccagctgcacgtggacatgaagagcctgctggcctggcagagcctgcggagagatgtgcagctgatccgctcctggagcctggccaccttccgcaccctgaagccagaggagcagaggcaggccctgcacagcctggagctgcactaccaggccttcctgcgggacagccaggatgctgggggctttggacctgaggaccggctgatggccgagcgggagtatggcagctgcagccaccactaccagcagctgctgcagagcctggagcagggcgcccaggaggagagccgctgccagcgctgcatcagcgagctgaaggacatccggctgcagctggaggcctgtgagaccaggacagtgcaccggctgcggctgcccctggacaaggagcccgccagagaatgtgcccagagaattgctgagcagcagaaggcccaggccgaggtggagggcctgggcaaaggagtggcccggctgtctgctgaggccgagaaggtgctggccctgcctgagcccagccctgctgcccccaccctgcggtctgagctggagctgaccctgggcaagctggagcaggtgcgcagcctgagcgccatctacctggagaagctgaagaccatcagcctggtgatccggggcacccagggcgctgaggaggtgctgcgggcccacgaggagcagctgaaggaggcccaggccgtgcctgccaccctgcctgagctggaggccaccaaggccagcctgaagaagctgcgggcccaggccgaggcccagcagcccacctttgatgccctgagagatgagctgcggggggcccaggaggtgggggagcggctgcagcagagacatggagagagagatgtggaggtggagcgctggagggagcgggtggcccagctgctggagcgctggcaggccgtgctggcccagacagatgtgcggcagcgggagctggagcagctgggccggcagctgcgctactaccgggagagcgctgaccccctgggcgcctggctgcaggatgcccggcggcggcaggagcagatccaggccatgcccctggccgacagccaggccgtgcgggagcagctgcggcaggagcaggccctgctggaggagattgagcggcacggggagaaggtggaggagtgccagagatttgccaagcagtacatcaatgccatcaaggactatgagctgcagctggtgacctacaaggcccagctggagcctgtggccagccctgccaagaagcccaaggtgcagagcggcagcgagagcgtcatccaggagtatgtggacctgcggacccactacagcgagctgaccaccctgaccagccagtacatcaagttcatcagcgagaccctgcggaggatggaggaggaggagcggctggccgagcagcagagagctgaggagcgggagcggctggccgaggtggaggccgccctggagaagcagaggcagctggccgaggcccacgcccaggccaaggcccaggccgagcgggaggccaaggagctgcagcagaggatgcaggaggaggtggtgcggcgggaggaggccgctgtggatgcccagcagcagaagaggagcatccaggaggagctgcagcagctgcggcagagcagcgaggccgagatccaggccaaggcccggcaggccgaggccgctgagaggagccggctgagaattgaggaggagatccgggtggtgcggctgcagctggaggccacagagcggcagaggggcggcgctgagggggagctgcaggccctgcgggcccgggcagaggaggccgaggcccagaagaggcaggcccaggaggaggccgagcggctgcggcggcaggtgcaggatgagagccagaggaagaggcaggccgaggtggagctggccagccgggtgaaggccgaggccgaggccgcccgggagaagcagagggccctgcaggccctggaggagctgcggctgcaggccgaggaggccgagcggcggctgcggcaggccgaggtggagcgggcccggcaggtgcaggtggccctggagacagcccagaggtctgctgaggccgagctgcagagcaagagggccagctttgctgagaagacagcccagctggagaggagcctgcaggaggagcacgtggccgtggcccagctgcgggaggaggccgagcggcgggcccagcagcaggccgaggccgagcgggcccgggaggaggccgagcgggagctggagcgctggcagctgaaggccaatgaggccctgcggctgcggctgcaggccgaggaggtggcccagcagaagagcctggcccaggccgaggccgagaagcagaaggaggaggccgagcgggaggcccggcggcggggcaaggccgaggagcaggccgtgcggcagcgggagctggccgagcaggagctggagaagcagaggcagctggccgagggcacagcccagcagaggctggccgctgagcaggagctgatccggctgcgggcagagacagagcagggcgagcagcagaggcagctgctggaggaggagctggcccggctgcagcgggaggccgccgccgccacccagaagaggcaggagctggaggccgagctggccaaggtgcgggcagagatggaggtgctgctggccagcaaggcccgggcagaggaggagagccgcagcaccagcgagaagagcaagcagaggctggaggccgaggccggccgcttccgggagctggccgaggaggccgcccggctgcgggccctggccgaggaggccaagaggcagaggcagctggccgaggaggatgctgcccggcagagagctgaggccgagcgggtgctggccgagaagctggccgccatcggggaggccacccggctgaagacagaagctgagatcgccctgaaggagaaggaggctgaaaatgaaaggctgcggcggctggccgaggatgaggccttccagaggcggcggctggaggagcaggccgcccagcacaaggctgacatcgaggagcggctggcccagctgaggaaggccagtgacagcgagctggagcggcagaagggcctggtggaggacaccctgcggcagaggcggcaggtggaggaggagatcctggccctgaaggccagctttgagaaggctgctgctgggaaggccgagctggagctggagctgggccgcatccgcagcaatgctgaggacaccctgcggagcaaggagcaggccgagctggaggccgcccggcagaggcagctggccgctgaggaggagaggagaagaagagaagctgaggagcgggtgcagaagagcctggccgctgaggaggaggccgcccggcagaggaaggccgccctggaggaggtggagcggctgaaggccaaggtggaggaggcccggcggctgcgggagagagctgagcaggagagcgcccggcagctgcagctggcccaggaggccgcccagaagaggctgcaggccgaggagaaggcccacgcctttgctgtgcagcagaaggagcaggagctgcagcagaccctgcagcaggagcagagcgtgctggaccagctgcggggggaggccgaggccgcccggcgggctgctgaggaggccgaggaggcccgggtgcaggccgagcgggaggccgcccagagccggcggcaggtggaggaggccgagcggctgaagcagagcgctgaggagcaggcccaggcccgggcccaggcccaggccgctgctgagaagctgaggaaggaggccgagcaggaggccgcccggcgggcccaggccgagcaggccgccctgcggcagaagcaggccgcagatgctgagatggagaagcacaagaagtttgctgagcagaccctgcggcagaaggcccaggtggagcaggagctgaccaccctgcggctgcagctggaggagacagaccaccagaagaacctgctggatgaggagctgcagaggctgaaggccgaggccacagaggccgcccggcagaggagccaggtggaggaggagctgttctctgtgcgggtgcagatggaggagctgagcaagctgaaggcccgcatcgaggctgaaaatagagccctgatcctgcgggacaaggacaacacccagcgcttcctgcaggaggaggccgagaagatgaagcaggtggccgaggaggccgcccggctgtctgtggccgcccaggaggccgcccggctgcggcagctggccgaggaggacctggcccagcagagggccctggccgagaagatgctgaaggagaagatgcaggccgtgcaggaggccacccggctgaaggccgaggccgagctgctgcagcagcagaaggagctggcccaggagcaggcccggcggctgcaggaggacaaggagcagatggcccagcagctggccgaggagacccagggcttccagaggaccctggaggccgagcggcagaggcagctggagatgtctgctgaggccgagcggctgaagctgcgggtggccgagatgagccgggcccaggcccgggcagaggaggatgcccagcgcttcaggaagcaggccgaggagatcggggagaagctgcacaggacagagctggccacccaggagaaggtgaccctggtgcagaccctggagatccagaggcagcagagcgaccatgatgctgagcggctgcgggaggccatcgccgagctggagcgggagaaggagaagctgcagcaggaggccaagctgctgcagctgaagtctgaggagatgcagacagtgcagcaggagcagctgctgcaggagacccaggccctgcagcagagcttcctgtctgagaaggacagcctgctgcagcgggagcgcttcatcgagcaggagaaggccaagctggagcagctgttccaggatgaggtggccaaggcccagcagctgcgggaggagcagcagaggcagcagcagcagatggagcaggagcggcagaggctggtggcctccatggaggaggcccggcggcggcagcatgaagctgaggagggcgtgcggaggaagcaggaggagctgcagcagctggagcagcagaggcggcagcaggaggagctgctggccgaggagaaccagaggctgcgggagcagctgcagctgctggaggagcagcaccgggccgccctggcccacagcgaggaggtgacagccagccaggtggccgccaccaagaccctgcccaacggcagagatgccctggatggccctgctgctgaggccgagcctgagcacagctttgatggcctgcggaggaaggtgtctgcccagaggctgcaggaggccggcatcctgtctgctgaggagctgcagaggctggcccagggccacaccaccgtggatgagctggccaggagagaagatgtgcgccactacctgcagggccgcagcagcattgctggcctgctgctgaaggccaccaatgagaagctgtctgtgtatgctgccctgcagaggcagctgctgagccctggaacagccctgatcctgctggaggcccaggccgccagcggcttcctgctggaccctgtgaggaacagaaggctgactgtgaatgaggccgtgaaggagggcgtggtgggccctgagctgcaccacaagctgctgtctgctgagagagctgtgacaggctacaaggacccctacacaggccagcagatcagcctcttccaggccatgcagaagggcctcatcgtgcgggagcacggcatccggctgctggaggcccagatcgccactggaggagtgattgatcctgtgcacagccaccgggtgcctgtggatgtggcctaccgccggggctactttgatgaggagatgaacagagtgctggccgaccccagtgatgacaccaagggcttctttgaccccaacacccatgagaacctgacctacctgcagctgctggagcgctgtgtggaggaccctgagaccggcctgtgcctgctgcccctgacagacaaggccgccaagggcggggagctggtgtacacagacagcgaggccagagatgtgtttgagaaggccaccgtgtctgccccctttgggaagttccagggcaagacagtgaccatctgggagatcatcaacagcgagtacttcaccgctgagcagaggcgggacctgctgcggcagttcagaacaggccgcatcaccgtggagaagatcatcaagatcatcatcaccgtggtggaggagcaggagcagaagggccgcctgtgctttgagggcctgcggagcctggtgcctgctgctgagctgctggagagccgggtgattgaccgggagctgtaccagcagctgcagagaggagagaggtctgtgagagatgtggccgaggtggacacagtgcggcgggccctgcggggggccaacgtgattgctggggtgtggctggaggaggccggccagaagctgagcatctacaatgccctgaagaaggacctgctgcccagcgacatggctgtggccctgctggaggcccaggccggcaccggccacatcattgatcctgccaccagcgcccggctgactgtggatgaggccgtgcgggccggcctggtgggccctgagttccacgagaagctgctgtctgctgagaaggctgtgacaggctacagagacccctacacaggccagagcgtgtccctcttccaggccctgaagaagggcctcatcccccgggagcagggcctgcggctgctggatgcccagctgagcactggaggcatcgtggaccccagcaagagccaccgggtgcccctggatgtggcctgtgcccggggctgcctggatgaggagaccagccgggccctgagcgcccccagggcagatgccaaggcctacagcgaccccagcactggagagcccgccacctatggagagctgcagcagcgctgcaggccagaccagctgaccggcctgagcctgctgcccctgtctgagaaggccgcccgggcccggcaggaggagctgtacagcgagctgcaggcccgggagacctttgagaagacccctgtggaggtgcctgtgggcggcttcaagggccgcacagtgacagtgtgggagctgatcagcagcgagtacttcaccgctgagcagaggcaggagctgctgcggcagttcagaacaggcaaggtgacagtggagaaggtgatcaagatcctgatcaccatcgtggaggaggtggagaccctgcggcaggagcggctgtccttcagcggcctgcgggcccctgtgcctgccagcgagctgctggccagcggcgtgctgagccgggcccagtttgagcagctgaaggatggcaagaccaccgtgaaggacctgtctgagctgggctctgtgaggaccctgctgcagggcagcggctgcctggccggcatctacctggaggacaccaaggagaaggtgtccatctatgaggccatgagaagaggcctgctgcgggccaccacagctgccctgctgctggaggcccaggccgccaccggcttcctggtggaccctgtgaggaaccagaggctgtatgtgcatgaagctgtgaaggccggcgtggtgggccctgagctgcacgagcagctgctgtctgctgagaaggctgtgacaggctacagagacccctacagcggcagcaccatcagcctcttccaggccatgcagaagggcctggtgctgcggcagcacggcatccggctgctggaggcccagatcgccaccggcggcatcatcgaccctgtgcacagccaccgggtgcctgtggatgtggcctaccagaggggctacttcagcgaggagatgaacagagtgctggccgaccccagtgatgacaccaagggcttctttgaccccaacacccatgagaacctgacctaccggcagctgctggagcgctgtgtggaggaccctgagaccggcctgcggctgctgcccctgaagggagctgagaaggccgaggtggtggagaccacccaggtgtacacagaggaggagacccggcgggcctttgaggagacccagattgacatccctgggggcggcagccatggaggcagcaccatgagcctgtgggaggtgatgcagagcgacctgatccctgaggagcagagggcccagctgatggctgacttccaggccggccgggtgaccaaggagaggatgatcatcatcatcatcgagatcatcgagaagacagagatcatccggcagcagggcctggccagctatgactatgtgagaagaaggctgacagctgaggacctgtttgaggcccgcatcatcagcctggagacctacaacctgctgcgggagggcaccaggagcctgcgggaggccctggaggccgagagcgcctggtgctacctgtatggcaccggctctgtggccggcgtgtacctgcccggcagccggcagaccctgagcatctaccaggccctgaagaagggcctgctgtctgctgaggtggcccggctgctgctggaggcccaggccgccaccggcttcctgctggaccctgtgaagggggagcggctgactgtggatgaggccgtgaggaagggcctggtgggccctgagctgcatgaccggctgctgtctgctgagagagctgtgacaggctacagagacccctacacagagcagaccatcagcctcttccaggccatgaagaaggagctgatccccacagaggaggccctgcggctgctggatgcccagctggccactggaggcatcgtggacccccggctgggcttccacctgcccctggaggtggcctaccagaggggctacctgaacaaggacacccatgaccagctgtctgagcccagcgaggtgcgctcctatgtggaccccagcacagatgagcggctgagctacacccagctgctgcggcgctgcagaagagatgatggcaccggccagctgctgctgcccctgagtgatgccaggaagctgaccttccggggcctgaggaagcagatcaccatggaggagctggtgcgcagccaggtgatggatgaggccacagccctgcagctgcgggagggcctgaccagcattgaggaggtgaccaagaacctgcagaagttcctggagggcaccagctgcatcgccggcgtgtttgtggatgccaccaaggagcggctgtctgtgtaccaggccatgaagaagggcatcatccggcctggaacagcctttgagctgctggaggcccaggccgccaccggctacgtgattgaccccatcaagggcctgaagctgactgtggaggaggccgtgaggatgggcatcgtgggccctgagttcaaggacaagctgctgtctgctgagagagctgtgacaggctacaaggacccctacagcggcaagctgatcagcctcttccaggccatgaagaagggcctcatcctgaaggaccacggcatccggctgctggaggcccagatcgccaccggcggcatcatcgaccctgaggagagccaccggctgcctgtggaggtggcctacaagaggggcctgtttgatgaggagatgaatgagatcctgacagaccccagtgatgacaccaagggcttctttgaccccaacacagaggagaacctgacctacctgcagctgatggagcgctgcatcacagacccccagacaggcctgtgcctgctgcccctgaaggagaagaagcgggagaggaagaccagcagcaagagctctgtgaggaagagaagagtggtgattgtggaccctgagaccgggaaggagatgtctgtgtatgaggcctacaggaagggcctgattgaccaccagacctacctggagctgtctgagcaggagtgtgagtgggaggagatcaccatcagcagcagtgatggagtggtgaagtccatgatcatcgaccggcgcagcggccggcagtatgacattgatgatgccatcgccaagaacctgattgacagaagtgccctggaccagtacagagctggcaccctgagcatcacagaatttgctgacatgctgtctggaaatgccggcggcttccgcagccgcagcagctctgtgggcagcagcagcagctaccccatcagccctgctgtgtccaggacccagctggcctcctggagcgaccccacagaggagaccggccctgtggccggcatcctggacacagagaccctggagaaggtgtccatcacagaggccatgcacaggaacctggtggacaacatcaccggccagaggctgctggaggcccaggcctgcacaggaggcatcatcgaccccagcactggagagcgcttccctgtgacagatgctgtgaacaagggcctggtggacaagatcatggtggaccgcatcaacctggcccagaaggccttctgtggctttgaggaccccaggaccaagaccaagatgtctgctgcccaggccctgaagaagggctggctgtactatgaggccggccagcgcttcctggaggtgcagtacctgactggaggcctgattgaaccagacaccccaggccgggtgcccctggatgaggccctgcagaggggcaccgtggatgccaggacagcccagaagctgagagatgtgggcgcctacagcaagtacctgacctgccccaagaccaagctgaagatctcctacaaggatgccctggaccgctccatggtggaggagggcaccggcctgcggctgctggaggccgccgcccagagcaccaagggctactacagcccctacagcgtgtctggcagcggcagcacagctggcagcaggacaggcagcaggacaggcagccgggccggcagcagaagaggcagctttgatgccaccggcagcggcttctccatgaccttcagcagcagcagctacagcagcagcggctacggccgccgctatgccagcggcagcagcgccagcctgggcggccctgagagcgctgtggcctag

SEQ ID NO: 262152 - DNA, 13644 bp, Artificial Sequence
  derived and/or modified sequence
atgagccagcaccagctgcgggtgccccagcctgagggcctgggcaggaagaggaccagcagcgaggacaacctgtacctggccgtgctgcgggccagcgagggcaagaaggatgagcgggacagagtgcagaagaagaccttcaccaagtgggtgaacaagcacctgatcaaggcccagaggcacatcagtgacctgtatgaggacctgagagatggccacaacctgatcagcctgctggaggtgctgagcggggacagcctgccccgggagaagggccgcatgaggttccacaagctgcagaatgtgcagatcgccctggactacctgcggcaccggcaggtgaagctggtgaacatcagaaatgatgacattgctgatggcaaccccaagctgaccctgggcctcatctggaccatcatcctgcacttccagatcagtgacatccaggtgtctggccagagcgaggacatgacagccaaggagaagctgctgctgtggagccagaggatggtggagggctaccagggcctgcgctgtgacaacttcaccagctcctggagagatggccgcctcttcaatgccatcatccaccgccacaagcccctgctgattgacatgaacaaggtgtaccggcagaccaacctggagaacctggaccaggccttctctgtggccgagcgggacctgggcgtgacccggctgctggaccctgaagatgtggatgtgccccagccagatgagaagagcatcatcacctacgtgagcagcctgtatgatgccatgccccgggtgcctgatgtgcaggatggagtgcgggccaatgagctgcagctgcgctggcaggagtaccgggagctggtgctgctgctgctgcagtggatgaggcaccacacagctgcctttgaggagcggcgcttccccagcagctttgaggagattgagatcctgtggagccagttcctgaagttcaaggagatggagctgcctgccaaggaggccgacaagaacagaagcaagggcatctaccagagcctggagggcgctgtgcaggccggccagctgaaggtgcccccaggctaccaccccctggatgtggagaaggagtggggcaagctgcacgtggccatcctggagcgggagaagcagctgcggagtgaatttgagcggctggagtgcctgcagagaattgtgaccaagctgcagatggaggccggcctgtgtgaggagcagctgaaccaggctgatgccctgctgcagagtgatgtgcggctgctggccgccggcaaggtgccccagagagctggggaggtggagcgggacctggacaaggctgacagcatgatccggctgctcttcaatgatgtgcagaccctgaaggatggccgccacccccagggcgagcagatgtaccgccgggtgtaccgcctgcacgagcggctggtggccatcagaacagagtacaacctgcggctgaaggccggcgtggccgccccagccacccaggtggcccaggtgaccctgcagagcgtgcagaggaggcctgagctggaggacagcaccctgcgctacctgcaggacctgctggcctgggtggaggagaaccagcaccgggtggatggagctgagtggggcgtggacctgcccagcgtggaggcccagctgggcagccaccggggcctgcaccagagcattgaggagttccgggccaagattgaaagagcccggagtgatgagggccagctgagccctgccaccaggggggcctacagagactgcctgggccgcctggacctgcagtatgccaagctgctgaacagcagcaaggcccggctgcggagcctggagagcctgcacagctttgtggccgccgccaccaaggagctgatgtggctgaatgagaaggaggaggaggaggtgggctttgactggagcgacaggaacaccaacatgacagccaagaaggagagctacagcgccctgatgagggagctggagctgaaggagaagaagatcaaggagctgcagaatgctggggaccggctgctgcgggaggaccacccagcccggcccaccgtggagagcttccaggccgccctgcagacccagtggagctggatgctgcagctgtgctgctgcatcgaggcccacctgaaggaaaatgctgcctacttccagttcttcagtgatgtgcgggaggccgagggccagctgcagaagctgcaggaggccctgcggaggaagtacagctgtgacagaagtgccaccgtgacccggctggaggacctgctgcaggatgcccaggatgagaaggagcagctgaatgagtacaagggccacctgagcggcctggccaagagggccaaggctgtggtgcagctgaagcccaggcacccagcccaccccatgaggggccgcctgcccctgctggccgtgtgtgactacaagcaggtggaggtgacagtgcacaagggagatgagtgccagctggtgggccctgcccagcccagccactggaaggtgctgagcagcagcggcagcgaggccgctgtgcccagcgtgtgcttcctggtgcccccacccaaccaggaggcccaggaggccgtgacccggctggaggcccagcaccaggccctggtgaccctgtggcaccagctgcacgtggacatgaagagcctgctggcctggcagagcctgcggagagatgtgcagctgatccgctcctggagcctggccaccttccgcaccctgaagccagaggagcagaggcaggccctgcacagcctggagctgcactaccaggccttcctgcgggacagccaggatgctgggggcttcggcccagaagatcggctgatggccgagcgggagtatggcagctgcagccaccactaccagcagctgctgcagagcctggagcagggcgcccaggaggagagccgctgccagcgctgcatcagcgagctgaaggacatccggctgcagctggaggcctgtgagaccaggacagtgcaccggctgcggctgcccctggacaaggagcccgcccgggagtgtgcccagagaattgctgagcagcagaaggcccaggccgaggtggagggcctgggcaagggcgtggcccggctgtctgctgaggccgagaaggtgctggccctgcctgagcccagccctgctgcccccaccctgcggtctgagctggagctgaccctgggcaagctggagcaggtgcgcagcctgagcgccatctacctggagaagctgaagaccatcagcctggtgatccggggcacccagggcgctgaggaggtgctgcgggcccacgaggagcagctgaaggaggcccaggccgtgcctgccaccctgcctgagctggaggccaccaaggccagcctgaagaagctgcgggcccaggccgaggcccagcagcccacctttgatgccctgagagatgagctgcggggggcccaggaggtgggggagcggctgcagcagagacatggagagagagatgtggaggtggagcgctggagggagcgggtggcccagctgctggagcgctggcaggccgtgctggcccagacagatgtgcggcagcgggagctggagcagctgggccggcagctgcgctactaccgggagagcgctgaccccctgggcgcctggctgcaggatgcccggcggcggcaggagcagatccaggccatgcccctggccgacagccaggccgtgcgggagcagctgcggcaggagcaggccctgctggaggagattgaaagacatggagagaaggtggaggagtgccagagatttgccaagcagtacatcaatgccatcaaggactatgagctgcagctggtgacctacaaggcccagctggagcctgtggccagccctgccaagaagcccaaggtgcagagcggcagcgagagcgtcatccaggagtatgtggacctgcggacccactacagcgagctgaccaccctgaccagccagtacatcaagttcatcagcgagaccctgcggaggatggaggaggaggagcggctggccgagcagcagagagctgaggagcgggagcggctggccgaggtggaggccgccctggagaagcagaggcagctggccgaggcccacgcccaggccaaggcccaggccgagcgggaggccaaggagctgcagcagaggatgcaggaggaggtggtgagaagagaggaggccgctgtggatgcccagcagcagaagaggagcatccaggaggagctgcagcagctgcggcagagcagcgaggccgagatccaggccaaggcccggcaggccgaggccgctgagaggagccggctgcgcatcgaggaggagatccgggtggtgcggctgcagctggaggccacagagcggcagagaggaggagctgagggggagctgcaggccctgcgggcccgggcagaggaggccgaggcccagaagaggcaggcccaggaggaggccgagcggctgcggcggcaggtgcaggatgagagccagaggaagaggcaggccgaggtggagctggccagccgggtgaaggccgaggccgaggccgcccgggagaagcagagggccctgcaggccctggaggagctgcggctgcaggccgaggaggccgagcggcggctgcggcaggccgaggtggagcgggcccggcaggtgcaggtggccctggagacagcccagaggtctgctgaggccgagctgcagagcaagagggccagctttgctgagaagacagcccagctggagaggagcctgcaggaggagcacgtggccgtggcccagctgcgggaggaggccgagcggcgggcccagcagcaggccgaggccgagcgggcccgggaggaggccgagcgggagctggagcgctggcagctgaaggccaatgaggccctgcggctgcggctgcaggccgaggaggtggcccagcagaagagcctggcccaggccgaggccgagaagcagaaggaggaggccgagcgggaggccaggagaagaggcaaggccgaggagcaggccgtgcggcagcgggagctggccgagcaggagctggagaagcagaggcagctggccgagggcacagcccagcagaggctggccgctgagcaggagctgatccggctgcgggcagagacagagcagggcgagcagcagaggcagctgctggaggaggagctggcccggctgcagcgggaggccgctgctgccacccagaagaggcaggagctggaggccgagctggccaaggtgcgggcagagatggaggtgctgctggccagcaaggcccgggcagaggaggagagccgcagcaccagcgagaagagcaagcagaggctggaggccgaggccggccgcttccgggagctggccgaggaggccgcccggctgcgggccctggccgaggaggccaagaggcagaggcagctggccgaggaggatgctgcccggcagagagctgaggccgagcgggtgctggccgagaagctggccgccatcggggaggccacccggctgaagacagaggccgagatcgccctgaaggagaaggaggccgagaatgaaaggctgcggcggctggctgaagatgaggccttccagaggcggcggctggaggagcaggccgcccagcacaaggctgacatcgaggagcggctggcccagctgaggaaggccagtgacagcgagctggagcggcagaagggcctggtggaggacaccctgcggcagaggcggcaggtggaggaggagatcctggccctgaaggccagctttgagaaggctgctgctgggaaggccgagctggagctggagctgggccgcatccgcagcaatgctgaggacaccctgcggagcaaggagcaggccgagctggaggccgcccggcagaggcagctggccgctgaggaggagaggagaagaagagaggccgaggagcgggtgcagaagagcctggccgctgaggaggaggccgcccggcagaggaaggccgccctggaggaggtggagcggctgaaggccaaggtggaggaggcccggcggctgcgggagcgggcagagcaggagagcgcccggcagctgcagctggcccaggaggccgcccagaagaggctgcaggccgaggagaaggcccacgcctttgctgtgcagcagaaggagcaggagctgcagcagaccctgcagcaggagcagagcgtgctggaccagctgcggggggaggccgaggccgccaggagagctgctgaggaggccgaggaggcccgggtgcaggccgagcgggaggccgcccagagccggcggcaggtggaggaggccgagcggctgaagcagagcgctgaggagcaggcccaggcccgggcccaggcccaggccgctgctgagaagctgaggaaggaggccgagcaggaggccgcccggcgggcccaggccgagcaggccgccctgcggcagaagcaggccgcagatgctgagatggagaagcacaagaagtttgctgagcagaccctgcggcagaaggcccaggtggagcaggagctgaccaccctgcggctgcagctggaggagacagaccaccagaagaacctgctggatgaggagctgcagaggctgaaggccgaggccacagaagctgcccggcagaggagccaggtggaggaggagctgttctctgtgcgggtgcagatggaggagctgagcaagctgaaggccagaattgaagctgagaacagagccctgatcctgcgggacaaggacaacacccagcgcttcctgcaggaggaggccgagaagatgaagcaggtggccgaggaggccgcccggctgtctgtggccgcccaggaggccgcccggctgcggcagctggccgaggaggacctggcccagcagagggccctggccgagaagatgctgaaggagaagatgcaggccgtgcaggaggccacccggctgaaggccgaggccgagctgctgcagcagcagaaggagctggcccaggagcaggcccggcggctgcaggaggacaaggagcagatggcccagcagctggccgaggagacccagggcttccagaggaccctggaggccgagcggcagaggcagctggagatgtctgctgaggccgagcggctgaagctgcgggtggccgagatgagccgggcccaggcccgggcagaagaagatgcccagcgcttcaggaagcaggccgaggagattggagagaagctgcacaggacagagctggccacccaggagaaggtgaccctggtgcagaccctggagatccagaggcagcagagcgaccatgatgctgagcggctgcgggaggccatcgccgagctggagcgggagaaggagaagctgcagcaggaggccaagctgctgcagctgaagtctgaggagatgcagacagtgcagcaggagcagctgctgcaggagacccaggccctgcagcagagcttcctgtctgagaaggacagcctgctgcagcgggagcgcttcatcgagcaggagaaggccaagctggagcagctgttccaggatgaggtggccaaggcccagcagctgcgggaggagcagcagaggcagcagcagcagatggagcaggagcggcagaggctggtggcctccatggaggaggcccggcggcggcagcacgaggccgaggagggcgtgcggaggaagcaggaggagctgcagcagctggagcagcagaggcggcagcaggaggagctgctggccgaggagaaccagaggctgcgggagcagctgcagctgctggaggagcagcacagagctgccctggcccacagcgaggaggtgacagccagccaggtggccgccaccaagaccctgcccaacggcagagatgccctggatggccctgctgctgaggccgagcctgagcacagctttgatggcctgcggaggaaggtgtctgcccagaggctgcaggaggccggcatcctgtctgctgaggagctgcagaggctggcccagggccacaccaccgtggatgagctggcccggcgggaggatgtgcgccactacctgcagggccgcagcagcattgctggcctgctgctgaaggccaccaatgagaagctgtctgtgtatgctgccctgcagaggcagctgctgagccctggaacagccctgatcctgctggaggcccaggccgccagcggcttcctgctggaccctgtgaggaacagaaggctgactgtgaatgaagctgtgaaggagggcgtggtgggccctgagctgcaccacaagctgctgtctgctgagagagctgtgacaggctacaaggacccctacacaggccagcagatcagcctcttccaggccatgcagaagggcctgattgtgcgggagcacggcatccggctgctggaggcccagatcgccaccggcggcgtcatcgaccctgtgcacagccaccgggtgcctgtggatgtggcctacagaagaggctactttgatgaggagatgaacagagtgctggccgaccccagtgatgacaccaagggcttctttgaccccaacacccatgagaacctgacctacctgcagctgctggagcgctgtgtggaggaccctgagaccggcctgtgcctgctgcccctgacagacaaggccgccaagggcggggagctggtgtacacagattctgaggccagagatgtgtttgagaaggccaccgtgtctgccccctttgggaagttccagggcaagacagtgaccatctgggagatcatcaacagcgagtacttcaccgctgagcagaggcgggacctgctgcggcagttcagaacaggccgcatcaccgtggagaagatcatcaagatcatcatcaccgtggtggaggagcaggagcagaagggccgcctgtgctttgagggcctgcggagcctggtgcctgctgctgagctgctggagagcagggtcatcgaccgggagctgtaccagcagctgcagagaggagagaggtctgtgagagatgtggccgaggtggacacagtgagaagagccctgcggggggccaacgtgattgctggggtgtggctggaggaggccggccagaagctgagcatctacaatgccctgaagaaggacctgctgcccagcgacatggctgtggccctgctggaggcccaggccggcaccggccacatcatcgaccctgccaccagcgcccggctgactgtggatgaagctgtgcgggccggcctggtgggccctgagttccacgagaagctgctgtctgctgagaaggctgtgacaggctacagagacccctacacaggccagagcgtgtccctcttccaggccctgaagaagggcctcatcccccgggagcagggcctgcggctgctggatgcccagctgagcactggaggcatcgtggaccccagcaagagccaccgggtgcccctggatgtggcctgtgcccggggctgcctggatgaggagaccagccgggccctgagcgcccccagggcagatgccaaggcctacagcgaccccagcactggagagcccgccacctacggggagctgcagcagcgctgcaggccagaccagctgaccggcctgagcctgctgcccctgtctgagaaggccgcccgggcccggcaggaggagctgtacagcgagctgcaggcccgggagacctttgagaagacccctgtggaggtgcctgtgggcggcttcaagggccgcacagtgacagtgtgggagctgatcagcagcgagtacttcaccgctgagcagaggcaggagctgctgcggcagttcagaacaggcaaggtgacagtggagaaggtgatcaagatcctgatcaccatcgtggaggaggtggagaccctgcggcaggagcggctgtccttcagcggcctgcgggcccctgtgcctgccagcgagctgctggccagcggcgtgctgagccgggcccagtttgagcagctgaaggatggcaagaccaccgtgaaggacctgtctgagctgggctctgtgaggaccctgctgcagggcagcggctgcctggccggcatctacctggaggacaccaaggagaaggtgtccatctatgaggccatgaggcggggcctgctgcgggccaccacagctgccctgctgctggaggcccaggccgccaccggcttcctggtggaccctgtgaggaaccagaggctgtatgtgcatgaggccgtgaaggccggcgtggtgggccctgagctgcacgagcagctgctgtctgctgagaaggctgtgacaggctacagagacccctacagcggcagcaccatcagcctcttccaggccatgcagaagggcctggtgctgcggcagcacggcatccggctgctggaggcccagatcgccactggaggcatcattgatcctgtgcacagccaccgggtgcctgtggatgtggcctaccagaggggctacttcagcgaggagatgaacagagtgctggccgaccccagtgatgacaccaagggcttctttgaccccaacacccatgagaacctgacctaccggcagctgctggagcgctgtgtggaggaccctgagaccggcctgcggctgctgcccctgaagggagctgagaaggccgaggtggtggagaccacccaggtgtacacagaggaggagacccggcgggcctttgaggagacccagattgacatccctgggggcggcagccacggcggcagcaccatgagcctgtgggaggtgatgcagagcgacctgatccctgaggagcagagggcccagctgatggctgacttccaggccggccgggtgaccaaggagaggatgatcatcatcatcatcgagatcatcgagaagacagagatcatccggcagcagggcctggccagctatgactatgtgagaagaaggctgacagctgaggacctgtttgaggcccgcatcatcagcctggagacctacaacctgctgcgggagggcaccaggagcctgcgggaggccctggaggccgagagcgcctggtgctacctgtatggaactggatctgtggccggcgtgtacctgcccggcagccggcagaccctgagcatctaccaggccctgaagaagggcctgctgtctgctgaggtggcccggctgctgctggaggcccaggccgccaccggcttcctgctggaccctgtgaagggggagcggctgactgtggatgaagctgtgaggaagggcctggtgggccctgagctgcatgaccggctgctgtctgctgagagagctgtgacaggctacagagacccctacacagagcagaccatcagcctcttccaggccatgaagaaggagctgatccccacagaggaggccctgcggctgctggatgcccagctggccaccggcggcatcgtggacccccggctgggcttccacctgcccctggaggtggcctaccagaggggctacctgaacaaggacacccatgaccagctgtctgagcccagcgaggtgcgctcctatgtggaccccagcacagatgagcggctgagctacacccagctgctgcggcgctgcagaagagatgatggcaccggccagctgctgctgcccctgagtgatgccaggaagctgaccttccggggcctgaggaagcagatcaccatggaggagctggtgcgcagccaggtgatggatgaggccacagccctgcagctgcgggagggcctgaccagcattgaggaggtgaccaagaacctgcagaagttcctggagggcaccagctgcatcgccggcgtgtttgtggatgccaccaaggagcggctgtctgtgtaccaggccatgaagaagggcatcatccggcccggcacagcctttgagctgctggaggcccaggccgccaccggctacgtgattgaccccatcaagggcctgaagctgactgtggaggaggccgtgaggatgggcatcgtgggccctgagttcaaggacaagctgctgtctgctgagagagctgtgacaggctacaaggacccctacagcggcaagctgatcagcctcttccaggccatgaagaagggcctcatcctgaaggaccacggcatccggctgctggaggcccagatcgccactggaggcatcattgatcctgaggagagccaccggctgcctgtggaggtggcctacaagaggggcctgtttgatgaggagatgaatgagatcctgacagaccccagtgatgacaccaagggcttctttgaccccaacacagaggagaacctgacctacctgcagctgatggagcgctgcatcacagacccccagacaggcctgtgcctgctgcccctgaaggagaagaagcgggagaggaagaccagcagcaagagctctgtgaggaagagaagagtggtgattgtggaccctgagaccgggaaggagatgtctgtgtatgaggcctacaggaagggcctgattgaccaccagacctacctggagctgtctgagcaggagtgtgagtgggaggagatcaccatcagcagcagtgatggagtggtgaagtccatgatcatcgacagaagaagtggccggcagtatgacattgatgatgccatcgccaagaacctgattgacagaagtgccctggaccagtaccgggccggcaccctgagcatcacagaatttgctgacatgctgtctggaaatgctgggggcttccgcagccgcagcagctctgtgggcagcagcagcagctaccccatcagccctgctgtgtccaggacccagctggcctcctggagcgaccccacagaggagactggacctgtggccggcatcctggacacagagaccctggagaaggtgtccatcacagaggccatgcacaggaacctggtggacaacatcaccggccagaggctgctggaggcccaggcctgcaccggcggcatcatcgaccccagcactggagagcgcttccctgtgacagatgctgtgaacaagggcctggtggacaagatcatggtggaccgcatcaacctggcccagaaggccttctgtggctttgaggaccccaggaccaagaccaagatgtctgctgcccaggccctgaagaagggctggctgtactatgaagctggccagcgcttcctggaggtgcagtacctgaccggcggcctcatcgagccagacaccccaggccgggtgcccctggatgaggccctgcagaggggcaccgtggatgccaggacagcccagaagctgagagatgtgggcgcctacagcaagtacctgacctgccccaagaccaagctgaagatctcctacaaggatgccctggaccgctccatggtggaggagggcaccggcctgcggctgctggaggccgccgcccagagcaccaagggctactacagcccctacagcgtgtctggcagcggcagcacagctggcagcaggacaggcagcaggacaggcagcagagctggcagccggcggggcagctttgatgccactggaagtggcttctccatgaccttcagcagcagcagctacagcagcagcggctatggaagaagatatgccagcggcagcagcgccagcctgggcggccctgagagcgctgtggcctag

SEQ ID NO: 262153 - DNA, 13644 bp, Artificial Sequence
  derived and/or modified sequence
atggagcccagcggcagcctcttccccagcctggtggtggtgggccacgtggtgaccctggccgctgtgtggcactggaggcggggccgccgctgggcccaggatgagcaggatgagcgggacagagtgcagaagaagaccttcaccaagtgggtgaacaagcacctgatcaaggcccagaggcacatcagtgacctgtatgaggacctgagagatggccacaacctgatcagcctgctggaggtgctgagcggggacagcctgccccgggagaagggccgcatgaggttccacaagctgcagaatgtgcagatcgccctggactacctgcggcaccggcaggtgaagctggtgaacatcagaaatgatgacattgctgatggcaaccccaagctgaccctgggcctcatctggaccatcatcctgcacttccagatcagtgacatccaggtgtctggccagagcgaggacatgacagccaaggagaagctgctgctgtggagccagaggatggtggagggctaccagggcctgcgctgtgacaacttcaccagctcctggagagatggccgcctcttcaatgccatcatccaccgccacaagcccctgctgattgacatgaacaaggtgtaccggcagaccaacctggagaacctggaccaggccttctctgtggccgagcgggacctgggcgtgacccggctgctggaccctgaagatgtggatgtgccccagccagatgagaagagcatcatcacctacgtgagcagcctgtatgatgccatgccccgggtgcctgatgtgcaggatggagtgcgggccaatgagctgcagctgcgctggcaggagtaccgggagctggtgctgctgctgctgcagtggatgaggcaccacacagctgcctttgaggagcggcgcttccccagcagctttgaggagattgagatcctgtggagccagttcctgaagttcaaggagatggagctgcctgccaaggaggccgacaagaacagaagcaagggcatctaccagagcctggagggcgctgtgcaggccggccagctgaaggtgcccccaggctaccaccccctggatgtggagaaggagtggggcaagctgcacgtggccatcctggagcgggagaagcagctgcggagtgaatttgagcggctggagtgcctgcagagaattgtgaccaagctgcagatggaggccggcctgtgtgaggagcagctgaaccaggctgatgccctgctgcagagtgatgtgcggctgctggccgccggcaaggtgccccagagagctggggaggtggagcgggacctggacaaggctgacagcatgatccggctgctcttcaatgatgtgcagaccctgaaggatggccgccacccccagggcgagcagatgtaccgccgggtgtaccgcctgcacgagcggctggtggccatcagaacagagtacaacctgcggctgaaggccggcgtggccgccccagccacccaggtggcccaggtgaccctgcagagcgtgcagaggaggcctgagctggaggacagcaccctgcgctacctgcaggacctgctggcctgggtggaggagaaccagcaccgggtggatggagctgagtggggcgtggacctgcccagcgtggaggcccagctgggcagccaccggggcctgcaccagagcattgaggagttccgggccaagattgaaagagcccggagtgatgagggccagctgagccctgccaccaggggggcctacagagactgcctgggccgcctggacctgcagtatgccaagctgctgaacagcagcaaggcccggctgcggagcctggagagcctgcacagctttgtggccgccgccaccaaggagctgatgtggctgaatgagaaggaggaggaggaggtgggctttgactggagcgacaggaacaccaacatgacagccaagaaggagagctacagcgccctgatgagggagctggagctgaaggagaagaagatcaaggagctgcagaatgctggggaccggctgctgcgggaggaccacccagcccggcccaccgtggagagcttccaggccgccctgcagacccagtggagctggatgctgcagctgtgctgctgcatcgaggcccacctgaaggaaaatgctgcctacttccagttcttcagtgatgtgcgggaggccgagggccagctgcagaagctgcaggaggccctgcggaggaagtacagctgtgacagaagtgccaccgtgacccggctggaggacctgctgcaggatgcccaggatgagaaggagcagctgaatgagtacaagggccacctgagcggcctggccaagagggccaaggctgtggtgcagctgaagcccaggcacccagcccaccccatgaggggccgcctgcccctgctggccgtgtgtgactacaagcaggtggaggtgacagtgcacaagggagatgagtgccagctggtgggccctgcccagcccagccactggaaggtgctgagcagcagcggcagcgaggccgctgtgcccagcgtgtgcttcctggtgcccccacccaaccaggaggcccaggaggccgtgacccggctggaggcccagcaccaggccctggtgaccctgtggcaccagctgcacgtggacatgaagagcctgctggcctggcagagcctgcggagagatgtgcagctgatccgctcctggagcctggccaccttccgcaccctgaagccagaggagcagaggcaggccctgcacagcctggagctgcactaccaggccttcctgcgggacagccaggatgctgggggcttcggcccagaagatcggctgatggccgagcgggagtatggcagctgcagccaccactaccagcagctgctgcagagcctggagcagggcgcccaggaggagagccgctgccagcgctgcatcagcgagctgaaggacatccggctgcagctggaggcctgtgagaccaggacagtgcaccggctgcggctgcccctggacaaggagcccgcccgggagtgtgcccagagaattgctgagcagcagaaggcccaggccgaggtggagggcctgggcaagggcgtggcccggctgtctgctgaggccgagaaggtgctggccctgcctgagcccagccctgctgcccccaccctgcggtctgagctggagctgaccctgggcaagctggagcaggtgcgcagcctgagcgccatctacctggagaagctgaagaccatcagcctggtgatccggggcacccagggcgctgaggaggtgctgcgggcccacgaggagcagctgaaggaggcccaggccgtgcctgccaccctgcctgagctggaggccaccaaggccagcctgaagaagctgcgggcccaggccgaggcccagcagcccacctttgatgccctgagagatgagctgcggggggcccaggaggtgggggagcggctgcagcagagacatggagagagagatgtggaggtggagcgctggagggagcgggtggcccagctgctggagcgctggcaggccgtgctggcccagacagatgtgcggcagcgggagctggagcagctgggccggcagctgcgctactaccgggagagcgctgaccccctgggcgcctggctgcaggatgcccggcggcggcaggagcagatccaggccatgcccctggccgacagccaggccgtgcgggagcagctgcggcaggagcaggccctgctggaggagattgaaagacatggagagaaggtggaggagtgccagagatttgccaagcagtacatcaatgccatcaaggactatgagctgcagctggtgacctacaaggcccagctggagcctgtggccagccctgccaagaagcccaaggtgcagagcggcagcgagagcgtcatccaggagtatgtggacctgcggacccactacagcgagctgaccaccctgaccagccagtacatcaagttcatcagcgagaccctgcggaggatggaggaggaggagcggctggccgagcagcagagagctgaggagcgggagcggctggccgaggtggaggccgccctggagaagcagaggcagctggccgaggcccacgcccaggccaaggcccaggccgagcgggaggccaaggagctgcagcagaggatgcaggaggaggtggtgagaagagaggaggccgctgtggatgcccagcagcagaagaggagcatccaggaggagctgcagcagctgcggcagagcagcgaggccgagatccaggccaaggcccggcaggccgaggccgctgagaggagccggctgcgcatcgaggaggagatccgggtggtgcggctgcagctggaggccacagagcggcagagaggaggagctgagggggagctgcaggccctgcgggcccgggcagaggaggccgaggcccagaagaggcaggcccaggaggaggccgagcggctgcggcggcaggtgcaggatgagagccagaggaagaggcaggccgaggtggagctggccagccgggtgaaggccgaggccgaggccgcccgggagaagcagagggccctgcaggccctggaggagctgcggctgcaggccgaggaggccgagcggcggctgcggcaggccgaggtggagcgggcccggcaggtgcaggtggccctggagacagcccagaggtctgctgaggccgagctgcagagcaagagggccagctttgctgagaagacagcccagctggagaggagcctgcaggaggagcacgtggccgtggcccagctgcgggaggaggccgagcggcgggcccagcagcaggccgaggccgagcgggcccgggaggaggccgagcgggagctggagcgctggcagctgaaggccaatgaggccctgcggctgcggctgcaggccgaggaggtggcccagcagaagagcctggcccaggccgaggccgagaagcagaaggaggaggccgagcgggaggccaggagaagaggcaaggccgaggagcaggccgtgcggcagcgggagctggccgagcaggagctggagaagcagaggcagctggccgagggcacagcccagcagaggctggccgctgagcaggagctgatccggctgcgggcagagacagagcagggcgagcagcagaggcagctgctggaggaggagctggcccggctgcagcgggaggccgctgctgccacccagaagaggcaggagctggaggccgagctggccaaggtgcgggcagagatggaggtgctgctggccagcaaggcccgggcagaggaggagagccgcagcaccagcgagaagagcaagcagaggctggaggccgaggccggccgcttccgggagctggccgaggaggccgcccggctgcgggccctggccgaggaggccaagaggcagaggcagctggccgaggaggatgctgcccggcagagagctgaggccgagcgggtgctggccgagaagctggccgccatcggggaggccacccggctgaagacagaggccgagatcgccctgaaggagaaggaggccgagaatgaaaggctgcggcggctggctgaagatgaggccttccagaggcggcggctggaggagcaggccgcccagcacaaggctgacatcgaggagcggctggcccagctgaggaaggccagtgacagcgagctggagcggcagaagggcctggtggaggacaccctgcggcagaggcggcaggtggaggaggagatcctggccctgaaggccagctttgagaaggctgctgctgggaaggccgagctggagctggagctgggccgcatccgcagcaatgctgaggacaccctgcggagcaaggagcaggccgagctggaggccgcccggcagaggcagctggccgctgaggaggagaggagaagaagagaggccgaggagcgggtgcagaagagcctggccgctgaggaggaggccgcccggcagaggaaggccgccctggaggaggtggagcggctgaaggccaaggtggaggaggcccggcggctgcgggagcgggcagagcaggagagcgcccggcagctgcagctggcccaggaggccgcccagaagaggctgcaggccgaggagaaggcccacgcctttgctgtgcagcagaaggagcaggagctgcagcagaccctgcagcaggagcagagcgtgctggaccagctgcggggggaggccgaggccgccaggagagctgctgaggaggccgaggaggcccgggtgcaggccgagcgggaggccgcccagagccggcggcaggtggaggaggccgagcggctgaagcagagcgctgaggagcaggcccaggcccgggcccaggcccaggccgctgctgagaagctgaggaaggaggccgagcaggaggccgcccggcgggcccaggccgagcaggccgccctgcggcagaagcaggccgcagatgctgagatggagaagcacaagaagtttgctgagcagaccctgcggcagaaggcccaggtggagcaggagctgaccaccctgcggctgcagctggaggagacagaccaccagaagaacctgctggatgaggagctgcagaggctgaaggccgaggccacagaagctgcccggcagaggagccaggtggaggaggagctgttctctgtgcgggtgcagatggaggagctgagcaagctgaaggccagaattgaagctgagaacagagccctgatcctgcgggacaaggacaacacccagcgcttcctgcaggaggaggccgagaagatgaagcaggtggccgaggaggccgcccggctgtctgtggccgcccaggaggccgcccggctgcggcagctggccgaggaggacctggcccagcagagggccctggccgagaagatgctgaaggagaagatgcaggccgtgcaggaggccacccggctgaaggccgaggccgagctgctgcagcagcagaaggagctggcccaggagcaggcccggcggctgcaggaggacaaggagcagatggcccagcagctggccgaggagacccagggcttccagaggaccctggaggccgagcggcagaggcagctggagatgtctgctgaggccgagcggctgaagctgcgggtggccgagatgagccgggcccaggcccgggcagaagaagatgcccagcgcttcaggaagcaggccgaggagattggagagaagctgcacaggacagagctggccacccaggagaaggtgaccctggtgcagaccctggagatccagaggcagcagagcgaccatgatgctgagcggctgcgggaggccatcgccgagctggagcgggagaaggagaagctgcagcaggaggccaagctgctgcagctgaagtctgaggagatgcagacagtgcagcaggagcagctgctgcaggagacccaggccctgcagcagagcttcctgtctgagaaggacagcctgctgcagcgggagcgcttcatcgagcaggagaaggccaagctggagcagctgttccaggatgaggtggccaaggcccagcagctgcgggaggagcagcagaggcagcagcagcagatggagcaggagcggcagaggctggtggcctccatggaggaggcccggcggcggcagcacgaggccgaggagggcgtgcggaggaagcaggaggagctgcagcagctggagcagcagaggcggcagcaggaggagctgctggccgaggagaaccagaggctgcgggagcagctgcagctgctggaggagcagcacagagctgccctggcccacagcgaggaggtgacagccagccaggtggccgccaccaagaccctgcccaacggcagagatgccctggatggccctgctgctgaggccgagcctgagcacagctttgatggcctgcggaggaaggtgtctgcccagaggctgcaggaggccggcatcctgtctgctgaggagctgcagaggctggcccagggccacaccaccgtggatgagctggcccggcgggaggatgtgcgccactacctgcagggccgcagcagcattgctggcctgctgctgaaggccaccaatgagaagctgtctgtgtatgctgccctgcagaggcagctgctgagccctggaacagccctgatcctgctggaggcccaggccgccagcggcttcctgctggaccctgtgaggaacagaaggctgactgtgaatgaagctgtgaaggagggcgtggtgggccctgagctgcaccacaagctgctgtctgctgagagagctgtgacaggctacaaggacccctacacaggccagcagatcagcctcttccaggccatgcagaagggcctgattgtgcgggagcacggcatccggctgctggaggcccagatcgccaccggcggcgtcatcgaccctgtgcacagccaccgggtgcctgtggatgtggcctacagaagaggctactttgatgaggagatgaacagagtgctggccgaccccagtgatgacaccaagggcttctttgaccccaacacccatgagaacctgacctacctgcagctgctggagcgctgtgtggaggaccctgagaccggcctgtgcctgctgcccctgacagacaaggccgccaagggcggggagctggtgtacacagattctgaggccagagatgtgtttgagaaggccaccgtgtctgccccctttgggaagttccagggcaagacagtgaccatctgggagatcatcaacagcgagtacttcaccgctgagcagaggcgggacctgctgcggcagttcagaacaggccgcatcaccgtggagaagatcatcaagatcatcatcaccgtggtggaggagcaggagcagaagggccgcctgtgctttgagggcctgcggagcctggtgcctgctgctgagctgctggagagcagggtcatcgaccgggagctgtaccagcagctgcagagaggagagaggtctgtgagagatgtggccgaggtggacacagtgagaagagccctgcggggggccaacgtgattgctggggtgtggctggaggaggccggccagaagctgagcatctacaatgccctgaagaaggacctgctgcccagcgacatggctgtggccctgctggaggcccaggccggcaccggccacatcatcgaccctgccaccagcgcccggctgactgtggatgaagctgtgcgggccggcctggtgggccctgagttccacgagaagctgctgtctgctgagaaggctgtgacaggctacagagacccctacacaggccagagcgtgtccctcttccaggccctgaagaagggcctcatcccccgggagcagggcctgcggctgctggatgcccagctgagcactggaggcatcgtggaccccagcaagagccaccgggtgcccctggatgtggcctgtgcccggggctgcctggatgaggagaccagccgggccctgagcgcccccagggcagatgccaaggcctacagcgaccccagcactggagagcccgccacctacggggagctgcagcagcgctgcaggccagaccagctgaccggcctgagcctgctgcccctgtctgagaaggccgcccgggcccggcaggaggagctgtacagcgagctgcaggcccgggagacctttgagaagacccctgtggaggtgcctgtgggcggcttcaagggccgcacagtgacagtgtgggagctgatcagcagcgagtacttcaccgctgagcagaggcaggagctgctgcggcagttcagaacaggcaaggtgacagtggagaaggtgatcaagatcctgatcaccatcgtggaggaggtggagaccctgcggcaggagcggctgtccttcagcggcctgcgggcccctgtgcctgccagcgagctgctggccagcggcgtgctgagccgggcccagtttgagcagctgaaggatggcaagaccaccgtgaaggacctgtctgagctgggctctgtgaggaccctgctgcagggcagcggctgcctggccggcatctacctggaggacaccaaggagaaggtgtccatctatgaggccatgaggcggggcctgctgcgggccaccacagctgccctgctgctggaggcccaggccgccaccggcttcctggtggaccctgtgaggaaccagaggctgtatgtgcatgaggccgtgaaggccggcgtggtgggccctgagctgcacgagcagctgctgtctgctgagaaggctgtgacaggctacagagacccctacagcggcagcaccatcagcctcttccaggccatgcagaagggcctggtgctgcggcagcacggcatccggctgctggaggcccagatcgccactggaggcatcattgatcctgtgcacagccaccgggtgcctgtggatgtggcctaccagaggggctacttcagcgaggagatgaacagagtgctggccgaccccagtgatgacaccaagggcttctttgaccccaacacccatgagaacctgacctaccggcagctgctggagcgctgtgtggaggaccctgagaccggcctgcggctgctgcccctgaagggagctgagaaggccgaggtggtggagaccacccaggtgtacacagaggaggagacccggcgggcctttgaggagacccagattgacatccctgggggcggcagccacggcggcagcaccatgagcctgtgggaggtgatgcagagcgacctgatccctgaggagcagagggcccagctgatggctgacttccaggccggccgggtgaccaaggagaggatgatcatcatcatcatcgagatcatcgagaagacagagatcatccggcagcagggcctggccagctatgactatgtgagaagaaggctgacagctgaggacctgtttgaggcccgcatcatcagcctggagacctacaacctgctgcgggagggcaccaggagcctgcgggaggccctggaggccgagagcgcctggtgctacctgtatggaactggatctgtggccggcgtgtacctgcccggcagccggcagaccctgagcatctaccaggccctgaagaagggcctgctgtctgctgaggtggcccggctgctgctggaggcccaggccgccaccggcttcctgctggaccctgtgaagggggagcggctgactgtggatgaagctgtgaggaagggcctggtgggccctgagctgcatgaccggctgctgtctgctgagagagctgtgacaggctacagagacccctacacagagcagaccatcagcctcttccaggccatgaagaaggagctgatccccacagaggaggccctgcggctgctggatgcccagctggccaccggcggcatcgtggacccccggctgggcttccacctgcccctggaggtggcctaccagaggggctacctgaacaaggacacccatgaccagctgtctgagcccagcgaggtgcgctcctatgtggaccccagcacagatgagcggctgagctacacccagctgctgcggcgctgcagaagagatgatggcaccggccagctgctgctgcccctgagtgatgccaggaagctgaccttccggggcctgaggaagcagatcaccatggaggagctggtgcgcagccaggtgatggatgaggccacagccctgcagctgcgggagggcctgaccagcattgaggaggtgaccaagaacctgcagaagttcctggagggcaccagctgcatcgccggcgtgtttgtggatgccaccaaggagcggctgtctgtgtaccaggccatgaagaagggcatcatccggcccggcacagcctttgagctgctggaggcccaggccgccaccggctacgtgattgaccccatcaagggcctgaagctgactgtggaggaggccgtgaggatgggcatcgtgggccctgagttcaaggacaagctgctgtctgctgagagagctgtgacaggctacaaggacccctacagcggcaagctgatcagcctcttccaggccatgaagaagggcctcatcctgaaggaccacggcatccggctgctggaggcccagatcgccactggaggcatcattgatcctgaggagagccaccggctgcctgtggaggtggcctacaagaggggcctgtttgatgaggagatgaatgagatcctgacagaccccagtgatgacaccaagggcttctttgaccccaacacagaggagaacctgacctacctgcagctgatggagcgctgcatcacagacccccagacaggcctgtgcctgctgcccctgaaggagaagaagcgggagaggaagaccagcagcaagagctctgtgaggaagagaagagtggtgattgtggaccctgagaccgggaaggagatgtctgtgtatgaggcctacaggaagggcctgattgaccaccagacctacctggagctgtctgagcaggagtgtgagtgggaggagatcaccatcagcagcagtgatggagtggtgaagtccatgatcatcgacagaagaagtggccggcagtatgacattgatgatgccatcgccaagaacctgattgacagaagtgccctggaccagtaccgggccggcaccctgagcatcacagaatttgctgacatgctgtctggaaatgctgggggcttccgcagccgcagcagctctgtgggcagcagcagcagctaccccatcagccctgctgtgtccaggacccagctggcctcctggagcgaccccacagaggagactggacctgtggccggcatcctggacacagagaccctggagaaggtgtccatcacagaggccatgcacaggaacctggtggacaacatcaccggccagaggctgctggaggcccaggcctgcaccggcggcatcatcgaccccagcactggagagcgcttccctgtgacagatgctgtgaacaagggcctggtggacaagatcatggtggaccgcatcaacctggcccagaaggccttctgtggctttgaggaccccaggaccaagaccaagatgtctgctgcccaggccctgaagaagggctggctgtactatgaagctggccagcgcttcctggaggtgcagtacctgaccggcggcctcatcgagccagacaccccaggccgggtgcccctggatgaggccctgcagaggggcaccgtggatgccaggacagcccagaagctgagagatgtgggcgcctacagcaagtacctgacctgccccaagaccaagctgaagatctcctacaaggatgccctggaccgctccatggtggaggagggcaccggcctgcggctgctggaggccgccgcccagagcaccaagggctactacagcccctacagcgtgtctggcagcggcagcacagctggcagcaggacaggcagcaggacaggcagcagagctggcagccggcggggcagctttgatgccactggaagtggcttctccatgaccttcagcagcagcagctacagcagcagcggctatggaagaagatatgccagcggcagcagcgccagcctgggcggccctgagagcgctgtggcctag

SEQ ID NO: 262154 - DNA, 13578 bp, Artificial Sequence
  derived and/or modified sequence
atggaccccagccgggccatccagaatgagatcagcagcctgaaggatgagcgggacagagtgcagaagaagaccttcaccaagtgggtgaacaagcacctgatcaaggcccagaggcacatcagtgacctgtatgaggacctgagagatggccacaacctgatcagcctgctggaggtgctgagcggggacagcctgccccgggagaagggccgcatgaggttccacaagctgcagaatgtgcagatcgccctggactacctgcggcaccggcaggtgaagctggtgaacatcagaaatgatgacattgctgatggcaaccccaagctgaccctgggcctcatctggaccatcatcctgcacttccagatcagtgacatccaggtgtctggccagagcgaggacatgacagccaaggagaagctgctgctgtggagccagaggatggtggagggctaccagggcctgcgctgtgacaacttcaccagctcctggagagatggccgcctcttcaatgccatcatccaccgccacaagcccctgctgattgacatgaacaaggtgtaccggcagaccaacctggagaacctggaccaggccttctctgtggccgagcgggacctgggcgtgacccggctgctggaccctgaagatgtggatgtgccccagccagatgagaagagcatcatcacctacgtgagcagcctgtatgatgccatgccccgggtgcctgatgtgcaggatggagtgcgggccaatgagctgcagctgcgctggcaggagtaccgggagctggtgctgctgctgctgcagtggatgaggcaccacacagctgcctttgaggagcggcgcttccccagcagctttgaggagattgagatcctgtggagccagttcctgaagttcaaggagatggagctgcctgccaaggaggccgacaagaacagaagcaagggcatctaccagagcctggagggcgctgtgcaggccggccagctgaaggtgcccccaggctaccaccccctggatgtggagaaggagtggggcaagctgcacgtggccatcctggagcgggagaagcagctgcggagtgaatttgagcggctggagtgcctgcagagaattgtgaccaagctgcagatggaggccggcctgtgtgaggagcagctgaaccaggctgatgccctgctgcagagtgatgtgcggctgctggccgccggcaaggtgccccagagagctggggaggtggagcgggacctggacaaggctgacagcatgatccggctgctcttcaatgatgtgcagaccctgaaggatggccgccacccccagggcgagcagatgtaccgccgggtgtaccgcctgcacgagcggctggtggccatcagaacagagtacaacctgcggctgaaggccggcgtggccgccccagccacccaggtggcccaggtgaccctgcagagcgtgcagaggaggcctgagctggaggacagcaccctgcgctacctgcaggacctgctggcctgggtggaggagaaccagcaccgggtggatggagctgagtggggcgtggacctgcccagcgtggaggcccagctgggcagccaccggggcctgcaccagagcattgaggagttccgggccaagattgaaagagcccggagtgatgagggccagctgagccctgccaccaggggggcctacagagactgcctgggccgcctggacctgcagtatgccaagctgctgaacagcagcaaggcccggctgcggagcctggagagcctgcacagctttgtggccgccgccaccaaggagctgatgtggctgaatgagaaggaggaggaggaggtgggctttgactggagcgacaggaacaccaacatgacagccaagaaggagagctacagcgccctgatgagggagctggagctgaaggagaagaagatcaaggagctgcagaatgctggggaccggctgctgcgggaggaccacccagcccggcccaccgtggagagcttccaggccgccctgcagacccagtggagctggatgctgcagctgtgctgctgcatcgaggcccacctgaaggaaaatgctgcctacttccagttcttcagtgatgtgcgggaggccgagggccagctgcagaagctgcaggaggccctgcggaggaagtacagctgtgacagaagtgccaccgtgacccggctggaggacctgctgcaggatgcccaggatgagaaggagcagctgaatgagtacaagggccacctgagcggcctggccaagagggccaaggctgtggtgcagctgaagcccaggcacccagcccaccccatgaggggccgcctgcccctgctggccgtgtgtgactacaagcaggtggaggtgacagtgcacaagggagatgagtgccagctggtgggccctgcccagcccagccactggaaggtgctgagcagcagcggcagcgaggccgctgtgcccagcgtgtgcttcctggtgcccccacccaaccaggaggcccaggaggccgtgacccggctggaggcccagcaccaggccctggtgaccctgtggcaccagctgcacgtggacatgaagagcctgctggcctggcagagcctgcggagagatgtgcagctgatccgctcctggagcctggccaccttccgcaccctgaagccagaggagcagaggcaggccctgcacagcctggagctgcactaccaggccttcctgcgggacagccaggatgctgggggcttcggcccagaagatcggctgatggccgagcgggagtatggcagctgcagccaccactaccagcagctgctgcagagcctggagcagggcgcccaggaggagagccgctgccagcgctgcatcagcgagctgaaggacatccggctgcagctggaggcctgtgagaccaggacagtgcaccggctgcggctgcccctggacaaggagcccgcccgggagtgtgcccagagaattgctgagcagcagaaggcccaggccgaggtggagggcctgggcaagggcgtggcccggctgtctgctgaggccgagaaggtgctggccctgcctgagcccagccctgctgcccccaccctgcggtctgagctggagctgaccctgggcaagctggagcaggtgcgcagcctgagcgccatctacctggagaagctgaagaccatcagcctggtgatccggggcacccagggcgctgaggaggtgctgcgggcccacgaggagcagctgaaggaggcccaggccgtgcctgccaccctgcctgagctggaggccaccaaggccagcctgaagaagctgcgggcccaggccgaggcccagcagcccacctttgatgccctgagagatgagctgcggggggcccaggaggtgggggagcggctgcagcagagacatggagagagagatgtggaggtggagcgctggagggagcgggtggcccagctgctggagcgctggcaggccgtgctggcccagacagatgtgcggcagcgggagctggagcagctgggccggcagctgcgctactaccgggagagcgctgaccccctgggcgcctggctgcaggatgcccggcggcggcaggagcagatccaggccatgcccctggccgacagccaggccgtgcgggagcagctgcggcaggagcaggccctgctggaggagattgaaagacatggagagaaggtggaggagtgccagagatttgccaagcagtacatcaatgccatcaaggactatgagctgcagctggtgacctacaaggcccagctggagcctgtggccagccctgccaagaagcccaaggtgcagagcggcagcgagagcgtcatccaggagtatgtggacctgcggacccactacagcgagctgaccaccctgaccagccagtacatcaagttcatcagcgagaccctgcggaggatggaggaggaggagcggctggccgagcagcagagagctgaggagcgggagcggctggccgaggtggaggccgccctggagaagcagaggcagctggccgaggcccacgcccaggccaaggcccaggccgagcgggaggccaaggagctgcagcagaggatgcaggaggaggtggtgagaagagaggaggccgctgtggatgcccagcagcagaagaggagcatccaggaggagctgcagcagctgcggcagagcagcgaggccgagatccaggccaaggcccggcaggccgaggccgctgagaggagccggctgcgcatcgaggaggagatccgggtggtgcggctgcagctggaggccacagagcggcagagaggaggagctgagggggagctgcaggccctgcgggcccgggcagaggaggccgaggcccagaagaggcaggcccaggaggaggccgagcggctgcggcggcaggtgcaggatgagagccagaggaagaggcaggccgaggtggagctggccagccgggtgaaggccgaggccgaggccgcccgggagaagcagagggccctgcaggccctggaggagctgcggctgcaggccgaggaggccgagcggcggctgcggcaggccgaggtggagcgggcccggcaggtgcaggtggccctggagacagcccagaggtctgctgaggccgagctgcagagcaagagggccagctttgctgagaagacagcccagctggagaggagcctgcaggaggagcacgtggccgtggcccagctgcgggaggaggccgagcggcgggcccagcagcaggccgaggccgagcgggcccgggaggaggccgagcgggagctggagcgctggcagctgaaggccaatgaggccctgcggctgcggctgcaggccgaggaggtggcccagcagaagagcctggcccaggccgaggccgagaagcagaaggaggaggccgagcgggaggccaggagaagaggcaaggccgaggagcaggccgtgcggcagcgggagctggccgagcaggagctggagaagcagaggcagctggccgagggcacagcccagcagaggctggccgctgagcaggagctgatccggctgcgggcagagacagagcagggcgagcagcagaggcagctgctggaggaggagctggcccggctgcagcgggaggccgctgctgccacccagaagaggcaggagctggaggccgagctggccaaggtgcgggcagagatggaggtgctgctggccagcaaggcccgggcagaggaggagagccgcagcaccagcgagaagagcaagcagaggctggaggccgaggccggccgcttccgggagctggccgaggaggccgcccggctgcgggccctggccgaggaggccaagaggcagaggcagctggccgaggaggatgctgcccggcagagagctgaggccgagcgggtgctggccgagaagctggccgccatcggggaggccacccggctgaagacagaggccgagatcgccctgaaggagaaggaggccgagaatgaaaggctgcggcggctggctgaagatgaggccttccagaggcggcggctggaggagcaggccgcccagcacaaggctgacatcgaggagcggctggcccagctgaggaaggccagtgacagcgagctggagcggcagaagggcctggtggaggacaccctgcggcagaggcggcaggtggaggaggagatcctggccctgaaggccagctttgagaaggctgctgctgggaaggccgagctggagctggagctgggccgcatccgcagcaatgctgaggacaccctgcggagcaaggagcaggccgagctggaggccgcccggcagaggcagctggccgctgaggaggagaggagaagaagagaggccgaggagcgggtgcagaagagcctggccgctgaggaggaggccgcccggcagaggaaggccgccctggaggaggtggagcggctgaaggccaaggtggaggaggcccggcggctgcgggagcgggcagagcaggagagcgcccggcagctgcagctggcccaggaggccgcccagaagaggctgcaggccgaggagaaggcccacgcctttgctgtgcagcagaaggagcaggagctgcagcagaccctgcagcaggagcagagcgtgctggaccagctgcggggggaggccgaggccgccaggagagctgctgaggaggccgaggaggcccgggtgcaggccgagcgggaggccgcccagagccggcggcaggtggaggaggccgagcggctgaagcagagcgctgaggagcaggcccaggcccgggcccaggcccaggccgctgctgagaagctgaggaaggaggccgagcaggaggccgcccggcgggcccaggccgagcaggccgccctgcggcagaagcaggccgcagatgctgagatggagaagcacaagaagtttgctgagcagaccctgcggcagaaggcccaggtggagcaggagctgaccaccctgcggctgcagctggaggagacagaccaccagaagaacctgctggatgaggagctgcagaggctgaaggccgaggccacagaagctgcccggcagaggagccaggtggaggaggagctgttctctgtgcgggtgcagatggaggagctgagcaagctgaaggccagaattgaagctgagaacagagccctgatcctgcgggacaaggacaacacccagcgcttcctgcaggaggaggccgagaagatgaagcaggtggccgaggaggccgcccggctgtctgtggccgcccaggaggccgcccggctgcggcagctggccgaggaggacctggcccagcagagggccctggccgagaagatgctgaaggagaagatgcaggccgtgcaggaggccacccggctgaaggccgaggccgagctgctgcagcagcagaaggagctggcccaggagcaggcccggcggctgcaggaggacaaggagcagatggcccagcagctggccgaggagacccagggcttccagaggaccctggaggccgagcggcagaggcagctggagatgtctgctgaggccgagcggctgaagctgcgggtggccgagatgagccgggcccaggcccgggcagaagaagatgcccagcgcttcaggaagcaggccgaggagattggagagaagctgcacaggacagagctggccacccaggagaaggtgaccctggtgcagaccctggagatccagaggcagcagagcgaccatgatgctgagcggctgcgggaggccatcgccgagctggagcgggagaaggagaagctgcagcaggaggccaagctgctgcagctgaagtctgaggagatgcagacagtgcagcaggagcagctgctgcaggagacccaggccctgcagcagagcttcctgtctgagaaggacagcctgctgcagcgggagcgcttcatcgagcaggagaaggccaagctggagcagctgttccaggatgaggtggccaaggcccagcagctgcgggaggagcagcagaggcagcagcagcagatggagcaggagcggcagaggctggtggcctccatggaggaggcccggcggcggcagcacgaggccgaggagggcgtgcggaggaagcaggaggagctgcagcagctggagcagcagaggcggcagcaggaggagctgctggccgaggagaaccagaggctgcgggagcagctgcagctgctggaggagcagcacagagctgccctggcccacagcgaggaggtgacagccagccaggtggccgccaccaagaccctgcccaacggcagagatgccctggatggccctgctgctgaggccgagcctgagcacagctttgatggcctgcggaggaaggtgtctgcccagaggctgcaggaggccggcatcctgtctgctgaggagctgcagaggctggcccagggccacaccaccgtggatgagctggcccggcgggaggatgtgcgccactacctgcagggccgcagcagcattgctggcctgctgctgaaggccaccaatgagaagctgtctgtgtatgctgccctgcagaggcagctgctgagccctggaacagccctgatcctgctggaggcccaggccgccagcggcttcctgctggaccctgtgaggaacagaaggctgactgtgaatgaagctgtgaaggagggcgtggtgggccctgagctgcaccacaagctgctgtctgctgagagagctgtgacaggctacaaggacccctacacaggccagcagatcagcctcttccaggccatgcagaagggcctgattgtgcgggagcacggcatccggctgctggaggcccagatcgccaccggcggcgtcatcgaccctgtgcacagccaccgggtgcctgtggatgtggcctacagaagaggctactttgatgaggagatgaacagagtgctggccgaccccagtgatgacaccaagggcttctttgaccccaacacccatgagaacctgacctacctgcagctgctggagcgctgtgtggaggaccctgagaccggcctgtgcctgctgcccctgacagacaaggccgccaagggcggggagctggtgtacacagattctgaggccagagatgtgtttgagaaggccaccgtgtctgccccctttgggaagttccagggcaagacagtgaccatctgggagatcatcaacagcgagtacttcaccgctgagcagaggcgggacctgctgcggcagttcagaacaggccgcatcaccgtggagaagatcatcaagatcatcatcaccgtggtggaggagcaggagcagaagggccgcctgtgctttgagggcctgcggagcctggtgcctgctgctgagctgctggagagcagggtcatcgaccgggagctgtaccagcagctgcagagaggagagaggtctgtgagagatgtggccgaggtggacacagtgagaagagccctgcggggggccaacgtgattgctggggtgtggctggaggaggccggccagaagctgagcatctacaatgccctgaagaaggacctgctgcccagcgacatggctgtggccctgctggaggcccaggccggcaccggccacatcatcgaccctgccaccagcgcccggctgactgtggatgaagctgtgcgggccggcctggtgggccctgagttccacgagaagctgctgtctgctgagaaggctgtgacaggctacagagacccctacacaggccagagcgtgtccctcttccaggccctgaagaagggcctcatcccccgggagcagggcctgcggctgctggatgcccagctgagcactggaggcatcgtggaccccagcaagagccaccgggtgcccctggatgtggcctgtgcccggggctgcctggatgaggagaccagccgggccctgagcgcccccagggcagatgccaaggcctacagcgaccccagcactggagagcccgccacctacggggagctgcagcagcgctgcaggccagaccagctgaccggcctgagcctgctgcccctgtctgagaaggccgcccgggcccggcaggaggagctgtacagcgagctgcaggcccgggagacctttgagaagacccctgtggaggtgcctgtgggcggcttcaagggccgcacagtgacagtgtgggagctgatcagcagcgagtacttcaccgctgagcagaggcaggagctgctgcggcagttcagaacaggcaaggtgacagtggagaaggtgatcaagatcctgatcaccatcgtggaggaggtggagaccctgcggcaggagcggctgtccttcagcggcctgcgggcccctgtgcctgccagcgagctgctggccagcggcgtgctgagccgggcccagtttgagcagctgaaggatggcaagaccaccgtgaaggacctgtctgagctgggctctgtgaggaccctgctgcagggcagcggctgcctggccggcatctacctggaggacaccaaggagaaggtgtccatctatgaggccatgaggcggggcctgctgcgggccaccacagctgccctgctgctggaggcccaggccgccaccggcttcctggtggaccctgtgaggaaccagaggctgtatgtgcatgaggccgtgaaggccggcgtggtgggccctgagctgcacgagcagctgctgtctgctgagaaggctgtgacaggctacagagacccctacagcggcagcaccatcagcctcttccaggccatgcagaagggcctggtgctgcggcagcacggcatccggctgctggaggcccagatcgccactggaggcatcattgatcctgtgcacagccaccgggtgcctgtggatgtggcctaccagaggggctacttcagcgaggagatgaacagagtgctggccgaccccagtgatgacaccaagggcttctttgaccccaacacccatgagaacctgacctaccggcagctgctggagcgctgtgtggaggaccctgagaccggcctgcggctgctgcccctgaagggagctgagaaggccgaggtggtggagaccacccaggtgtacacagaggaggagacccggcgggcctttgaggagacccagattgacatccctgggggcggcagccacggcggcagcaccatgagcctgtgggaggtgatgcagagcgacctgatccctgaggagcagagggcccagctgatggctgacttccaggccggccgggtgaccaaggagaggatgatcatcatcatcatcgagatcatcgagaagacagagatcatccggcagcagggcctggccagctatgactatgtgagaagaaggctgacagctgaggacctgtttgaggcccgcatcatcagcctggagacctacaacctgctgcgggagggcaccaggagcctgcgggaggccctggaggccgagagcgcctggtgctacctgtatggaactggatctgtggccggcgtgtacctgcccggcagccggcagaccctgagcatctaccaggccctgaagaagggcctgctgtctgctgaggtggcccggctgctgctggaggcccaggccgccaccggcttcctgctggaccctgtgaagggggagcggctgactgtggatgaagctgtgaggaagggcctggtgggccctgagctgcatgaccggctgctgtctgctgagagagctgtgacaggctacagagacccctacacagagcagaccatcagcctcttccaggccatgaagaaggagctgatccccacagaggaggccctgcggctgctggatgcccagctggccaccggcggcatcgtggacccccggctgggcttccacctgcccctggaggtggcctaccagaggggctacctgaacaaggacacccatgaccagctgtctgagcccagcgaggtgcgctcctatgtggaccccagcacagatgagcggctgagctacacccagctgctgcggcgctgcagaagagatgatggcaccggccagctgctgctgcccctgagtgatgccaggaagctgaccttccggggcctgaggaagcagatcaccatggaggagctggtgcgcagccaggtgatggatgaggccacagccctgcagctgcgggagggcctgaccagcattgaggaggtgaccaagaacctgcagaagttcctggagggcaccagctgcatcgccggcgtgtttgtggatgccaccaaggagcggctgtctgtgtaccaggccatgaagaagggcatcatccggcccggcacagcctttgagctgctggaggcccaggccgccaccggctacgtgattgaccccatcaagggcctgaagctgactgtggaggaggccgtgaggatgggcatcgtgggccctgagttcaaggacaagctgctgtctgctgagagagctgtgacaggctacaaggacccctacagcggcaagctgatcagcctcttccaggccatgaagaagggcctcatcctgaaggaccacggcatccggctgctggaggcccagatcgccactggaggcatcattgatcctgaggagagccaccggctgcctgtggaggtggcctacaagaggggcctgtttgatgaggagatgaatgagatcctgacagaccccagtgatgacaccaagggcttctttgaccccaacacagaggagaacctgacctacctgcagctgatggagcgctgcatcacagacccccagacaggcctgtgcctgctgcccctgaaggagaagaagcgggagaggaagaccagcagcaagagctctgtgaggaagagaagagtggtgattgtggaccctgagaccgggaaggagatgtctgtgtatgaggcctacaggaagggcctgattgaccaccagacctacctggagctgtctgagcaggagtgtgagtgggaggagatcaccatcagcagcagtgatggagtggtgaagtccatgatcatcgacagaagaagtggccggcagtatgacattgatgatgccatcgccaagaacctgattgacagaagtgccctggaccagtaccgggccggcaccctgagcatcacagaatttgctgacatgctgtctggaaatgctgggggcttccgcagccgcagcagctctgtgggcagcagcagcagctaccccatcagccctgctgtgtccaggacccagctggcctcctggagcgaccccacagaggagactggacctgtggccggcatcctggacacagagaccctggagaaggtgtccatcacagaggccatgcacaggaacctggtggacaacatcaccggccagaggctgctggaggcccaggcctgcaccggcggcatcatcgaccccagcactggagagcgcttccctgtgacagatgctgtgaacaagggcctggtggacaagatcatggtggaccgcatcaacctggcccagaaggccttctgtggctttgaggaccccaggaccaagaccaagatgtctgctgcccaggccctgaagaagggctggctgtactatgaagctggccagcgcttcctggaggtgcagtacctgaccggcggcctcatcgagccagacaccccaggccgggtgcccctggatgaggccctgcagaggggcaccgtggatgccaggacagcccagaagctgagagatgtgggcgcctacagcaagtacctgacctgccccaagaccaagctgaagatctcctacaaggatgccctggaccgctccatggtggaggagggcaccggcctgcggctgctggaggccgccgcccagagcaccaagggctactacagcccctacagcgtgtctggcagcggcagcacagctggcagcaggacaggcagcaggacaggcagcagagctggcagccggcggggcagctttgatgccactggaagtggcttctccatgaccttcagcagcagcagctacagcagcagcggctatggaagaagatatgccagcggcagcagcgccagcctgggcggccctgagagcgctgtggcctag

SEQ ID NO: 262155 - DNA, 13602 bp, Artificial Sequence
  derived and/or modified sequence
atggccggccccctgcctgatgagcaggacttcatccaggcctatgaggaggtgcgggagaagtacaaggatgagcgggacagagtgcagaagaagaccttcaccaagtgggtgaacaagcacctgatcaaggcccagaggcacatcagtgacctgtatgaggacctgagagatggccacaacctgatcagcctgctggaggtgctgagcggggacagcctgccccgggagaagggccgcatgaggttccacaagctgcagaatgtgcagatcgccctggactacctgcggcaccggcaggtgaagctggtgaacatcagaaatgatgacattgctgatggcaaccccaagctgaccctgggcctcatctggaccatcatcctgcacttccagatcagtgacatccaggtgtctggccagagcgaggacatgacagccaaggagaagctgctgctgtggagccagaggatggtggagggctaccagggcctgcgctgtgacaacttcaccagctcctggagagatggccgcctcttcaatgccatcatccaccgccacaagcccctgctgattgacatgaacaaggtgtaccggcagaccaacctggagaacctggaccaggccttctctgtggccgagcgggacctgggcgtgacccggctgctggaccctgaagatgtggatgtgccccagccagatgagaagagcatcatcacctacgtgagcagcctgtatgatgccatgccccgggtgcctgatgtgcaggatggagtgcgggccaatgagctgcagctgcgctggcaggagtaccgggagctggtgctgctgctgctgcagtggatgaggcaccacacagctgcctttgaggagcggcgcttccccagcagctttgaggagattgagatcctgtggagccagttcctgaagttcaaggagatggagctgcctgccaaggaggccgacaagaacagaagcaagggcatctaccagagcctggagggcgctgtgcaggccggccagctgaaggtgcccccaggctaccaccccctggatgtggagaaggagtggggcaagctgcacgtggccatcctggagcgggagaagcagctgcggagtgaatttgagcggctggagtgcctgcagagaattgtgaccaagctgcagatggaggccggcctgtgtgaggagcagctgaaccaggctgatgccctgctgcagagtgatgtgcggctgctggccgccggcaaggtgccccagagagctggggaggtggagcgggacctggacaaggctgacagcatgatccggctgctcttcaatgatgtgcagaccctgaaggatggccgccacccccagggcgagcagatgtaccgccgggtgtaccgcctgcacgagcggctggtggccatcagaacagagtacaacctgcggctgaaggccggcgtggccgccccagccacccaggtggcccaggtgaccctgcagagcgtgcagaggaggcctgagctggaggacagcaccctgcgctacctgcaggacctgctggcctgggtggaggagaaccagcaccgggtggatggagctgagtggggcgtggacctgcccagcgtggaggcccagctgggcagccaccggggcctgcaccagagcattgaggagttccgggccaagattgaaagagcccggagtgatgagggccagctgagccctgccaccaggggggcctacagagactgcctgggccgcctggacctgcagtatgccaagctgctgaacagcagcaaggcccggctgcggagcctggagagcctgcacagctttgtggccgccgccaccaaggagctgatgtggctgaatgagaaggaggaggaggaggtgggctttgactggagcgacaggaacaccaacatgacagccaagaaggagagctacagcgccctgatgagggagctggagctgaaggagaagaagatcaaggagctgcagaatgctggggaccggctgctgcgggaggaccacccagcccggcccaccgtggagagcttccaggccgccctgcagacccagtggagctggatgctgcagctgtgctgctgcatcgaggcccacctgaaggaaaatgctgcctacttccagttcttcagtgatgtgcgggaggccgagggccagctgcagaagctgcaggaggccctgcggaggaagtacagctgtgacagaagtgccaccgtgacccggctggaggacctgctgcaggatgcccaggatgagaaggagcagctgaatgagtacaagggccacctgagcggcctggccaagagggccaaggctgtggtgcagctgaagcccaggcacccagcccaccccatgaggggccgcctgcccctgctggccgtgtgtgactacaagcaggtggaggtgacagtgcacaagggagatgagtgccagctggtgggccctgcccagcccagccactggaaggtgctgagcagcagcggcagcgaggccgctgtgcccagcgtgtgcttcctggtgcccccacccaaccaggaggcccaggaggccgtgacccggctggaggcccagcaccaggccctggtgaccctgtggcaccagctgcacgtggacatgaagagcctgctggcctggcagagcctgcggagagatgtgcagctgatccgctcctggagcctggccaccttccgcaccctgaagccagaggagcagaggcaggccctgcacagcctggagctgcactaccaggccttcctgcgggacagccaggatgctgggggcttcggcccagaagatcggctgatggccgagcgggagtatggcagctgcagccaccactaccagcagctgctgcagagcctggagcagggcgcccaggaggagagccgctgccagcgctgcatcagcgagctgaaggacatccggctgcagctggaggcctgtgagaccaggacagtgcaccggctgcggctgcccctggacaaggagcccgcccgggagtgtgcccagagaattgctgagcagcagaaggcccaggccgaggtggagggcctgggcaagggcgtggcccggctgtctgctgaggccgagaaggtgctggccctgcctgagcccagccctgctgcccccaccctgcggtctgagctggagctgaccctgggcaagctggagcaggtgcgcagcctgagcgccatctacctggagaagctgaagaccatcagcctggtgatccggggcacccagggcgctgaggaggtgctgcgggcccacgaggagcagctgaaggaggcccaggccgtgcctgccaccctgcctgagctggaggccaccaaggccagcctgaagaagctgcgggcccaggccgaggcccagcagcccacctttgatgccctgagagatgagctgcggggggcccaggaggtgggggagcggctgcagcagagacatggagagagagatgtggaggtggagcgctggagggagcgggtggcccagctgctggagcgctggcaggccgtgctggcccagacagatgtgcggcagcgggagctggagcagctgggccggcagctgcgctactaccgggagagcgctgaccccctgggcgcctggctgcaggatgcccggcggcggcaggagcagatccaggccatgcccctggccgacagccaggccgtgcgggagcagctgcggcaggagcaggccctgctggaggagattgaaagacatggagagaaggtggaggagtgccagagatttgccaagcagtacatcaatgccatcaaggactatgagctgcagctggtgacctacaaggcccagctggagcctgtggccagccctgccaagaagcccaaggtgcagagcggcagcgagagcgtcatccaggagtatgtggacctgcggacccactacagcgagctgaccaccctgaccagccagtacatcaagttcatcagcgagaccctgcggaggatggaggaggaggagcggctggccgagcagcagagagctgaggagcgggagcggctggccgaggtggaggccgccctggagaagcagaggcagctggccgaggcccacgcccaggccaaggcccaggccgagcgggaggccaaggagctgcagcagaggatgcaggaggaggtggtgagaagagaggaggccgctgtggatgcccagcagcagaagaggagcatccaggaggagctgcagcagctgcggcagagcagcgaggccgagatccaggccaaggcccggcaggccgaggccgctgagaggagccggctgcgcatcgaggaggagatccgggtggtgcggctgcagctggaggccacagagcggcagagaggaggagctgagggggagctgcaggccctgcgggcccgggcagaggaggccgaggcccagaagaggcaggcccaggaggaggccgagcggctgcggcggcaggtgcaggatgagagccagaggaagaggcaggccgaggtggagctggccagccgggtgaaggccgaggccgaggccgcccgggagaagcagagggccctgcaggccctggaggagctgcggctgcaggccgaggaggccgagcggcggctgcggcaggccgaggtggagcgggcccggcaggtgcaggtggccctggagacagcccagaggtctgctgaggccgagctgcagagcaagagggccagctttgctgagaagacagcccagctggagaggagcctgcaggaggagcacgtggccgtggcccagctgcgggaggaggccgagcggcgggcccagcagcaggccgaggccgagcgggcccgggaggaggccgagcgggagctggagcgctggcagctgaaggccaatgaggccctgcggctgcggctgcaggccgaggaggtggcccagcagaagagcctggcccaggccgaggccgagaagcagaaggaggaggccgagcgggaggccaggagaagaggcaaggccgaggagcaggccgtgcggcagcgggagctggccgagcaggagctggagaagcagaggcagctggccgagggcacagcccagcagaggctggccgctgagcaggagctgatccggctgcgggcagagacagagcagggcgagcagcagaggcagctgctggaggaggagctggcccggctgcagcgggaggccgctgctgccacccagaagaggcaggagctggaggccgagctggccaaggtgcgggcagagatggaggtgctgctggccagcaaggcccgggcagaggaggagagccgcagcaccagcgagaagagcaagcagaggctggaggccgaggccggccgcttccgggagctggccgaggaggccgcccggctgcgggccctggccgaggaggccaagaggcagaggcagctggccgaggaggatgctgcccggcagagagctgaggccgagcgggtgctggccgagaagctggccgccatcggggaggccacccggctgaagacagaggccgagatcgccctgaaggagaaggaggccgagaatgaaaggctgcggcggctggctgaagatgaggccttccagaggcggcggctggaggagcaggccgcccagcacaaggctgacatcgaggagcggctggcccagctgaggaaggccagtgacagcgagctggagcggcagaagggcctggtggaggacaccctgcggcagaggcggcaggtggaggaggagatcctggccctgaaggccagctttgagaaggctgctgctgggaaggccgagctggagctggagctgggccgcatccgcagcaatgctgaggacaccctgcggagcaaggagcaggccgagctggaggccgcccggcagaggcagctggccgctgaggaggagaggagaagaagagaggccgaggagcgggtgcagaagagcctggccgctgaggaggaggccgcccggcagaggaaggccgccctggaggaggtggagcggctgaaggccaaggtggaggaggcccggcggctgcgggagcgggcagagcaggagagcgcccggcagctgcagctggcccaggaggccgcccagaagaggctgcaggccgaggagaaggcccacgcctttgctgtgcagcagaaggagcaggagctgcagcagaccctgcagcaggagcagagcgtgctggaccagctgcggggggaggccgaggccgccaggagagctgctgaggaggccgaggaggcccgggtgcaggccgagcgggaggccgcccagagccggcggcaggtggaggaggccgagcggctgaagcagagcgctgaggagcaggcccaggcccgggcccaggcccaggccgctgctgagaagctgaggaaggaggccgagcaggaggccgcccggcgggcccaggccgagcaggccgccctgcggcagaagcaggccgcagatgctgagatggagaagcacaagaagtttgctgagcagaccctgcggcagaaggcccaggtggagcaggagctgaccaccctgcggctgcagctggaggagacagaccaccagaagaacctgctggatgaggagctgcagaggctgaaggccgaggccacagaagctgcccggcagaggagccaggtggaggaggagctgttctctgtgcgggtgcagatggaggagctgagcaagctgaaggccagaattgaagctgagaacagagccctgatcctgcgggacaaggacaacacccagcgcttcctgcaggaggaggccgagaagatgaagcaggtggccgaggaggccgcccggctgtctgtggccgcccaggaggccgcccggctgcggcagctggccgaggaggacctggcccagcagagggccctggccgagaagatgctgaaggagaagatgcaggccgtgcaggaggccacccggctgaaggccgaggccgagctgctgcagcagcagaaggagctggcccaggagcaggcccggcggctgcaggaggacaaggagcagatggcccagcagctggccgaggagacccagggcttccagaggaccctggaggccgagcggcagaggcagctggagatgtctgctgaggccgagcggctgaagctgcgggtggccgagatgagccgggcccaggcccgggcagaagaagatgcccagcgcttcaggaagcaggccgaggagattggagagaagctgcacaggacagagctggccacccaggagaaggtgaccctggtgcagaccctggagatccagaggcagcagagcgaccatgatgctgagcggctgcgggaggccatcgccgagctggagcgggagaaggagaagctgcagcaggaggccaagctgctgcagctgaagtctgaggagatgcagacagtgcagcaggagcagctgctgcaggagacccaggccctgcagcagagcttcctgtctgagaaggacagcctgctgcagcgggagcgcttcatcgagcaggagaaggccaagctggagcagctgttccaggatgaggtggccaaggcccagcagctgcgggaggagcagcagaggcagcagcagcagatggagcaggagcggcagaggctggtggcctccatggaggaggcccggcggcggcagcacgaggccgaggagggcgtgcggaggaagcaggaggagctgcagcagctggagcagcagaggcggcagcaggaggagctgctggccgaggagaaccagaggctgcgggagcagctgcagctgctggaggagcagcacagagctgccctggcccacagcgaggaggtgacagccagccaggtggccgccaccaagaccctgcccaacggcagagatgccctggatggccctgctgctgaggccgagcctgagcacagctttgatggcctgcggaggaaggtgtctgcccagaggctgcaggaggccggcatcctgtctgctgaggagctgcagaggctggcccagggccacaccaccgtggatgagctggcccggcgggaggatgtgcgccactacctgcagggccgcagcagcattgctggcctgctgctgaaggccaccaatgagaagctgtctgtgtatgctgccctgcagaggcagctgctgagccctggaacagccctgatcctgctggaggcccaggccgccagcggcttcctgctggaccctgtgaggaacagaaggctgactgtgaatgaagctgtgaaggagggcgtggtgggccctgagctgcaccacaagctgctgtctgctgagagagctgtgacaggctacaaggacccctacacaggccagcagatcagcctcttccaggccatgcagaagggcctgattgtgcgggagcacggcatccggctgctggaggcccagatcgccaccggcggcgtcatcgaccctgtgcacagccaccgggtgcctgtggatgtggcctacagaagaggctactttgatgaggagatgaacagagtgctggccgaccccagtgatgacaccaagggcttctttgaccccaacacccatgagaacctgacctacctgcagctgctggagcgctgtgtggaggaccctgagaccggcctgtgcctgctgcccctgacagacaaggccgccaagggcggggagctggtgtacacagattctgaggccagagatgtgtttgagaaggccaccgtgtctgccccctttgggaagttccagggcaagacagtgaccatctgggagatcatcaacagcgagtacttcaccgctgagcagaggcgggacctgctgcggcagttcagaacaggccgcatcaccgtggagaagatcatcaagatcatcatcaccgtggtggaggagcaggagcagaagggccgcctgtgctttgagggcctgcggagcctggtgcctgctgctgagctgctggagagcagggtcatcgaccgggagctgtaccagcagctgcagagaggagagaggtctgtgagagatgtggccgaggtggacacagtgagaagagccctgcggggggccaacgtgattgctggggtgtggctggaggaggccggccagaagctgagcatctacaatgccctgaagaaggacctgctgcccagcgacatggctgtggccctgctggaggcccaggccggcaccggccacatcatcgaccctgccaccagcgcccggctgactgtggatgaagctgtgcgggccggcctggtgggccctgagttccacgagaagctgctgtctgctgagaaggctgtgacaggctacagagacccctacacaggccagagcgtgtccctcttccaggccctgaagaagggcctcatcccccgggagcagggcctgcggctgctggatgcccagctgagcactggaggcatcgtggaccccagcaagagccaccgggtgcccctggatgtggcctgtgcccggggctgcctggatgaggagaccagccgggccctgagcgcccccagggcagatgccaaggcctacagcgaccccagcactggagagcccgccacctacggggagctgcagcagcgctgcaggccagaccagctgaccggcctgagcctgctgcccctgtctgagaaggccgcccgggcccggcaggaggagctgtacagcgagctgcaggcccgggagacctttgagaagacccctgtggaggtgcctgtgggcggcttcaagggccgcacagtgacagtgtgggagctgatcagcagcgagtacttcaccgctgagcagaggcaggagctgctgcggcagttcagaacaggcaaggtgacagtggagaaggtgatcaagatcctgatcaccatcgtggaggaggtggagaccctgcggcaggagcggctgtccttcagcggcctgcgggcccctgtgcctgccagcgagctgctggccagcggcgtgctgagccgggcccagtttgagcagctgaaggatggcaagaccaccgtgaaggacctgtctgagctgggctctgtgaggaccctgctgcagggcagcggctgcctggccggcatctacctggaggacaccaaggagaaggtgtccatctatgaggccatgaggcggggcctgctgcgggccaccacagctgccctgctgctggaggcccaggccgccaccggcttcctggtggaccctgtgaggaaccagaggctgtatgtgcatgaggccgtgaaggccggcgtggtgggccctgagctgcacgagcagctgctgtctgctgagaaggctgtgacaggctacagagacccctacagcggcagcaccatcagcctcttccaggccatgcagaagggcctggtgctgcggcagcacggcatccggctgctggaggcccagatcgccactggaggcatcattgatcctgtgcacagccaccgggtgcctgtggatgtggcctaccagaggggctacttcagcgaggagatgaacagagtgctggccgaccccagtgatgacaccaagggcttctttgaccccaacacccatgagaacctgacctaccggcagctgctggagcgctgtgtggaggaccctgagaccggcctgcggctgctgcccctgaagggagctgagaaggccgaggtggtggagaccacccaggtgtacacagaggaggagacccggcgggcctttgaggagacccagattgacatccctgggggcggcagccacggcggcagcaccatgagcctgtgggaggtgatgcagagcgacctgatccctgaggagcagagggcccagctgatggctgacttccaggccggccgggtgaccaaggagaggatgatcatcatcatcatcgagatcatcgagaagacagagatcatccggcagcagggcctggccagctatgactatgtgagaagaaggctgacagctgaggacctgtttgaggcccgcatcatcagcctggagacctacaacctgctgcgggagggcaccaggagcctgcgggaggccctggaggccgagagcgcctggtgctacctgtatggaactggatctgtggccggcgtgtacctgcccggcagccggcagaccctgagcatctaccaggccctgaagaagggcctgctgtctgctgaggtggcccggctgctgctggaggcccaggccgccaccggcttcctgctggaccctgtgaagggggagcggctgactgtggatgaagctgtgaggaagggcctggtgggccctgagctgcatgaccggctgctgtctgctgagagagctgtgacaggctacagagacccctacacagagcagaccatcagcctcttccaggccatgaagaaggagctgatccccacagaggaggccctgcggctgctggatgcccagctggccaccggcggcatcgtggacccccggctgggcttccacctgcccctggaggtggcctaccagaggggctacctgaacaaggacacccatgaccagctgtctgagcccagcgaggtgcgctcctatgtggaccccagcacagatgagcggctgagctacacccagctgctgcggcgctgcagaagagatgatggcaccggccagctgctgctgcccctgagtgatgccaggaagctgaccttccggggcctgaggaagcagatcaccatggaggagctggtgcgcagccaggtgatggatgaggccacagccctgcagctgcgggagggcctgaccagcattgaggaggtgaccaagaacctgcagaagttcctggagggcaccagctgcatcgccggcgtgtttgtggatgccaccaaggagcggctgtctgtgtaccaggccatgaagaagggcatcatccggcccggcacagcctttgagctgctggaggcccaggccgccaccggctacgtgattgaccccatcaagggcctgaagctgactgtggaggaggccgtgaggatgggcatcgtgggccctgagttcaaggacaagctgctgtctgctgagagagctgtgacaggctacaaggacccctacagcggcaagctgatcagcctcttccaggccatgaagaagggcctcatcctgaaggaccacggcatccggctgctggaggcccagatcgccactggaggcatcattgatcctgaggagagccaccggctgcctgtggaggtggcctacaagaggggcctgtttgatgaggagatgaatgagatcctgacagaccccagtgatgacaccaagggcttctttgaccccaacacagaggagaacctgacctacctgcagctgatggagcgctgcatcacagacccccagacaggcctgtgcctgctgcccctgaaggagaagaagcgggagaggaagaccagcagcaagagctctgtgaggaagagaagagtggtgattgtggaccctgagaccgggaaggagatgtctgtgtatgaggcctacaggaagggcctgattgaccaccagacctacctggagctgtctgagcaggagtgtgagtgggaggagatcaccatcagcagcagtgatggagtggtgaagtccatgatcatcgacagaagaagtggccggcagtatgacattgatgatgccatcgccaagaacctgattgacagaagtgccctggaccagtaccgggccggcaccctgagcatcacagaatttgctgacatgctgtctggaaatgctgggggcttccgcagccgcagcagctctgtgggcagcagcagcagctaccccatcagccctgctgtgtccaggacccagctggcctcctggagcgaccccacagaggagactggacctgtggccggcatcctggacacagagaccctggagaaggtgtccatcacagaggccatgcacaggaacctggtggacaacatcaccggccagaggctgctggaggcccaggcctgcaccggcggcatcatcgaccccagcactggagagcgcttccctgtgacagatgctgtgaacaagggcctggtggacaagatcatggtggaccgcatcaacctggcccagaaggccttctgtggctttgaggaccccaggaccaagaccaagatgtctgctgcccaggccctgaagaagggctggctgtactatgaagctggccagcgcttcctggaggtgcagtacctgaccggcggcctcatcgagccagacaccccaggccgggtgcccctggatgaggccctgcagaggggcaccgtggatgccaggacagcccagaagctgagagatgtgggcgcctacagcaagtacctgacctgccccaagaccaagctgaagatctcctacaaggatgccctggaccgctccatggtggaggagggcaccggcctgcggctgctggaggccgccgcccagagcaccaagggctactacagcccctacagcgtgtctggcagcggcagcacagctggcagcaggacaggcagcaggacaggcagcagagctggcagccggcggggcagctttgatgccactggaagtggcttctccatgaccttcagcagcagcagctacagcagcagcggctatggaagaagatatgccagcggcagcagcgccagcctgggcggccctgagagcgctgtggcctag

SEQ ID NO: 262156 - DNA, 13656 bp, Artificial Sequence
  derived and/or modified sequence
atgtctggggccggcggggcctttgccagcccccgggaggtgctgctggagcggccctgctggctggatggcggctgtgagcccgcccggcggggctacctgtaccagcagctgtgctgcgtggatgagcgggacagagtgcagaagaagaccttcaccaagtgggtgaacaagcacctgatcaaggcccagaggcacatcagtgacctgtatgaggacctgagagatggccacaacctgatcagcctgctggaggtgctgagcggggacagcctgccccgggagaagggccgcatgaggttccacaagctgcagaatgtgcagatcgccctggactacctgcggcaccggcaggtgaagctggtgaacatcagaaatgatgacattgctgatggcaaccccaagctgaccctgggcctcatctggaccatcatcctgcacttccagatcagtgacatccaggtgtctggccagagcgaggacatgacagccaaggagaagctgctgctgtggagccagaggatggtggagggctaccagggcctgcgctgtgacaacttcaccagctcctggagagatggccgcctcttcaatgccatcatccaccgccacaagcccctgctgattgacatgaacaaggtgtaccggcagaccaacctggagaacctggaccaggccttctctgtggccgagcgggacctgggcgtgacccggctgctggaccctgaagatgtggatgtgccccagccagatgagaagagcatcatcacctacgtgagcagcctgtatgatgccatgccccgggtgcctgatgtgcaggatggagtgcgggccaatgagctgcagctgcgctggcaggagtaccgggagctggtgctgctgctgctgcagtggatgaggcaccacacagctgcctttgaggagcggcgcttccccagcagctttgaggagattgagatcctgtggagccagttcctgaagttcaaggagatggagctgcctgccaaggaggccgacaagaacagaagcaagggcatctaccagagcctggagggcgctgtgcaggccggccagctgaaggtgcccccaggctaccaccccctggatgtggagaaggagtggggcaagctgcacgtggccatcctggagcgggagaagcagctgcggagtgaatttgagcggctggagtgcctgcagagaattgtgaccaagctgcagatggaggccggcctgtgtgaggagcagctgaaccaggctgatgccctgctgcagagtgatgtgcggctgctggccgccggcaaggtgccccagagagctggggaggtggagcgggacctggacaaggctgacagcatgatccggctgctcttcaatgatgtgcagaccctgaaggatggccgccacccccagggcgagcagatgtaccgccgggtgtaccgcctgcacgagcggctggtggccatcagaacagagtacaacctgcggctgaaggccggcgtggccgccccagccacccaggtggcccaggtgaccctgcagagcgtgcagaggaggcctgagctggaggacagcaccctgcgctacctgcaggacctgctggcctgggtggaggagaaccagcaccgggtggatggagctgagtggggcgtggacctgcccagcgtggaggcccagctgggcagccaccggggcctgcaccagagcattgaggagttccgggccaagattgaaagagcccggagtgatgagggccagctgagccctgccaccaggggggcctacagagactgcctgggccgcctggacctgcagtatgccaagctgctgaacagcagcaaggcccggctgcggagcctggagagcctgcacagctttgtggccgccgccaccaaggagctgatgtggctgaatgagaaggaggaggaggaggtgggctttgactggagcgacaggaacaccaacatgacagccaagaaggagagctacagcgccctgatgagggagctggagctgaaggagaagaagatcaaggagctgcagaatgctggggaccggctgctgcgggaggaccacccagcccggcccaccgtggagagcttccaggccgccctgcagacccagtggagctggatgctgcagctgtgctgctgcatcgaggcccacctgaaggaaaatgctgcctacttccagttcttcagtgatgtgcgggaggccgagggccagctgcagaagctgcaggaggccctgcggaggaagtacagctgtgacagaagtgccaccgtgacccggctggaggacctgctgcaggatgcccaggatgagaaggagcagctgaatgagtacaagggccacctgagcggcctggccaagagggccaaggctgtggtgcagctgaagcccaggcacccagcccaccccatgaggggccgcctgcccctgctggccgtgtgtgactacaagcaggtggaggtgacagtgcacaagggagatgagtgccagctggtgggccctgcccagcccagccactggaaggtgctgagcagcagcggcagcgaggccgctgtgcccagcgtgtgcttcctggtgcccccacccaaccaggaggcccaggaggccgtgacccggctggaggcccagcaccaggccctggtgaccctgtggcaccagctgcacgtggacatgaagagcctgctggcctggcagagcctgcggagagatgtgcagctgatccgctcctggagcctggccaccttccgcaccctgaagccagaggagcagaggcaggccctgcacagcctggagctgcactaccaggccttcctgcgggacagccaggatgctgggggcttcggcccagaagatcggctgatggccgagcgggagtatggcagctgcagccaccactaccagcagctgctgcagagcctggagcagggcgcccaggaggagagccgctgccagcgctgcatcagcgagctgaaggacatccggctgcagctggaggcctgtgagaccaggacagtgcaccggctgcggctgcccctggacaaggagcccgcccgggagtgtgcccagagaattgctgagcagcagaaggcccaggccgaggtggagggcctgggcaagggcgtggcccggctgtctgctgaggccgagaaggtgctggccctgcctgagcccagccctgctgcccccaccctgcggtctgagctggagctgaccctgggcaagctggagcaggtgcgcagcctgagcgccatctacctggagaagctgaagaccatcagcctggtgatccggggcacccagggcgctgaggaggtgctgcgggcccacgaggagcagctgaaggaggcccaggccgtgcctgccaccctgcctgagctggaggccaccaaggccagcctgaagaagctgcgggcccaggccgaggcccagcagcccacctttgatgccctgagagatgagctgcggggggcccaggaggtgggggagcggctgcagcagagacatggagagagagatgtggaggtggagcgctggagggagcgggtggcccagctgctggagcgctggcaggccgtgctggcccagacagatgtgcggcagcgggagctggagcagctgggccggcagctgcgctactaccgggagagcgctgaccccctgggcgcctggctgcaggatgcccggcggcggcaggagcagatccaggccatgcccctggccgacagccaggccgtgcgggagcagctgcggcaggagcaggccctgctggaggagattgaaagacatggagagaaggtggaggagtgccagagatttgccaagcagtacatcaatgccatcaaggactatgagctgcagctggtgacctacaaggcccagctggagcctgtggccagccctgccaagaagcccaaggtgcagagcggcagcgagagcgtcatccaggagtatgtggacctgcggacccactacagcgagctgaccaccctgaccagccagtacatcaagttcatcagcgagaccctgcggaggatggaggaggaggagcggctggccgagcagcagagagctgaggagcgggagcggctggccgaggtggaggccgccctggagaagcagaggcagctggccgaggcccacgcccaggccaaggcccaggccgagcgggaggccaaggagctgcagcagaggatgcaggaggaggtggtgagaagagaggaggccgctgtggatgcccagcagcagaagaggagcatccaggaggagctgcagcagctgcggcagagcagcgaggccgagatccaggccaaggcccggcaggccgaggccgctgagaggagccggctgcgcatcgaggaggagatccgggtggtgcggctgcagctggaggccacagagcggcagagaggaggagctgagggggagctgcaggccctgcgggcccgggcagaggaggccgaggcccagaagaggcaggcccaggaggaggccgagcggctgcggcggcaggtgcaggatgagagccagaggaagaggcaggccgaggtggagctggccagccgggtgaaggccgaggccgaggccgcccgggagaagcagagggccctgcaggccctggaggagctgcggctgcaggccgaggaggccgagcggcggctgcggcaggccgaggtggagcgggcccggcaggtgcaggtggccctggagacagcccagaggtctgctgaggccgagctgcagagcaagagggccagctttgctgagaagacagcccagctggagaggagcctgcaggaggagcacgtggccgtggcccagctgcgggaggaggccgagcggcgggcccagcagcaggccgaggccgagcgggcccgggaggaggccgagcgggagctggagcgctggcagctgaaggccaatgaggccctgcggctgcggctgcaggccgaggaggtggcccagcagaagagcctggcccaggccgaggccgagaagcagaaggaggaggccgagcgggaggccaggagaagaggcaaggccgaggagcaggccgtgcggcagcgggagctggccgagcaggagctggagaagcagaggcagctggccgagggcacagcccagcagaggctggccgctgagcaggagctgatccggctgcgggcagagacagagcagggcgagcagcagaggcagctgctggaggaggagctggcccggctgcagcgggaggccgctgctgccacccagaagaggcaggagctggaggccgagctggccaaggtgcgggcagagatggaggtgctgctggccagcaaggcccgggcagaggaggagagccgcagcaccagcgagaagagcaagcagaggctggaggccgaggccggccgcttccgggagctggccgaggaggccgcccggctgcgggccctggccgaggaggccaagaggcagaggcagctggccgaggaggatgctgcccggcagagagctgaggccgagcgggtgctggccgagaagctggccgccatcggggaggccacccggctgaagacagaggccgagatcgccctgaaggagaaggaggccgagaatgaaaggctgcggcggctggctgaagatgaggccttccagaggcggcggctggaggagcaggccgcccagcacaaggctgacatcgaggagcggctggcccagctgaggaaggccagtgacagcgagctggagcggcagaagggcctggtggaggacaccctgcggcagaggcggcaggtggaggaggagatcctggccctgaaggccagctttgagaaggctgctgctgggaaggccgagctggagctggagctgggccgcatccgcagcaatgctgaggacaccctgcggagcaaggagcaggccgagctggaggccgcccggcagaggcagctggccgctgaggaggagaggagaagaagagaggccgaggagcgggtgcagaagagcctggccgctgaggaggaggccgcccggcagaggaaggccgccctggaggaggtggagcggctgaaggccaaggtggaggaggcccggcggctgcgggagcgggcagagcaggagagcgcccggcagctgcagctggcccaggaggccgcccagaagaggctgcaggccgaggagaaggcccacgcctttgctgtgcagcagaaggagcaggagctgcagcagaccctgcagcaggagcagagcgtgctggaccagctgcggggggaggccgaggccgccaggagagctgctgaggaggccgaggaggcccgggtgcaggccgagcgggaggccgcccagagccggcggcaggtggaggaggccgagcggctgaagcagagcgctgaggagcaggcccaggcccgggcccaggcccaggccgctgctgagaagctgaggaaggaggccgagcaggaggccgcccggcgggcccaggccgagcaggccgccctgcggcagaagcaggccgcagatgctgagatggagaagcacaagaagtttgctgagcagaccctgcggcagaaggcccaggtggagcaggagctgaccaccctgcggctgcagctggaggagacagaccaccagaagaacctgctggatgaggagctgcagaggctgaaggccgaggccacagaagctgcccggcagaggagccaggtggaggaggagctgttctctgtgcgggtgcagatggaggagctgagcaagctgaaggccagaattgaagctgagaacagagccctgatcctgcgggacaaggacaacacccagcgcttcctgcaggaggaggccgagaagatgaagcaggtggccgaggaggccgcccggctgtctgtggccgcccaggaggccgcccggctgcggcagctggccgaggaggacctggcccagcagagggccctggccgagaagatgctgaaggagaagatgcaggccgtgcaggaggccacccggctgaaggccgaggccgagctgctgcagcagcagaaggagctggcccaggagcaggcccggcggctgcaggaggacaaggagcagatggcccagcagctggccgaggagacccagggcttccagaggaccctggaggccgagcggcagaggcagctggagatgtctgctgaggccgagcggctgaagctgcgggtggccgagatgagccgggcccaggcccgggcagaagaagatgcccagcgcttcaggaagcaggccgaggagattggagagaagctgcacaggacagagctggccacccaggagaaggtgaccctggtgcagaccctggagatccagaggcagcagagcgaccatgatgctgagcggctgcgggaggccatcgccgagctggagcgggagaaggagaagctgcagcaggaggccaagctgctgcagctgaagtctgaggagatgcagacagtgcagcaggagcagctgctgcaggagacccaggccctgcagcagagcttcctgtctgagaaggacagcctgctgcagcgggagcgcttcatcgagcaggagaaggccaagctggagcagctgttccaggatgaggtggccaaggcccagcagctgcgggaggagcagcagaggcagcagcagcagatggagcaggagcggcagaggctggtggcctccatggaggaggcccggcggcggcagcacgaggccgaggagggcgtgcggaggaagcaggaggagctgcagcagctggagcagcagaggcggcagcaggaggagctgctggccgaggagaaccagaggctgcgggagcagctgcagctgctggaggagcagcacagagctgccctggcccacagcgaggaggtgacagccagccaggtggccgccaccaagaccctgcccaacggcagagatgccctggatggccctgctgctgaggccgagcctgagcacagctttgatggcctgcggaggaaggtgtctgcccagaggctgcaggaggccggcatcctgtctgctgaggagctgcagaggctggcccagggccacaccaccgtggatgagctggcccggcgggaggatgtgcgccactacctgcagggccgcagcagcattgctggcctgctgctgaaggccaccaatgagaagctgtctgtgtatgctgccctgcagaggcagctgctgagccctggaacagccctgatcctgctggaggcccaggccgccagcggcttcctgctggaccctgtgaggaacagaaggctgactgtgaatgaagctgtgaaggagggcgtggtgggccctgagctgcaccacaagctgctgtctgctgagagagctgtgacaggctacaaggacccctacacaggccagcagatcagcctcttccaggccatgcagaagggcctgattgtgcgggagcacggcatccggctgctggaggcccagatcgccaccggcggcgtcatcgaccctgtgcacagccaccgggtgcctgtggatgtggcctacagaagaggctactttgatgaggagatgaacagagtgctggccgaccccagtgatgacaccaagggcttctttgaccccaacacccatgagaacctgacctacctgcagctgctggagcgctgtgtggaggaccctgagaccggcctgtgcctgctgcccctgacagacaaggccgccaagggcggggagctggtgtacacagattctgaggccagagatgtgtttgagaaggccaccgtgtctgccccctttgggaagttccagggcaagacagtgaccatctgggagatcatcaacagcgagtacttcaccgctgagcagaggcgggacctgctgcggcagttcagaacaggccgcatcaccgtggagaagatcatcaagatcatcatcaccgtggtggaggagcaggagcagaagggccgcctgtgctttgagggcctgcggagcctggtgcctgctgctgagctgctggagagcagggtcatcgaccgggagctgtaccagcagctgcagagaggagagaggtctgtgagagatgtggccgaggtggacacagtgagaagagccctgcggggggccaacgtgattgctggggtgtggctggaggaggccggccagaagctgagcatctacaatgccctgaagaaggacctgctgcccagcgacatggctgtggccctgctggaggcccaggccggcaccggccacatcatcgaccctgccaccagcgcccggctgactgtggatgaagctgtgcgggccggcctggtgggccctgagttccacgagaagctgctgtctgctgagaaggctgtgacaggctacagagacccctacacaggccagagcgtgtccctcttccaggccctgaagaagggcctcatcccccgggagcagggcctgcggctgctggatgcccagctgagcactggaggcatcgtggaccccagcaagagccaccgggtgcccctggatgtggcctgtgcccggggctgcctggatgaggagaccagccgggccctgagcgcccccagggcagatgccaaggcctacagcgaccccagcactggagagcccgccacctacggggagctgcagcagcgctgcaggccagaccagctgaccggcctgagcctgctgcccctgtctgagaaggccgcccgggcccggcaggaggagctgtacagcgagctgcaggcccgggagacctttgagaagacccctgtggaggtgcctgtgggcggcttcaagggccgcacagtgacagtgtgggagctgatcagcagcgagtacttcaccgctgagcagaggcaggagctgctgcggcagttcagaacaggcaaggtgacagtggagaaggtgatcaagatcctgatcaccatcgtggaggaggtggagaccctgcggcaggagcggctgtccttcagcggcctgcgggcccctgtgcctgccagcgagctgctggccagcggcgtgctgagccgggcccagtttgagcagctgaaggatggcaagaccaccgtgaaggacctgtctgagctgggctctgtgaggaccctgctgcagggcagcggctgcctggccggcatctacctggaggacaccaaggagaaggtgtccatctatgaggccatgaggcggggcctgctgcgggccaccacagctgccctgctgctggaggcccaggccgccaccggcttcctggtggaccctgtgaggaaccagaggctgtatgtgcatgaggccgtgaaggccggcgtggtgggccctgagctgcacgagcagctgctgtctgctgagaaggctgtgacaggctacagagacccctacagcggcagcaccatcagcctcttccaggccatgcagaagggcctggtgctgcggcagcacggcatccggctgctggaggcccagatcgccactggaggcatcattgatcctgtgcacagccaccgggtgcctgtggatgtggcctaccagaggggctacttcagcgaggagatgaacagagtgctggccgaccccagtgatgacaccaagggcttctttgaccccaacacccatgagaacctgacctaccggcagctgctggagcgctgtgtggaggaccctgagaccggcctgcggctgctgcccctgaagggagctgagaaggccgaggtggtggagaccacccaggtgtacacagaggaggagacccggcgggcctttgaggagacccagattgacatccctgggggcggcagccacggcggcagcaccatgagcctgtgggaggtgatgcagagcgacctgatccctgaggagcagagggcccagctgatggctgacttccaggccggccgggtgaccaaggagaggatgatcatcatcatcatcgagatcatcgagaagacagagatcatccggcagcagggcctggccagctatgactatgtgagaagaaggctgacagctgaggacctgtttgaggcccgcatcatcagcctggagacctacaacctgctgcgggagggcaccaggagcctgcgggaggccctggaggccgagagcgcctggtgctacctgtatggaactggatctgtggccggcgtgtacctgcccggcagccggcagaccctgagcatctaccaggccctgaagaagggcctgctgtctgctgaggtggcccggctgctgctggaggcccaggccgccaccggcttcctgctggaccctgtgaagggggagcggctgactgtggatgaagctgtgaggaagggcctggtgggccctgagctgcatgaccggctgctgtctgctgagagagctgtgacaggctacagagacccctacacagagcagaccatcagcctcttccaggccatgaagaaggagctgatccccacagaggaggccctgcggctgctggatgcccagctggccaccggcggcatcgtggacccccggctgggcttccacctgcccctggaggtggcctaccagaggggctacctgaacaaggacacccatgaccagctgtctgagcccagcgaggtgcgctcctatgtggaccccagcacagatgagcggctgagctacacccagctgctgcggcgctgcagaagagatgatggcaccggccagctgctgctgcccctgagtgatgccaggaagctgaccttccggggcctgaggaagcagatcaccatggaggagctggtgcgcagccaggtgatggatgaggccacagccctgcagctgcgggagggcctgaccagcattgaggaggtgaccaagaacctgcagaagttcctggagggcaccagctgcatcgccggcgtgtttgtggatgccaccaaggagcggctgtctgtgtaccaggccatgaagaagggcatcatccggcccggcacagcctttgagctgctggaggcccaggccgccaccggctacgtgattgaccccatcaagggcctgaagctgactgtggaggaggccgtgaggatgggcatcgtgggccctgagttcaaggacaagctgctgtctgctgagagagctgtgacaggctacaaggacccctacagcggcaagctgatcagcctcttccaggccatgaagaagggcctcatcctgaaggaccacggcatccggctgctggaggcccagatcgccactggaggcatcattgatcctgaggagagccaccggctgcctgtggaggtggcctacaagaggggcctgtttgatgaggagatgaatgagatcctgacagaccccagtgatgacaccaagggcttctttgaccccaacacagaggagaacctgacctacctgcagctgatggagcgctgcatcacagacccccagacaggcctgtgcctgctgcccctgaaggagaagaagcgggagaggaagaccagcagcaagagctctgtgaggaagagaagagtggtgattgtggaccctgagaccgggaaggagatgtctgtgtatgaggcctacaggaagggcctgattgaccaccagacctacctggagctgtctgagcaggagtgtgagtgggaggagatcaccatcagcagcagtgatggagtggtgaagtccatgatcatcgacagaagaagtggccggcagtatgacattgatgatgccatcgccaagaacctgattgacagaagtgccctggaccagtaccgggccggcaccctgagcatcacagaatttgctgacatgctgtctggaaatgctgggggcttccgcagccgcagcagctctgtgggcagcagcagcagctaccccatcagccctgctgtgtccaggacccagctggcctcctggagcgaccccacagaggagactggacctgtggccggcatcctggacacagagaccctggagaaggtgtccatcacagaggccatgcacaggaacctggtggacaacatcaccggccagaggctgctggaggcccaggcctgcaccggcggcatcatcgaccccagcactggagagcgcttccctgtgacagatgctgtgaacaagggcctggtggacaagatcatggtggaccgcatcaacctggcccagaaggccttctgtggctttgaggaccccaggaccaagaccaagatgtctgctgcccaggccctgaagaagggctggctgtactatgaagctggccagcgcttcctggaggtgcagtacctgaccggcggcctcatcgagccagacaccccaggccgggtgcccctggatgaggccctgcagaggggcaccgtggatgccaggacagcccagaagctgagagatgtgggcgcctacagcaagtacctgacctgccccaagaccaagctgaagatctcctacaaggatgccctggaccgctccatggtggaggagggcaccggcctgcggctgctggaggccgccgcccagagcaccaagggctactacagcccctacagcgtgtctggcagcggcagcacagctggcagcaggacaggcagcaggacaggcagcagagctggcagccggcggggcagctttgatgccactggaagtggcttctccatgaccttcagcagcagcagctacagcagcagcggctatggaagaagatatgccagcggcagcagcgccagcctgggcggccctgagagcgctgtggcctag

SEQ ID NO: 262157 - DNA, 13548 bp, Artificial Sequence
  derived and/or modified sequence
atgaagatcgtgcctgatgagcgggacagagtgcagaagaagaccttcaccaagtgggtgaacaagcacctgatcaaggcccagaggcacatcagtgacctgtatgaggacctgagagatggccacaacctgatcagcctgctggaggtgctgagcggggacagcctgccccgggagaagggccgcatgaggttccacaagctgcagaatgtgcagatcgccctggactacctgcggcaccggcaggtgaagctggtgaacatcagaaatgatgacattgctgatggcaaccccaagctgaccctgggcctcatctggaccatcatcctgcacttccagatcagtgacatccaggtgtctggccagagcgaggacatgacagccaaggagaagctgctgctgtggagccagaggatggtggagggctaccagggcctgcgctgtgacaacttcaccagctcctggagagatggccgcctcttcaatgccatcatccaccgccacaagcccctgctgattgacatgaacaaggtgtaccggcagaccaacctggagaacctggaccaggccttctctgtggccgagcgggacctgggcgtgacccggctgctggaccctgaagatgtggatgtgccccagccagatgagaagagcatcatcacctacgtgagcagcctgtatgatgccatgccccgggtgcctgatgtgcaggatggagtgcgggccaatgagctgcagctgcgctggcaggagtaccgggagctggtgctgctgctgctgcagtggatgaggcaccacacagctgcctttgaggagcggcgcttccccagcagctttgaggagattgagatcctgtggagccagttcctgaagttcaaggagatggagctgcctgccaaggaggccgacaagaacagaagcaagggcatctaccagagcctggagggcgctgtgcaggccggccagctgaaggtgcccccaggctaccaccccctggatgtggagaaggagtggggcaagctgcacgtggccatcctggagcgggagaagcagctgcggagtgaatttgagcggctggagtgcctgcagagaattgtgaccaagctgcagatggaggccggcctgtgtgaggagcagctgaaccaggctgatgccctgctgcagagtgatgtgcggctgctggccgccggcaaggtgccccagagagctggggaggtggagcgggacctggacaaggctgacagcatgatccggctgctcttcaatgatgtgcagaccctgaaggatggccgccacccccagggcgagcagatgtaccgccgggtgtaccgcctgcacgagcggctggtggccatcagaacagagtacaacctgcggctgaaggccggcgtggccgccccagccacccaggtggcccaggtgaccctgcagagcgtgcagaggaggcctgagctggaggacagcaccctgcgctacctgcaggacctgctggcctgggtggaggagaaccagcaccgggtggatggagctgagtggggcgtggacctgcccagcgtggaggcccagctgggcagccaccggggcctgcaccagagcattgaggagttccgggccaagattgaaagagcccggagtgatgagggccagctgagccctgccaccaggggggcctacagagactgcctgggccgcctggacctgcagtatgccaagctgctgaacagcagcaaggcccggctgcggagcctggagagcctgcacagctttgtggccgccgccaccaaggagctgatgtggctgaatgagaaggaggaggaggaggtgggctttgactggagcgacaggaacaccaacatgacagccaagaaggagagctacagcgccctgatgagggagctggagctgaaggagaagaagatcaaggagctgcagaatgctggggaccggctgctgcgggaggaccacccagcccggcccaccgtggagagcttccaggccgccctgcagacccagtggagctggatgctgcagctgtgctgctgcatcgaggcccacctgaaggaaaatgctgcctacttccagttcttcagtgatgtgcgggaggccgagggccagctgcagaagctgcaggaggccctgcggaggaagtacagctgtgacagaagtgccaccgtgacccggctggaggacctgctgcaggatgcccaggatgagaaggagcagctgaatgagtacaagggccacctgagcggcctggccaagagggccaaggctgtggtgcagctgaagcccaggcacccagcccaccccatgaggggccgcctgcccctgctggccgtgtgtgactacaagcaggtggaggtgacagtgcacaagggagatgagtgccagctggtgggccctgcccagcccagccactggaaggtgctgagcagcagcggcagcgaggccgctgtgcccagcgtgtgcttcctggtgcccccacccaaccaggaggcccaggaggccgtgacccggctggaggcccagcaccaggccctggtgaccctgtggcaccagctgcacgtggacatgaagagcctgctggcctggcagagcctgcggagagatgtgcagctgatccgctcctggagcctggccaccttccgcaccctgaagccagaggagcagaggcaggccctgcacagcctggagctgcactaccaggccttcctgcgggacagccaggatgctgggggcttcggcccagaagatcggctgatggccgagcgggagtatggcagctgcagccaccactaccagcagctgctgcagagcctggagcagggcgcccaggaggagagccgctgccagcgctgcatcagcgagctgaaggacatccggctgcagctggaggcctgtgagaccaggacagtgcaccggctgcggctgcccctggacaaggagcccgcccgggagtgtgcccagagaattgctgagcagcagaaggcccaggccgaggtggagggcctgggcaagggcgtggcccggctgtctgctgaggccgagaaggtgctggccctgcctgagcccagccctgctgcccccaccctgcggtctgagctggagctgaccctgggcaagctggagcaggtgcgcagcctgagcgccatctacctggagaagctgaagaccatcagcctggtgatccggggcacccagggcgctgaggaggtgctgcgggcccacgaggagcagctgaaggaggcccaggccgtgcctgccaccctgcctgagctggaggccaccaaggccagcctgaagaagctgcgggcccaggccgaggcccagcagcccacctttgatgccctgagagatgagctgcggggggcccaggaggtgggggagcggctgcagcagagacatggagagagagatgtggaggtggagcgctggagggagcgggtggcccagctgctggagcgctggcaggccgtgctggcccagacagatgtgcggcagcgggagctggagcagctgggccggcagctgcgctactaccgggagagcgctgaccccctgggcgcctggctgcaggatgcccggcggcggcaggagcagatccaggccatgcccctggccgacagccaggccgtgcgggagcagctgcggcaggagcaggccctgctggaggagattgaaagacatggagagaaggtggaggagtgccagagatttgccaagcagtacatcaatgccatcaaggactatgagctgcagctggtgacctacaaggcccagctggagcctgtggccagccctgccaagaagcccaaggtgcagagcggcagcgagagcgtcatccaggagtatgtggacctgcggacccactacagcgagctgaccaccctgaccagccagtacatcaagttcatcagcgagaccctgcggaggatggaggaggaggagcggctggccgagcagcagagagctgaggagcgggagcggctggccgaggtggaggccgccctggagaagcagaggcagctggccgaggcccacgcccaggccaaggcccaggccgagcgggaggccaaggagctgcagcagaggatgcaggaggaggtggtgagaagagaggaggccgctgtggatgcccagcagcagaagaggagcatccaggaggagctgcagcagctgcggcagagcagcgaggccgagatccaggccaaggcccggcaggccgaggccgctgagaggagccggctgcgcatcgaggaggagatccgggtggtgcggctgcagctggaggccacagagcggcagagaggaggagctgagggggagctgcaggccctgcgggcccgggcagaggaggccgaggcccagaagaggcaggcccaggaggaggccgagcggctgcggcggcaggtgcaggatgagagccagaggaagaggcaggccgaggtggagctggccagccgggtgaaggccgaggccgaggccgcccgggagaagcagagggccctgcaggccctggaggagctgcggctgcaggccgaggaggccgagcggcggctgcggcaggccgaggtggagcgggcccggcaggtgcaggtggccctggagacagcccagaggtctgctgaggccgagctgcagagcaagagggccagctttgctgagaagacagcccagctggagaggagcctgcaggaggagcacgtggccgtggcccagctgcgggaggaggccgagcggcgggcccagcagcaggccgaggccgagcgggcccgggaggaggccgagcgggagctggagcgctggcagctgaaggccaatgaggccctgcggctgcggctgcaggccgaggaggtggcccagcagaagagcctggcccaggccgaggccgagaagcagaaggaggaggccgagcgggaggccaggagaagaggcaaggccgaggagcaggccgtgcggcagcgggagctggccgagcaggagctggagaagcagaggcagctggccgagggcacagcccagcagaggctggccgctgagcaggagctgatccggctgcgggcagagacagagcagggcgagcagcagaggcagctgctggaggaggagctggcccggctgcagcgggaggccgctgctgccacccagaagaggcaggagctggaggccgagctggccaaggtgcgggcagagatggaggtgctgctggccagcaaggcccgggcagaggaggagagccgcagcaccagcgagaagagcaagcagaggctggaggccgaggccggccgcttccgggagctggccgaggaggccgcccggctgcgggccctggccgaggaggccaagaggcagaggcagctggccgaggaggatgctgcccggcagagagctgaggccgagcgggtgctggccgagaagctggccgccatcggggaggccacccggctgaagacagaggccgagatcgccctgaaggagaaggaggccgagaatgaaaggctgcggcggctggctgaagatgaggccttccagaggcggcggctggaggagcaggccgcccagcacaaggctgacatcgaggagcggctggcccagctgaggaaggccagtgacagcgagctggagcggcagaagggcctggtggaggacaccctgcggcagaggcggcaggtggaggaggagatcctggccctgaaggccagctttgagaaggctgctgctgggaaggccgagctggagctggagctgggccgcatccgcagcaatgctgaggacaccctgcggagcaaggagcaggccgagctggaggccgcccggcagaggcagctggccgctgaggaggagaggagaagaagagaggccgaggagcgggtgcagaagagcctggccgctgaggaggaggccgcccggcagaggaaggccgccctggaggaggtggagcggctgaaggccaaggtggaggaggcccggcggctgcgggagcgggcagagcaggagagcgcccggcagctgcagctggcccaggaggccgcccagaagaggctgcaggccgaggagaaggcccacgcctttgctgtgcagcagaaggagcaggagctgcagcagaccctgcagcaggagcagagcgtgctggaccagctgcggggggaggccgaggccgccaggagagctgctgaggaggccgaggaggcccgggtgcaggccgagcgggaggccgcccagagccggcggcaggtggaggaggccgagcggctgaagcagagcgctgaggagcaggcccaggcccgggcccaggcccaggccgctgctgagaagctgaggaaggaggccgagcaggaggccgcccggcgggcccaggccgagcaggccgccctgcggcagaagcaggccgcagatgctgagatggagaagcacaagaagtttgctgagcagaccctgcggcagaaggcccaggtggagcaggagctgaccaccctgcggctgcagctggaggagacagaccaccagaagaacctgctggatgaggagctgcagaggctgaaggccgaggccacagaagctgcccggcagaggagccaggtggaggaggagctgttctctgtgcgggtgcagatggaggagctgagcaagctgaaggccagaattgaagctgagaacagagccctgatcctgcgggacaaggacaacacccagcgcttcctgcaggaggaggccgagaagatgaagcaggtggccgaggaggccgcccggctgtctgtggccgcccaggaggccgcccggctgcggcagctggccgaggaggacctggcccagcagagggccctggccgagaagatgctgaaggagaagatgcaggccgtgcaggaggccacccggctgaaggccgaggccgagctgctgcagcagcagaaggagctggcccaggagcaggcccggcggctgcaggaggacaaggagcagatggcccagcagctggccgaggagacccagggcttccagaggaccctggaggccgagcggcagaggcagctggagatgtctgctgaggccgagcggctgaagctgcgggtggccgagatgagccgggcccaggcccgggcagaagaagatgcccagcgcttcaggaagcaggccgaggagattggagagaagctgcacaggacagagctggccacccaggagaaggtgaccctggtgcagaccctggagatccagaggcagcagagcgaccatgatgctgagcggctgcgggaggccatcgccgagctggagcgggagaaggagaagctgcagcaggaggccaagctgctgcagctgaagtctgaggagatgcagacagtgcagcaggagcagctgctgcaggagacccaggccctgcagcagagcttcctgtctgagaaggacagcctgctgcagcgggagcgcttcatcgagcaggagaaggccaagctggagcagctgttccaggatgaggtggccaaggcccagcagctgcgggaggagcagcagaggcagcagcagcagatggagcaggagcggcagaggctggtggcctccatggaggaggcccggcggcggcagcacgaggccgaggagggcgtgcggaggaagcaggaggagctgcagcagctggagcagcagaggcggcagcaggaggagctgctggccgaggagaaccagaggctgcgggagcagctgcagctgctggaggagcagcacagagctgccctggcccacagcgaggaggtgacagccagccaggtggccgccaccaagaccctgcccaacggcagagatgccctggatggccctgctgctgaggccgagcctgagcacagctttgatggcctgcggaggaaggtgtctgcccagaggctgcaggaggccggcatcctgtctgctgaggagctgcagaggctggcccagggccacaccaccgtggatgagctggcccggcgggaggatgtgcgccactacctgcagggccgcagcagcattgctggcctgctgctgaaggccaccaatgagaagctgtctgtgtatgctgccctgcagaggcagctgctgagccctggaacagccctgatcctgctggaggcccaggccgccagcggcttcctgctggaccctgtgaggaacagaaggctgactgtgaatgaagctgtgaaggagggcgtggtgggccctgagctgcaccacaagctgctgtctgctgagagagctgtgacaggctacaaggacccctacacaggccagcagatcagcctcttccaggccatgcagaagggcctgattgtgcgggagcacggcatccggctgctggaggcccagatcgccaccggcggcgtcatcgaccctgtgcacagccaccgggtgcctgtggatgtggcctacagaagaggctactttgatgaggagatgaacagagtgctggccgaccccagtgatgacaccaagggcttctttgaccccaacacccatgagaacctgacctacctgcagctgctggagcgctgtgtggaggaccctgagaccggcctgtgcctgctgcccctgacagacaaggccgccaagggcggggagctggtgtacacagattctgaggccagagatgtgtttgagaaggccaccgtgtctgccccctttgggaagttccagggcaagacagtgaccatctgggagatcatcaacagcgagtacttcaccgctgagcagaggcgggacctgctgcggcagttcagaacaggccgcatcaccgtggagaagatcatcaagatcatcatcaccgtggtggaggagcaggagcagaagggccgcctgtgctttgagggcctgcggagcctggtgcctgctgctgagctgctggagagcagggtcatcgaccgggagctgtaccagcagctgcagagaggagagaggtctgtgagagatgtggccgaggtggacacagtgagaagagccctgcggggggccaacgtgattgctggggtgtggctggaggaggccggccagaagctgagcatctacaatgccctgaagaaggacctgctgcccagcgacatggctgtggccctgctggaggcccaggccggcaccggccacatcatcgaccctgccaccagcgcccggctgactgtggatgaagctgtgcgggccggcctggtgggccctgagttccacgagaagctgctgtctgctgagaaggctgtgacaggctacagagacccctacacaggccagagcgtgtccctcttccaggccctgaagaagggcctcatcccccgggagcagggcctgcggctgctggatgcccagctgagcactggaggcatcgtggaccccagcaagagccaccgggtgcccctggatgtggcctgtgcccggggctgcctggatgaggagaccagccgggccctgagcgcccccagggcagatgccaaggcctacagcgaccccagcactggagagcccgccacctacggggagctgcagcagcgctgcaggccagaccagctgaccggcctgagcctgctgcccctgtctgagaaggccgcccgggcccggcaggaggagctgtacagcgagctgcaggcccgggagacctttgagaagacccctgtggaggtgcctgtgggcggcttcaagggccgcacagtgacagtgtgggagctgatcagcagcgagtacttcaccgctgagcagaggcaggagctgctgcggcagttcagaacaggcaaggtgacagtggagaaggtgatcaagatcctgatcaccatcgtggaggaggtggagaccctgcggcaggagcggctgtccttcagcggcctgcgggcccctgtgcctgccagcgagctgctggccagcggcgtgctgagccgggcccagtttgagcagctgaaggatggcaagaccaccgtgaaggacctgtctgagctgggctctgtgaggaccctgctgcagggcagcggctgcctggccggcatctacctggaggacaccaaggagaaggtgtccatctatgaggccatgaggcggggcctgctgcgggccaccacagctgccctgctgctggaggcccaggccgccaccggcttcctggtggaccctgtgaggaaccagaggctgtatgtgcatgaggccgtgaaggccggcgtggtgggccctgagctgcacgagcagctgctgtctgctgagaaggctgtgacaggctacagagacccctacagcggcagcaccatcagcctcttccaggccatgcagaagggcctggtgctgcggcagcacggcatccggctgctggaggcccagatcgccactggaggcatcattgatcctgtgcacagccaccgggtgcctgtggatgtggcctaccagaggggctacttcagcgaggagatgaacagagtgctggccgaccccagtgatgacaccaagggcttctttgaccccaacacccatgagaacctgacctaccggcagctgctggagcgctgtgtggaggaccctgagaccggcctgcggctgctgcccctgaagggagctgagaaggccgaggtggtggagaccacccaggtgtacacagaggaggagacccggcgggcctttgaggagacccagattgacatccctgggggcggcagccacggcggcagcaccatgagcctgtgggaggtgatgcagagcgacctgatccctgaggagcagagggcccagctgatggctgacttccaggccggccgggtgaccaaggagaggatgatcatcatcatcatcgagatcatcgagaagacagagatcatccggcagcagggcctggccagctatgactatgtgagaagaaggctgacagctgaggacctgtttgaggcccgcatcatcagcctggagacctacaacctgctgcgggagggcaccaggagcctgcgggaggccctggaggccgagagcgcctggtgctacctgtatggaactggatctgtggccggcgtgtacctgcccggcagccggcagaccctgagcatctaccaggccctgaagaagggcctgctgtctgctgaggtggcccggctgctgctggaggcccaggccgccaccggcttcctgctggaccctgtgaagggggagcggctgactgtggatgaagctgtgaggaagggcctggtgggccctgagctgcatgaccggctgctgtctgctgagagagctgtgacaggctacagagacccctacacagagcagaccatcagcctcttccaggccatgaagaaggagctgatccccacagaggaggccctgcggctgctggatgcccagctggccaccggcggcatcgtggacccccggctgggcttccacctgcccctggaggtggcctaccagaggggctacctgaacaaggacacccatgaccagctgtctgagcccagcgaggtgcgctcctatgtggaccccagcacagatgagcggctgagctacacccagctgctgcggcgctgcagaagagatgatggcaccggccagctgctgctgcccctgagtgatgccaggaagctgaccttccggggcctgaggaagcagatcaccatggaggagctggtgcgcagccaggtgatggatgaggccacagccctgcagctgcgggagggcctgaccagcattgaggaggtgaccaagaacctgcagaagttcctggagggcaccagctgcatcgccggcgtgtttgtggatgccaccaaggagcggctgtctgtgtaccaggccatgaagaagggcatcatccggcccggcacagcctttgagctgctggaggcccaggccgccaccggctacgtgattgaccccatcaagggcctgaagctgactgtggaggaggccgtgaggatgggcatcgtgggccctgagttcaaggacaagctgctgtctgctgagagagctgtgacaggctacaaggacccctacagcggcaagctgatcagcctcttccaggccatgaagaagggcctcatcctgaaggaccacggcatccggctgctggaggcccagatcgccactggaggcatcattgatcctgaggagagccaccggctgcctgtggaggtggcctacaagaggggcctgtttgatgaggagatgaatgagatcctgacagaccccagtgatgacaccaagggcttctttgaccccaacacagaggagaacctgacctacctgcagctgatggagcgctgcatcacagacccccagacaggcctgtgcctgctgcccctgaaggagaagaagcgggagaggaagaccagcagcaagagctctgtgaggaagagaagagtggtgattgtggaccctgagaccgggaaggagatgtctgtgtatgaggcctacaggaagggcctgattgaccaccagacctacctggagctgtctgagcaggagtgtgagtgggaggagatcaccatcagcagcagtgatggagtggtgaagtccatgatcatcgacagaagaagtggccggcagtatgacattgatgatgccatcgccaagaacctgattgacagaagtgccctggaccagtaccgggccggcaccctgagcatcacagaatttgctgacatgctgtctggaaatgctgggggcttccgcagccgcagcagctctgtgggcagcagcagcagctaccccatcagccctgctgtgtccaggacccagctggcctcctggagcgaccccacagaggagactggacctgtggccggcatcctggacacagagaccctggagaaggtgtccatcacagaggccatgcacaggaacctggtggacaacatcaccggccagaggctgctggaggcccaggcctgcaccggcggcatcatcgaccccagcactggagagcgcttccctgtgacagatgctgtgaacaagggcctggtggacaagatcatggtggaccgcatcaacctggcccagaaggccttctgtggctttgaggaccccaggaccaagaccaagatgtctgctgcccaggccctgaagaagggctggctgtactatgaagctggccagcgcttcctggaggtgcagtacctgaccggcggcctcatcgagccagacaccccaggccgggtgcccctggatgaggccctgcagaggggcaccgtggatgccaggacagcccagaagctgagagatgtgggcgcctacagcaagtacctgacctgccccaagaccaagctgaagatctcctacaaggatgccctggaccgctccatggtggaggagggcaccggcctgcggctgctggaggccgccgcccagagcaccaagggctactacagcccctacagcgtgtctggcagcggcagcacagctggcagcaggacaggcagcaggacaggcagcagagctggcagccggcggggcagctttgatgccactggaagtggcttctccatgaccttcagcagcagcagctacagcagcagcggctatggaagaagatatgccagcggcagcagcgccagcctgggcggccctgagagcgctgtggcctag

SEQ ID NO: 262158 - DNA, 13725 bp, Artificial Sequence
  derived and/or modified sequence
atgtctggagaagatgctgaggtgcgggctgtgtctgaagatgtgtccaatggcagcagcggcagccccagccctggggacaccctgccctggaacctgggcaagacccagaggagccgccgcagcggcggcggggccggcagcaatggatctgtgctggaccctgctgagagagctgtgatcagaattgctgatgagcgggacagagtgcagaagaagaccttcaccaagtgggtgaacaagcacctgatcaaggcccagaggcacatcagtgacctgtatgaggacctgagagatggccacaacctgatcagcctgctggaggtgctgagcggggacagcctgccccgggagaagggccgcatgaggttccacaagctgcagaatgtgcagatcgccctggactacctgcggcaccggcaggtgaagctggtgaacatcagaaatgatgacattgctgatggcaaccccaagctgaccctgggcctcatctggaccatcatcctgcacttccagatcagtgacatccaggtgtctggccagagcgaggacatgacagccaaggagaagctgctgctgtggagccagaggatggtggagggctaccagggcctgcgctgtgacaacttcaccagctcctggagagatggccgcctcttcaatgccatcatccaccgccacaagcccctgctgattgacatgaacaaggtgtaccggcagaccaacctggagaacctggaccaggccttctctgtggccgagcgggacctgggcgtgacccggctgctggaccctgaagatgtggatgtgccccagccagatgagaagagcatcatcacctacgtgagcagcctgtatgatgccatgccccgggtgcctgatgtgcaggatggagtgcgggccaatgagctgcagctgcgctggcaggagtaccgggagctggtgctgctgctgctgcagtggatgaggcaccacacagctgcctttgaggagcggcgcttccccagcagctttgaggagattgagatcctgtggagccagttcctgaagttcaaggagatggagctgcctgccaaggaggccgacaagaacagaagcaagggcatctaccagagcctggagggcgctgtgcaggccggccagctgaaggtgcccccaggctaccaccccctggatgtggagaaggagtggggcaagctgcacgtggccatcctggagcgggagaagcagctgcggagtgaatttgagcggctggagtgcctgcagagaattgtgaccaagctgcagatggaggccggcctgtgtgaggagcagctgaaccaggctgatgccctgctgcagagtgatgtgcggctgctggccgccggcaaggtgccccagagagctggggaggtggagcgggacctggacaaggctgacagcatgatccggctgctcttcaatgatgtgcagaccctgaaggatggccgccacccccagggcgagcagatgtacagaagagtgtaccgcctgcacgagcggctggtggccatcagaacagagtacaacctgcggctgaaggccggcgtggccgccccagccacccaggtggcccaggtgaccctgcagagcgtgcagaggaggcctgagctggaggacagcaccctgcgctacctgcaggacctgctggcctgggtggaggagaaccagcaccgggtggatggagctgagtggggcgtggacctgcccagcgtggaggcccagctgggcagccaccggggcctgcaccagagcattgaggagttccgggccaagattgagcgggcccggagtgatgagggccagctgagccctgccaccaggggggcctacagagactgcctgggccgcctggacctgcagtatgccaagctgctgaacagcagcaaggcccggctgcggagcctggagagcctgcacagctttgtggccgccgccaccaaggagctgatgtggctgaatgagaaggaggaggaggaggtgggctttgactggagcgacaggaacaccaacatgacagccaagaaggagagctacagcgccctgatgagggagctggagctgaaggagaagaagatcaaggagctgcagaatgctggggaccggctgctgcgggaggaccacccagcccggcccaccgtggagagcttccaggccgccctgcagacccagtggagctggatgctgcagctgtgctgctgcatcgaggcccacctgaaggaaaatgctgcctacttccagttcttcagtgatgtgcgggaggccgagggccagctgcagaagctgcaggaggccctgcggaggaagtacagctgtgacagaagtgccaccgtgacccggctggaggacctgctgcaggatgcccaggatgagaaggagcagctgaatgagtacaagggccacctgagcggcctggccaagagggccaaggctgtggtgcagctgaagcccaggcacccagcccaccccatgaggggccgcctgcccctgctggccgtgtgtgactacaagcaggtggaggtgacagtgcacaagggagatgagtgccagctggtgggccctgcccagcccagccactggaaggtgctgagcagcagcggcagcgaggccgctgtgcccagcgtgtgcttcctggtgcccccacccaaccaggaggcccaggaggccgtgacccggctggaggcccagcaccaggccctggtgaccctgtggcaccagctgcacgtggacatgaagagcctgctggcctggcagagcctgcggagagatgtgcagctgatccgctcctggagcctggccaccttccgcaccctgaagccagaggagcagaggcaggccctgcacagcctggagctgcactaccaggccttcctgcgggacagccaggatgctgggggctttggacctgaggaccggctgatggccgagcgggagtatggcagctgcagccaccactaccagcagctgctgcagagcctggagcagggcgcccaggaggagagccgctgccagcgctgcatcagcgagctgaaggacatccggctgcagctggaggcctgtgagaccaggacagtgcaccggctgcggctgcccctggacaaggagcccgccagagaatgtgcccagagaattgctgagcagcagaaggcccaggccgaggtggagggcctgggcaaaggagtggcccggctgtctgctgaggccgagaaggtgctggccctgcctgagcccagccctgctgcccccaccctgcggtctgagctggagctgaccctgggcaagctggagcaggtgcgcagcctgagcgccatctacctggagaagctgaagaccatcagcctggtgatccggggcacccagggcgctgaggaggtgctgcgggcccacgaggagcagctgaaggaggcccaggccgtgcctgccaccctgcctgagctggaggccaccaaggccagcctgaagaagctgcgggcccaggccgaggcccagcagcccacctttgatgccctgagagatgagctgcggggggcccaggaggtgggggagcggctgcagcagagacatggagagagagatgtggaggtggagcgctggagggagcgggtggcccagctgctggagcgctggcaggccgtgctggcccagacagatgtgcggcagcgggagctggagcagctgggccggcagctgcgctactaccgggagagcgctgaccccctgggcgcctggctgcaggatgcccggcggcggcaggagcagatccaggccatgcccctggccgacagccaggccgtgcgggagcagctgcggcaggagcaggccctgctggaggagattgagcggcacggggagaaggtggaggagtgccagagatttgccaagcagtacatcaatgccatcaaggactatgagctgcagctggtgacctacaaggcccagctggagcctgtggccagccctgccaagaagcccaaggtgcagagcggcagcgagagcgtcatccaggagtatgtggacctgcggacccactacagcgagctgaccaccctgaccagccagtacatcaagttcatcagcgagaccctgcggaggatggaggaggaggagcggctggccgagcagcagagagctgaggagcgggagcggctggccgaggtggaggccgccctggagaagcagaggcagctggccgaggcccacgcccaggccaaggcccaggccgagcgggaggccaaggagctgcagcagaggatgcaggaggaggtggtgcggcgggaggaggccgctgtggatgcccagcagcagaagaggagcatccaggaggagctgcagcagctgcggcagagcagcgaggccgagatccaggccaaggcccggcaggccgaggccgctgagaggagccggctgagaattgaggaggagatccgggtggtgcggctgcagctggaggccacagagcggcagaggggcggcgctgagggggagctgcaggccctgcgggcccgggcagaggaggccgaggcccagaagaggcaggcccaggaggaggccgagcggctgcggcggcaggtgcaggatgagagccagaggaagaggcaggccgaggtggagctggccagccgggtgaaggccgaggccgaggccgcccgggagaagcagagggccctgcaggccctggaggagctgcggctgcaggccgaggaggccgagcggcggctgcggcaggccgaggtggagcgggcccggcaggtgcaggtggccctggagacagcccagaggtctgctgaggccgagctgcagagcaagagggccagctttgctgagaagacagcccagctggagaggagcctgcaggaggagcacgtggccgtggcccagctgcgggaggaggccgagcggcgggcccagcagcaggccgaggccgagcgggcccgggaggaggccgagcgggagctggagcgctggcagctgaaggccaatgaggccctgcggctgcggctgcaggccgaggaggtggcccagcagaagagcctggcccaggccgaggccgagaagcagaaggaggaggccgagcgggaggcccggcggcggggcaaggccgaggagcaggccgtgcggcagcgggagctggccgagcaggagctggagaagcagaggcagctggccgagggcacagcccagcagaggctggccgctgagcaggagctgatccggctgcgggcagagacagagcagggcgagcagcagaggcagctgctggaggaggagctggcccggctgcagcgggaggccgccgccgccacccagaagaggcaggagctggaggccgagctggccaaggtgcgggcagagatggaggtgctgctggccagcaaggcccgggcagaggaggagagccgcagcaccagcgagaagagcaagcagaggctggaggccgaggccggccgcttccgggagctggccgaggaggccgcccggctgcgggccctggccgaggaggccaagaggcagaggcagctggccgaggaggatgctgcccggcagagagctgaggccgagcgggtgctggccgagaagctggccgccatcggggaggccacccggctgaagacagaagctgagatcgccctgaaggagaaggaggctgaaaatgaaaggctgcggcggctggccgaggatgaggccttccagaggcggcggctggaggagcaggccgcccagcacaaggctgacatcgaggagcggctggcccagctgaggaaggccagtgacagcgagctggagcggcagaagggcctggtggaggacaccctgcggcagaggcggcaggtggaggaggagatcctggccctgaaggccagctttgagaaggctgctgctgggaaggccgagctggagctggagctgggccgcatccgcagcaatgctgaggacaccctgcggagcaaggagcaggccgagctggaggccgcccggcagaggcagctggccgctgaggaggagaggagaagaagagaagctgaggagcgggtgcagaagagcctggccgctgaggaggaggccgcccggcagaggaaggccgccctggaggaggtggagcggctgaaggccaaggtggaggaggcccggcggctgcgggagagagctgagcaggagagcgcccggcagctgcagctggcccaggaggccgcccagaagaggctgcaggccgaggagaaggcccacgcctttgctgtgcagcagaaggagcaggagctgcagcagaccctgcagcaggagcagagcgtgctggaccagctgcggggggaggccgaggccgcccggcgggctgctgaggaggccgaggaggcccgggtgcaggccgagcgggaggccgcccagagccggcggcaggtggaggaggccgagcggctgaagcagagcgctgaggagcaggcccaggcccgggcccaggcccaggccgctgctgagaagctgaggaaggaggccgagcaggaggccgcccggcgggcccaggccgagcaggccgccctgcggcagaagcaggccgcagatgctgagatggagaagcacaagaagtttgctgagcagaccctgcggcagaaggcccaggtggagcaggagctgaccaccctgcggctgcagctggaggagacagaccaccagaagaacctgctggatgaggagctgcagaggctgaaggccgaggccacagaggccgcccggcagaggagccaggtggaggaggagctgttctctgtgcgggtgcagatggaggagctgagcaagctgaaggcccgcatcgaggctgaaaatagagccctgatcctgcgggacaaggacaacacccagcgcttcctgcaggaggaggccgagaagatgaagcaggtggccgaggaggccgcccggctgtctgtggccgcccaggaggccgcccggctgcggcagctggccgaggaggacctggcccagcagagggccctggccgagaagatgctgaaggagaagatgcaggccgtgcaggaggccacccggctgaaggccgaggccgagctgctgcagcagcagaaggagctggcccaggagcaggcccggcggctgcaggaggacaaggagcagatggcccagcagctggccgaggagacccagggcttccagaggaccctggaggccgagcggcagaggcagctggagatgtctgctgaggccgagcggctgaagctgcgggtggccgagatgagccgggcccaggcccgggcagaggaggatgcccagcgcttcaggaagcaggccgaggagatcggggagaagctgcacaggacagagctggccacccaggagaaggtgaccctggtgcagaccctggagatccagaggcagcagagcgaccatgatgctgagcggctgcgggaggccatcgccgagctggagcgggagaaggagaagctgcagcaggaggccaagctgctgcagctgaagtctgaggagatgcagacagtgcagcaggagcagctgctgcaggagacccaggccctgcagcagagcttcctgtctgagaaggacagcctgctgcagcgggagcgcttcatcgagcaggagaaggccaagctggagcagctgttccaggatgaggtggccaaggcccagcagctgcgggaggagcagcagaggcagcagcagcagatggagcaggagcggcagaggctggtggcctccatggaggaggcccggcggcggcagcatgaagctgaggagggcgtgcggaggaagcaggaggagctgcagcagctggagcagcagaggcggcagcaggaggagctgctggccgaggagaaccagaggctgcgggagcagctgcagctgctggaggagcagcaccgggccgccctggcccacagcgaggaggtgacagccagccaggtggccgccaccaagaccctgcccaacggcagagatgccctggatggccctgctgctgaggccgagcctgagcacagctttgatggcctgcggaggaaggtgtctgcccagaggctgcaggaggccggcatcctgtctgctgaggagctgcagaggctggcccagggccacaccaccgtggatgagctggccaggagagaagatgtgcgccactacctgcagggccgcagcagcattgctggcctgctgctgaaggccaccaatgagaagctgtctgtgtatgctgccctgcagaggcagctgctgagccctggaacagccctgatcctgctggaggcccaggccgccagcggcttcctgctggaccctgtgaggaacagaaggctgactgtgaatgaggccgtgaaggagggcgtggtgggccctgagctgcaccacaagctgctgtctgctgagagagctgtgacaggctacaaggacccctacacaggccagcagatcagcctcttccaggccatgcagaagggcctcatcgtgcgggagcacggcatccggctgctggaggcccagatcgccactggaggagtgattgatcctgtgcacagccaccgggtgcctgtggatgtggcctaccgccggggctactttgatgaggagatgaacagagtgctggccgaccccagtgatgacaccaagggcttctttgaccccaacacccatgagaacctgacctacctgcagctgctggagcgctgtgtggaggaccctgagaccggcctgtgcctgctgcccctgacagacaaggccgccaagggcggggagctggtgtacacagacagcgaggccagagatgtgtttgagaaggccaccgtgtctgccccctttgggaagttccagggcaagacagtgaccatctgggagatcatcaacagcgagtacttcaccgctgagcagaggcgggacctgctgcggcagttcagaacaggccgcatcaccgtggagaagatcatcaagatcatcatcaccgtggtggaggagcaggagcagaagggccgcctgtgctttgagggcctgcggagcctggtgcctgctgctgagctgctggagagccgggtgattgaccgggagctgtaccagcagctgcagagaggagagaggtctgtgagagatgtggccgaggtggacacagtgcggcgggccctgcggggggccaacgtgattgctggggtgtggctggaggaggccggccagaagctgagcatctacaatgccctgaagaaggacctgctgcccagcgacatggctgtggccctgctggaggcccaggccggcaccggccacatcattgatcctgccaccagcgcccggctgactgtggatgaggccgtgcgggccggcctggtgggccctgagttccacgagaagctgctgtctgctgagaaggctgtgacaggctacagagacccctacacaggccagagcgtgtccctcttccaggccctgaagaagggcctcatcccccgggagcagggcctgcggctgctggatgcccagctgagcactggaggcatcgtggaccccagcaagagccaccgggtgcccctggatgtggcctgtgcccggggctgcctggatgaggagaccagccgggccctgagcgcccccagggcagatgccaaggcctacagcgaccccagcactggagagcccgccacctatggagagctgcagcagcgctgcaggccagaccagctgaccggcctgagcctgctgcccctgtctgagaaggccgcccgggcccggcaggaggagctgtacagcgagctgcaggcccgggagacctttgagaagacccctgtggaggtgcctgtgggcggcttcaagggccgcacagtgacagtgtgggagctgatcagcagcgagtacttcaccgctgagcagaggcaggagctgctgcggcagttcagaacaggcaaggtgacagtggagaaggtgatcaagatcctgatcaccatcgtggaggaggtggagaccctgcggcaggagcggctgtccttcagcggcctgcgggcccctgtgcctgccagcgagctgctggccagcggcgtgctgagccgggcccagtttgagcagctgaaggatggcaagaccaccgtgaaggacctgtctgagctgggctctgtgaggaccctgctgcagggcagcggctgcctggccggcatctacctggaggacaccaaggagaaggtgtccatctatgaggccatgagaagaggcctgctgcgggccaccacagctgccctgctgctggaggcccaggccgccaccggcttcctggtggaccctgtgaggaaccagaggctgtatgtgcatgaagctgtgaaggccggcgtggtgggccctgagctgcacgagcagctgctgtctgctgagaaggctgtgacaggctacagagacccctacagcggcagcaccatcagcctcttccaggccatgcagaagggcctggtgctgcggcagcacggcatccggctgctggaggcccagatcgccaccggcggcatcatcgaccctgtgcacagccaccgggtgcctgtggatgtggcctaccagaggggctacttcagcgaggagatgaacagagtgctggccgaccccagtgatgacaccaagggcttctttgaccccaacacccatgagaacctgacctaccggcagctgctggagcgctgtgtggaggaccctgagaccggcctgcggctgctgcccctgaagggagctgagaaggccgaggtggtggagaccacccaggtgtacacagaggaggagacccggcgggcctttgaggagacccagattgacatccctgggggcggcagccatggaggcagcaccatgagcctgtgggaggtgatgcagagcgacctgatccctgaggagcagagggcccagctgatggctgacttccaggccggccgggtgaccaaggagaggatgatcatcatcatcatcgagatcatcgagaagacagagatcatccggcagcagggcctggccagctatgactatgtgagaagaaggctgacagctgaggacctgtttgaggcccgcatcatcagcctggagacctacaacctgctgcgggagggcaccaggagcctgcgggaggccctggaggccgagagcgcctggtgctacctgtatggcaccggctctgtggccggcgtgtacctgcccggcagccggcagaccctgagcatctaccaggccctgaagaagggcctgctgtctgctgaggtggcccggctgctgctggaggcccaggccgccaccggcttcctgctggaccctgtgaagggggagcggctgactgtggatgaggccgtgaggaagggcctggtgggccctgagctgcatgaccggctgctgtctgctgagagagctgtgacaggctacagagacccctacacagagcagaccatcagcctcttccaggccatgaagaaggagctgatccccacagaggaggccctgcggctgctggatgcccagctggccactggaggcatcgtggacccccggctgggcttccacctgcccctggaggtggcctaccagaggggctacctgaacaaggacacccatgaccagctgtctgagcccagcgaggtgcgctcctatgtggaccccagcacagatgagcggctgagctacacccagctgctgcggcgctgcagaagagatgatggcaccggccagctgctgctgcccctgagtgatgccaggaagctgaccttccggggcctgaggaagcagatcaccatggaggagctggtgcgcagccaggtgatggatgaggccacagccctgcagctgcgggagggcctgaccagcattgaggaggtgaccaagaacctgcagaagttcctggagggcaccagctgcatcgccggcgtgtttgtggatgccaccaaggagcggctgtctgtgtaccaggccatgaagaagggcatcatccggcctggaacagcctttgagctgctggaggcccaggccgccaccggctacgtgattgaccccatcaagggcctgaagctgactgtggaggaggccgtgaggatgggcatcgtgggccctgagttcaaggacaagctgctgtctgctgagagagctgtgacaggctacaaggacccctacagcggcaagctgatcagcctcttccaggccatgaagaagggcctcatcctgaaggaccacggcatccggctgctggaggcccagatcgccaccggcggcatcatcgaccctgaggagagccaccggctgcctgtggaggtggcctacaagaggggcctgtttgatgaggagatgaatgagatcctgacagaccccagtgatgacaccaagggcttctttgaccccaacacagaggagaacctgacctacctgcagctgatggagcgctgcatcacagacccccagacaggcctgtgcctgctgcccctgaaggagaagaagcgggagaggaagaccagcagcaagagctctgtgaggaagagaagagtggtgattgtggaccctgagaccgggaaggagatgtctgtgtatgaggcctacaggaagggcctgattgaccaccagacctacctggagctgtctgagcaggagtgtgagtgggaggagatcaccatcagcagcagtgatggagtggtgaagtccatgatcatcgaccggcgcagcggccggcagtatgacattgatgatgccatcgccaagaacctgattgacagaagtgccctggaccagtacagagctggcaccctgagcatcacagaatttgctgacatgctgtctggaaatgccggcggcttccgcagccgcagcagctctgtgggcagcagcagcagctaccccatcagccctgctgtgtccaggacccagctggcctcctggagcgaccccacagaggagaccggccctgtggccggcatcctggacacagagaccctggagaaggtgtccatcacagaggccatgcacaggaacctggtggacaacatcaccggccagaggctgctggaggcccaggcctgcacaggaggcatcatcgaccccagcactggagagcgcttccctgtgacagatgctgtgaacaagggcctggtggacaagatcatggtggaccgcatcaacctggcccagaaggccttctgtggctttgaggaccccaggaccaagaccaagatgtctgctgcccaggccctgaagaagggctggctgtactatgaggccggccagcgcttcctggaggtgcagtacctgactggaggcctgattgaaccagacaccccaggccgggtgcccctggatgaggccctgcagaggggcaccgtggatgccaggacagcccagaagctgagagatgtgggcgcctacagcaagtacctgacctgccccaagaccaagctgaagatctcctacaaggatgccctggaccgctccatggtggaggagggcaccggcctgcggctgctggaggccgccgcccagagcaccaagggctactacagcccctacagcgtgtctggcagcggcagcacagctggcagcaggacaggcagcaggacaggcagccgggccggcagcagaagaggcagctttgatgccaccggcagcggcttctccatgaccttcagcagcagcagctacagcagcagcggctacggccgccgctatgccagcggcagcagcgccagcctgggcggccctgagagcgctgtggcctag

SEQ ID NO: 262159 - DNA, 13713 bp, Artificial Sequence
  derived and/or modified sequence
atgtctggagaagatgctgaggtgcgggctgtgtctgaagatgtgtccaatggcagcagcggcagccccagccctggggacaccctgccctggaacctgggcaagacccagaggagccgccgcagcggcggcggggccggcagcaatggatctgtgctggaccctgctgagagagctgtgatcagaattgctgatgagcgggacagagtgcagaagaagaccttcaccaagtgggtgaacaagcacctgatcaaggcccagaggcacatcagtgacctgtatgaggacctgagagatggccacaacctgatcagcctgctggaggtgctgagcggggacagcctgccccgggagaagggccgcatgaggttccacaagctgcagaatgtgcagatcgccctggactacctgcggcaccggcaggtgaagctggtgaacatcagaaatgatgacattgctgatggcaaccccaagctgaccctgggcctcatctggaccatcatcctgcacttccagatcagtgacatccaggtgtctggccagagcgaggacatgacagccaaggagaagctgctgctgtggagccagaggatggtggagggctaccagggcctgcgctgtgacaacttcaccagctcctggagagatggccgcctcttcaatgccatcatccaccgccacaagcccctgctgattgacatgaacaaggtgtaccggcagaccaacctggagaacctggaccaggccttctctgtggccgagcgggacctgggcgtgacccggctgctggaccctgaagatgtggatgtgccccagccagatgagaagagcatcatcacctacgtgagcagcctgtatgatgccatgccccgggtgcctgatgtgcaggatggagagctgcagctgcgctggcaggagtaccgggagctggtgctgctgctgctgcagtggatgaggcaccacacagctgcctttgaggagcggcgcttccccagcagctttgaggagattgagatcctgtggagccagttcctgaagttcaaggagatggagctgcctgccaaggaggccgacaagaacagaagcaagggcatctaccagagcctggagggcgctgtgcaggccggccagctgaaggtgcccccaggctaccaccccctggatgtggagaaggagtggggcaagctgcacgtggccatcctggagcgggagaagcagctgcggagtgaatttgagcggctggagtgcctgcagagaattgtgaccaagctgcagatggaggccggcctgtgtgaggagcagctgaaccaggctgatgccctgctgcagagtgatgtgcggctgctggccgccggcaaggtgccccagagagctggggaggtggagcgggacctggacaaggctgacagcatgatccggctgctcttcaatgatgtgcagaccctgaaggatggccgccacccccagggcgagcagatgtacagaagagtgtaccgcctgcacgagcggctggtggccatcagaacagagtacaacctgcggctgaaggccggcgtggccgccccagccacccaggtggcccaggtgaccctgcagagcgtgcagaggaggcctgagctggaggacagcaccctgcgctacctgcaggacctgctggcctgggtggaggagaaccagcaccgggtggatggagctgagtggggcgtggacctgcccagcgtggaggcccagctgggcagccaccggggcctgcaccagagcattgaggagttccgggccaagattgagcgggcccggagtgatgagggccagctgagccctgccaccaggggggcctacagagactgcctgggccgcctggacctgcagtatgccaagctgctgaacagcagcaaggcccggctgcggagcctggagagcctgcacagctttgtggccgccgccaccaaggagctgatgtggctgaatgagaaggaggaggaggaggtgggctttgactggagcgacaggaacaccaacatgacagccaagaaggagagctacagcgccctgatgagggagctggagctgaaggagaagaagatcaaggagctgcagaatgctggggaccggctgctgcgggaggaccacccagcccggcccaccgtggagagcttccaggccgccctgcagacccagtggagctggatgctgcagctgtgctgctgcatcgaggcccacctgaaggaaaatgctgcctacttccagttcttcagtgatgtgcgggaggccgagggccagctgcagaagctgcaggaggccctgcggaggaagtacagctgtgacagaagtgccaccgtgacccggctggaggacctgctgcaggatgcccaggatgagaaggagcagctgaatgagtacaagggccacctgagcggcctggccaagagggccaaggctgtggtgcagctgaagcccaggcacccagcccaccccatgaggggccgcctgcccctgctggccgtgtgtgactacaagcaggtggaggtgacagtgcacaagggagatgagtgccagctggtgggccctgcccagcccagccactggaaggtgctgagcagcagcggcagcgaggccgctgtgcccagcgtgtgcttcctggtgcccccacccaaccaggaggcccaggaggccgtgacccggctggaggcccagcaccaggccctggtgaccctgtggcaccagctgcacgtggacatgaagagcctgctggcctggcagagcctgcggagagatgtgcagctgatccgctcctggagcctggccaccttccgcaccctgaagccagaggagcagaggcaggccctgcacagcctggagctgcactaccaggccttcctgcgggacagccaggatgctgggggctttggacctgaggaccggctgatggccgagcgggagtatggcagctgcagccaccactaccagcagctgctgcagagcctggagcagggcgcccaggaggagagccgctgccagcgctgcatcagcgagctgaaggacatccggctgcagctggaggcctgtgagaccaggacagtgcaccggctgcggctgcccctggacaaggagcccgccagagaatgtgcccagagaattgctgagcagcagaaggcccaggccgaggtggagggcctgggcaaaggagtggcccggctgtctgctgaggccgagaaggtgctggccctgcctgagcccagccctgctgcccccaccctgcggtctgagctggagctgaccctgggcaagctggagcaggtgcgcagcctgagcgccatctacctggagaagctgaagaccatcagcctggtgatccggggcacccagggcgctgaggaggtgctgcgggcccacgaggagcagctgaaggaggcccaggccgtgcctgccaccctgcctgagctggaggccaccaaggccagcctgaagaagctgcgggcccaggccgaggcccagcagcccacctttgatgccctgagagatgagctgcggggggcccaggaggtgggggagcggctgcagcagagacatggagagagagatgtggaggtggagcgctggagggagcgggtggcccagctgctggagcgctggcaggccgtgctggcccagacagatgtgcggcagcgggagctggagcagctgggccggcagctgcgctactaccgggagagcgctgaccccctgggcgcctggctgcaggatgcccggcggcggcaggagcagatccaggccatgcccctggccgacagccaggccgtgcgggagcagctgcggcaggagcaggccctgctggaggagattgagcggcacggggagaaggtggaggagtgccagagatttgccaagcagtacatcaatgccatcaaggactatgagctgcagctggtgacctacaaggcccagctggagcctgtggccagccctgccaagaagcccaaggtgcagagcggcagcgagagcgtcatccaggagtatgtggacctgcggacccactacagcgagctgaccaccctgaccagccagtacatcaagttcatcagcgagaccctgcggaggatggaggaggaggagcggctggccgagcagcagagagctgaggagcgggagcggctggccgaggtggaggccgccctggagaagcagaggcagctggccgaggcccacgcccaggccaaggcccaggccgagcgggaggccaaggagctgcagcagaggatgcaggaggaggtggtgcggcgggaggaggccgctgtggatgcccagcagcagaagaggagcatccaggaggagctgcagcagctgcggcagagcagcgaggccgagatccaggccaaggcccggcaggccgaggccgctgagaggagccggctgagaattgaggaggagatccgggtggtgcggctgcagctggaggccacagagcggcagaggggcggcgctgagggggagctgcaggccctgcgggcccgggcagaggaggccgaggcccagaagaggcaggcccaggaggaggccgagcggctgcggcggcaggtgcaggatgagagccagaggaagaggcaggccgaggtggagctggccagccgggtgaaggccgaggccgaggccgcccgggagaagcagagggccctgcaggccctggaggagctgcggctgcaggccgaggaggccgagcggcggctgcggcaggccgaggtggagcgggcccggcaggtgcaggtggccctggagacagcccagaggtctgctgaggccgagctgcagagcaagagggccagctttgctgagaagacagcccagctggagaggagcctgcaggaggagcacgtggccgtggcccagctgcgggaggaggccgagcggcgggcccagcagcaggccgaggccgagcgggcccgggaggaggccgagcgggagctggagcgctggcagctgaaggccaatgaggccctgcggctgcggctgcaggccgaggaggtggcccagcagaagagcctggcccaggccgaggccgagaagcagaaggaggaggccgagcgggaggcccggcggcggggcaaggccgaggagcaggccgtgcggcagcgggagctggccgagcaggagctggagaagcagaggcagctggccgagggcacagcccagcagaggctggccgctgagcaggagctgatccggctgcgggcagagacagagcagggcgagcagcagaggcagctgctggaggaggagctggcccggctgcagcgggaggccgccgccgccacccagaagaggcaggagctggaggccgagctggccaaggtgcgggcagagatggaggtgctgctggccagcaaggcccgggcagaggaggagagccgcagcaccagcgagaagagcaagcagaggctggaggccgaggccggccgcttccgggagctggccgaggaggccgcccggctgcgggccctggccgaggaggccaagaggcagaggcagctggccgaggaggatgctgcccggcagagagctgaggccgagcgggtgctggccgagaagctggccgccatcggggaggccacccggctgaagacagaagctgagatcgccctgaaggagaaggaggctgaaaatgaaaggctgcggcggctggccgaggatgaggccttccagaggcggcggctggaggagcaggccgcccagcacaaggctgacatcgaggagcggctggcccagctgaggaaggccagtgacagcgagctggagcggcagaagggcctggtggaggacaccctgcggcagaggcggcaggtggaggaggagatcctggccctgaaggccagctttgagaaggctgctgctgggaaggccgagctggagctggagctgggccgcatccgcagcaatgctgaggacaccctgcggagcaaggagcaggccgagctggaggccgcccggcagaggcagctggccgctgaggaggagaggagaagaagagaagctgaggagcgggtgcagaagagcctggccgctgaggaggaggccgcccggcagaggaaggccgccctggaggaggtggagcggctgaaggccaaggtggaggaggcccggcggctgcgggagagagctgagcaggagagcgcccggcagctgcagctggcccaggaggccgcccagaagaggctgcaggccgaggagaaggcccacgcctttgctgtgcagcagaaggagcaggagctgcagcagaccctgcagcaggagcagagcgtgctggaccagctgcggggggaggccgaggccgcccggcgggctgctgaggaggccgaggaggcccgggtgcaggccgagcgggaggccgcccagagccggcggcaggtggaggaggccgagcggctgaagcagagcgctgaggagcaggcccaggcccgggcccaggcccaggccgctgctgagaagctgaggaaggaggccgagcaggaggccgcccggcgggcccaggccgagcaggccgccctgcggcagaagcaggccgcagatgctgagatggagaagcacaagaagtttgctgagcagaccctgcggcagaaggcccaggtggagcaggagctgaccaccctgcggctgcagctggaggagacagaccaccagaagaacctgctggatgaggagctgcagaggctgaaggccgaggccacagaggccgcccggcagaggagccaggtggaggaggagctgttctctgtgcgggtgcagatggaggagctgagcaagctgaaggcccgcatcgaggctgaaaatagagccctgatcctgcgggacaaggacaacacccagcgcttcctgcaggaggaggccgagaagatgaagcaggtggccgaggaggccgcccggctgtctgtggccgcccaggaggccgcccggctgcggcagctggccgaggaggacctggcccagcagagggccctggccgagaagatgctgaaggagaagatgcaggccgtgcaggaggccacccggctgaaggccgaggccgagctgctgcagcagcagaaggagctggcccaggagcaggcccggcggctgcaggaggacaaggagcagatggcccagcagctggccgaggagacccagggcttccagaggaccctggaggccgagcggcagaggcagctggagatgtctgctgaggccgagcggctgaagctgcgggtggccgagatgagccgggcccaggcccgggcagaggaggatgcccagcgcttcaggaagcaggccgaggagatcggggagaagctgcacaggacagagctggccacccaggagaaggtgaccctggtgcagaccctggagatccagaggcagcagagcgaccatgatgctgagcggctgcgggaggccatcgccgagctggagcgggagaaggagaagctgcagcaggaggccaagctgctgcagctgaagtctgaggagatgcagacagtgcagcaggagcagctgctgcaggagacccaggccctgcagcagagcttcctgtctgagaaggacagcctgctgcagcgggagcgcttcatcgagcaggagaaggccaagctggagcagctgttccaggatgaggtggccaaggcccagcagctgcgggaggagcagcagaggcagcagcagcagatggagcaggagcggcagaggctggtggcctccatggaggaggcccggcggcggcagcatgaagctgaggagggcgtgcggaggaagcaggaggagctgcagcagctggagcagcagaggcggcagcaggaggagctgctggccgaggagaaccagaggctgcgggagcagctgcagctgctggaggagcagcaccgggccgccctggcccacagcgaggaggtgacagccagccaggtggccgccaccaagaccctgcccaacggcagagatgccctggatggccctgctgctgaggccgagcctgagcacagctttgatggcctgcggaggaaggtgtctgcccagaggctgcaggaggccggcatcctgtctgctgaggagctgcagaggctggcccagggccacaccaccgtggatgagctggccaggagagaagatgtgcgccactacctgcagggccgcagcagcattgctggcctgctgctgaaggccaccaatgagaagctgtctgtgtatgctgccctgcagaggcagctgctgagccctggaacagccctgatcctgctggaggcccaggccgccagcggcttcctgctggaccctgtgaggaacagaaggctgactgtgaatgaggccgtgaaggagggcgtggtgggccctgagctgcaccacaagctgctgtctgctgagagagctgtgacaggctacaaggacccctacacaggccagcagatcagcctcttccaggccatgcagaagggcctcatcgtgcgggagcacggcatccggctgctggaggcccagatcgccactggaggagtgattgatcctgtgcacagccaccgggtgcctgtggatgtggcctaccgccggggctactttgatgaggagatgaacagagtgctggccgaccccagtgatgacaccaagggcttctttgaccccaacacccatgagaacctgacctacctgcagctgctggagcgctgtgtggaggaccctgagaccggcctgtgcctgctgcccctgacagacaaggccgccaagggcggggagctggtgtacacagacagcgaggccagagatgtgtttgagaaggccaccgtgtctgccccctttgggaagttccagggcaagacagtgaccatctgggagatcatcaacagcgagtacttcaccgctgagcagaggcgggacctgctgcggcagttcagaacaggccgcatcaccgtggagaagatcatcaagatcatcatcaccgtggtggaggagcaggagcagaagggccgcctgtgctttgagggcctgcggagcctggtgcctgctgctgagctgctggagagccgggtgattgaccgggagctgtaccagcagctgcagagaggagagaggtctgtgagagatgtggccgaggtggacacagtgcggcgggccctgcggggggccaacgtgattgctggggtgtggctggaggaggccggccagaagctgagcatctacaatgccctgaagaaggacctgctgcccagcgacatggctgtggccctgctggaggcccaggccggcaccggccacatcattgatcctgccaccagcgcccggctgactgtggatgaggccgtgcgggccggcctggtgggccctgagttccacgagaagctgctgtctgctgagaaggctgtgacaggctacagagacccctacacaggccagagcgtgtccctcttccaggccctgaagaagggcctcatcccccgggagcagggcctgcggctgctggatgcccagctgagcactggaggcatcgtggaccccagcaagagccaccgggtgcccctggatgtggcctgtgcccggggctgcctggatgaggagaccagccgggccctgagcgcccccagggcagatgccaaggcctacagcgaccccagcactggagagcccgccacctatggagagctgcagcagcgctgcaggccagaccagctgaccggcctgagcctgctgcccctgtctgagaaggccgcccgggcccggcaggaggagctgtacagcgagctgcaggcccgggagacctttgagaagacccctgtggaggtgcctgtgggcggcttcaagggccgcacagtgacagtgtgggagctgatcagcagcgagtacttcaccgctgagcagaggcaggagctgctgcggcagttcagaacaggcaaggtgacagtggagaaggtgatcaagatcctgatcaccatcgtggaggaggtggagaccctgcggcaggagcggctgtccttcagcggcctgcgggcccctgtgcctgccagcgagctgctggccagcggcgtgctgagccgggcccagtttgagcagctgaaggatggcaagaccaccgtgaaggacctgtctgagctgggctctgtgaggaccctgctgcagggcagcggctgcctggccggcatctacctggaggacaccaaggagaaggtgtccatctatgaggccatgagaagaggcctgctgcgggccaccacagctgccctgctgctggaggcccaggccgccaccggcttcctggtggaccctgtgaggaaccagaggctgtatgtgcatgaagctgtgaaggccggcgtggtgggccctgagctgcacgagcagctgctgtctgctgagaaggctgtgacaggctacagagacccctacagcggcagcaccatcagcctcttccaggccatgcagaagggcctggtgctgcggcagcacggcatccggctgctggaggcccagatcgccaccggcggcatcatcgaccctgtgcacagccaccgggtgcctgtggatgtggcctaccagaggggctacttcagcgaggagatgaacagagtgctggccgaccccagtgatgacaccaagggcttctttgaccccaacacccatgagaacctgacctaccggcagctgctggagcgctgtgtggaggaccctgagaccggcctgcggctgctgcccctgaagggagctgagaaggccgaggtggtggagaccacccaggtgtacacagaggaggagacccggcgggcctttgaggagacccagattgacatccctgggggcggcagccatggaggcagcaccatgagcctgtgggaggtgatgcagagcgacctgatccctgaggagcagagggcccagctgatggctgacttccaggccggccgggtgaccaaggagaggatgatcatcatcatcatcgagatcatcgagaagacagagatcatccggcagcagggcctggccagctatgactatgtgagaagaaggctgacagctgaggacctgtttgaggcccgcatcatcagcctggagacctacaacctgctgcgggagggcaccaggagcctgcgggaggccctggaggccgagagcgcctggtgctacctgtatggcaccggctctgtggccggcgtgtacctgcccggcagccggcagaccctgagcatctaccaggccctgaagaagggcctgctgtctgctgaggtggcccggctgctgctggaggcccaggccgccaccggcttcctgctggaccctgtgaagggggagcggctgactgtggatgaggccgtgaggaagggcctggtgggccctgagctgcatgaccggctgctgtctgctgagagagctgtgacaggctacagagacccctacacagagcagaccatcagcctcttccaggccatgaagaaggagctgatccccacagaggaggccctgcggctgctggatgcccagctggccactggaggcatcgtggacccccggctgggcttccacctgcccctggaggtggcctaccagaggggctacctgaacaaggacacccatgaccagctgtctgagcccagcgaggtgcgctcctatgtggaccccagcacagatgagcggctgagctacacccagctgctgcggcgctgcagaagagatgatggcaccggccagctgctgctgcccctgagtgatgccaggaagctgaccttccggggcctgaggaagcagatcaccatggaggagctggtgcgcagccaggtgatggatgaggccacagccctgcagctgcgggagggcctgaccagcattgaggaggtgaccaagaacctgcagaagttcctggagggcaccagctgcatcgccggcgtgtttgtggatgccaccaaggagcggctgtctgtgtaccaggccatgaagaagggcatcatccggcctggaacagcctttgagctgctggaggcccaggccgccaccggctacgtgattgaccccatcaagggcctgaagctgactgtggaggaggccgtgaggatgggcatcgtgggccctgagttcaaggacaagctgctgtctgctgagagagctgtgacaggctacaaggacccctacagcggcaagctgatcagcctcttccaggccatgaagaagggcctcatcctgaaggaccacggcatccggctgctggaggcccagatcgccaccggcggcatcatcgaccctgaggagagccaccggctgcctgtggaggtggcctacaagaggggcctgtttgatgaggagatgaatgagatcctgacagaccccagtgatgacaccaagggcttctttgaccccaacacagaggagaacctgacctacctgcagctgatggagcgctgcatcacagacccccagacaggcctgtgcctgctgcccctgaaggagaagaagcgggagaggaagaccagcagcaagagctctgtgaggaagagaagagtggtgattgtggaccctgagaccgggaaggagatgtctgtgtatgaggcctacaggaagggcctgattgaccaccagacctacctggagctgtctgagcaggagtgtgagtgggaggagatcaccatcagcagcagtgatggagtggtgaagtccatgatcatcgaccggcgcagcggccggcagtatgacattgatgatgccatcgccaagaacctgattgacagaagtgccctggaccagtacagagctggcaccctgagcatcacagaatttgctgacatgctgtctggaaatgccggcggcttccgcagccgcagcagctctgtgggcagcagcagcagctaccccatcagccctgctgtgtccaggacccagctggcctcctggagcgaccccacagaggagaccggccctgtggccggcatcctggacacagagaccctggagaaggtgtccatcacagaggccatgcacaggaacctggtggacaacatcaccggccagaggctgctggaggcccaggcctgcacaggaggcatcatcgaccccagcactggagagcgcttccctgtgacagatgctgtgaacaagggcctggtggacaagatcatggtggaccgcatcaacctggcccagaaggccttctgtggctttgaggaccccaggaccaagaccaagatgtctgctgcccaggccctgaagaagggctggctgtactatgaggccggccagcgcttcctggaggtgcagtacctgactggaggcctgattgaaccagacaccccaggccgggtgcccctggatgaggccctgcagaggggcaccgtggatgccaggacagcccagaagctgagagatgtgggcgcctacagcaagtacctgacctgccccaagaccaagctgaagatctcctacaaggatgccctggaccgctccatggtggaggagggcaccggcctgcggctgctggaggccgccgcccagagcaccaagggctactacagcccctacagcgtgtctggcagcggcagcacagctggcagcaggacaggcagcaggacaggcagccgggccggcagcagaagaggcagctttgatgccaccggcagcggcttctccatgaccttcagcagcagcagctacagcagcagcggctacggccgccgctatgccagcggcagcagcgccagcctgggcggccctgagagcgctgtggcctag

SEQ ID NO: 262160 - DNA, 14055 bp, Artificial Sequence
  derived and/or modified sequence
atggtggccggcatgctgatgccccgggaccagctgcgggccatctatgaagtgttatttagggaaggtgttatggtggctaaaaaagacagacgcccccggagtctccatccccatgtaccaggcgtgaccaacctgcaggtcatgagagcaatggcttctcttcgagcccgaggcttggtgcgggagacctttgcgtggtgccatttctattggtacctgaccaatgagggtatagcacatctaagacagtacctccacctgcctccagagattgtccccgcgtcattacagcgcgtccggaggcctgtggcgatggtcatgcctgctcggcggacaccacacgttcaagcagttcaaggacctctaggctccccgcccaagagggggcctttaccaaccgaggaacagagggtgtacagacgcaaagagctggaagaggtttctcccgagacgcctgtggtgcctgctacaacccaacggactctggcgcggccgggcccagagccagcacctgccacagatgagagggaccgagtgcaaaaaaagaccttcacaaaatgggtaaataaacacctgatcaaagcccagaggcatatatcagacttgtacgaggatctaagggatggacacaaccttatctccttgttggaggttctgtccggcgactcactcccccgggagaagggaaggatgagatttcacaagttgcaaaatgtacagatcgctctcgattacctgagacaccggcaggtgaagctcgtgaacatccggaatgacgatattgccgatggaaatcccaagctcaccttgggtctgatctggactataatcctgcattttcagatatcggacattcaggtttcgggccagtccgaagacatgacagctaaagaaaaactcctgctctggtcgcagcggatggtggaaggttaccaaggactgagatgcgataacttcacttccagctggcgggacgggagactgttcaacgcaattatacacagacataagccactgctcatcgacatgaacaaagtttacaggcagacaaatctagaaaacctggaccaggctttcagtgtggccgagagagatctgggcgtaactcgacttctggatcccgaggacgtggacgtacctcagccagacgaaaaatccattatcacttatgtgtctagtctgtacgatgccatgccccgggtcccagatgtgcaggacggagtgcgcgccaatgagcttcagcttcgctggcaagaataccgcgagctcgtactcttactgttacagtggatgaggcatcacactgccgccttcgaggaaagacggttccccagctcatttgaggagatagagatactgtggagccagtttctgaagttcaaagagatggagctacctgcaaaagaagctgacaagaacagaagtaagggaatttatcagtctctggaaggcgctgttcaggctggacaactgaaggttccgcccgggtatcaccctctggatgtcgagaaggagtgggggaagctgcacgtggccattctggagcgggagaaacagctgagaagtgaatttgaacggcttgagtgcttacagcggatagtgaccaaactccagatggaggcaggcctctgcgaggaacaactcaatcaggcagatgcactgctccagtccgacgttagattactggccgcaggtaaagtcccccagcgggcgggtgaggttgagagggatttggacaaggccgactcgatgattagattactctttaacgatgtgcagacactgaaggacggacgccacccccagggcgagcagatgtacaggcgcgtgtaccgattacacgaacgactcgttgccatacggaccgagtacaaccttaggctcaaggcaggagtggccgctcctgcaacccaggtggcccaggtaaccctgcaatctgtgcagcgccgccctgaactcgaagacagcacattgcgatacctgcaggacctgttagcgtgggtcgaagaaaatcagcatcgggtagacggcgcggaatggggtgtggatttaccctctgtcgaagcacagttgggatcccaccgtggattacatcagagcattgaggaatttcgtgcaaaaatcgagagggcgcgctcggatgaaggccaactgtccccggcaactcggggggcgtatcgagattgcctgggccgattagacctgcagtacgcgaagcttctgaattcgagcaaagcgcgacttcggtcgcttgagtctctacattccttcgtggccgccgccacgaaagagctgatgtggctcaatgaaaaagaggaagaagaagtaggtttcgattggagcgacagaaataccaacatgaccgcaaagaaagaaagttactcagcacttatgcgcgaactcgagttgaaggagaaaaagattaaagaactccaaaatgctggtgacaggctcctccgggaggaccaccctgcaaggcccaccgtggaatctttccaggctgcgctgcaaacacaatggagctggatgctccagctctgttgttgcatcgaggcccacctaaaagagaatgcagcttatttccaattcttttccgatgtgcgcgaagccgaagggcaactgcagaagttgcaggaggctctaagaaggaagtactcttgcgaccgcagcgcgacagtcacacgactcgaggacttgctgcaggacgctcaggacgagaaggaacagcttaacgaatacaaggggcatctcagtggcctggcaaaaagagctaaagcagttgtgcagctgaaacctcggcaccctgcccacccgatgaggggaaggttgcctctgctggctgtatgtgattacaaacaggtcgaggtcacggtacacaagggcgacgagtgtcagctggtgggtccagctcagccctcccactggaaggtcctcagttcctctgggagtgaggccgccgttccttcagtgtgttttctggtgccaccacccaatcaggaagctcaggaggctgtcacccggctggaagctcagcaccaggccctggtgaccttatggcaccagctccacgtcgatatgaagtccctgttggcctggcagagcctgagaagagatgttcagctgataagaagctggtccctggctaccttccgcacactgaaaccagaagagcagagacaggcccttcattccctggagttacactaccaagccttcttgagggacagccaggacgccggcggatttggtcctgaagatcgactcatggccgaacgggaatacgggagctgctcacaccattatcaacagctcctacagtcactggaacagggagcccaggaagagagccgttgccagcgttgtatcagtgagctgaaagacattcggctgcagcttgaggcctgtgagacgcgcaccgtgcatcgacttcgactcccactggacaaggaaccggctagagagtgtgcccagagaattgccgagcagcaaaaggctcaggccgaggttgaggggctcggcaaaggggtagcacgactctcggctgaagcagagaaggttctggcacttccagaaccctcccctgctgcccctacactccgatccgagcttgaactgacattggggaagttggaacaggttagaagcctaagcgccatctaccttgagaaattgaaaacgattagcctggttatccgtggtacgcagggggccgaggaggtcctgcgcgcccacgaagagcagttaaaagaggcgcaggccgttccggccacgctccctgagctcgaagccaccaaggctagcctgaaaaagcttagggcccaagcggaagctcaacagccaacctttgacgcactgcgggatgaactgcgaggggctcaagaagtgggagagaggttacagcagaggcatggcgagagggacgtggaggtggaaagatggcgcgagcgcgtggcacagctccttgaaagatggcaggccgttctggctcagaccgatgtgagacagagagagctggagcagttgggacgccaactgcgttactatagagagtccgccgaccctctgggcgcctggcttcaggatgccaggaggagacaggaacagatccaggctatgccactggccgattcccaggctgtgagggagcagttacgccaagaacaagctctgctggaggaaatcgaacgacatggggagaaagttgaagaatgtcagcgttttgctaaacagtacattaacgccattaaggattacgaactgcaactggtaacatacaaagcccagctggaaccagtggccagcccagccaagaagcccaaggtgcagtcgggctccgagtcagtcatacaggagtatgtcgacctacgaactcattattctgagttaacaaccctaacaagccaatacatcaaatttatcagcgaaacactgagacggatggaagaggaagaaaggctggccgaacagcagcgggccgaggaacgagagcgcctcgcagaagtagaggccgccctggaaaaacagagacagctcgccgaggctcacgctcaggcaaaagcgcaggccgaacgtgaggccaaggagctgcaacagcgaatgcaggaagaagtggtgcgtcgcgaggaagccgctgtagacgctcagcagcagaaacgatcaattcaagaggaactgcagcagctccggcagagtagcgaggcagaaatccaggctaaggctagacaggcagaagccgccgaaagatcacggctgcgcattgaagaagagataagagtggtcagactgcagttagaagcaacagagcgtcagagggggggcgcggagggcgagctgcaggcccttcgcgctcgcgccgaagaagcggaggcacaaaaaaggcaggctcaggaggaggctgaacggctacgtcgccaggtccaggatgaatcccagaggaagaggcaggcggaggtggaactggctagcagagtaaaagctgaagctgaagcggcccgggagaaacagagagctctacaagcattggaagagctacgcctgcaggccgaagaagctgaacggcggctgcgtcaggccgaagttgagagagcacggcaggtgcaggtggctctggaaaccgcccagcgcagcgcagaagcagagctgcagtccaaacgcgcttccttcgccgagaaaaccgctcagctcgaaaggtctcttcaggaagagcatgtcgccgtggctcagcttagagaagaggccgagcggagggcacagcagcaagccgaagcagaacgagcacgggaagaagccgagagagagttggagcgttggcagcttaaagcgaacgaggcactgagactccggctacaagcagaggaagtagctcagcagaaaagtctcgcccaagccgaggctgagaaacagaaagaagaggccgaaagggaggctaggagacgcggcaaggctgaggagcaggcagtccggcagcgcgagctcgccgaacaagaactcgagaagcagagacaactggcagagggtaccgctcagcagaggcttgccgctgagcaggagctgatccggttgagagcggagaccgagcagggtgaacagcaacgccagctgttggaagaggaactggcaaggctgcaaagggaagctgccgcagctacccagaagcggcaggaactggaggccgaacttgccaaagtccgggccgagatggaggtgttattagcgtcgaaagctagagccgaagaagagagcagaagcaccagcgagaaatccaagcagcgactggaggctgaggctggccgcttcagagaactcgctgaagaagctgcccgactacgtgccttagcagaggaagccaaacgtcaacgacagctggcagaggaggacgcagccaggcaacgcgcagaggctgaacgagtgctggcggagaaacttgcggccatcggtgaggctacaaggttaaaaactgaggctgagatcgccctcaaagagaaggaggctgaaaatgagagactgagaaggctcgccgaagacgaagcattccagcgtaggcggttagaagagcaagctgcccagcacaaagccgacatcgaggagcgactcgcccaactccgaaaagcctcagactccgagcttgagagacagaaggggctcgtcgaagataccctccgccagagaagacaggtcgaagaggaaattttggccctgaaggcgtcctttgagaaagccgccgccggcaaggctgagctcgaactcgagctgggccgcatccgtagcaacgctgaggacacattaaggagtaaggagcaagccgagcttgaagcagcacgccagaggcagctagctgccgaagaagaaagaaggcgccgcgaagccgaggagagggttcagaagtccttagctgccgaggaagaggccgccaggcaacgtaaggctgcccttgaggaagttgagaggctcaaggcaaaagtggaggaggcaaggcggttacgggagagagcagaacaggagagtgccagacaactgcagctggctcaggaggctgcacagaagcgcctgcaagctgaggagaaggcccatgctttcgccgtccagcagaaggaacaggagctgcaacagactctgcaacaggaacagtctgtgctcgaccagctgcggggcgaggccgaagctgctcggcgtgcggcagaggaagcagaggaagccagggtgcaagctgagcgggaagctgcacaaagccgtcggcaagtggaagaagcggagaggctgaagcagtcggcagaggaacaggcccaggctcgggcccaagcacaggctgctgcagaaaagctccggaaggaggctgagcaagaagctgcccggagggcacaggccgagcaggcagcattaagacagaaacaggctgccgatgctgaaatggagaagcataagaagtttgcggaacagacactgagacaaaaggctcaagttgaacaggagctcactacgctcagactgcagctcgaggagactgatcaccagaagaacttactggacgaagagttacaacgactgaaggctgaggccacagaggctgcgagacagagaagtcaagtggaagaggaactcttcagcgtcagagtgcagatggaagagctaagcaaattaaaggctcggatcgaagcagagaatagagcgctaatcctgagagacaaggataacactcagcgattcctgcaggaagaagccgagaaaatgaaacaagtcgcagaagaagctgccaggctcagtgttgccgcacaggaggccgcccggctgcggcagctggcggaagaggatctagcccagcagagggccttggcagaaaaaatgctcaaagagaaaatgcaggcagtgcaggaggccacccgactcaaagctgaagcagaactgcttcagcagcagaaggaacttgctcaggaacaagccagacgattgcaggaggataaagagcagatggcccagcagttggctgaggagacccaaggattccagagaacactggaagccgaacgccaacgccaactggaaatgtcagccgaagccgaacgcctcaagttgcgagttgccgagatgtctagggcacaggcgcgagctgaagaagatgcccagcggttcaggaagcaagccgaagaaatcggagaaaaattgcacagaactgaactcgccacacaggagaaggtgacgctggttcagacactggaaatccagcgtcagcagtcagatcacgacgcggaacgactgagagaggccatcgccgagcttgagcgcgagaaagagaagctgcagcaggaagccaagttactccagctgaagagtgaagagatgcagaccgtccagcaggagcagttgctgcaagagacacaagccctgcagcaatctttcctgagcgaaaaggactccctcctccagagagaaagatttatcgaacaagaaaaggctaagctggagcagctatttcaggatgaggtcgcgaaggcccagcagctaagagaggaacagcaaagacagcagcagcaaatggagcaggaacggcagagactggtggccagtatggaagaagcccggagacgccaacacgaagccgaagaaggagtgcgaaggaaacaagaagagctacaacagctggagcagcagcgtcggcagcaggaggaacttctggctgaggagaaccaaagactgcgcgagcaacttcagctcctagaggagcagcaccgggctgctttggcccattcagaggaggtgacggccagtcaggttgctgctacaaaaacactccccaacgggagagatgctctggatggtcctgctgccgaagctgagccagaacactccttcgacggtctgcgccgaaaagtgagcgctcaaaggctgcaggaggccggtatcctgagcgctgaagagctccagaggctggcccagggacacacgaccgtggatgagctcgccaggagagaggatgttcgccactatcttcaggggcgttcgtctattgcggggctcttgctaaaagcaacaaacgaaaagttatcagtgtatgccgcattacagcgacagctcctaagcccaggaacagccctcatcttacttgaggctcaggctgcaagcggttttttgctggatccagtacgaaatagacgccttacagtcaatgaggctgtgaaagagggggtagttggccctgagctacatcacaaactgctctccgcagagcgggccgtcaccggttacaaggatccttacaccggacaacaaatcagcctctttcaggcgatgcagaaaggccttattgtgcgcgagcatggaatccgtcttctggaggcccagattgccacaggaggcgtcatcgacccagtccattcccatcgtgtacctgtggacgttgcatataggcggggttattttgacgaagaaatgaatcgcgttctcgccgacccatccgacgatacaaaaggtttctttgaccccaacacacacgagaatctaacatacctgcagcttttggagcgttgcgtggaggatcccgaaacaggactgtgcctgttaccactgactgacaaggctgccaaggggggagaactggtgtatactgactctgaagcccgcgatgttttcgagaaagctacggtgtcggcgcccttcggaaaatttcaaggaaaaacagtcacaatatgggaaatcattaactctgagtatttcaccgcagagcagagaagggatttactgcggcagtttaggacaggaagaatcacagtcgagaaaattattaaaatcataattaccgtcgtcgaggaacaggagcaaaaaggaaggctgtgtttcgaaggtctgcgaagcctggtgccagcagccgagttgctagagtctagggtcatcgaccgagagttataccagcaactgcagagaggggagaggtcagtccgcgatgtggccgaggtggacacagtgcgtcgggccctgagaggcgccaacgtgatagcaggagtatggctggaggaagcaggccagaagttaagtatttacaatgccctcaagaaagacctgcttccgtcagatatggccgttgctcttctcgaagctcaagctgggaccggtcatattattgacccagcaacgagcgccagattaactgtcgacgaagccgtgcgggctggcctggtcggacctgagttccatgagaagctcttatccgctgagaaagcagtcactggttatcgcgatccgtacactgggcagtccgtttccttattccaggctctcaagaagggactgataccccgtgagcagggtctccggctcttggatgctcagctttctacgggggggatagtcgaccccagtaagtctcatagagtgcccctcgatgttgcctgcgccagaggttgtctcgatgaagagacatctcgtgcgctttctgcaccgagggccgacgctaaggcctattccgacccctcgaccggcgaacccgcgacttatggggagctgcagcaaagatgtcggcctgaccagcttaccgggttatccttgttgcccttaagcgagaaagccgcccgtgccagacaggaggagctctatagcgagcttcaggctcgggagacctttgaaaaaacaccggtagaggtccccgtgggcggttttaagggccggacggtgaccgtgtgggagctcatctcctctgaatatttcaccgccgagcagcgccaagagttgctcagacagtttagaaccggaaaggtgaccgtggagaaggtcataaaaattctaattactatcgtggaggaggtggaaaccctcagacaagaacggttgagttttagcgggctcagagcccctgttccagcaagtgagctgctggcgtctggggtgctgagtagggcgcagttcgagcagctgaaggacggcaagaccacggttaaggatctgtcagaactgggctcagtcaggacacttctccaggggagcgggtgcttggccggtatttacctggaggataccaaggagaaggtgtccatctacgaggcgatgagaagaggactgctgcgcgccaccactgccgccctgctccttgaagctcaggcggcaactggctttctggttgaccccgtccgaaatcagcgtctatacgttcacgaggctgttaaagcgggagtggtggggccggagctccacgaacaattgttgagcgccgagaaggcagtgaccggatatcgcgatccatatagcggtagcactatctctttgttccaggctatgcaaaaaggcttggttctgcgccagcatggaatcagactgttggaggctcaaatcgctacaggcggaattatcgacccagtccactctcaccgggtcccagtggatgtggcctatcagcgtgggtacttttcagaagaaatgaatcgcgtacttgccgacccttccgatgatacaaagggtttctttgatcccaatactcacgagaatctaacataccggcagctgctagaacggtgcgttgaggatcccgagacgggattgcgcctgcttccactcaagggcgcagaaaaggcagaagttgtcgagacaacccaggtatacaccgaagaagagacacgcagagcttttgaagaaactcagatcgacatccccggaggtggttcccatggaggcagcactatgtcgttatgggaagtgatgcagagcgacctcatacctgaggaacagcgagcacagttgatggccgattttcaagccggcagagtgacaaaagaaaggatgattataataataatagagatcattgaaaagaccgagattatacgccagcagggcctggcctcatacgactatgtgcggaggagattgacggctgaggacctgttcgaggccaggatcatttccctcgaaacatataatctgctgagagaaggcacccggtcattacgagaggcattggaagccgagagcgcgtggtgctacttatacggaactggaagtgtagcaggcgtctacctccccggatcacgacagactctgagcatctaccaggccttgaagaaagggctgctgtcagcagaggtcgcaaggcttctgttggaggcccaggcagcaacaggtttcctcctggatcccgttaaaggtgagaggctgacagtcgacgaagcagtgcggaagggccttgttggtccagaactgcacgacagactgttgagcgctgagcgggcagtcactggctatcgggacccctacactgagcaaacaatctcgttattccaggccatgaagaaagaactgattcctaccgaggaggccctgcggctgttagacgcccagctggctaccggggggatcgtcgatccacggctgggctttcacttgcctctggaagtcgcgtatcagcgggggtatctcaataaagacacccacgaccagctgtctgaaccctccgaagttagaagctatgtggatccctcaacagacgagcgacttagttatacacaattgctgaggcgctgtcggcgagatgatggaacaggccaattacttcttccactgtctgatgcacggaaactgactttccgcggactcagaaaacagatcaccatggaagagctagtaaggtcccaggtgatggacgaggccactgcccttcagctgagggagggcctgaccagcatcgaggaagtgactaaaaacttacagaagttcctggaaggtacgtcttgcatcgcgggagtctttgttgatgctacaaaggagcgactgagtgtgtaccaggcaatgaagaaaggcataatcagacctggcaccgccttcgaattactggaggcccaggccgccaccggatacgtcatcgaccctataaagggactgaagctgactgtggaggaagcagtgaggatgggcatcgtagggcctgagtttaaggacaaattactgtctgctgaaagggcggtgacgggctacaaggacccttattccgggaaactcattagtctcttccaggctatgaagaaggggctgattcttaaggaccacgggattaggctactcgaggcccagatcgcaacagggggcatcatcgaccccgaggagtcccacaggcttcccgtggaggtggcttacaagaggggtctgttcgacgaggaaatgaatgaaatccttacagatccttcagacgacacaaagggtttctttgaccccaacaccgaggagaacctgacctaccttcagctgatggaacgctgcatcactgacccgcagacagggctttgcctgctgcctcttaaggagaaaaagagagaacgtaagactagtagtaagtctagcgttcggaagcgacgcgtcgtcatagtcgatccagagaccggtaaagagatgtccgtgtatgaggcgtatcgcaagggactgatcgatcaccaaacctatctagagctttctgaacaagaatgtgagtgggaagaaattacaatcagtagctcagacggagtggttaagagtatgatcatcgatcgacggagcggccgccagtacgacatcgacgacgccattgcgaagaaccttatcgaccgctcagctttggatcagtatcgagccggaactctctctatcaccgaatttgcagacatgcttagcggcaacgccgggggattccggagccgttcctcgagcgtgggctccagctccagttaccccatcagccctgccgtctcaaggactcagctagcttcttggtctgatcctaccgaggaaaccggaccggtcgcgggcattctggatactgagaccctggaaaaggtctccatcaccgaagctatgcaccgcaatctggtagataatattaccgggcagcggcttctggaagcccaagcttgtacaggaggtattatcgaccccagtaccggagagaggttccccgttaccgatgccgtgaataagggactggtggataagataatggttgacagaattaatctcgcccaaaaggccttttgcggcttcgaagacccaaggactaaaaccaaaatgagcgccgctcaagcactcaaaaagggatggctctattacgaggccggtcagagatttctagaggtccagtatcttacaggtggtctaatcgaacccgatacccctggcagggttcctttggacgaagccttacagagaggaaccgtagacgccagaacagctcaaaagctgagagatgtgggagcatatagtaaatatcttacctgccccaaaacaaaactgaaaatcagttacaaagatgcgcttgacaggtcaatggtggaggagggaacaggccttcggctgctggaggcagccgcacaaagcactaagggctattattccccatacagcgtgtccgggagcgggtcaactgccgggtctagaacgggaagtaggaccggttcaagagccggctctcgaagaggttcttttgacgcaactggctcgggctttagtatgacctttagctcctcatcttatagttcctcagggtacggcaggcggtacgcctctggatcatcggcatccctgggaggacccgagtccgcagttgcctag

SEQ ID NO: 262161 - DNA, 13644 bp, Artificial Sequence
  derived and/or modified sequence
atgagccagcaccagctgcgggtgccccagcccgagggcctgggccggaaaaggactagctcggaggacaacctctatttagccgtgctgcgagcttccgaggggaagaaggatgagagggacagagtgcaaaaaaaaacattcacaaagtgggtgaacaaacacctcatcaaggcccagagacatatcagcgacctttacgaggatttacgcgacggccataatctaattagtctgcttgaggtcctgtctggcgactccctgccacgagagaaaggcagaatgagatttcataagttgcaaaacgtccagatcgctctggattatttgcgccaccggcaggtgaagctagttaacatccgcaatgatgacatcgccgatgggaaccccaagcttactcttggacttatttggaccatcattttgcatttccagattagtgatatacaggttagcggacagagcgaggacatgactgccaaggagaagctgcttctgtggagccaaaggatggtcgagggctaccagggcctgaggtgtgacaacttcacaagctcatggcgtgacggacggctcttcaacgcgatcattcaccggcacaagccgctgttaattgacatgaataaggtgtatagacagacaaatctcgaaaatctggatcaagcgttttccgtcgctgagagagatctgggggtgacccgcctgctggaccccgaagatgtagacgttccacaaccggatgagaagtcgataatcacatatgtgtcatccctctacgacgcaatgccccgggttccggacgtgcaggacggggtgagggcaaatgagctccaactgcggtggcaggaatatagagagctggtgcttctactgctacagtggatgcgccatcataccgcggcgtttgaagaaagaagatttccttcttcatttgaagagatcgaaatcctatggtctcagttcctaaagttcaaggagatggagctcccagcgaaggaagctgataagaataggagcaaaggcatctatcagagcctcgaaggcgccgtgcaggcaggacaactgaaggtaccccccggctaccatcctctggatgtggagaaagagtggggaaagcttcacgttgcaattcttgagcgcgagaagcagctgaggagtgagtttgagcggctcgaatgcttgcagcggatcgtcacaaagctccaaatggaggccggcctctgcgaagaacagttgaatcaagctgacgctttattacaatccgatgtgaggctgctggctgcaggcaaagtgcctcagcgagctggtgaagtggagcgggacttggataaagccgacagcatgattagactgctattcaacgatgtccaaacgctcaaggacgggagacaccctcaaggtgaacagatgtaccggagggtgtatcgcctgcatgagcgtctggtggccatcagaaccgaatataatctgaggctcaaggcaggggtggccgccccggccacccaagtggcccaggtaaccttgcagtcagtccagaggcgccctgagctggaagattctactctgagatatctgcaggacttactcgcctgggtcgaggaaaatcagcacagggtcgatggagcagagtggggggtggacctgccaagcgtggaggcccagctgggaagccacaggggtctacaccagagtatcgaggagtttcgtgccaagattgaaagagcacgcagtgatgaaggacagttgtcccccgctactaggggggcttacagagattgcctcgggagacttgacctgcaatacgcgaaacttctaaactctagtaaagcccgcttaagatcccttgaaagtctgcactcctttgtggctgcggctactaaagagcttatgtggctgaacgagaaggaggaagaggaagtcggattcgattggtcagataggaacacaaatatgactgccaagaaggagtcatactccgcactgatgcgggaactggagttgaaggagaagaagatcaaagagctgcagaacgccggtgaccgtctgttgcgggaggaccaccccgctcggccaacagttgagtctttccaagcagcgcttcaaactcagtggagttggatgctgcagctctgctgttgtatcgaggctcaccttaaggaaaacgccgcttacttccagttcttctctgacgtccgcgaagctgaaggacaattgcagaagctccaggaggcccttcgacgaaagtacagttgtgatcgatcggcaacggtgacacgcctggaggacctcttgcaggacgcacaggatgagaaggagcagttgaatgaatacaaaggccatctgtccggcttagctaagcgcgccaaagccgttgttcaacttaaaccaaggcacccagctcaccctatgcggggcaggttgcctctgcttgctgtgtgcgactacaaacaggtggaggtgaccgttcataagggagatgaatgtcagttggtaggcccagctcagccttcccactggaaggttcttagtagctctgggtcggaagccgctgtccccagcgtctgctttttggtaccccccccgaaccaggaggctcaggaagcagtgactcggctggaggcccagcatcaggcgcttgttaccctgtggcatcagctccatgttgacatgaagtccctcttagcctggcagagcctaagacgggacgtgcaactgatacgctcttggagcttggccacatttcgtacactgaagcccgaagaacagcggcaggccctccacagcctggagctgcattatcaagccttcctcagagactctcaggatgccgggggcttcggccccgaagaccgcctgatggctgaacgggagtacgggagttgcagtcatcattatcaacagctgctccagtccctcgagcagggggctcaagaggagtctcggtgccaacgctgtataagtgaactgaaagacattcgactgcagctggaagcgtgcgagacacgtactgtgcaccggttgcgcctccctctcgataaagaacctgccagggagtgtgcccaaagaatagcagagcaacagaaggcacaggcggaagttgagggcctgggaaagggagtagctaggttgtcggcagaagccgagaaagtcctcgcgcttcctgagcccagccctgctgcaccaacgcttcgtagcgagttagaacttactctgggcaaacttgagcaggtccgctccctctcggccatttaccttgagaaattaaagacaatttctcttgtgattcgcgggactcagggcgctgaagaagtcctcagggcccacgaagaacagttgaaggaggcacaagctgtaccggctacgctgccggaactggaggctaccaaagcctcactgaaaaaattaagagcacaggccgaagctcagcagcctaccttcgacgcacttcgagatgagctgcgcggcgcccaggaggtcggagaaagactccagcagaggcatggagaaagggacgtggaagttgaacgctggagggagcgagtggctcagctcttggagcgctggcaggccgtgctggcacagacagatgttcggcaaagagaattggaacagctagggaggcagctccggtactaccgggaatcagcagatcccttgggagcttggcttcaggacgctcgcaggcggcaggagcagatccaggccatgccccttgccgacagtcaagcggtgagagaacagctgcggcaggaacaggctctgctcgaagagattgagcggcacggcgagaaggttgaggagtgtcaacgcttcgcgaagcagtacattaacgccattaaagattacgaactccaactcgttacatacaaggcccagctggagcccgttgcttccccagccaagaaaccaaaggtgcagagcggctcggagtcggtcatccaggagtacgttgatctgaggacacactattcggagttgacgaccctaacttctcagtatatcaagttcatctccgagacccttcgcaggatggaggaggaggagcggttagccgagcaacaacgggctgaagaacgggagaggctggctgaagttgaggccgcactagagaaacagcggcagctggcagaggcgcatgctcaggccaaggcccaagccgagagagaggcaaaggaacttcaacaacgaatgcaggaggaagtagtccgcagggaggaggcggcagtcgatgcccagcagcagaaaagaagcatccaagaggaacttcagcagctcaggcagagcagcgaagccgaaatacaggccaaagcacgccaggctgaggccgctgaacgcagtagactgagaatcgaggaagagattcgcgtcgtgcggctgcagctggaggcaacagaaagacaacgcggcggcgccgagggggagctccaggccctgcgcgcaagggctgaagaggcagaggcacagaaaaggcaggcgcaggaagaagccgagcgccttagacggcaggtgcaggatgaatcccagaggaagcggcaagctgaagtggagctggccagcagggtcaaagccgaagctgaggccgcacgagagaagcagagagcccttcaggcccttgaagagctccggctccaggccgaagaagccgaacgacgcctgcgccaggccgaggttgagcgggccaggcaggtccaagtggccctcgagacggcacaacggtcagcagaagccgagctccagagcaaaagggcctccttcgcagagaaaactgcacagctggaacggagccttcaggaggagcacgtcgccgttgctcagcttagggaggaagcagagagacgcgctcagcaacaggccgaggcagagcgcgcaagggaggaggccgagcgcgagctggaacgttggcagcttaaggctaatgaggccctgaggctcagacttcaggccgaggaggtcgcacagcagaaatcgttagcccaggctgaggcagagaagcaaaaggaagaggccgaaagagaagctcgtagaaggggaaaagcagaggaacaggctgttcgtcagagggagcttgccgagcaggaactagaaaagcagaggcaattggctgaaggaaccgcacaacaacgactggctgccgaacaagagctaataagactccgcgcagagacagagcagggcgagcagcagagacagcttttggaggaggaattggcccgcctccagcgtgaggccgccgccgctactcaaaaaagacaagaattagaggccgaactcgctaaggtgagggccgagatggaggtcctgttggcatctaaggcacgcgcagaggaggagtcgaggtccactagcgagaagtccaaacagcggctagaagccgaagctggtaggttccgggaattggcagaagaggccgcacggctgcgcgctttagctgaggaggccaagcgccagaggcaacttgccgaggaggatgcagctcgtcagagagctgaagctgagcgggtcctggctgagaaactggccgccataggggaagccacccgccttaaaaccgaagccgaaatcgcactgaaggagaaagaagctgaaaacgagcgccttagacgtcttgctgaggatgaggccttccaacgacggagactcgaagagcaggcagcacaacataaggcagatatcgaggaaaggctggcccagctgaggaaagcaagcgactcggaactcgaaagacagaagggcctggttgaagatacccttaggcaacgcaggcaggtggaggaggagatcttagcactcaaggccagcttcgagaaagccgcagccggcaaagcagaactggaactcgagctgggtagaatcagatctaacgctgaagatactctcaggtcaaaagaacaggcggaactcgaagccgctaggcagaggcagttagccgcagaagaggagcgacgcaggcgtgaggctgaagaaagagttcagaaaagtcttgctgccgaagaggaggccgcgagacaacggaaggcggctctggaggaggtggaaagattaaaggccaaggtggaagaggcccgcaggctgcgcgaacgagctgaacaggagtctgctaggcagttgcagctggcccaagaggcagcacagaagagactgcaagctgaggagaaggcgcatgctttcgccgtgcagcaaaaagagcaggaactccagcagacccttcaacaggaacaatccgtcctcgaccaactgcgcggcgaagcggaggctgcccgccgcgcagccgaagaagccgaagaagccagggtccaggccgaacgggaggccgcgcagtctagacggcaagtagaggaagctgagcgactaaaacagagtgccgaggagcaggcccaggcgcgagcgcaagcccaggccgcagctgaaaaactccgaaaggaggccgagcaagaggctgcccggcgtgcccaagccgagcaggctgccctgcggcaaaagcaggcagcggacgccgagatggagaaacacaagaagttcgctgagcagactttacgccaaaaagcccaggtggagcaagagctcactaccctgaggctgcagttggaagaaaccgatcaccagaagaatctgttagatgaagagctgcaacggttgaaggctgaggctaccgaggccgcaagacagcggtctcaggtcgaggaagagttatttagcgtgcgcgttcagatggaggaactatctaagttaaaggcgaggatagaggcagagaacagggcgcttatcttgcgcgataaggataatacacaacgcttcctgcaagaagaggccgagaagatgaagcaggtagccgaggaagctgcaaggttaagcgtagcagcccaggaggccgctcgcctcagacagttggcagaagaggatctagcgcagcagagagcattggctgagaaaatgctgaaggagaaaatgcaggcagttcaggaggctacaaggcttaaagcagaggcggagcttctccagcagcagaaagaactggcacaggagcaagctcggcgtctgcaagaagataaggaacaaatggcacagcagctggcggaggaaacccagggatttcaacgtacgctggaagctgagcgacagcggcagctagagatgtccgctgaggccgaaaggctgaaactgcgcgtcgcggagatgagccgcgcgcaggcacgagcagaagaagacgcccagaggtttaggaaacaggcagaagagatcggagaaaagctccatagaaccgagttagctacacaagagaaggtgacgctggtgcagactttagagattcagagacaacaatccgatcacgacgcagagcggctgcgtgaggccatcgcagagcttgagagggaaaaagagaaactgcagcaggaggccaagctgctgcagctgaaatccgaggagatgcaaacagtgcagcaagaacagctgttgcaggagacacaggccctccagcagtccttcctgagtgagaaggatagcctcttgcagcgtgagcgcttcatcgaacaggaaaaagccaagttagaacaactgtttcaggatgaggttgctaaggcccagcagctgagggaagagcagcagcggcaacaacagcagatggagcaagaacgtcagagactcgtagcttctatggaggaagcaaggcgtcggcagcatgaagccgaggaaggtgtgcgccgcaagcaagaagagttgcagcaattggaacagcaacgacgtcagcaggaagaactgttagccgaggagaatcagcgacttagggagcagctccagctactcgaggaacaacaccgcgcagcgctggcccattccgaggaggttaccgcaagtcaggtagcggccacgaaaaccctgccgaacggtagagatgcattagacgggcctgcggcggaggcggaaccggaacattctttcgatgggttgaggcggaaggtgtcagcccaaagattgcaggaggctgggatcttgagcgccgaagagctgcaaaggttggcccagggccacactacggtcgacgagctagcgcgccgcgaagatgttagacattaccttcagggcaggtcttccatcgcagggcttcttctgaaagctacaaacgagaaactgtctgtttatgccgcgctccagcgccagctccttagcccaggaacagccttaatcctgcttgaagctcaagcagcgtccggtttcctgctggaccctgtgcgaaacaggagactgacagtgaatgaagcagttaaagaaggcgtggtgggccccgagctccaccataaactgctgagtgctgagagagcggtgacagggtacaaggatccttacacgggccagcaaattagtctctttcaggccatgcaaaagggtttgattgtccgtgagcatggcatccgactgctcgaggctcaaattgctaccggaggtgtaatcgatcctgtgcactcacatagagttccagtggatgttgcctatcgcagaggctacttcgacgaggagatgaatcgggtgcttgctgatccttccgatgacaccaagggcttcttcgatcctaatacccatgaaaatctgacttacctgcagctgctggagaggtgcgtggaggaccctgaaaccggactgtgtcttttaccgctgacagataaagcagcgaagggcggcgaattggtctacacagatagcgaagccagggatgtgttcgagaaagccacagtgtcagcaccctttggaaagttccaaggaaaaacagttactatatgggagataattaattctgagtatttcactgccgagcaacgcagggacctgctgaggcagtttaggaccggccgaatcacagttgagaagattataaaaatcattataactgtggtagaggagcaggagcaaaagggtcgcctgtgctttgaaggacttcggagcctcgtcccggcagccgaactgttggaatcccgtgtaattgacagggaactgtaccagcagctgcaaagaggagaacggtccgttagggacgtggctgaggtagacaccgtgcggagagcacttcggggggcaaacgtgatcgccggcgtatggctcgaggaggcaggacagaaattatctatttataatgccctgaaaaaagacctgttgcccagtgatatggccgttgcactcttagaggcccaggcaggcactggacacatcatagaccctgccacttcagcacggttgaccgttgatgaggccgtccgagctggcctggttggcccagaattccatgagaaattgctgtctgcagagaaagccgtgacaggttacagagatccgtacaccggtcaaagtgtctccctgtttcaggccctgaaaaagggactgatcccccgagagcagggcctgaggctgctggatgcacagcttagcaccggaggcatcgtcgatccctcaaaatcccatagggtccccctagatgtggcttgcgcccgcggatgtctcgacgaagagacctcacgggcgctgtctgcgccaagagctgatgcaaaagcttactcagacccgtcaacaggggagcccgccacctatggggagctgcagcagagatgtagacctgatcagctgacagggctctcgttactgccgctcagcgagaaagctgcaagagcacgccaggaggagctgtactccgagctgcaggcgcgggaaacttttgaaaaaacgccagttgaggtgcctgtgggcggctttaagggccggacagtaacagtttgggaactgattagcagtgagtattttacagctgaacaaaggcaagagctgcttagacagttcaggacaggaaaggtgacagtggaaaaggtcataaaaatcctgatcactattgtggaggaggtcgagacgctgcggcaggagcgtctttcttttagcggactacgagctcctgttccggcctcggaattactggcttccggcgtgctctcacgggcacagttcgagcagctgaaggatgggaagacaaccgtcaaagatctgagcgagctgggctctgtcaggactctgctgcaagggagcggctgcctcgcaggaatatacctggaagataccaaagagaaggtctccatatatgaggccatgcgcagaggtttgctgagagccacgactgccgcccttctcctcgaagcacaggccgcaacggggttccttgtggatccagtgaggaatcaacgcctttacgtccacgaggcggtgaaggctggggtcgtcgggcccgagctccatgagcaactgttatcagccgaaaaagcagtcaccggttatcgtgacccctactcagggagtaccatctctctgttccaagcaatgcaaaagggacttgtattgcgtcaacatgggattagattgctggaggctcagattgccaccgggggcatcattgatcctgtacacagccaccgggttccagtcgatgttgcctatcagagggggtacttctccgaggagatgaaccgggtcctggcagatccttccgatgataccaagggattcttcgacccaaacacgcacgaaaaccttacttaccgccaattgctggaacggtgcgtggaggatcccgaaacagggcttaggctgctgcccctgaagggagccgagaaggccgaggtggtcgaaaccacccaagtttacacagaagaggagacccggcgggccttcgaggaaacacaaatcgacatacctgggggggggtctcatgggggttctaccatgagcttgtgggaagtgatgcagtccgatttaattccagaggaacagcgtgcgcaactaatggctgattttcaggctgggagagtgacaaaggagaggatgataataataataatcgaaattattgagaagaccgaaataatccgtcaacaaggcctcgcctcatacgattacgtgaggagacgtctcactgccgaagatctttttgaggcccgcattatctctctggaaacatacaatctccttagagaggggacccggagcctgagagaggccttggaggccgaatccgcctggtgctacctctacgggacaggcagcgtcgccggggtatacctaccggggtcccgccagacattatccatataccaggctttgaagaagggactcctgagcgccgaggtggcacgactgcttctggaagctcaggccgcgaccgggttcctgttggacccggtaaagggggaacgtcttactgtagacgaggcagtccgaaagggattagtaggccccgagctgcatgatcgcttgctgtctgccgagcgagcagtgactggctaccgtgacccctataccgagcagaccatcagtctgttccaggccatgaagaaggagttaattcccaccgaagaggctttgaggcttctggatgcgcagctggccactggagggattgtggatccacggctcggcttccatttgccactggaagtcgcctatcagagggggtatctgaataaggatacacacgaccagcttagtgagccttctgaagtgcggtcctacgtagacccatctacagacgagaggctgtcctacacccagttgctgcgacgttgcagacgggacgatggaaccggccagttgttgctcccattaagtgacgcgcgaaaactaacttttagaggtctccggaagcagatcaccatggaagaactggtccgttcgcaagtcatggacgaggccacagccttgcaattgagggagggtctgacttctatagaagaggtgaccaaaaacttacagaagttcctggaagggacctcatgtatcgccggcgtgtttgtggacgctacaaaggagcgtctgagtgtgtaccaggcaatgaaaaaaggaatcatcaggcccggcacagcattcgagctcctggaggcccaggctgccaccggctacgtgattgacccaatcaaggggttgaaactgacggtggaggaggctgtccgcatgggaattgtcggtcccgagtttaaggacaaattattaagtgctgagagggccgttaccggctacaaggatccatactctggtaaactcatctccctttttcaggccatgaagaagggcctgattttgaaagatcacggtattcgtcttctagaggcacaaattgctacaggtggtattattgatcctgaagaatcccataggctgcccgtggaggtggcatacaagagggggcttttcgatgaggaaatgaatgaaatccttacagaccccagcgacgacacaaagggtttcttcgatcccaacaccgaagaaaacctaacctatctgcagctcatggaaaggtgtattactgacccccagaccggtctatgccttctgcctcttaaggagaaaaagagagagaggaagacgtcctccaaatcctccgtgcggaagcggcgggtggtaattgtggacccggaaacaggcaaggagatgtccgtgtatgaggcatacaggaagggcctcatcgaccatcagacgtatctcgagttatccgagcaggagtgcgagtgggaagagataactataagttccagtgacggtgtggtgaagagcatgatcatcgacaggcgtagcggccgtcagtatgatatagacgacgcaatcgcaaaaaacctgatagaccggagcgccctggaccagtacagggccggaactctgtcgatcacggagttcgctgacatgctgagtggcaacgccggcggttttcgaagccgctcttccagtgtcggatcttcatcgtcctaccctatcagcccagccgtgagtcggacacagttggcgagttggtccgaccccaccgaagaaactgggcctgtggcaggcattctagacacagaaacactcgaaaaggtgagtattaccgaggccatgcacagaaacctcgttgataacatcacgggtcagcggctgctagaggcccaagcctgcacgggcggtataatcgatcctagtacaggggagcgctttccagtgacggacgcagtaaataaagggctcgtggacaaaatcatggtggaccgcattaacttggcccagaaagccttctgtggctttgaggatcccagaacaaagacgaagatgagcgcagcccaggcgctgaagaaagggtggctgtattacgaggccggccagcgattcttagaagtgcagtacctgaccgggggcctgatcgagcctgatactcccggacgagtacccctggatgaagctctgcagaggggcactgtggatgcaaggacagctcaaaaattgcgcgacgtgggggcatactccaaatacctgacatgtcccaagacaaagctcaaaattagttacaaagatgctctggacaggtctatggtagaagagggcacagggctgcgactgttggaggccgccgcacagagcaccaagggttattatagcccctacagcgtgtctggatcaggctctaccgccggctccaggaccgggtcccgtaccgggagccgtgccggcagcaggcggggatcatttgatgccacaggaagtggttttagcatgacgttctcctcatcctcatactccagtagtggatacgggcgccgctatgccagtggatcctctgcatctcttggcggccccgaatccgccgtggcatag

SEQ ID NO: 262162 - DNA, 13644 bp, Artificial Sequence
  derived and/or modified sequence
atggagcccagcggcagcctgttccccagcctggtggtggtgggccacgtcgtgacccttgccgcagtgtggcattggagacgcggccgccggtgggcccaggacgaacaggatgaacgtgaccgggtccagaagaagaccttcaccaaatgggtcaacaaacacttgataaaggcccaacgacacatttccgacctgtatgaagatctgcgggatggccataatctgatcagtctcctggaggtgctctccggggattcgctgccaagggagaaaggaagaatgcgattccataagttacagaatgtgcaaatcgcactggattacctgcggcatcgtcaagtaaaacttgtaaacattcgaaacgacgacattgccgatggaaacccaaagcttaccctaggcctgatttggacgattatactgcatttccaaatttctgatattcaagttagtgggcaaagcgaagacatgacagctaaggagaaattgctgctctggtcgcagcgcatggtggagggatatcagggcctgcgctgcgataatttcacttcgtcctggagggatggccgcctcttcaacgcaatcatccacaggcacaagcccctcttgattgacatgaacaaagtgtacagacagaccaacctggagaaccttgatcaggcatttagtgtggccgaaagagatttgggcgtaactcgcctgctggatccagaggatgtcgatgtgcctcagcccgacgagaaatcaatcattacctatgtatccagtttatacgatgctatgcctcgagtgcctgatgtgcaggatggggtgagggctaacgagctacagctgcggtggcaagaatatcgtgaattggtgctcctgctgctccaatggatgcgtcatcatactgccgcttttgaggaacggaggtttcccagttcctttgaagaaatcgaaatcttatggagccaatttctcaaattcaaagagatggagctcccggccaaagaagcagataaaaaccggagtaaggggatttatcagagcctagaaggggccgtgcaggcaggtcaactgaaagtgccgccggggtaccaccctttagatgtggaaaaagagtggggcaagctccatgttgctatccttgaacgcgaaaaacagctgcggtcagagtttgagagacttgagtgcctccagagaattgtgaccaaattgcagatggaggcagggctttgcgaagagcagcttaaccaggccgatgcccttctgcagagtgacgtccgattacttgctgctgggaaagtgccgcagcgtgctggagaagtagagcgcgatctggacaaggcggattctatgatcaggctgctttttaatgacgttcagacgctaaaggacggtagacatccccagggggagcagatgtatcgacgagtttaccgtttacatgaaagattggtggccattagaaccgaatacaacttaaggcttaaggcaggggttgccgctccagcgacacaggttgcccaagttactctgcaatcggtccagaggaggccagaactagaggactcaactttgcgctatctccaggatctactggcttgggtggaagaaaaccagcacagagtcgacggcgcagaatggggcgttgatctgccgtccgttgaagcccaacttggttcccacagagggctccaccagagcattgaggagttccgtgccaagatcgagcgcgctcgtagtgatgagggccagctctcaccggctacacggggtgcctaccgcgactgccttggcagactcgacctgcagtatgccaagctgctgaattcttctaaggcacgccttcgttcattagagtctctacacagcttcgtggcagcagccactaaagaactgatgtggttgaacgagaaagaggaggaagaggtggggtttgactggtcagacagaaacaccaatatgactgctaagaaagaatcatactccgctctcatgcgcgagttagagcttaaggaaaaaaagattaaggagttgcagaacgctggagatagactcctgcgcgaggatcaccccgcaagaccaaccgtcgaatcctttcaggcagcgctgcagactcagtggtcttggatgcttcagctgtgttgctgcatagaggcccatctgaaagagaacgccgcctatttccagttctttagtgacgtacgggaagccgaaggtcagctccagaagctccaggaagctctaagacggaaatacagctgtgaccggagcgcgactgtgacccggctcgaagacctgctgcaagacgcccaagacgagaaggagcaactgaacgagtacaagggccatctctcaggcctggccaaacgcgccaaggccgtcgtccaactcaagccacggcacccagcacatcctatgcgtggccggttgcccctccttgccgtctgcgattacaagcaggtagaggtaacggtgcacaaaggagacgaatgccaactcgtgggaccggcccagcccagccattggaaggtgctctcctcctctggcagtgaagcggccgtaccgagcgtttgtttccttgtgcctccgcccaaccaagaggcccaagaggcggtgacccggctggaagcccagcaccaggccctggtcactttgtggcaccagctccacgttgacatgaagagcctattagcttggcaaagtctgagaagggacgtccagctgataagaagctggagtctcgccacctttcgcactctaaaaccggaggaacagcgccaggcattacatagtttagaactgcactaccaggcattccttcgcgactctcaggatgcggggggatttggtcctgaggacaggctgatggctgaaagagagtacggctcgtgttcgcatcactaccagcagctgcttcagtccttggagcagggagcccaagaagagagtagatgccagcgctgtattagcgaactgaaagatattcgcttgcagttagaggcctgtgaaactaggaccgtgcataggctgagactccccctggataaggagcctgccagggaatgcgcccaacgaatagccgagcagcagaaagcccaggctgaagttgagggcttaggtaaaggtgttgcccgtctgtccgctgaagctgagaaggtgttggccctgcctgaacctagccccgctgcaccaacactgcggtctgaactcgagttaaccctgggcaaactagagcaggtgcgctcattatcagctatctacctggagaagctgaagaccataagtctggtcatcagggggacccagggcgcagaggaagtgctgagagcacatgaggaacagctaaaggaagcacaggcagttcccgccaccctgccggagctggaagctaccaaagctagcctgaagaaactcagagcacaggccgaggctcagcagcctacatttgatgcccttcgcgacgagctccgaggcgcccaggaagtcggagaaagactgcagcagcgccacggagaaagggatgtggaagtagagaggtggcgggaaagggtggctcagctgctggagcgttggcaggctgtgttggcccaaaccgacgtaaggcagcgggagcttgaacagctcggtcggcagcttaggtattatagagagagcgctgatcctctcggcgcctggctgcaggacgctaggagaaggcaggaacagatacaggcaatgccgttagccgattcacaggctgtgagggaacaacttcggcaggaacaggccctgcttgaggagattgagagacatggcgaaaaggttgaagaatgtcagaggtttgccaagcaatatatcaacgcgataaaggactacgaactgcagctggtgacctacaaggcccaattggagcccgttgcgtctccagccaagaaacctaaagtgcagagcgggtcagagtctgtgatccaggagtacgtcgacctgagaacccactacagcgaactgactactctcacgtcccagtacatcaaatttatttctgaaacactccgcagaatggaggaagaggaacgcttagccgagcaacaaagagctgaggagcgtgagcggctggctgaggtcgaggcagcccttgaaaagcagaggcagctcgccgaggcacatgcccaagcgaaggcccaggcagagagagaagcaaaagagctgcagcaacggatgcaagaggaggtagtgcgcagggaagaggcagccgtggatgcccagcagcagaaacgctcaatccaggaggagctgcagcagcttcgacaatcttccgaggcggaaatccaagccaaggctcgccaggctgaggccgccgagcgtagcaggttgcgaatagaagaggagataagggtggtccgcctgcaattggaggctaccgagcgtcagaggggcggtgctgagggggagcttcaggcactcagagcaagggcagaggaggcggaggcccagaagaggcaagcccaagaggaggcagagcgcttgaggagacaggtgcaggatgagagccagcgcaagcggcaggcagaggtggaattggcaagccgtgtgaaagcagaagctgaggctgccagggagaagcagagggcactgcaggccctcgaggagcttcgcctccaagccgaggaagctgagcgacgactacgccaggctgaagtggaacgagcccgccaggttcaggtggcactggaaacagcccagcggtccgcggaggctgaactgcagtcaaaacgagcgtcattcgccgagaagacagctcagctggagaggagtctccaagaagagcacgtcgccgtggctcagttgcgagaagaggcggaaaggcgggcccaacagcaggctgaagctgaacgtgcccgggaagaagcggagagagagctggaaaggtggcagctcaaagccaacgaggcactccgactccggttgcaagccgaagaggtcgcccagcagaagtcactggctcaggccgaggcagaaaaacagaaggaagaggccgaacgcgaggctcgccgaaggggtaaagccgaagagcaggctgttcgccagcgggagctggctgagcaggaattagagaagcagcgccagctggcagagggtaccgcccaacagcgtctggccgcggagcaggagctgatacggttgagagcagaaaccgagcagggcgaacagcaaaggcagttgttggaagaagagctggcaagattgcagagagaggctgccgccgccacacagaagcgccaggaacttgaggccgaactggccaaagtaagagcagagatggaggtgctgctggcctccaaggcgagggcagaggaggagtccaggagcactagcgagaagagcaaacaacgattggaggccgaagccggacgcttccgggagttggcggaagaagcagcacgccttcgcgcactcgcagaggaagctaagagacagagacagctggctgaggaagacgccgcacgacaaagggcagaagccgaacgcgtgctggctgagaagcttgcagccataggtgaggcaactcgactaaagaccgaagctgagatcgcactcaaagaaaaggaagcagagaacgaacgcctgaggcgattggctgaggatgaagccttccagagaaggcgcctggaggagcaggccgcacaacacaaggcagatatcgaagagagactggcccagctcagaaaagctagtgatagcgaactggaaagacagaaagggctggtggaagacactctgcgacagaggcgccaggtggaagaagaaattctagcactgaaagcctcgttcgagaaggcagccgctggtaaggccgaactggagttggaacttggaagaatcaggtctaacgctgaagatacccttaggtccaaagaacaggctgagttggaagccgcaagacaacggcagctggcagcagaagaggagagacgcaggagggaagccgaagaacgcgtacagaagagtctggccgccgaggaggaggctgcccgccagagaaaagcggccctcgaagaggtggagaggctaaaggctaaggtggaagaggctcgccggctgagggagagagccgaacaggagagcgcgagacaactgcaattagcccaagaggccgcacagaagaggctgcaggcggaagaaaaagcgcacgccttcgccgtgcagcagaaagagcaggagctgcagcagacgctacagcaggagcagagcgtcctggatcagctgcggggggaggccgaggctgctcgacgggctgccgaagaagcagaagaggctcgcgtacaggctgagagagaggctgcccagagccgtcgccaggtcgaggaggctgagcggctgaagcagagtgctgaagaacaggctcaggcaagggcacaggcacaggccgccgccgaaaagctccgcaaagaggctgagcaggaggccgccaggcgcgcccaggccgagcaggccgctctgcggcagaagcaagccgctgatgctgaaatggaaaaacacaaaaagtttgctgagcagacattgcgacagaaagcccaggtcgagcaggagttgacaacactgagactgcaactggaagaaactgatcatcagaaaaatctgctcgacgaagaacttcagagactgaaggccgaggccaccgaagcggcccggcaacgcagtcaggtcgaggaagaactgttttccgtgcgcgtacagatggaggaacttagcaagctgaaagctagaatagaggcggagaatcgagctttaatattgagggataaagataacacacagcggtttctccaggaggaggcagaaaagatgaagcaagtcgcggaagaggcggcccgcctctcggttgctgctcaagaggctgcccgcttgagacagttagctgaggaagacctggcccagcagcgggcgctggctgaaaaaatgttgaaggagaagatgcaggccgtacaggaggccacccggctcaaggctgaggccgaactcttgcagcagcagaaggagctggcccaggaacaggcaaggcggctgcaggaggacaaagagcagatggcacagcagctggcagaagagacccaaggattccagcggaccctcgaggccgagaggcagcgacagttggagatgtctgcggaagctgagcgactgaagcttagggtagcggaaatgtctagagcccaggctagggctgaggaggatgcacaacgctttagaaaacaagctgaggagattggagagaagctgcatagaacggagctggcaacccaagagaaggttactttggtgcagacattggagattcagagacagcagagtgaccatgacgcagagagactcagggaggcaattgccgaattagagagggagaaggagaaattgcaacaggaggctaagctgctgcaattgaagagtgaagagatgcagacagtccagcaggagcaactgcttcaggaaactcaggcattgcagcaatcttttttatcagaaaaggattctctcttgcaacgggagcggtttatagagcaggagaaggccaaactggagcagctgttccaggatgaggtggcaaaagcacagcagctgagggaggagcaacagaggcagcagcagcagatggagcaagagcgtcaacgactcgtagcatctatggaagaggccaggcgccgtcagcacgaagccgaggagggggtgaggcggaaacaagaagagctgcagcaattagagcagcagcgccggcaacaggaagagctgttagcggaggagaaccaacgactgcgggagcagctgcagttacttgaggagcagcacagagctgccttggctcactccgaagaagtgaccgcaagccaggtggctgccaccaaaacattgcctaacggccgggatgccctggacgggcccgctgcggaggcagaacccgagcatagtttcgatgggctgcgccggaaggtttcagcccagaggctgcaagaggccggcattctgtccgccgaggagctgcagcgcctggcccagggccacaccactgtggatgaactggctaggcgggaagatgtccgccactatctgcagggtagatcgagtattgcaggcttgctcttaaaagccacaaacgaaaagctgtctgtgtacgctgccctccagcgccagctcctcagtcccggaactgccttgatactgctcgaagcccaggctgcttctgggttccttctggatccagtccgtaaccggcgtctaaccgttaacgaggcagtcaaggaaggagttgtgggccctgaactacaccacaagctacttagcgcggaacgagctgtaactgggtacaaggacccctataccggtcagcaaatttctttgtttcaggcaatgcagaagggcctgattgttagagaacacggtattcgactcctcgaagcccagattgccaccggcggcgttattgacccggtgcatagtcatcgtgtgcccgtggatgtcgcatatcgcaggggatactttgacgaagagatgaacagagtgctggcggatccaagtgacgatacaaagggcttttttgacccaaacacccatgagaatttgacctatctgcagttgctggagcgatgcgtggaagatccagagacaggattgtgcttgctgcccctgacggacaaggccgcaaaaggcggagagctggtgtatacggattctgaagctcgagatgtttttgagaaagcgacggtctcagcccccttcgggaagtttcagggaaagaccgttacaatctgggagataataaacagtgagtactttaccgcggagcagaggcgagacctgttacgccaatttcgcaccggccgaatcaccgttgaaaagatcatcaagatcattatcaccgtagtggaggaacaggaacaaaaaggacgtctctgcttcgagggcttgcgctccctggtcccagcagccgaattgctcgaatcacgcgttatcgatcgagagttgtaccaacaactccagagaggcgagaggagtgtgagagacgtggccgaagtggataccgtcagaagggcactcaggggagcaaatgtgatcgctggagtctggctcgaagaagcaggacagaaactgtctatatataatgctctaaagaaagacttgctgccttctgacatggcagtggctctcctggaggcacaagccggcaccggccacattatcgacccagcaacgtccgcaagactgactgtggatgaggccgttagggcaggtctggtgggcccagaattccatgaaaagctcctctcagcagagaaagcagtgaccggatacagggacccatacacaggtcaaagcgtgtccctattccaggcattaaaaaaagggctgattccgcgagaacagggccttcgcttgctagacgctcagctgagtaccggaggtattgtggacccctctaagagccatcgagtgccactcgatgtggcctgcgcacgcggatgtctggacgaggagacatcgagagcactttctgccccacgggccgatgccaaagcatattcagaccccagtaccggcgagcctgccacatacggcgagctccaacaacgatgtagacccgatcagctcaccggcctgtctttgctaccattgtcagagaaagccgctcgtgcccgccaagaagaactttactctgagctccaagctagggaaaccttcgagaagacacctgtggaggtccctgtgggtggattcaagggcaggacagtaaccgtttgggaattgatctccagtgaatacttcaccgctgagcagcggcaggagttgttaaggcaattccgcaccgggaaagttaccgttgagaaagtgattaaaatccttatcacaattgtagaagaagtggagaccctgagacaggaacgattaagttttagtggtctccgcgcccctgtacccgccagtgagcttctggcttccggtgtgctttcccgggcccagttcgagcagctaaaggatggcaaaacaacagtgaaagatctatctgaactggggagtgtgagaactctgctccagggatctggttgtctggcgggaatctacctcgaggacacaaaagaaaaggtgagcatctatgaagcaatgcggcgaggacttctgagggccacaaccgcagcactactattggaagcgcaagcagctacagggttcttggtagatcctgtccgcaaccaaaggctatacgtgcacgaagcagtcaaagccggcgtggtcggccctgaactccatgagcaactgctcagtgccgaaaaggccgtcaccggttaccgcgacccctacagtgggagcacgatttccctgttccaggcaatgcagaaggggctggttctcagacagcatggtattcgccttctggaggcgcaaatcgcaaccggtggcattatcgaccctgtacactcccacagggttcctgtcgacgtagcataccagagaggctactttagcgaggaaatgaatagggtcttagccgacccatccgacgacactaaagggttctttgacccgaacacccacgagaacctcacttatcggcagctcctcgagaggtgtgtcgaggacccagaaacaggcctcagattgctgcctctgaaaggagctgaaaaggctgaagtggtggagacgacccaggtgtacacggaggaggaaactagaagagcttttgaggagacacagatcgacatccctgggggagggtcccatggagggagcacaatgtctttatgggaggtaatgcagtctgatctgatcccggaagagcagcgagcacagttaatggccgactttcaggcgggccgcgttactaaggaaagaatgataatcatcatcatcgagatcatcgaaaagactgaaattatccggcagcagggcctcgcctcttacgactacgtgcgaagaagactgactgctgaggatctgttcgaggctaggattatcagcctggagacgtacaatctgttgagggaggggaccagatcactcagagaggccctggaggccgagtctgcatggtgctacctctacggcaccggcagcgtcgctggtgtctacctacccggatctcggcagactttgagtatctaccaggctcttaagaaaggcttgctgtcagccgaggtggctcgcctgcttctcgaagcacaagctgcgaccggattcttactggaccctgtgaagggagaacgccttactgtcgatgaggcggtacgaaaaggccttgtgggtcccgaattgcacgatcgactgctttcagccgaacgtgccgtgacaggctaccgagatccctatactgaacagactattagcctcttccaggctatgaagaaagagttgattccgacagaagaggcactgcgtctgttggacgctcaactggccaccgggggaatcgttgatcctcggcttggcttccacctcccattggaggtagcataccaacggggctacttaaacaaagatacccacgatcaattatctgagcctagcgaagttcgcagttacgtggatccttccactgacgagcggctgtcttatacccaactgctgaggcgatgcaggcgcgatgacggcacaggccagctgctgctacccctgtctgacgctaggaagttaacttttcggggccttagaaagcaaattactatggaggagctcgtgcgcagccaggtcatggatgaagcgaccgccctgcagctgagggaagggctcactagcatcgaagaggtcactaaaaatctgcagaagtttctggaggggacatcttgtatcgctggcgtttttgtcgatgctactaaggaaaggctttctgtttaccaggctatgaaaaagggcatcatcagacctgggaccgcttttgaactcttggaggcccaagccgccaccggttatgttattgacccaataaaaggcttgaaattgacagttgaggaagccgtgcgcatgggaattgtggggcccgagttcaaagataaactcctcagcgccgagcgggcagtcaccggatataaggacccatacagcgggaagcttatttctctatttcaagctatgaagaaagggctgattctgaaggatcacggcatccggctgctggaagcacagatcgctaccgggggaatcattgaccctgaagagtcgcatcgactgccagtggaggttgcctataaaagaggactattcgatgaggagatgaatgagatcttaaccgaccctagcgatgatactaaggggttcttcgaccccaataccgaagagaatctgacctatctccaactgatggagcggtgtatcacagacccccagactggcctatgtctgcttcccctaaaagagaaaaaacgcgagaggaagacctcatctaaatcatccgttcggaagaggcgtgtcgtgatcgttgatccggagacaggcaaagaaatgagcgtgtatgaggcctaccggaagggcctcatcgatcatcagacgtatttggagctgtccgaacaggagtgtgaatgggaagagattacaattagctctagtgacggtgtggtcaaatcgatgattatcgacagaaggagcggcaggcagtacgacatcgacgacgcaattgcaaaaaatctgattgatcgctccgcactggaccagtacagggcgggcaccctgtcaatcactgagtttgcggatatgctctccgggaacgctggcgggttccggagccggtcctcttccgttggctcgtccagctcctaccccatctccccggcagtcagtcggactcagctggcttcctggtccgatcccactgaagagaccggtcccgttgccgggattctcgacactgagacactggagaaggtgtctatcacagaagctatgcatagaaacctggtggacaatatcaccgggcagcgcttgctggaagctcaggcctgcaccggcggcattatcgatccaagcacgggcgaacggttcccggtgactgacgccgtgaataaaggattggttgataagatcatggtggacagaattaatttagcccagaaggcgttttgtgggttcgaagatcctaggacaaagaccaagatgagcgcggcgcaggcactgaagaaaggctggctctactacgaagctgggcagcgttttctggaagtgcagtatctgacaggcggcctgatagaacctgacactcccggaagagtgccccttgatgaagccctgcagagagggacggtcgacgcacgaacagcccagaagctgcgcgatgtgggagcctattcaaagtacttgacctgtccaaagacgaagctgaagatttcctataaagatgcgctggatcgatcaatggtggaagagggcactggtctacggctcctggaagcagctgctcaatccaccaagggctactattcgccttattcggtgtctggctcaggaagcacggctggatctcgcacaggctcccgtacgggctctcgagctggctctagacgtggcagctttgacgctaccggctccggcttttccatgacattcagctcctccagctattcctcctccggttatggccgcagatacgcgagcggcagttcagcttctttgggaggaccagaatcggccgtggcctag

SEQ ID NO: 262163 - DNA, 13578 bp, Artificial Sequence
  derived and/or modified sequence
atggaccccagccgggccatccagaacgagatcagcagcctgaaggacgagagagacagggtacagaagaaaacgttcactaagtgggtgaataaacatctaatcaaggcacaaaggcacatctcagatttgtatgaggacctaagggacggtcataacctgataagcctgctggaagtcctatccggagattccctaccgagagaaaaaggacgcatgcgatttcacaagttacaaaatgtgcaaattgcacttgattacctccggcacaggcaggtcaaactggtcaatatcaggaatgacgatatagctgatggtaatcctaagctgacgcttggattaatttggaccatcattttacacttccagatctccgacattcaagtttccggacagtcagaggatatgaccgccaaggagaagctactgctatggtcccagaggatggtcgaggggtatcagggtcttcgttgtgacaactttacttcttcttggagggatggcagactgttcaacgcaatcattcaccggcataaaccactgctgatcgacatgaataaagtataccgtcagactaatctcgaaaacctagatcaggcattctctgttgcggagcgcgacttaggagtcaccaggctgctggacccggaagatgtggacgtcccacagccagacgagaaaagcataatcacctatgtatcttccttatacgacgctatgccccgcgtccctgacgtccaggacggggttagggcaaatgaactgcaactcaggtggcaagagtaccgagagctggtgcttctcctcctgcagtggatgaggcaccataccgccgccttcgaggaaaggagatttccctcctctttcgaggagattgaaatattatggtcacagtttctgaagttcaaagagatggagctcccagctaaagaggcggacaaaaatagaagcaagggcatatatcagtcactcgagggcgcggttcaggctggacagttaaaggtgccaccagggtaccacccgttggatgtggagaaagagtgggggaagctgcacgtggcaatccttgaaagggaaaaacagttgcgcagcgagttcgagcgtctggagtgcctgcagcgcatcgtgacaaagttacagatggaggctggcttatgcgaggaacagctcaaccaggcggatgcactcctccagtctgacgtacgcttgttagccgccggcaaggttccacagcgggccggggaggtagagcgggatctggataaagctgattctatgatccggctgttgtttaatgatgtacaaaccctgaaagacggacgccatccgcagggcgaacagatgtatcgcagggtgtataggctgcacgaaaggctggtggctatccgcactgagtataacctcaggcttaaggcaggggtggctgcccctgcaacgcaagttgcccaggtaacactacaaagtgtccagaggcgacctgagctcgaggattctacactgcggtatctgcaggatttgcttgcctgggtcgaggagaaccagcaccgagtggacggcgccgagtggggcgtggatttaccgagcgtcgaggcgcaactgggcagtcaccgtggcttacaccaatccatcgaagaattccgggctaagattgagagagcacggagcgatgaaggccaactcagccctgcaactagaggtgcataccgggattgcctggggcgcctggatttgcagtacgctaagttgctcaattcttctaaagctcgattgagaagcttggaatccctgcactctttcgttgccgccgccacaaaggagctgatgtggctgaacgagaaggaagaagaggaggtgggattcgactggtctgacagaaatacgaatatgacagccaagaaggaatcttatagcgctctcatgagggaactggagctaaaggagaaaaaaatcaaagaattacagaacgccggagacaggctgctgcgggaagaccaccctgctcgtccaactgtagaaagctttcaagctgctttgcagactcaatggagctggatgctgcaactgtgctgctgtattgaagcacatctcaaggagaatgcagcatacttccagtttttttcagacgtaagagaggcggagggtcagctccagaagcttcaagaagcacttcggcggaagtactcatgtgatagatcagctacggtgacgcgcctcgaggacctcttacaggacgctcaagatgaaaaagagcaactcaacgagtataaaggccacctgagcggactggcgaaacgggcaaaagctgtagtccagcttaaacctcgccatcccgcacatcccatgaggggccgcctgcccctgctggcagtgtgtgattacaaacaggtggaagtgacagtacataagggcgacgaatgtcaactggttgggcccgcccaacccagccactggaaagtgctcagttcctccgggtccgaagcagcagtgccctctgtttgcttcctggtgccgccccccaaccaggaagcccaggaagcggtgacccggctggaggcccagcaccaggccttagtgacactatggcatcagctgcatgtggatatgaagtctctgcttgcctggcagtccttacggcgggatgtgcaactcatacggtcatggagtctggctacgttcaggaccctcaagcctgaggaacagcgtcaagctttgcacagccttgaactccattatcaagccttcctgcgcgatagccaggatgccggtggctttgggccagaagacagactgatggccgagagggagtacgggtcatgctcccaccactatcagcaattgctgcagtctcttgaacagggcgctcaggaagagtcaaggtgtcagagatgtatttcagaactgaaagacattaggctgcagctcgaggcctgcgagaccagaacggtgcataggttaaggcttccgctggacaaagaacccgcacgggagtgcgcccagcggatcgccgaacagcagaaagcccaggccgaagtggaaggtttaggcaaaggtgttgccagactgagtgccgaagctgaaaaggttctggccctgcccgaaccatctcccgccgccccgactcttagaagtgaactggagctcacattgggcaagctggagcaggtgcggtcccttagcgcaatctacttagagaagctgaagacaataagtttagttattcgcggcactcagggggccgaggaagttctgagggcacacgaggaacagcttaaagaggcccaggccgtgccggccaccctgccggaactggaggcaaccaaagcctccttgaagaagctccgggcgcaggccgaagcccagcagcctacattcgacgctcttagggacgagctgagaggggcacaggaggtgggcgaacgactgcagcagagacacggtgaaagagatgtcgaagtcgaaagatggcgcgagcgtgtggcccagctcctggagcggtggcaggccgtgctggcccaaacagatgttcgacagcgcgaactcgagcaactgggcaggcagctcaggtactatagggagtcagccgaccctcttggagcatggcttcaagatgcacggcgccggcaggaacagatccaagccatgccccttgcagattcacaggccgtaagagagcagttaaggcaggagcaagccttgctcgaggagatcgagcgccacggcgaaaaagtcgaggagtgccagagatttgctaaacaatacattaatgccatcaaggactacgagctacagcttgtcacctacaaggctcagctggagcctgtggcctcaccagctaagaaacctaaagtgcagagcggttccgaaagcgtcatccaggaatacgtcgacctgcgcacgcattactcggagctcacaaccctgacatctcagtacatcaaattcatcagcgagaccctgcgtcgcatggaagaagaagaacgactagcggagcagcaacgtgcagaagagagggagagactggccgaggttgaagccgctctagagaagcagagacagttagccgaggcgcatgcacaagccaaggcacaggcggagagggaagctaaggagctacagcagaggatgcaggaagaagtagtccggcgcgaagaggccgcagtcgacgcacaacagcaaaagcggtcaattcaggaggaactgcagcagctgaggcaaagcagcgaggctgaaatccaggcgaaggcccgtcaagccgaggccgccgagaggtcccggctgcgaattgaggaggagatccgtgtggtgcgcctgcagctggaagccaccgaaaggcagcgcgggggcgccgagggcgaactgcaagccttaagagccagagctgaggaagcggaggctcagaaaagacaagctcaggaggaggctgagagattgcgaagacaggtgcaggacgaatctcagagaaagagacaggccgaggtggaactcgcaagtcgagtgaaagcagaggccgaagccgctcgtgaaaaacagcgcgcgcttcaggctctggaggagcttcgactgcaagcagaggaagcagagaggcgtctgcgacaggccgaggttgaacgagcccgccaggtacaggtggctttagagactgcacagcggtctgccgaggccgagctgcagtcaaaacgggcttcatttgcagaaaagacagctcaactggagagaagccttcaggaggagcacgtagccgttgcgcagctgagggaagaagctgagaggcgggctcagcagcaggctgaggctgaacgggcccgtgaggaagccgaaagggagttggagagatggcaacttaaggccaacgaagctctccgtctgcgccttcaagccgaggaggttgcccagcagaagagtctggcacaggcggaggccgagaaacaaaaggaggaggcagagcgcgaggctaggagaaggggcaaagctgaggagcaggccgtgcggcaacgcgaattggcggagcaagaactggagaaacagcgacagttagccgagggaacagcccagcagcgcttggctgccgagcaggagctaatacgcctgcgagccgagactgagcagggagagcagcagcgccaactgctcgaagaagagcttgctcgccttcagagggaagcggcagccgccacccagaaacggcaggagctagaagccgaacttgctaaggtcagggcagagatggaagtgcttcttgccagcaaagctcgagccgaagaagagtcacgctccaccagtgaaaaatccaaacagcgcctggaggctgaggccggcagatttcgggaacttgcggaggaggccgcccgcctccgcgcccttgctgaggaagctaagcggcagaggcaactggccgaagaagatgccgctcgccaacgcgccgaggcggagcgggtgctagccgaaaaactcgccgctattggggaagctacccgtctaaagaccgaagcagagattgctctcaaagaaaaggaggctgaaaatgagcgcttgcgccggttggctgaggatgaggcctttcaaagaagacgactggaagagcaggctgcgcagcacaaggcagacattgaggaacgcttggcccagctccgaaaagcttctgatagcgagcttgaaaggcaaaaaggactggtcgaagacacactcagacaacgacgtcaggtggaagaggagatactcgccctcaaagcaagcttcgaaaaagcagccgccggcaaagctgagttggagctggaactaggcagaatccggtcaaatgcagaggacactctacgaagcaaggaacaagccgagctggaggctgcaagacaacgccagctggctgccgaggaagagcggaggcgaagggaggccgaggaacgggtgcagaaatccctcgcagccgaggaggaagcggcaagacagcggaaggcagccctggaggaggttgaaagactcaaagccaaagtcgaggaggctagaaggcttcgggagcgcgctgaacaggaaagcgctaggcagttgcagctggcgcaggaagccgctcagaagaggttgcaggcggaagaaaaggcacacgcctttgctgttcagcagaaggagcaggagttgcagcagactcttcagcaagaacagtctgtgttagatcagctaaggggggaagctgaagcagccaggagagccgccgaggaggccgaggaggctagggtacaggctgagcgggaggccgctcagtctagacggcaggtggaagaggctgaaagattaaagcagagcgctgaggagcaggcccaggcccgcgcccaggcccaagcggctgccgagaagctgcgcaaagaggctgaacaggaggcggcccgccgtgctcaggctgagcaggccgccttgcgacaaaagcaggccgcagatgccgagatggaaaagcacaagaagttcgccgagcagactctgcgtcagaaggctcaggtcgagcaagaactaaccacattgagactgcagcttgaagaaaccgatcaccagaagaacctgcttgatgaagaattgcaacggctcaaggcggaagccacagaagccgcccgtcaacgctcccaagtggaggaggagttgttctcagtgcgtgttcagatggaagaactttccaagctcaaagctagaatagaggctgaaaaccgcgccctcatactgcgggacaaggataatacgcagcgattcttgcaagaggaagcggagaaaatgaagcaggtggcagaggaagccgcacgactctctgttgcggcccaagaggccgcacgtctgcgacagctggctgaggaagatctcgctcaacagagggctctggctgagaagatgttgaaggagaaaatgcaggctgtgcaggaggcaacgcggttaaaggctgaagcagagctgctgcaacagcagaaggagttagcgcaggaacaggcccgtcggctgcaggaggataaggagcagatggcccagcagctggctgaggaaactcagggctttcagaggacactagaggcagaacgacagcgtcagctcgaaatgtcagcggaagctgagcggcttaaactgcgagttgcggaaatgtcacgggcacaggcgcgggccgaagaagatgcgcagcggtttagaaaacaagcggaggaaattggagaaaagctgcaccgcaccgagctagctacacaggaaaaagtgacgctggtgcagactctcgaaatccagcgacagcagagcgatcacgacgccgagcgactgagagaggcaatcgccgaactcgaacgggagaaggagaaactgcagcaggaggctaaattgctgcagttaaagagcgaagagatgcagacagttcaacaagaacagctcctgcaagagactcaggcactgcagcagtcctttttgtctgagaaagattctctgctgcagcgtgagcgctttattgagcaagaaaaagccaagctcgaacagttgttccaggacgaggtcgcgaaagcacagcagttgcgggaggagcagcagcgccagcagcagcaaatggagcaggaaagacagaggctagtcgctagtatggaagaggcaaggagacgacaacacgaagccgaagagggtgtgcgccgaaagcaggaggagctgcagcagctggagcagcaaaggcggcagcaggaggaactacttgcggaggaaaatcagcgcctcagggagcaactccaactccttgaagagcaacaccgcgctgcgttggcacattccgaagaagtcaccgcctcacaggttgccgccaccaaaaccctcccaaatgggcgggacgctcttgatggtccagcggccgaggccgagcccgaacatagcttcgacgggttaagacggaaggtgtcagcccagcggcttcaggaggcgggtatcctgtccgcagaagagctgcagcgcctggcccaagggcatactaccgtggatgaattggctcggcgggaagatgtgaggcactaccttcaagggcgctctagcatcgccggtctccttttaaaggcaacgaacgagaagttgtctgtgtatgctgcactgcaaagacagctgttgagccccggcacagcactcattttgctggaagctcaggctgccagcggctttctgctagacccagtgagaaataggcgactgacagtgaacgaggccgttaaagagggcgtggtgggccccgagttacatcataaattactgagtgcagaacgtgctgtcaccggatacaaggatccttatacaggacagcagatttctctgtttcaggccatgcagaagggactcattgtccgcgaacacggtatcaggcttttagaagctcaaattgcaacgggaggggtaattgacccagtccatagccatagagtgccagtggatgtggcctaccggcgagggtatttcgatgaggaaatgaacagggtgctggcggatccgtctgacgatacgaagggttttttcgacccaaacactcatgagaatctgacttacctccagcttctggagagatgcgttgaggatcccgaaacaggcctctgcctgctgcctctgacggataaagcagctaagggaggagagcttgtgtatacagattctgaggcgagggacgtcttcgagaaggccactgtcagcgcgcctttcggcaagttccaggggaagacagtgaccatttgggaaattattaacagtgaatacttcacagcagagcagcgcagggacttactgcgacaatttagaacaggtagaataacagttgaaaagatcatcaagattataatcaccgtagtggaagagcaggaacagaagggaaggctctgtttcgagggactcaggagtctggttccggccgcggaactattggagtcacgcgttatcgatagggagctgtatcagcagctccaaaggggagagcgcagtgtgagggatgttgctgaggtggataccgtcaggcgagcactgcgcggcgccaacgtcatagctggcgtctggctggaggaggccggacagaagctgtccatatacaacgctctgaaaaaggatttgctgcccagcgacatggctgtcgccctgctggaagctcaggctgggaccggccacattatcgatcccgctacaagcgcacggttaacggttgatgaggctgttcgagccgggctcgtcggtcctgagtttcacgaaaaacttctgagtgctgagaaggccgttactggctatcgggatccatacactggccaaagcgtcagcctattccaggctctgaaaaagggcctgatccctagggaacagggactcagactgctcgacgcccagctaagcactggagggatagtggatcccagcaaatctcacagagtgcctttggatgtagcttgtgccaggggctgcctggatgaagaaacttccagggctctaagtgcccctcgagccgacgccaaagcctattctgacccgagtactggagaacccgccacatatggcgagctgcagcagcggtgtcgcccagatcagcttacaggactaagtctgctgccacttagtgagaaggccgcacgggcgcgtcaggaggagttgtatagcgagttacaggcaagggaaacctttgaaaaaacacccgtcgaagttcctgtggggggcttcaaaggaagaaccgtcactgtgtgggagctgatctccagcgagtacttcacagccgaacagaggcaggaactattgagacaatttcgcactgggaaggtgaccgttgaaaaagtgataaagattctgattaccatcgtggaggaggtcgagaccctccgccaggaacggctgtctttttccggactgagggcccccgtgccggcctccgagcttctggcatcaggagtgctgtcgagagcacagtttgagcagctgaaagatggaaagacgactgtgaaggacctctctgagctgggcagcgtgcggacgctgctacaggggtccgggtgcctcgctggaatctatctcgaagacactaaggaaaaagtcagtatttatgaagctatgcgaagaggccttctccgcgctaccacagctgccttgttgctggaggctcaggccgctaccgggtttttggtggatcccgtgaggaaccaaagattatacgtgcatgaggcagtcaaggcaggtgtggtgggcccagagcttcatgagcagcttttgtcagctgagaaagctgtgacgggctaccgggatccctattccggaagtacaatctccctgtttcaggccatgcagaagggcctcgttctgagacaacacggcatccgcctactcgaggctcagattgcaaccggtgggataatcgaccccgtgcacagtcacagagtgcctgttgatgtagcctaccagcgaggctacttctccgaggaaatgaatcgggtactggcagatcccagcgacgataccaaagggttcttcgatcccaacacgcatgagaacctgacctatcgccagcttctggagaggtgcgttgaagacccggaaactggtctgcggctgctgcccctaaagggcgccgaaaaagcagaagtcgtggaaacaactcaggtttataccgaggaagagactcggcgcgcatttgaggagactcaaatcgacatacccggaggcggcagccatgggggatcaacgatgagcctctgggaagtaatgcagagtgatctgatccccgaggaacagcgggcccagctcatggccgactttcaggctggacgtgtgaccaaggaaagaatgataataatcattatagaaatcattgaaaagacagaaataatacggcaacagggactggccagttacgactacgtgaggcgccgtcttacagctgaagatctcttcgaagcacggatcatttccttagagacctataacctgttgcgcgaaggaacccggtctctgagggaagccctggaagccgagagtgcctggtgctatttgtacggcacaggtagcgtggcgggcgtgtacctccccggctcgcggcagaccctaagcatttaccaagccctgaagaaggggctgttgagtgcagaagtcgccagactactgctggaggcccaggctgctaccggctttcttctggatcccgtgaaaggggaacggcttactgttgatgaagccgttagaaagggactcgtgggccccgagttgcacgatcgactcttatccgctgaacgtgccgtcaccggctacagagatccctataccgagcagactatttcgttgttccaggctatgaaaaaggagctgatccctacagaggaggccctacgcctgttagacgcacagctggccacgggaggcatcgtcgatccccggcttggctttcacctacccctggaggtggcttaccagcggggctatctgaacaaggacacacatgatcagctcagcgaaccgtctgaggttaggagttacgttgacccctccaccgatgagcggctgtcctacacacagttgctgagacgatgcagacgcgacgacgggaccggccagctattactgcctttatccgacgcccggaagctgacattcagaggcttacggaaacagatcacgatggaggaactggttcgatcccaggtgatggacgaggcgacggctttacagctgcgagagggtctaacgagcatcgaggaagtgacaaagaacttgcagaagttcttggagggcacgagctgcatcgccggtgtgttcgtggacgcgacgaaagagcgtctgagtgtgtaccaggctatgaagaagggaatcatacggcccgggacagcttttgaactacttgaagcacaggctgctacaggctatgtaattgatcctataaaaggactgaagctcactgtcgaagaagcagtgcgcatgggcatcgtaggaccagagtttaaggacaagctgttgagcgctgaaagggccgtgacaggctacaaagacccatactccgggaagctcatcagcctgttccaggccatgaaaaagggtttgattcttaaggatcacgggatccgcctcctggaggcacagattgcgaccgggggaatcatcgaccccgaagagagtcacagactccctgtggaggtggcatataaaaggggactgttcgacgaagagatgaatgagatattaacagatccctccgatgacaccaagggcttctttgatcctaatactgaagagaatctaacgtacctccagctcatggaacggtgcattaccgatcctcaaactggactttgtctccttcctctcaaggaaaaaaagagggaacggaagacctccagcaagagcagcgtgcgaaagaggcgggtagtgatagtggaccctgagactggtaaagaaatgtccgtctatgaagcgtacagaaagggcctaattgaccaccagacctacctggagctttccgaacaggagtgcgaatgggaagagatcaccattagctcgtctgatggcgtggttaaatcgatgatcatcgatcgcagaagcggcagacagtatgacatcgatgatgcaattgctaaaaacctaatcgataggtccgccctggatcagtacagagccggtaccctgagtattaccgagttcgcagacatgctgagcggtaacgcaggtggcttccgctctcggtccagcagcgtgggctcaagctcctcgtatcccattagtcctgcggtgagccgcacccaactggcgtcctggagcgatcccacagaggagaccggtcccgtggccgggatactcgataccgagactctggaaaaggtgtcaataaccgaggccatgcaccgtaatttagtggacaatattacgggacagcggctgcttgaggctcaggcttgtaccggggggatcatcgatccaagcaccggagaacgttttccagttacagatgcggttaataaaggcttagtcgataagattatggtcgatagaatcaatttggctcagaaggcgttctgcggctttgaggaccctcgtacaaagaccaaaatgagcgccgcccaggccttaaagaaaggatggctgtactacgaagctggccagaggtttctggaagtgcagtatttaactggtgggctcatcgagcccgacacaccagggcgggtgccactggatgaggcactgcagcggggaactgtggatgctcggacagcccagaagctgagagacgtgggcgcatatagtaaatacctcacctgccccaagacaaagttgaagatttcttataaagatgctctggatcggtcaatggtggaagagggcaccgggctgaggctgcttgaagcggccgctcagagtacgaagggctattacagcccttactctgtgagtggctccgggagtacagcagggtcgaggaccggcagtcggaccggaagcagggcaggcagtaggcgaggatcatttgatgctaccggaagcgggttctcaatgaccttcagctcttcttcttatagcagctccggatacggaaggcggtacgcttccggatctagtgcttcattgggaggtcctgaaagcgctgtcgcatag

SEQ ID NO: 262164 - DNA, 13602 bp, Artificial Sequence
  derived and/or modified sequence
atggccggccccctgcccgacgagcaggacttcatccaggcctacgaggaggtgcgggagaaatataaggatgaaagggacagggtgcagaagaaaacgttcacaaagtgggttaacaagcaccttattaaggcccagcggcacattagcgacctgtacgaagatttgagagacgggcataacctcatctcgctcctggaagtgctgtcaggcgattcactcccccgagagaagggcagaatgcgcttccataagctccagaacgtgcagatagctctagactacctgcgtcacaggcaggttaaactggtgaatatccggaatgatgatatcgcagatgggaaccccaagcttacactcggcttgatttggacaatcatcctacatttccagatatctgacattcaggtctccggtcaatccgaggatatgactgcgaaagagaagctacttctgtggtctcagaggatggttgagggctatcaaggtctccggtgtgacaacttcacttccagttggcgtgatggccgcttatttaatgctatcatacataggcacaaaccgttactcattgacatgaacaaagtttaccggcagaccaaccttgagaacctggatcaagccttttctgtggctgagcgagatcttggtgtgacgcgtttgctggaccctgaagatgttgatgtcccacagcctgatgaaaagagtatcatcacttacgtttctagtctctacgatgccatgccccgagtccccgacgtgcaggatggcgtgcgggccaacgaattgcaactgcgctggcaggagtacagggagctggtcctgctgcttttgcagtggatgcgccaccataccgcagccttcgaggagcgacggtttccttcaagctttgaggagatcgagatcttgtggagccaattccttaagtttaaggaaatggagctgcctgctaaggaggcagacaaaaataggtctaagggaatatatcaatccctcgagggagcagtccaggccggacaacttaaggtgccccctgggtatcacccccttgatgtggagaaagagtgggggaaactgcacgtcgctattctcgagagggaaaagcagttgcgaagcgaattcgagagactggagtgtctgcagcggattgtgacaaaattgcagatggaggccggactgtgcgaggaacagctgaatcaggccgatgctctcctacagtccgacgttagattactcgccgccggaaaagttcctcaacgcgccggcgaagttgagagagacctggacaaagccgactctatgattaggttgctgtttaacgacgttcaaacccttaaagacggcaggcatcctcaaggagaacaaatgtacaggcgcgtatatagactgcatgagcggttagtggctattaggacagagtataacctccgtctaaaggcgggggttgccgcccccgctactcaagtggcacaggtgaccttacagtctgtgcagcgccgacctgagctggaggactctaccctccgctatctccaagatctgctagcctgggtggaggaaaatcagcacagggttgacggggccgagtggggagttgatctccccagcgtagaagcccagctgggctctcaccgtgggctgcaccagagcatcgaggagttccgcgccaagatagagcgcgctcgcagcgatgaaggtcaactctcccctgcaacacgcggcgcttaccgcgactgtctcggaaggctggatcttcagtatgccaaattattaaattctagtaaggcgagactgaggtctttagaatcattgcattcttttgttgccgcagccacaaaggagctgatgtggctgaatgagaaggaggaggaagaagtggggtttgattggtctgacagaaacacgaacatgacagctaagaaggaaagctattccgcgctaatgcgggaattggagcttaaggagaaaaaaatcaaagagcttcagaacgcgggggatagacttctaagggaggaccacccggcccggcctaccgtcgaatcattccaggctgcattgcagacacagtggtcttggatgctccagctctgttgttgtatcgaggcccacctcaaggagaacgccgcttatttccagttcttctctgatgtccgggaagctgaaggacagctccagaagctccaggaggccctgcgtcggaaatactcttgcgaccgatctgccacggttactagactggaggatttgttgcaagatgctcaggacgagaaagagcagctcaacgagtataaaggccacttgagcgggttggctaaacgtgcaaaggcggttgtgcagctgaagcccaggcaccccgctcaccctatgcgaggacgactgcccttattagccgtctgcgactacaaacaggtggaggtgaccgtgcacaagggggacgaatgccagctggtaggtcctgcccagcccagccattggaaggttctcagcagtagcggctctgaggcagccgttccctccgtgtgtttcttggtgcccccacccaatcaagaggcccaagaggcagttaccagattagaagcccaacaccaggcattagttaccctctggcatcaattacatgtcgacatgaaaagccttctggcatggcaatcgcttcgtcgagatgtccagcttattcgatcatggtcgctagcgacattcagaacactgaagcctgaagaacaaaggcaggcactgcatagtctcgagctgcactatcaagctttcttgcgcgacagtcaggacgccgggggctttggtccggaagatcggctgatggccgaaagagagtatgggtcatgttcccaccactaccaacagctactccagagcctggagcaaggagcacaggaagaaagccggtgtcaaagatgcatttccgaactcaaggacataagactccagctcgaggcatgtgaaacccgcacagttcatcgcctgcgccttcctcttgacaaggagcctgcgagggagtgtgcccagcgaatcgcagagcagcagaaggcgcaggccgaagtggagggcttagggaagggcgttgcccggctgtccgcagaagcggaaaaggttctagctctccccgagccaagtcccgctgccccaaccctgcgtagcgagcttgaattgactctcgggaagcttgagcaagtgaggagcctcagtgccatttacctcgagaaattgaagaccatctctctggttattcgtggcactcagggggctgaggaggtactgcgggctcacgaagaacagttgaaggaagctcaggctgtgccggctaccctgccggagttggaggccacaaaagcctctctgaaaaaactgagagcccaagctgaggcgcagcagccaacattcgatgctctgcgggatgagctgagaggagcacaagaggttggggaaagactgcagcagcggcacggtgagagagatgttgaggtggagcggtggagagaaagggttgctcaactcttagagagatggcaagccgtacttgcgcagactgacgtgaggcagcgagagctggagcagttgggacgacagctccggtactaccgagaatccgcggatccactgggagcctggctccaggatgcgcggcgtagacaggagcagatacaggcaatgcctctggccgactctcaggccgtgagggagcaactgcgtcaggaacaggctctcctagaggagatcgagcgccacggagaaaaggttgaggaatgccaacggttcgccaagcaatatatcaacgcgatcaaagactacgaattgcagctggtgacttacaaggcccaactcgaaccggtggcatctcccgcgaagaaacctaaagttcagagcggcagcgaaagcgtgatacaggagtatgtcgacttgcggacgcattatagtgagctgaccacattgacgtctcaatacatcaagtttataagcgaaaccttgcgacggatggaggaagaagaacgactcgctgagcaacagagagcagaagaaagagagaggcttgccgaagtggaagctgctttagagaaacagcgacagttagccgaagcccacgcacaagccaaagcccaggccgagcgggaggctaaggaactgcagcagagaatgcaggaagaggtagtgagacgggaggaagcggctgtcgacgctcaacagcaaaaacgcagcattcaggaagagctgcaacagctgagacagtcatctgaggctgagattcaagcaaaggcccggcaagccgaggccgcggaacgcagtaggcttcgtattgaggaggaaattagggtagtgagactgcagcttgaagccacggaaaggcagcgggggggcgccgagggagaactgcaggccttgcgcgctagagccgaagaggctgaagcacagaaacgccaggcccaggaagaggcggaaaggctccggcgccaggtgcaggacgagtcccagcgaaaacggcaggcagaagtggaactggcgtctcgggtgaaagctgaagcggaggccgcacgggagaaacaaagagccctgcaggctcttgaagagctgagacttcaagctgaggaggccgagcgcagactgagacaggccgaagtggagcgcgcaaggcaagtgcaggtagctctggagaccgcccagagaagtgccgaggccgagttgcagtctaagcgggcttccttcgcagagaagactgcacagttggagaggagcctccaagaggaacatgtggccgtggcgcaactccgcgaagaggctgaacgaagagcacagcagcaagcagaagcagaacgagcaagagaagaagcggaacgagagttagagcgatggcaactgaaggccaatgaagcccttcgtctaagactgcaagctgaagaggttgcccagcaaaaatcacttgcgcaggccgaggcagagaaacagaaggaagaggccgagcgggaggccaggcggaggggaaaagcagaggagcaggccgtcaggcagcgcgaactggccgaacaggagctggaaaagcagcgtcagctggccgagggaaccgcacagcagagactcgccgccgagcaggagctgatccggttgagggccgagacggagcagggagaacagcaaaggcagttgctcgaggaagagctcgccaggttacagcgggaggcagcagccgctacccagaagcggcaggagcttgaggctgaacttgctaaagttcgggctgagatggaggtcctgctggccagcaaagcacgcgcagaggaggaaagtcgctccacctccgagaagtctaagcaacggctggaagccgaagcaggccggtttagagagctcgccgaagaagcagctcgattgagggccctggcagaggaggcgaagcggcagagacaactggctgaggaggatgcggcaagacagcgggctgaggctgagagagtactggccgagaagctcgccgccatcggcgaggctaccaggctgaagacagaagccgagatcgctttgaaggagaaggaagccgagaacgaacgtctgagaagactggcagaagacgaggcctttcagcgtaggcgactcgaggaacaggctgcacaacacaaggcagatatcgaggagaggctggcgcaactgcgcaaagcatcggatagcgaactcgaaagacagaaaggactcgttgaggataccctgcggcagaggagacaggtggaagaagaaatacttgcacttaaagcgagttttgagaaggccgcggctgggaaggctgaactggaactggaactgggccgcataaggagtaacgctgaagacactttgcggtccaaagaacaggcagagctggaagctgcccgccagcggcagctggcagccgaagaggagcggcgacggagagaggctgaggaacgcgtccagaaatccctggccgcggaagaagaagcagcccgccagcgtaaagccgcactggaagaggtggaacggttgaaggcaaaagtcgaagaggcacggcggctgcgtgagcgggccgagcaggaatcagcgcgccagctgcagctcgcacaagaagccgcgcaaaagcgactccaggctgaagaaaaggcccatgcctttgccgtgcaacaaaaagaacaggagttacaacagacactccaacaggaacaaagcgtcctcgatcaactgcggggggaagccgaggcagcacgaagagcagccgaggaggcagaagaagcaagagtacaggccgaacgcgaagccgctcagtccaggagacaggtggaggaggctgagagactcaagcaaagcgcggaggaacaagctcaggcaagggcgcaggctcaggctgccgctgagaagctccgcaaagaggccgagcaggaagcagcgcgccgtgcccaagccgaacaggctgcgttgcgtcaaaaacaagccgcggacgctgaaatggagaagcacaaaaagtttgctgagcaaacattacgccaaaaagctcaggtggaacaggaactaaccacacttagactccagctggaggagactgatcaccagaaaaatctcctggatgaggaacttcagagactgaaggcagaggccactgaagcggccagacagcgcagccaggtggaagaggagttgttttccgtaagagtacagatggaggagctgagcaaactgaaagcccgtattgaggcagagaaccgcgcccttattctgagagataaagacaatactcagcgattcctacaagaagaggctgagaaaatgaagcaggtggccgaggaagccgccagactctcggtggctgctcaggaggctgctcgtctacgacaactcgcagaagaggatttggcccagcaacgagcactggccgaaaagatgcttaaggagaagatgcaggccgtccaggaggccacccggttaaaagcagaagctgagctgctgcagcagcagaaagaattggcccaagagcaggcgcggagattacaggaggacaaagaacagatggcccagcaactcgctgaggaaactcagggcttccagagaacactggaggccgagcggcaaaggcagctggaaatgtctgccgaggcagagcgccttaaattgagagtagcagaaatgtcaagggctcaggcgagagccgaggaggacgcgcagcggttcaggaaacaggccgaggaaatcggcgagaaactgcaccgcacggaacttgctacccaggaaaaggttaccctagtacagactctcgagattcagcgccagcaatctgatcacgacgccgagagactcagagaagccattgctgaactggagcgggaaaaagaaaaacttcagcaggaggctaagctccttcagttgaaaagtgaggagatgcagacagttcagcaggaacagttgctgcaggagactcaggcactgcagcagagtttcttaagtgaaaaggactctcttctccaacgcgagcggttcatcgagcaagagaaggccaaacttgaacaactatttcaggatgaagttgcgaaggcgcagcagcttcgagaagagcaacagcgccagcaacagcaaatggagcaggaacgccagcgcctagttgcctcaatggaggaggcacgcagaaggcaacacgaggcagaggaaggagttcggcggaaacaagaggagttgcagcagcttgaacaacagaggcggcagcaagaggaattgcttgcggaggagaaccagcggttgagggagcaactacaactgctcgaagaacagcatcgagcagccctggcccactccgaggaggtgactgcctcccaggtggccgccacgaagacattgcccaatgggcgcgacgctctagacggacccgctgccgaagcagagcccgagcattctttcgacggtctccgccgcaaggtcagcgctcagcggctgcaggaggcaggcattctgagcgctgaagagctgcagcgcttggcccaaggccacacaaccgtcgatgagctggctcgccgggaggatgttcgccactacctccagggacgaagctctatagctgggctgctcttaaaggctacaaatgagaagctgtccgtgtacgctgcattgcagaggcagctcctgtcccccgggactgcgctgatactgttggaagcccaggctgcctcgggcttcctgttggatccagtgcggaaccgccggcttaccgtaaatgaagccgtaaaagaaggcgtggtcgggcctgagctccaccataaattgttatccgcagagcgagcggtgaccggttacaaggacccctacaccggacagcaaatctccctcttccaagctatgcagaaggggctcatcgtgagagagcacggcattcggctgctggaggcacagattgcgactggcggtgtcattgatcccgttcattctcacagggttccagtcgatgtggcataccgtcgtggctatttcgacgaagaaatgaatagggtgctggctgatccctccgatgatacaaaaggcttctttgacccaaacacacacgagaacctgacttacttgcagttattagagcgctgcgtggaggaccctgagaccgggctgtgcctgttgcctctgactgataaagcggcaaaaggcggagaacttgtttacaccgacagtgaggctcgggacgtttttgaaaaagctaccgtatccgctccttttgggaaatttcagggcaagactgtcacgatttgggaaattatcaacagcgaatacttcaccgccgagcagcgccgtgatctgctcagacaattccgcaccgggagaattaccgtggagaagatcatcaaaatcataataacagtggtggaagagcaggaacagaagggacgactgtgttttgaaggcctgcgttcacttgttccagccgcagagctgctggagtccagggtaattgatcgggaactgtaccaacagctgcagaggggagaacgctccgtgcgagatgtggcggaggtcgacaccgtccgaagggccctgaggggagccaatgtaatcgcgggggtgtggctagaagaagccggccaaaagttgtctatctacaacgctctaaaaaaggatctccttccttctgatatggcagtagctctgctggaggcacaggccggaacaggacacataatagatccagctacttcagcccggctgactgtggatgaggcggtgagggctggtctggtcggcccagagtttcacgaaaagcttctgtccgccgagaaagcagtcacagggtacagggatccatataccggtcagagtgtgtctttgttccaagccctaaagaagggactaatccctagagagcaaggactccgcctcctagatgcccagctgtcaacaggcggaatcgtggaccctagtaaatctcaccgagtgccactggatgtggcgtgcgctaggggatgcttagacgaggagaccagtagagctctttcagccccacgagccgatgctaaggcctatagcgatccctctaccggcgagcctgctacgtacggggagttgcagcagaggtgccgcccggatcaattaacagggctgtctctgctccccttgtccgaaaaggccgcacgggcaagacaggaagaattgtattcagaactgcaggccagagagacctttgagaagactccggtggaagtgccggttgggggctttaaaggccggaccgttaccgtgtgggaattgataagtagcgaatatttcaccgctgaacagcgtcaagagctcttgcggcaattccgaacgggcaaggtgactgtagagaaggtgatcaagattttaattaccatcgtagaagaggtggagaccctgcggcaagagcggctctctttctctggactgagggctccagtacctgcttctgagctgttggcttccggcgtgctgtcaagagcccagtttgaacagcttaaagatggcaaaaccaccgtgaaggacctcagtgagctgggttccgttaggacgctgctgcaggggagtgggtgcttagcagggatttatctggaggacacaaaagaaaaggtgtcaatttatgaggcgatgagacgcgggctgctcagggcaacaactgcagccttactgctcgaagcccaggctgctactggatttcttgttgatccagtccggaaccagagactgtacgtgcacgaagccgtgaaagctggcgtagtcggtcccgaactgcacgagcagctcctctctgccgaaaaggcagtgacaggatatcgggatccatactccggaagcactatctcgctgtttcaggccatgcagaagggcctggttcttcgccagcatggcatccggctgctggaagctcagattgccactggcggtataatcgacccagtgcactcccaccgcgttcccgttgatgttgcatatcagagagggtatttctctgaagaaatgaaccgagtgctggcagaccccagcgacgacaccaagggcttcttcgaccccaacactcacgagaacctcacttacaggcaacttctggaacgctgtgtggaagatcctgaaacaggcctgcgcttactcccactgaagggagccgaaaaggccgaggtcgtggagaccactcaggtctatacagaggaggaaacgagaagagcatttgaagagacgcagatcgatatacccggcggcggaagtcatggggggagcactatgagtttatgggaagtgatgcagagcgacctcatcccagaggagcaaagagcacagctgatggccgactttcaagccggccgcgtcactaaggagagaatgatcattatcatcatcgaaatcattgagaagacggagatcatacgacagcaagggttggccagctacgattacgtccgccgccgcctcacagccgaggatctctttgaggccagaataatttccctggagacatacaatctgttacgcgagggtacgcgaagcctgcgggaggctttggaagccgagtctgcatggtgttatctgtatggaacggggagcgtcgcaggagtttatctcccaggttcgaggcagactctgtctatttaccaggctttaaagaagggactattgagcgcggaggtagcgcgtctgttgttggaggctcaggccgcgactggcttcttattagaccctgtgaagggagagcggctaaccgttgacgaggctgtgagaaagggtctggtgggacccgagctgcatgaccgattgctgagcgcggagagagccgtaactgggtatcgcgacccttacaccgagcagactatcagtctgttccaagcaatgaaaaaggagctgataccaacagaagaggccctgcgcctgctggacgcccagctggctactggggggatcgtcgaccccaggttaggtttccacctgcccctggaggtggcctaccaaaggggatacctaaataaggatacacatgatcaattgagtgaaccttccgaggtgaggtcgtatgtcgacccctctacagacgagaggctctcctacacccagctgctgcgcaggtgtcgccgagatgacggaaccggacagctcctcctccccctgtccgatgccaggaaactgacctttcgcgggctgaggaagcagatcaccatggaggaactcgtaaggagccaagtcatggatgaggctactgccctccagctccgagaagggttgacctccatagaggaggtaacgaaaaatttacagaaatttttggagggcacatcttgtattgctggagtgtttgtggacgccactaaagagaggctgagtgtgtaccaagcaatgaaaaaggggataatcaggcctgggaccgcttttgaacttctggaggctcaagctgctaccggatatgtgatcgatcccataaaagggctgaaactgacagtggaagaagcagtgcgcatgggaatcgtgggaccggagttcaaggataagctcctatcggccgagcgcgccgtgactggctacaaagatccatattcggggaaactgatctccttgttccaggccatgaagaaggggctgatcctcaaggaccacggcataaggctcctggaagcgcagatcgccacaggcgggataatcgatcctgaggagagccatagattacccgtcgaggtagcatacaaaaggggtttgttcgatgaggagatgaacgagatactcacagacccatcagacgacacaaaaggcttcttcgacccaaacacagaggagaatctcacgtacttgcagctcatggagcgctgcattacagatccacagacaggattgtgtctcctccccctgaaagaaaaaaaacgggagaggaaaacctcctctaaatcatccgtgcgaaaaaggcgggtagtcatcgtggatcccgagacaggtaaggaaatgtctgtttacgaggcctacaggaagggcttaatcgatcaccagacctatctagaattgagtgagcaagaatgcgaatgggaagagatcaccatttcctcctcagatggcgtggtgaagtctatgattatcgaccgtagaagcgggagacagtacgatatcgatgacgccatcgcaaaaaacttaattgacagaagcgccctggaccagtaccgagctggaactctttccatcactgagtttgctgacatgttatccggtaatgccggaggatttcgctcccgtagttcatctgtcggctctagcagctcctacccaatttcgcccgccgtttccaggactcaattagctagctggagcgatcccacagaggaaactggtccagtcgccgggattttggatacagaaaccctggagaaggtgagcatcacggaggcaatgcaccgcaaccttgtggataacatcacaggacaacgactgctcgaagcccaggcatgtacaggcggcattatagacccatccacaggcgaaagatttcccgtcactgacgcagtgaacaaaggtttagtcgacaaaattatggtggatagaatcaacctggcacagaaggctttttgcgggtttgaggatccgagaacaaagactaagatgtccgccgcccaggctcttaagaagggatggctgtactatgaagccggacagcgctttttggaagtgcaatatcttaccggcgggttgattgagccagacacaccaggtcgagtgccattggatgaggcattgcagcgcggcactgtagacgcccggactgcccagaagctgcgagacgttggcgcctattctaagtacctgacatgtcctaaaactaaactcaaaatttcgtataaggatgctctggataggagtatggtcgaggagggcactggactccggctgctcgaagctgcagctcagtccacaaaaggatattattcaccctattctgtcagcggctctggcagtactgccgggtcccgcactggctcccgcactggatcccgggccggaagccggcgagggagtttcgatgcaaccgggtccggcttctccatgaccttttccagctccagttatagttccagtggctatggccgcagatatgcttccggctctagcgcgagcctgggaggcccagaatccgcagtggcctag

SEQ ID NO: 262165 - DNA, 13656 bp, Artificial Sequence
  derived and/or modified sequence
atgagcggcgccggcggcgccttcgccagcccccgggaggtgctgctggagaggccctgttggctggacggtggctgcgaacccgcccgtcgcgggtacttgtaccaacagctgtgttgcgtggacgagcgcgaccgggtccagaagaagacctttacgaaatgggtgaacaaacatctcattaaagctcagcgacacattagcgacctctatgaagacctccgggacggtcacaacctaatttccctcctagaggtgctttccggcgactcgctcccacgtgagaagggacgaatgcgattccataaacttcagaacgtccagattgccctggactacctgagacacaggcaggtgaagctggtcaacatccgcaacgatgacatcgcggacggtaatcctaaattaaccctgggccttatctggactattattctgcacttccagatatcagatattcaagtctcgggccagagcgaggacatgaccgcaaaagaaaagctgctgctgtggtctcaacggatggtcgagggctaccaggggttgcgatgcgataattttacaagcagctggcgagacggccgcttatttaacgccatcatccatagacataagcctctcttgatagacatgaataaggtgtaccgacagaccaatctggaaaacctcgaccaggccttttctgtggccgagcgagacctcggcgtgactaggctgctggaccccgaggatgtggatgtgccgcagcccgatgaaaagtctataatcacctatgtctcgtcgctgtacgatgcaatgccccgcgttccagacgtgcaggatggcgtgcgagccaatgagctacaactgagatggcaagaataccgggaattggtgttgctgctacttcaatggatgaggcaccacacagccgcctttgaagagcgacgattcccctctagctttgaggaaattgagattctatggtcacaatttttgaaattcaaagagatggaactgccggctaaggaggctgacaaaaaccgatccaaggggatctaccagtctcttgaaggggccgtgcaggctgggcagctgaaggtgcctcccggatatcacccgctggatgttgagaaggaatggggcaaacttcatgtggcaatcttggagcgggagaagcagctccgcagcgaatttgaacgactcgagtgcctgcaacggattgttacaaagctgcagatggaggcagggttgtgcgaagaacagctcaatcaggccgacgcactccttcaaagtgatgtgaggctcctggctgccgggaaggtgccgcagagagcaggagaagtagagcgagacctggataaggccgactccatgatcagactcctctttaatgacgttcagacactcaaggatggaaggcacccccaaggcgaacagatgtatcgaagagtttatcgcctgcacgagagactcgtggccattcgaacggaatacaatctgcgattaaaggctggagttgctgcacctgccactcaggtcgctcaagttacacttcagagtgtgcagcgccggccggagttagaagattctactctccggtacctgcaggatcttctagcttgggtagaagaaaaccagcatagggtggacggggccgaatggggggttgaccttccctccgtcgaggcccagctcggttctcacagggggctgcatcaaagcattgaagagttcagggcgaagattgaacgcgcccgttctgatgaagggcagctgtcacccgctactcgcggagcttatcgggattgtctcggacgcctggacttacagtacgccaagttgctgaactcatccaaggcgcgtctgagaagcctggaaagcctccactcctttgtggctgcagcgacaaaggaattgatgtggctcaacgaaaaagaagaagaagaggtcggctttgactggagcgacagaaatactaatatgaccgctaagaaggagtcatacagcgctcttatgcgagaactagaactcaaggagaaaaagatcaaagagctgcagaacgcaggggatagacttctgagagaggaccatcccgctcggccaactgttgaatcatttcaggccgcactgcagacgcaatggtcatggatgctacaactatgctgctgcattgaggcccatctgaaagagaacgccgcctactttcagttttttagcgatgtgcgagaggcggagggccagctgcagaagttgcaggaggccctacgcagaaagtacagctgtgatagaagcgccaccgtaactcgactggaggacctgttgcaggacgcacaggacgagaaggaacagctcaatgaatataaagggcacctctcaggtctcgccaaaagagccaaagcagtggtacaattgaaaccacgacatcccgcccaccccatgagaggcaggctgcctctgctggcagtctgcgactataaacaggtcgaagtgaccgtgcacaaaggcgacgagtgccaattggtaggacctgcccaaccttcccactggaaagttctctcgtctagcggaagcgaagctgctgtccctagcgtttgctttctggtgccacctcccaaccaggaagcccaagaagcggtgacccgcttggaggctcagcaccaggccttagtaactctgtggcatcagctgcacgttgacatgaagtccctcttggcctggcagtctctccggagagacgtgcagctgattagatcttggagtcttgctaccttccgcacgcttaagcccgaagagcaacgccaagcccttcatagcctggaactccactaccaagcctttctccgggattcacaagatgctgggggatttggccccgaggataggttaatggccgagcgtgagtacggctcttgcagccatcattaccagcagttgctgcaatcacttgagcaaggagcacaggaggagtctcgctgtcaaagatgtatttccgagttgaaggacattagactgcagctagaagcttgtgagacccgtaccgtgcacaggctaaggcttcctctggataaagaaccagcgcgcgagtgtgcccagcgaatagctgaacagcagaaggcccaggcggaagtggaagggttaggcaaaggagtggcccgcctgtccgctgaggcagaaaaagtgttggccctccctgaaccatctcccgctgcaccaacccttaggtccgagcttgaactgacgctcggaaagctggagcaggtgcggagtttgagtgcgatttatcttgaaaaacttaagaccattagccttgtaattcgcggcacccagggtgccgaagaagtcctgcgtgcacatgaagagcaacttaaggaggcacaggctgtgccagctaccttgcccgaactcgaggctacgaaagcttctttgaagaagctgagagctcaggcggaagctcagcagcccacgtttgacgcacttagggatgagctacgcggcgcccaggaagtgggcgaaaggctccaacagagacacggcgagagggatgtagaggtggaacgatggcgagaaagagtggcccagctactagaacggtggcaggccgtactggcacagacagatgtacggcagcgcgagttagagcaactcgggcgccagctaaggtattatcgggaaagcgcggacccactcggcgcctggctgcaggacgcacgacggagacaagaacagatacaggcgatgcccctcgcagacagccaggccgttcgggagcagcttcgccaggaacaagctctcctggaggaaatcgagcggcacggggagaaagtagaagaatgtcagcgattcgcaaagcagtatataaacgctatcaaagattatgagctgcaactcgttacatataaagcccaactggaacccgtcgcctctccggcaaaaaagccaaaagtgcagtccggcagcgagtctgtgatccaagaatacgtcgacttgcgcacgcactacagcgagttgaccaccctcacttctcaatacatcaaattcatctccgaaacactccggagaatggaggaagaggaaaggctcgccgaacagcagcgggcagaggagcgtgaacgccttgcagaggtggaagcagccctagagaagcagcgccagttggccgaagctcacgctcaagctaaggcacaggctgagcgcgaggctaaagagttacagcaacggatgcaggaggaggttgtccgtcgcgaggaggccgccgtggacgcccagcagcagaaaagatcaattcaggaagagctccagcagctgcgtcagtcctcagaagccgaaattcaggccaaggcaaggcaagctgaagctgctgaaagatctcgcctgcgcatagaggaggaaatacgcgtcgtgagactgcagctggaagcaacagaacgccagagaggcggtgcggagggcgaactccaggccctgagggctagagccgaagaggccgaggcacagaagaggcaagctcaagaagaagccgaaagacttaggaggcaagtgcaggacgagagtcagcgtaagagacaagctgaagtggagctggcctcacgagtcaaggctgaggccgaggctgcgcgtgagaaacagagagcactacaggccctggaagaattgaggctgcaggcggaggaagctgagcgcagattaagacaggctgaagttgaacgagcaagacaggtgcaagtcgcccttgagactgctcagcgatctgccgaagctgaactgcagtccaagagagcctcgtttgccgaaaagaccgctcagctggagcgcagccttcaggaggaacacgtggccgtggcacagctgagggaggaagctgagcgccgggcacagcagcaggccgaagccgagcgcgcgagggaggaggctgagagagagcttgagcggtggcaactgaaagcaaatgaggctctgagactgcgcctgcaagcggaggaagtggctcagcagaaatcacttgctcaggccgaagcagaaaagcaaaaagaggaggcggagcgggaggcaagaaggagaggcaaagcagaagagcaggctgttcggcagcgggaattggccgagcaggaactcgagaagcagagacagcttgctgaggggactgcacagcagcgactggcagccgagcaggaactgattcgacttagagctgagactgagcagggagaacaacagcggcagctcttagaggaggagcttgccaggctccagcgggaagcagccgcggcaacacaaaagaggcaagagctggaagccgagttggcaaaggtgagggctgaaatggaggttctcctggcaagcaaggctagagccgaggaggaaagtagatcgaccagcgaaaagagcaagcagaggctcgaagctgaggctggcaggtttcgggagctggccgaggaagcagccagattgagagccctcgccgaagaggctaagagacaaaggcagctggccgaggaggacgctgcccggcagcgtgccgaagccgagcgcgtgctggcagaaaagctcgctgctatcggggaggccacacgactgaaaactgaagcagagatagcacttaaggagaaggaggcggagaacgaaagactgcgccgactggcagaggacgaggccttccagcgccgcagactggaagagcaggctgctcagcataaagccgatattgaagaacgtcttgctcaattgaggaaggcctcagactctgaactggagcggcagaaggggcttgttgaggacacattgcggcagcgccgccaggtggaagaggagatcctggccctcaaggcctcattcgaaaaagccgctgccggcaaggcagagttggaactggagttagggcgtataaggtcaaatgcggaagacactctgcgttccaaggagcaggccgaactggaagccgccagacaacgacagctcgccgccgaggaggagagaagacgacgcgaagcagaagagcgggtgcagaagagcctggctgccgaagaggaggccgccaggcaaagaaaggccgctttagaggaagtagagagactcaaagccaaggttgaggaggctaggcgcctcagagaaagggccgaacaagaatctgcccggcagctccagctggcacaggaagccgctcaaaaacgcctgcaggcagaggagaaggcgcacgcattcgccgttcagcagaaagagcaggagctccaacagacattacagcaggaacaatctgtactggaccagctgaggggggaggccgaggcggcccggagggctgccgaagaggcagaggaagcacgcgtgcaggctgaacgggaggccgctcagtcccgacgccaggttgaggaagcggaaagactaaaacagtcagcagaggaacaggctcaggcacgggctcaggcccaggcagctgctgaaaaattgagaaaagaggccgaacaggaggcagcaaggcgcgcacaggctgagcaagcggccctcagacagaagcaggccgctgatgctgagatggagaagcacaaaaaattcgcggagcagaccttgcgacagaaagcgcaggtggagcaggagctgaccacccttcgccttcagctcgaggagactgatcaccagaagaaccttctggacgaggagttgcagaggctgaaggcagaagctactgaagccgccagacagcggagccaggtggaagaggaactcttcagcgtacgcgtacagatggaagaactgtcgaaactgaaggcacgtatcgaagcagaaaacagggccctcattttacgcgacaaagacaacactcaaaggtttctccaggaagaggctgagaagatgaaacaagtggcagaggaagctgcacgcctttccgtggccgcccaagaggcagcgcggctccgacagttggccgaggaggacctggcccagcagagagctctggccgaaaaaatgttaaaggagaagatgcaggccgtacaggaagccactcggttgaaggcggaggccgagctgttgcaacagcagaaggagctcgcccaggagcaagcccgaaggcttcaggaagacaaggaacagatggctcaacagctcgctgaagaaacccaaggatttcagaggacactggaagctgaaagacagaggcagctggaaatgtctgccgaagccgagcgtttgaaattacgagtggctgagatgtcgcgtgcgcaagcgcgagccgaagaggatgcccagagatttcggaaacaggccgaggaaatcggggagaagctccatagaactgaactggccacccaagaaaaagtgacgctggtgcagacgcttgagatacaaaggcagcagtccgaccatgacgccgaacggttgcgggaagccatcgccgaactcgagcgtgaaaaggaaaaactgcagcaagaggccaagcttcttcagctcaaatcagaagagatgcagaccgtgcagcaggaacagctgctgcaggaaacacaggcgctgcagcagagtttcctctcagagaaggacagccttcttcagcgcgagaggttcattgaacaggagaaagctaaactggaacaactgttccaagacgaggttgctaaggcccagcagctgcgggaagagcagcaaaggcagcagcaacagatggaacaagagcgacagcgactggtcgccagcatggaggaagcgagacgcagacaacacgaagccgaagaaggtgttagaaggaagcaggaggaattgcagcaactggagcaacagaggcggcagcaggaagagcttctggccgaagagaaccagcgtctgcgcgagcaacttcagcttctggaggagcagcacagggctgctctcgcacattctgaagaggtcactgcaagccaagttgccgccacgaaaacgcttccaaatggcagagatgctctggatggacctgcagccgaagcagagcctgagcacagctttgacggtctgcgccgtaaggttagtgcacagagactccaggaagcgggaatactgagtgccgaggagttacagagactcgcccaggggcacaccacagttgacgaactcgcacgccgtgaagacgtacggcactatttacagggccgctcatcaattgcggggttgctgttgaaggctacgaacgaaaagctgtcagtctacgccgcattacaacggcagctgctgtccccgggaactgccctgattctgctcgaagcccaggcagcgagtggctttttgttggatcccgtgagaaaccgcagactgacagtgaatgaagctgtgaaggagggtgtcgtcgggcctgagctgcatcataagctgctgagcgcagaacgggcggttaccgggtacaaggatccttacaccggacagcagatctccttgtttcaggccatgcagaaaggcttgattgtgagggagcatgggatacgccttctggaggcccagatcgcaactgggggcgtcatagatccagtgcactctcatagagtgcctgttgacgtggcctatagaagaggatattttgatgaggagatgaaccgcgtgctggccgacccctctgatgacactaaagggttctttgaccccaatacgcacgaaaacctgacataccttcagctgctggaaaggtgtgtggaggaccctgaaacaggcctgtgtctgttgcctcttaccgataaggccgccaaaggaggggagctggtgtacacagacagcgaggcacgagatgtgtttgaaaaagccacagtgagcgccccctttggtaagtttcagggaaagaccgtaacaatctgggaaatcattaattcagagtatttcacggcagagcagaggcgggatctgctgagacaattccgaactggcagaatcaccgtagagaaaattattaagattatcataacggtggtggaagagcaggaacagaagggaaggttgtgctttgaggggcttcgttccttggtccccgccgctgaacttctcgagagtcgcgttatcgatcgtgagctatatcaacagctgcagagaggcgagcgcagtgtgagagacgtggccgaggtcgacaccgttcgtcgggccttaagaggcgccaatgtgattgccggcgtgtggttagaagaggcgggacaaaaactgtccatttacaatgccttgaagaaagacttgttaccgagtgatatggccgttgctctgctcgaggcccaggccggcacagggcatatcatcgatcctgcaaccagtgctcgcctgaccgtggatgaggccgttagagccgggctcgtgggaccagaattccacgaaaagttactgtcagctgagaaagcagtgactggttatcgcgatccatacacaggccagtccgtcagcctgttccaagccctgaagaaaggcttgatcccaagagagcaaggtcttagactgttggatgctcagctgtccaccgggggcattgtcgaccctagcaagagtcatcgcgttcctctagacgtggcctgtgccagaggctgcttagatgaggaaacttcacgcgccctctcagcccctcgcgctgacgctaaggcttacagcgatccatcaaccggtgagccagcaacatacggggaactccagcaaaggtgtcggccagatcagctaacaggcctctcccttctacccctatcggagaaagctgcacgggcgagacaagaggagctgtattcagagctgcaggcacgggagacatttgagaagactccggtggaggttcctgttggaggcttcaagggtaggactgtgactgtttgggagttgatctcatcagaatacttcacagctgagcagagacaagagctactccgccaatttagaaccggcaaggtgacagtcgaaaaggtgatcaagatcctgattacaatcgtggaagaggtggagacactgagacaagagcgccttagcttttctggcctgcgggctccggtcccagcttcagagctgctcgctagcggcgtcctgagtcgtgcacagttcgaacagttgaaagacgggaaaactacagtgaaggacctctcagaactgggctcggtccgcaccctgctgcagggctctggctgtctggcaggtatctacttggaggatacaaaagagaaagtctccatctatgaggccatgcgacggggtctcttacgggcaacaacagccgccctgcttctggaggctcaggctgccaccggctttctggtggaccccgtccgtaaccagaggctctatgtgcacgaggccgtaaaagccggagtcgtcggccccgagcttcacgagcagctgctgtccgcagaaaaagcggttactgggtatcgcgacccctatagcggatctacgattagccttttccaggcaatgcaaaaaggtctcgttctcagacagcatggaattcgccttttagaggcccagatcgccactggcggcataattgatcctgtacatagccaccgcgtgccagttgacgttgcctatcaaagaggatacttcagcgaagagatgaatagggtcttagctgaccccagcgacgataccaaaggcttcttcgatcctaatacccatgaaaatctgacatataggcagctgttggaacgatgtgtggaagatcccgagacaggcctaagactattgcccctcaagggagctgagaaagccgaagttgtggagaccacccaggtttatacagaagaggagactcggcgagccttcgaggagacgcagatcgacattcccggcggtggatctcacggcgggagtaccatgagtctctgggaggtgatgcagagcgatctgattcccgaagagcagcgcgctcagctcatggctgattttcaggcagggcgggtgactaaggagaggatgattatcatcatcatcgagatcatagaaaagaccgagattattaggcagcaggggctggccagttacgactacgtgcgcaggcgactaacggcagaggacttattcgaggcccggatcatctctctggagacctacaatcttttaagggagggcacacgatccctacgggaggcactggaagccgagtcagcttggtgctatttgtatggaactggtagtgtggccggagtgtacctcccagggagtcgtcaaaccctcagcatataccaggccctgaagaaaggactcctgtcggccgaagtggccagacttctgctggaggctcaggccgccaccggtttccttctggaccccgttaagggcgaacgtctgaccgttgacgaggccgtcagaaaaggccttgttgggcccgaactgcacgaccgcctcctgagcgccgagagagcagttacaggttatcgggatccctacactgaacagacaataagtctgtttcaggctatgaaaaaagagctgattcccaccgaggaagcacttcgcctcttagacgcccagctggctaccggaggcatagtggatcctcgcctagggtttcacttgcctctggaggtggcctaccagcggggatacctgaataaggatacacacgaccaactctcagagccatctgaagttcgctcttacgtcgaccccagtacggacgaacggctatcatacacgcagctccttcggcgctgccggcgggatgatggcactggacagctcctcctaccgttgagtgacgccaggaagttaacctttagaggcctgcgcaaacagatcactatggaagaattagtcagatctcaggttatggacgaggccacagccttgcagttacgtgaagggctcacttctattgaggaagtaaccaagaacctgcagaagttcttggaagggaccagctgcattgctggagttttcgtcgatgctacaaaagagcggctgagcgtttaccaggctatgaagaaggggattattcggcccggcacagcctttgagttgctggaagcccaggctgccacgggatatgtgatcgaccccataaagggcctgaagttaacagtggaagaggctgtgaggatgggtatagtgggcccggagtttaaagataaattattgagcgctgaacgcgccgtcactggttataaagatccctacagcggcaagctcatctctctgtttcaggcaatgaaaaaaggactgattctgaaggaccacgggatccgcctgcttgaggctcagatcgctacgggagggattattgaccctgaagaatcgcacaggctgcccgtggaagtcgcttataagaggggcctgttcgatgaagaaatgaacgagatcctgacggatcctagcgacgatacgaaaggattctttgatcccaatactgaagaaaacctcacctacttgcagttaatggaacgttgcattaccgatccgcaaactgggctttgcctgcttccactgaaggaaaaaaagcgcgagcgcaaaacgtcatccaaaagcagcgttagaaaaagaagagttgtcatagtggaccccgaaaccgggaaggagatgtctgtgtatgaagcatatcgcaaaggcctgattgaccatcaaacctatctggagctgtctgagcaggaatgcgagtgggaagagatcacgatctccagcagcgatggcgtcgtgaaatctatgatcatcgacagacggagcgggcggcagtatgatatcgacgatgctattgcaaagaatctgattgatcgctcggctctggaccagtacagggccggtaccctgtccatcaccgagttcgccgacatgctaagtggcaacgccgggggcttcaggagcagatctagctccgttggatcgtcttccagttaccccatcagcccagccgtgtcaaggacacagctagcttcatggagtgacccaacggaggagaccggacctgtggcagggattctcgataccgagacgctggagaaggtgtccatcacagaggccatgcatcggaacttagtggataatatcactggtcaacgactgcttgaagcccaggcttgcacaggcgggatcattgatcctagtactggcgaaaggtttcctgtgactgacgctgtcaataaaggcctggtagacaagattatggtcgatcgtattaacttggcccagaaagcattctgtggctttgaggaccctaggactaaaacgaagatgtcagccgcccaggcccttaaaaagggctggctgtactatgaggccggccagcggttcctggaggtgcagtacctgacagggggactcatcgaaccagatacacccggacgcgtgccgttggacgaagccctccaacgtggtaccgtggacgcacggactgcccaaaaactgcgcgacgtgggggcttattccaaatatctgacttgtcccaagaccaaacttaaaattagttacaaggacgcgttggacagatctatggttgaggaaggcaccggtcttcggctcctagaagctgccgctcagtctaccaaaggctattactctccatactccgtttccggatctggaagcaccgctggctcgagaacggggtccaggacaggtagtcgggcagggagcagacgcggatctttcgatgccaccggctcaggcttctctatgacgtttagcagttcctcctactcctctagtggatacggccgccggtatgcaagtgggtcttcggcctccctgggcgggcctgaaagtgccgtggcttag

SEQ ID NO: 262166 - DNA, 13548 bp, Artificial Sequence
  derived and/or modified sequence
atgaagatcgtgcccgacgagcgggaccgggtgcagaagaagaccttcacaaaatgggttaataagcatctgatcaaagcccagaggcacataagtgacctgtacgaggaccttagagacggccacaatttgatctctctgctggaagtgctcagtggagatagtctcccacgagagaagggcaggatgcgtttccacaagctacagaacgtgcagatcgctttggattacttgagacacagacaggttaaactggtgaacatacgcaatgatgacatagccgacggtaaccccaaactgaccctcggattgatttggactattatactacacttccagatctccgacatccaggtctccggacagagtgaggacatgactgctaaagaaaaattgctcctttggagccaacggatggtggagggctatcagggactgcggtgcgacaatttcacgtcgtcatggagggacgggcgtctgtttaatgccataattcatcgccataagcccctcctgatcgacatgaataaggtgtatcggcagaccaaccttgagaacctcgaccaagccttcagcgtagccgaacgtgacctaggagtcacgaggctgcttgacccggaagatgtggatgttccacagcctgacgagaagtctatcattacatatgtgtccagcctgtatgatgccatgccacgggtccccgacgtgcaggacggtgtccgtgccaacgagctgcagctcaggtggcaagagtaccgggagctcgtcctattgctgctgcagtggatgagacatcacacagccgcgttcgaagagagacgttttccctccagcttcgaagagatcgaaatactttggtcccaattccttaaatttaaggagatggaattgcccgcaaaggaggccgacaagaatcgctctaaaggcatctatcagtccttggagggcgccgttcaggccggacaactcaaggtaccacccggctaccacccactagacgtcgaaaaagaatggggaaaacttcatgtggctatactggagcgggaaaaacagctgcgctccgaattcgaacggctcgagtgtctgcagcggattgtgaccaagctgcaaatggaggccggattgtgtgaagaacaactgaaccaggctgacgctctgcttcagtccgatgtacgactgctggcggccggtaaggtgccccagcgcgcaggggaggtagagagggatcttgacaaagccgacagcatgattaggttactgttcaatgatgtgcagaccttgaaggatggtagacaccctcaaggggagcaaatgtataggcgagtctaccgcttacatgaaaggcttgtggcgatccgcaccgaatataatctccgtttaaaggcaggagttgccgctcccgcgacacaggtagctcaggtaaccctgcagagcgtgcagagaaggcctgagctggaagacagcaccttgaggtatcttcaggatctgctggcttgggtggaggagaatcagcatcgggttgacggggccgagtggggtgtcgatctccccagcgttgaggctcagctggggagtcatcgcggcttgcaccagagcatcgaagaattcagagcgaagatagagagagccaggagcgacgagggccaactgagccctgccacacggggagcctaccgagattgcctgggccgcttggatttgcagtacgctaaattgttgaacagctctaaagcccgcctgaggtctctggaatccctgcattcattcgttgctgccgccacaaaagagttgatgtggctgaatgagaaagaggaagaggaagttggcttcgattggtcagaccggaataccaacatgaccgcgaaaaaggaatcgtactcggctctcatgcgggagcttgaactcaaagaaaagaaaatcaaggagctgcagaacgctggcgacagactcctacgtgaggaccatccagcccgtccaaccgtggagagcttccaagctgctctgcagacccagtggtcctggatgttacagctttgctgctgtatcgaagcccacctaaaggagaacgcagcctattttcagttttttagcgatgtgcgagaagccgaagggcagctacagaaactgcaagaagctctacgaagaaaatattcttgcgaccggtccgccactgttacacgtctcgaagaccttctgcaagacgctcaggatgagaaagagcaactgaatgagtataaaggacacctttctggcctggccaaaagggctaaagccgttgtacagcttaagcctcggcaccctgcccacccaatgcgtggaagactgccactgctggccgtctgcgactacaaacaagtggaggtgacggtacacaaaggggacgagtgtcaattagtgggaccagcccagccttcgcactggaaggtgttatcctcatccgggtcagaagcggcggtgcccagcgtttgctttttagtgcccccacccaaccaggaagcccaggaagccgtgacccggcttgaggcccagcatcaggctctggtgactctgtggcatcaattacatgtcgacatgaagtctctactggcttggcagtcactgcggcgagacgttcagctcatccgatcctggagtctcgcgacattccgaactctcaaaccggaggagcagagacaagcgctccactcccttgaattacattatcaggcattcctccgagacagccaggacgcaggcggatttggacccgaggatcgcctcatggcagaaagggaatacggtagctgctcccatcattatcagcaactgttgcagtctcttgaacagggggcccaagaggagtccaggtgccagagatgcatatccgagctgaaagacatccgactgcagcttgaggcatgcgaaacccgtacagttcatcggctgcggttaccactggataaagagccagctcgcgaatgtgcccagaggattgcagaacagcagaaggctcaagcggaagtcgagggactaggcaagggggtggcaaggcttagcgcagaggcagagaaagtgcttgccttaccagaaccatcaccggccgcccccacgctgagaagcgaattggaactgacgctggggaaactggagcaggtgcggtcgctgagcgccatctacctggagaagctgaaaacgatatcactggttattagaggcacccaaggtgccgaggaagtgctccgagcgcatgaagagcagctaaaggaagctcaggcagtgcctgccacactgcctgagctcgaggcaaccaaagcatccttgaaaaaactgagggcccaagccgaggctcagcaaccgacgtttgacgccttacgggacgagctgcggggagctcaggaagtgggagaacgcctgcagcaaagacacggtgagcgtgatgttgaggtggagagatggagagaaagagtggcacagcttttggaaagatggcaggcagtgctggcccaaacggatgtgcggcaacgggaactggagcagttgggccgccagttgcggtattatcgcgaaagtgctgatcccctgggcgcctggctgcaggatgccagaaggagacaggagcagatccaagcgatgccactggccgactctcaggctgtgcgcgaacaactgcgtcaggaacaagcgttgctggaggaaatcgaaagacatggtgaaaaggtggaggagtgccagcgttttgctaaacaatatatcaatgctatcaaagactacgagctgcagctagtgacctacaaagctcagctggagcctgtggccagccccgctaagaaaccgaaagtccagagcgggtctgagtccgttatccaggaatacgtggacctacgaacccactacagcgagttgacgacactgacaagtcagtatatcaagttcattagcgagacactgaggcgaatggaggaagaagagcggcttgccgaacagcaacgggccgaggaacgggagcgtctggctgaggtagaagctgctctggagaagcaacggcagttggctgaggcacatgcccaggccaaggcccaagccgaacgggaggcaaaagagctgcagcagagaatgcaggaggaggtggtgcgcagagaggaagccgcggtggacgctcagcagcagaagcggagcatacaggaagagctgcagcagctacggcaaagttctgaggccgagatacaggccaaagcccgccaggcggaggccgcggaacgttctcgtttgcggattgaggaggagatccgggtggtccgactgcagctcgaggctacagagagacagcggggaggggcggaaggcgaactgcaggccttgcgcgctagggccgaagaggcggaggctcagaaaaggcaggcccaggaggaggctgagcggttgagacgacaggttcaggacgagtctcaaagaaaaaggcaggccgaggtggagctagcttcacgggtgaaagccgaggccgaagccgcacgcgagaaacaaagagctctgcaggcgttggaggagctccgccttcaagccgaagaagccgagaggcgcttgcgtcaggccgaagtcgagagggcccggcaggttcaggtggctctagaaacagcgcagagatcagctgaggccgagctgcagagcaagcgagcatctttcgccgaaaaaacagcacagctcgaacgaagcctgcaggaggaacatgtggctgtggcacagctgcgcgaggaggctgagcggcgagctcagcaacaggcagaagcggaacgggcgagggaagaggccgagcgggagctggagcggtggcaactgaaggcaaacgaagcccttagattacgccttcaggccgaggaagtcgctcagcagaaatctctggcccaggcggaggccgagaaacagaaagaggaagccgagagggaggctagaaggcggggcaaagccgaagagcaggccgtgagacagagggaactggctgagcaagaattagagaaacagaggcaactggccgaaggaactgctcagcagcgcctcgccgctgaacaggaactgattcgattgcgtgctgagaccgagcaaggtgagcagcagcgacaattacttgaagaggagctggcccggctccaacgtgaggctgctgctgcaacacagaaaagacaggaacttgaggccgagcttgcgaaggtgagggccgagatggaagtcctcttagccagcaaggccagagctgaggaggagtccagaagcaccagtgaaaaatccaagcagcgcttggaagccgaggcaggaagattccgggaactcgccgaagaggccgcccgtttgcgagcactagccgaggaagccaagcggcagcggcagcttgcggaggaggacgccgctcgtcaacgtgcagaagcagaaagagtgctcgccgaaaaactggctgctatcggggaggccactcgactgaagactgaagcagaaattgccctaaaggaaaaagaggctgagaatgaaaggttgcgcaggcttgccgaagacgaagcatttcagcgccgccgccttgaagagcaggcagcccaacataaggccgatattgaggagaggctggcacaattgaggaaagcgagcgacagtgaattggagagacagaagggattggtggaagacacacttagacagaggcgtcaggtggaggaagagattctggcgctgaaggcttcttttgagaaagccgccgccggaaaggcggagctggaactcgagctcgggcgaatccggagtaatgctgaggataccctgaggtccaaggaacaggccgagcttgaggcggctcggcagcgccaactagccgccgaagaagagcggagacgtcgagaagcagaagaacgagtgcagaagagccttgcagcggaggaggaggcggcaagacagagaaaagccgccttggaggaggtggaacggctgaaggctaaggtggaggaagccagacggctgagggagcgcgccgagcaagagtctgctcgccaactgcagctcgcgcaggaagccgctcaaaaaagattgcaggcagaagagaaagcccatgccttcgccgtccagcagaaagagcaggagctgcagcagactctgcagcaggaacaatctgtccttgatcaactgcgaggtgaggccgaggccgctagaagggctgctgaagaggctgaggaagcccgagtgcaagctgaacgcgaggcagcccaaagccgccgtcaggtcgaggaggccgaaaggttaaagcagtccgccgaggaacaggcgcaggcccgagcccaggctcaggctgccgcagaaaagcttaggaaagaagccgagcaagaggccgcccgccgagcccaggccgaacaggccgccctccggcaaaaacaagctgccgacgccgagatggaaaagcacaagaagttcgcggagcagaccctccggcagaaagcccaagtggagcaggagctgacaaccctcaggctgcaattggaagagaccgatcatcagaagaacttgctggacgaggagctgcaacgtcttaaggccgaggcgaccgaggccgcccggcagaggtcccaagttgaagaggaactgtttagcgtgcgggtacagatggaagagctgtcgaaactgaaagcaagaatcgaggcagagaaccgcgctttgatcctcagagataaggataacactcaaaggttccttcaagaggaggccgagaagatgaaacaggtagctgaagaggctgcgcggctgtcagtggcagctcaagaggctgctaggctgcggcagcttgcggaggaggacctggcccagcagagagcgttagcagagaaaatgcttaaggagaaaatgcaggcagtgcaggaggcaactaggctgaaagctgaggcagaattactacagcaacagaaggaactggcccaggagcaggcacgcagactgcaggaagacaaggaacaaatggcccaacaactggctgaggagactcagggatttcagcgaaccctcgaagccgagagacaaaggcagctagagatgtccgcagaagctgaacgcctcaaactcagggttgccgagatgtcgagagcccaggccagggcagaggaagatgcccagagatttagaaaacaggcggaggagattggggagaaacttcacaggactgaactggctactcaagagaaggtgacccttgttcaaactctggagattcaacgccagcagtctgaccacgacgccgagcgtctgcgcgaggcgattgctgagctggagagggaaaaagagaagttgcagcaggaagcaaagttgctgcagctgaagtctgaagagatgcagactgtgcagcaggagcagctgctccaggagacacaggccctgcaacagtcgtttctgagcgagaaggactccctgctccagagagagagattcattgagcaggaaaaggctaaactggaacagctcttccaggacgaagtggcaaaggcccagcagctcagggaagaacagcaaaggcagcaacaacaaatggagcaggaacggcagcgtttggtcgcctctatggaggaggcacgcaggcgccagcatgaggctgaggaaggcgtccgtcgcaagcaggaggagcttcagcagctggaacagcagaggcgccagcaagaggagttacttgccgaggagaaccagcgcctgcgggagcagctccagttgctagaggagcagcatcgggctgcactcgcccattctgaagaggttactgcttcgcaggtggcagctaccaaaaccctgccgaacggcagggacgccctggacggccccgcagcagaggccgagcccgaacatagttttgacggacttagacggaaggttagtgcacagcgccttcaggaagctggaatcctttctgcagaggagctgcagcgactggcccagggtcacactacagtggatgaactagcacgccgtgaagacgttcggcactacctgcaggggcggagctccatagctggtcttttgcttaaggctaccaacgagaagctgagtgtctacgccgcactccaacggcagctcctgagcccaggcacagccctcatcctccttgaggcacaggcagccagtgggttcttactggatcctgtgcgcaataggcggctgactgtgaacgaggcggtcaaagaaggagtcgtgggcccagaactgcatcacaaactattgtccgccgaaagagccgttacgggttacaaagatccctataccggtcagcagatatctttgtttcaggccatgcagaaggggctgattgttcgtgagcatggaatccggctcctcgaggctcagatcgccacaggcggggtaattgatccagttcacagtcaccgtgtccctgttgacgtcgcctacaggcgtggttacttcgacgaggagatgaacagggtgctggccgacccatccgacgacaccaaaggtttttttgaccctaacacacatgagaatctcacatacttacagttgctggaaagatgtgttgaggacccagagaccggattgtgtcttctgccgttgacagacaaggccgcgaaggggggcgaactcgtgtacaccgactcagaggctagggacgtcttcgaaaaagcaaccgtttcagcccccttcgggaagtttcagggcaagaccgtgacgatttgggaaattatcaatagcgagtacttcacagctgagcagaggcgagacctcctgcgccagttccgcacaggtcggattacagtggaaaaaatcataaagattatcattaccgtagtcgaggagcaggagcagaagggccgcctgtgttttgaagggctgcggtctcttgtgcccgctgctgaattactagagtcgcgagtgattgatcgagagttataccaacagttgcagagaggtgagaggagcgtaagggatgtggctgaggtagacactgtcaggcgcgctctgcggggggctaacgtcatcgcaggggtgtggctggaggaagccggtcagaagctgagtatctataacgccttaaaaaaggatttgctcccaagtgacatggctgtcgcactgctcgaggcgcaggctgggacaggtcatattatcgaccccgctacttctgctagacttacagtggatgaggctgtgcgggcaggactcgtgggacccgaattccatgaaaagctgctgtccgctgaaaaggccgtgaccgggtatcgagacccctacactggccaatccgtttctctattccaagccttgaagaaaggcctcatcccccgggaacaggggctacgcctcctggacgctcagctgagtaccggggggatcgttgatccttccaaatcgcatagagtgccgttggacgttgcctgtgcaagagggtgtttggacgaggaaacttccagagcactttccgcacctcgagctgacgccaaggcatattccgatccatctaccggcgagcctgccacttacggggagctgcagcagcgttgtcgcccagaccagctgactggcttgtctttgctgcctctgtccgaaaaggctgctcgggcgcgtcaggaggaattgtactcggagctgcaggcgcgcgagacctttgaaaaaactcccgttgaggtccccgtaggcggctttaagggccgcactgtcacagtctgggagctgatttcgtcagagtactttaccgcagaacagcgccaggagctgctcagacaattccgcaccggtaaagtcaccgtggagaaagttattaagattctcatcactatcgtagaggaagtggagacactgcggcaggagcggttgagtttcagtgggttgagagcaccagttccagcatcagaactcctggcgtcaggggttctgagcagggcccagttcgagcaacttaaggacgggaagactaccgtgaaggacctgagtgagctgggatctgtcaggaccctgctgcagggctcagggtgtctggctggcatctatctcgaagacactaaagagaaggtgtcgatctacgaagctatgcgaaggggtctgctccgcgccaccacagccgcattgttgcttgaggcccaggctgccaccggttttctcgtggatccagtcagaaatcagagactatatgtccacgaagcagttaaggcaggtgtagtaggtcctgagttgcacgagcagttactctcggccgaaaaagcagtaacggggtacagggatccctactcaggttctacaatctcactgttccaagcaatgcagaaaggactggtgttacggcagcatgggattcgtctcctggaggcccagatagctacaggaggaattatagaccctgtgcactcacaccgcgtccccgttgacgtggcctaccagcgtgggtatttttctgaagaaatgaatagggtgctcgctgatccgagtgatgatactaaagggttcttcgacccaaatacacatgagaatttgacgtacaggcagctgctggaaaggtgtgtcgaggaccccgagacaggtctcaggctgctgcctctgaagggcgccgaaaaggccgaagtggtggaaacaactcaggtctacacagaagaagagaccagaagagcgttcgaggagacccagatcgacattccaggtgggggcagccacggggggagcactatgtcactgtgggaggtgatgcagagtgatttaatcccagaggaacagagggctcagttgatggctgactttcaggcgggcagagtgacaaaagaaaggatgattatcattatcatcgaaatcatcgagaaaacagaaattatcaggcaacaagggctcgccagctacgattacgtaagacggagactcaccgccgaggacctcttcgaggcccgtattattagtctggagacttataacctgctgcgcgaggggacaagaagcttacgagaagccttggaggccgaaagcgcctggtgctatctatacggcaccgggtccgttgccggcgtgtatctgcccgggtcacggcaaaccctttcaatttaccaggccctgaaaaaggggctgcttagcgcagaggtggcccgccttttactcgaggcccaggccgctacaggtttcctgttggaccccgtaaaaggcgaacgactaacagtggacgaagctgtgagaaagggtctggtcggccctgagttgcatgataggctcctgagtgctgagagagccgtgaccggctatcgggatccttatactgagcagacgatcagcctttttcaagccatgaaaaaagaactgatccctacagaggaggcattaagacttctagacgcacagctggctaccgggggcattgtggaccccagattggggttccatctacccctagaagtagcctatcagcgtggatacctgaataaagacactcacgatcagctctctgaaccaagcgaagtgcgttcctacgtggatccgtccactgatgaacgccttagctacacccagcttctacggaggtgtagaagagatgacggtacggggcagttactcctacccttgagtgatgccaggaagttgacattcaggggcctccgtaagcagatcaccatggaagagctggttcgatcccaggttatggacgaagcaaccgccttgcagctacgtgaaggtctcacttcaattgaagaggtcacgaagaacctgcagaaattcctggagggtacatcgtgcattgctggtgtgtttgtagacgctaccaaggaaagactgtccgtctaccaggccatgaagaagggtatcattcgcccagggaccgcctttgaacttctggaggcgcaagccgccacaggctacgtcatcgaccccattaaaggtctgaagctcacggttgaggaagcggtccggatgggtatcgtgggccctgaattcaaggacaaactgctcagcgcggaacgggccgtcacagggtataaggacccatattcaggcaaacttatctcgcttttccaggcgatgaagaagggcctgatactcaaggaccacggaatcagactcctggaggcccagatcgctacagggggcattatagaccccgaggagagccataggttaccagttgaagtggcttacaagcgtggtctgttcgacgaggagatgaatgaaatacttacagacccctcagatgacaccaaggggttcttcgacccgaataccgaggagaatcttacatatcttcaactgatggagcgatgtattactgatcctcagaccggcctatgcctcctccccttgaaagaaaagaagcgagagcgcaaaacaagtagcaagtcgagcgtgagaaaaagacgggttgtaattgtggatccggaaactggaaaggaaatgtccgtgtatgaggcgtatcgaaagggcctgatcgaccaccagacctatttggaattaagtgagcaggaatgcgagtgggaggagattactatatcttcctcagacggagtggtgaaatcgatgatcatcgatcggagatcaggccgccaatatgacatcgatgatgctattgcaaaaaacttgatagatagatcagccttagatcaataccgggcaggaaccttgtccataaccgaatttgccgacatgttatctgggaatgctggcgggttccgatcgcggtctagctccgttggtagttcaagtagctacccgatcagccccgccgttagccggactcagctcgcaagttggtctgatcccacagaggaaactggtcccgtagctgggatcctcgacaccgagacactcgagaaagtgtcaattacagaagcaatgcatcggaatttggtcgataatatcactgggcaacgtttacttgaggcccaggcatgtaccggagggattatcgatccctcaacaggggaacgcttccctgtgacagacgccgtgaacaagggcctagtcgacaaaataatggtcgaccggataaacctggcccagaaggctttttgtgggttcgaagatcctaggactaagaccaaaatgtcggccgcccaagccttaaagaaggggtggctgtactatgaggctgggcagcgcttccttgaagtccaatatcttactggaggccttattgagcccgatactcccgggcgcgtgcctctcgatgaggccctgcagagaggtactgtggatgctagaacagctcagaaacttagggacgtaggtgcctactcaaaatatctgacctgtcctaaaaccaagctaaagattagttataaggatgccctcgaccggtccatggtggaggagggaacaggactgcgccttctcgaagccgctgcgcaatctaccaagggctactacagcccttattcagtgagcggaagtggaagcaccgctgggagcagaactggcagcaggacaggcagtagagctgggtctaggcgcggcagctttgacgcaaccggaagtggcttcagcatgacctttagttcgtcttcctatagctcatccgggtacggtaggcgttacgcctccggttcttctgcaagtctgggagggcccgagtccgccgtcgcttag

SEQ ID NO: 262167 - DNA, 13725 bp, Artificial Sequence
  derived and/or modified sequence
atgagcggcgaggacgccgaggtgcgggccgtgagcgaggacgtgtcaaacgggagtagcggctccccaagccccggtgacactctaccctggaacctggggaagacccagaggagtcggcggtctggcgggggtgccgggtcaaatgggtccgttctggaccctgccgagcgcgctgtgatccgcattgccgacgagcgcgatagagtacagaagaaaacatttaccaagtgggttaataagcacctcattaaggcccagaggcacatcagcgacctctacgaggacctaagagatggacataatctaatctctttgcttgaggttttgagcggggatagccttcccagggagaagggacgtatgcggttccacaaactccagaacgtgcagatcgctctggactatctacgacacagacaagtcaaactagtgaacattagaaatgacgatatcgcagacggcaatcccaaactcacgctgggactgatatggaccataattttacatttccagatatccgacatacaggtcagcgggcagtctgaggacatgacagcaaaagaaaagctgttactttggagccagagaatggtggagggttatcagggtttgcgctgcgacaacttcacttcttcctggagggatggtcgcctcttcaacgcgattattcatcgtcacaaacctctgctgattgacatgaacaaagtgtatcggcagaccaacctggagaacctcgatcaagctttttccgtcgcagagcgggacctgggcgtcactaggctgctggatccagaggatgtggacgttccccagcccgacgaaaagagtatcatcacgtatgtaagcagcctctacgatgctatgccccgggtgcccgatgtgcaggatggtgtgcgggccaacgaattacaattaagatggcaagagtatcgcgaactggtgctactgcttctgcagtggatgagacatcataccgcggcattcgaggagcgaaggtttccctcctcatttgaagagatcgaaattttgtggtctcagtttttgaaattcaaagagatggagttacctgcaaaggaagctgacaaaaataggtctaagggtatatatcagtctctggagggcgccgtgcaggcagggcaactaaaggtaccccccggctaccatcccctcgatgtcgagaaggagtggggaaaattacacgttgctattctagagagagagaaacagctgaggtcagagtttgagcgactggaatgtctgcagcgtatcgtcacgaagttgcagatggaggcaggactctgtgaagaacagctcaaccaggcagatgccctactgcaatccgacgtgcggctgcttgctgcaggcaaagtgccccagagagccggcgaggtcgagcgcgacttagacaaagcggatagtatgattaggttactttttaatgacgtgcagactctgaaggacggccgccatccccaaggagaacaaatgtatcgcagggtgtaccgactccatgagcgcttggtggctattcggactgaatacaacttgagacttaaggccggcgtggccgccccggctacgcaggtggctcaggtgactcttcagtcagtgcagcgcaggcccgagttagaggactcaactctgaggtatctgcaggaccttctcgcatgggtcgaggaaaatcaacaccgcgtggacggtgctgaatggggtgtggaccttcccagcgtcgaggcccagctcggcagtcatagaggtcttcaccagtcaatcgaggagtttcgagctaagattgagcgcgcaaggagcgatgaagggcaattatcacctgccaccagaggggcctaccgcgactgcctcggcaggctcgatctgcagtatgctaagcttctgaactcttctaaagctcgactgaggagtcttgagtcactgcattcattcgtagcggccgcaaccaaggaactgatgtggttaaatgaaaaggaagaggaggaggtcggtttcgattggtcggaccgaaacactaacatgaccgctaaaaaagaaagttacagcgctttgatgagagaattggagttgaaagagaagaagatcaaggagctgcagaatgcaggagaccggctcctgagagaagatcatcccgccaggcccacagtcgagagtttccaggctgccctccagacccagtggtcctggatgttacagctttgctgttgcattgaggcccacctaaaagagaacgccgcctactttcagtttttttccgatgtgcgcgaggcagaggggcagctacagaagttacaggaggcgctgaggagaaagtactcctgtgacaggtctgccaccgttactcgccttgaagatctgcttcaggacgcccaggatgaaaaggagcagctgaatgagtataaaggccacctctccgggctcgctaagcgggccaaggctgtcgtgcagctcaaacctcgtcacccagcccacccaatgcggggacgcctcccgcttctggctgtctgcgactacaagcaggtcgaagtgacggttcacaagggggacgaatgtcagctggttggacccgcacagccctcccattggaaggtgttgtccagttctggtagcgaggcagctgtgccttctgtgtgtttcttagtgcccccaccaaatcaggaggcccaagaagcagttaccagattggaggcccaacaccaggctctagtgacattgtggcatcagctacatgtcgacatgaaaagcctattggcctggcagtctttgcgccgtgacgtgcagctcatcagatcctggagcctcgcaacctttaggaccctgaaaccagaggagcagcggcaggctctgcacagcctcgagctgcattaccaagccttcctccgagattctcaggatgccggcggattcggccccgaagatagactcatggcagaaagggaatacggcagttgttcgcatcactaccagcagctgttacagtcattagagcagggggcccaggaagagtctcgctgccagcggtgcatttcagaactcaaggacatcagactgcagctcgaggcatgtgaaactagaacagtacatcgtttgcgcctcccgctcgacaaagaacccgctcgggagtgtgcccaacgcattgcagagcagcaaaaggcccaagctgaggtggagggcttaggtaagggagtagctagacttagcgcagaggccgagaaagtcttggccctacctgagccaagcccagcagcaccaactctgcgttcggagcttgagctgacactgggaaaattggaacaggtgcgtagtctctccgcaatatatttggagaaattgaaaacaatttccctggtcatccgcggcacccaaggcgcggaagaagtactccgagcccacgaagaacagctcaaagaggcacaggccgttccggcgaccctgccggagctggaagcaaccaaggcgagcctcaaaaagttgcgggcccaggctgaggcccagcagccaacctttgatgccttgagagacgagttgcgtggcgcccaggaggtgggtgaacggttgcagcagcggcacggggagagggacgtggaagtcgaacggtggcgagaaagggtggcacagcttctggagcgatggcaggctgtactggcgcaaactgacgtgaggcagagggagcttgaacaactcggcagacagctgaggtactaccgggagtcagctgatccacttggcgcctggttgcaggatgccagaagacggcaggagcagatccaggcaatgcccttagctgactctcaggcggtacgggaacagcttaggcaggaacaggccctccttgaagagattgagcgtcacggtgaaaaggtggaggagtgccagaggtttgctaaacagtatattaacgccatcaaggactacgaactccagctagtaacatacaaggcccagttggagcctgtggcctcaccagctaagaaacctaaagtccagtccggaagcgagagcgtcattcaagaatatgtggacttgcggactcactattccgaactgacgacactcacaagccagtacataaagttcatctccgagaccttgaggagaatggaggaggaagagcgcctggccgagcagcagcgagcagaggagagagagcggttagcagaggtcgaagcagccctcgagaaacagagacagttagcggaagcccacgctcaggccaaggcacaggccgagcgggaagctaaggaactgcagcagaggatgcaagaggaagtcgttcgtcgggaagaagctgccgtcgacgctcaacagcagaaaagaagcatccaggaggaactgcagcagcttcggcagagctcagaagcagaaatccaggccaaggcacggcaggccgaagcggcagagcggtcaagactacgaatcgaggaagaaattcgggtcgtacgactgcaattagaagccacagaacgtcagagggggggggccgaaggggaattgcaggctttgcgagcccgcgcggaggaagccgaggcccaaaaaagacaggcccaggaggaagccgaacggctccggcgacaggtgcaggatgaaagtcagagaaaaagacaggcagaggtggaactggcaagtagagtaaaagctgaagccgaagccgccagggaaaaacagcgagcgctacaggcccttgaagagctgcgattgcaagctgaagaggccgagcgaaggctgaggcaggccgaggtggagcgggcacggcaagtgcaggttgcactagagactgcacaaagaagtgctgaggccgagcttcaatcaaagcgcgcctcttttgctgagaagactgctcagctcgaacgatcactccaggaagagcacgtcgcagtggcccaactccgggaggaagccgaaagaagggcccagcagcaggccgaggccgagcgcgcccgggaggaggcagaaagagaacttgaaagatggcagcttaaggccaacgaggccctccgcctgcgcttgcaggcagaggaggtagcacagcagaaatccctggctcaggccgaagccgaaaagcagaaggaggaagcggaaagagaagcaaggcgaagaggcaaagcggaggagcaggccgtgcgccagcgagaactggctgagcaggagctggagaaacaacgccagttagcagagggcaccgcgcagcagagactcgctgcagagcaggagctcatacgcctcagggcagagaccgagcagggcgagcaacagcggcagctgcttgaagaggagctcgcccgcctccagcgggaggccgccgcagcaacccagaagcggcaggagctggaggctgaactggcgaaagtgcgggccgagatggaagttctcctggcgtcaaaggcaagggccgaggaggaaagtcggtccacttccgagaagagtaaacagcggctagaggccgaggctggacggttcagagaactcgctgaggaggcggctcggctgagggcccttgcagaggaagcaaagaggcagagacaactcgccgaggaggatgccgctagacagcgtgccgaggccgagcgggtgttagctgagaagttggctgcgattggcgaagccaccaggctcaaaaccgaggctgaaatcgcactcaaagaaaaggaggctgaaaacgaacggctcagaaggctcgcagaggacgaggcgttccagaggcggagactggaggagcaagccgcgcagcacaaggccgacatcgaagaacgcctcgctcagctgcgcaaggcctctgactctgagcttgagcgacagaagggtttggtcgaagacactcttagacagcgtcgccaggtggaggaagagattctggctctaaaggcatcttttgaaaaagccgcagcaggcaaggccgaattagaactcgagctgggaaggatcagatccaacgccgaggatacgctgcggtccaaggaacaggccgagttggaggccgcacgacagagacagctcgcggccgaagaagaacggcggagaagggaggcagaagagcgcgttcaaaaaagcctggcagccgaggaggaagcagcgcggcagcgaaaggctgcgctggaggaggtagagcgcctgaaggccaaggtcgaggaagccagacgtctgagagaaagagctgagcaggaaagtgcacgccagctgcagctcgcgcaggaggctgcgcagaagcggcttcaagcggaggaaaaggcccacgccttcgccgtgcagcagaaggaacaggagctgcaacaaactttacaacaggaacaaagcgttttagatcaactgcggggggaggccgaggccgcccggcgcgcagctgaagaggcagaggaagctcgggtccaagctgaaagggaagcggcgcaaagcagaagacaggtggaggaggccgaacgactcaagcaaagtgccgaggagcaggcccaggcccgtgcgcaggctcaggcggccgctgagaagctgaggaaggaagccgagcaggaagcagcgcgccgcgctcaggcggaacaggctgccttgcgccagaagcaagcagctgacgctgagatggagaagcataaaaagttcgctgaacagacattaaggcaaaaggcacaagtggagcaagaactgactactctgcgactgcaactagaagagacagaccaccagaaaaaccttctcgacgaggaactccagcgcctaaaagccgaagccactgaggcggcacgacagcggtcccaggtcgaagaagagctgttctccgtgcgggtgcagatggaggagctatcaaagctcaaggccagaatcgaagctgaaaatagagcactgattttacgtgataaagataacacacagagatttttacaagaggaggcggaaaaaatgaaacaggtagctgaggaggccgctcgactgagcgtggctgctcaagaggctgccaggttgcgtcagctcgcagaagaagatttagcacagcagagagccctcgctgagaaaatgctgaaagaaaaaatgcaggccgtgcaggaagcgactcgtctgaaggcggaagccgagctgttgcaacaacagaaagagctggcacaggagcaggcaaggaggctgcaggaggataaagagcagatggcccagcagttagcggaggagacgcaagggttccaaaggaccctcgaggctgagcgtcagcggcaactggaaatgtcagctgaggccgagaggttaaagctgcgggtcgccgaaatgtcgcgggctcaggcccgtgcggaggaggacgcacagaggttccggaagcaagcagaagagataggtgagaagttacacagaactgagctagcgacccaggagaaggtcacattggtgcagaccctagagatacagcggcagcagagtgatcacgacgcggagcggctgcgcgaggccatcgctgagcttgaaagagagaaggagaagttgcaacaagaagctaaactcttgcagttgaagagtgaggagatgcagacggttcaacaggagcagctgctgcaggaaacccaagctctccagcagtcctttctgtccgaaaaagattctctcctgcagagagaacgttttatagagcaggagaaggcaaaactggagcaactgttccaggatgaggttgcaaaggctcaacagcttagggaggagcagcagcgccagcaacagcagatggagcaggaacgccagcgtctagttgcctcaatggaagaggctcgcagacggcagcatgaggccgaggagggggtcagacggaaacaggaggaactgcaacagttagagcagcaacggaggcagcaggaagagctcctggcagaggaaaaccagcggctgcgggagcaactccagctgttagaggagcaacacagagctgctctcgcacatagcgaggaagtgacggcctcgcaggtcgcagccacaaaaaccctgccgaatggacgcgatgcgttagacggtccagctgctgaagctgaaccagagcattcctttgatggcctgcggagaaaggtgtcagcccaacggctccaggaagccggtatcttgtctgcggaggagctccagcgccttgctcagggccacactactgttgatgagctggctcgcagagaggatgtgagacactacctgcagggacgtagtagcattgcagggttactgctgaaagcaacgaacgagaagctcagtgtgtacgcagccctccaaagacagttgctgtctccagggaccgccctgatccttctggaggctcaggctgcctctggtttcctcctcgaccccgtaaggaaccggcggttgacagtgaatgaagccgttaaggagggagtggtcgggcctgagctccatcacaagctcctgagtgccgagcgcgccgtcacagggtacaaagatccctataccggccagcagataagcctgtttcaagcaatgcagaagggattgatagtgagggaacatggtattaggttgttagaggcccagattgccactggtggagttatagacccggtccattctcacagggtaccagtcgacgttgcgtaccgccgggggtacttcgatgaggagatgaatagggtcctagcggatccttccgacgacacaaagggcttcttcgatcccaacactcatgagaacctgacatacctgcagctgcttgagcgctgtgtagaagatcccgaaaccggtctatgtttactcccactcactgacaaagccgctaagggtggggaactcgtgtatactgactcagaagccagggacgtcttcgaaaaagccacagtttccgcccctttcgggaagtttcaaggaaagaccgtaacgatctgggagataatcaacagtgagtacttcaccgccgagcagcgaagagatcttctaagacaattcaggaccggcagaatcaccgttgagaagatcatcaaaattataatcacggtcgttgaggaacaggagcaaaagggcaggctctgcttcgaggggctccgctcccttgtgcctgccgcggaactgctggaatctagggttatcgaccgtgagctttatcagcaactccagcgaggtgaacgctctgttagggacgtggcagaggtagacaccgtgcgccgcgctcttcggggcgccaatgtaatagcaggcgtctggctagaggaggcaggccagaaactgtcaatatacaacgctctgaaaaaagacctgctgccatctgacatggctgtggccctgctcgaagcacaagcggggactgggcacattatcgaccctgctacgagtgcgaggctgaccgtagacgaagcagtgcgagctgggcttgtcggccccgagttccacgaaaagcttcttagtgccgagaaggctgtcacgggttacagagacccctacactgggcagagtgtgtccttgttccaggccctcaaaaaaggactgatcccacgtgagcagggcctccggctcctggacgcccagctgagcactggtggaattgtcgatccgtcgaaaagtcaccgcgtgcctctcgacgttgcctgtgctcgcggatgcctggatgaagaaaccagtagggccctcagcgccccaagggcggatgcaaaggcctattcggacccgtctacaggggagcccgccacatacggcgagctccagcaacgatgcagaccagaccagttgacagggctgtctttactccctctgagcgaaaaagccgccagagccagacaggaggagttatatagcgaactgcaggcgagagagacattcgaaaagactccagttgaggtgcccgtcggtggattcaagggacggaccgtgaccgtctgggagttgatttcctcagagtactttacagctgagcagaggcaagagctcctacggcagtttaggaccggtaaggtgaccgtggagaaggtcataaaaatccttatcactatagtggaggaagtcgagacactacgccaggagaggttaagctttagcggcctgagggcccctgtgccagccagcgagctgctcgcatcaggcgtactgagccgagctcagtttgagcaattgaaggatgggaagaccaccgtcaaagacctcagcgagctcggcagtgtgagaacattactccaggggtccggttgcctggccggcatttacttagaagacacgaaagagaaggtaagtatctatgaggcgatgaggcgaggtctcctacgcgccaccacggctgctctacttctggaagcccaagcggctacagggtttttggtggaccccgtgcgcaatcagcgcttatacgtgcacgaagccgtcaaagccggagtcgtgggtcccgaactccacgagcagttactgagcgcagagaaggccgtgacaggttaccgggacccatactcagggagcacaatttctcttttccaagcgatgcagaaaggactcgtattgcgacagcacggcatcagattgctggaagcccagatcgccaccggggggatcatcgaccctgtacatagccacagggtcccggttgatgtcgcctatcagaggggatacttctcggaagagatgaaccgtgttcttgcggatccctccgatgacaccaagggcttttttgaccccaacacccatgagaatttgacttaccgacagctgctggaaaggtgtgtcgaagatccagaaaccgggctgcgcctcctgcccttaaaaggagccgagaaggctgaagttgtcgaaacgacccaggtctacaccgaggaagagacacgaagggcctttgaggaaacacaaattgacatccctggcggaggctctcacggaggctccactatgtccctgtgggaggtgatgcagtccgacctgattccagaagaacagagagcacagttgatggctgattttcaggccgggcgcgtgacgaaggaaagaatgattatcattatcattgaaattattgaaaaaacagaaattattcgtcagcaggggctcgcgagttacgactacgtacgccgtagactgacggctgaagatctgttcgaagcaaggatcatttcactcgagacttataacttactgagagagggcactagatccttgcgcgaagccctggaggccgagagtgcgtggtgttacctttacggaacagggagcgtggcaggtgtatacctgccgggttcgcgacaaaccttgtcaatataccaggcactcaaaaagggtttactgagcgccgaggttgcacgtctgctcctggaggcgcaagccgcaaccggttttctgttggatcccgttaaaggcgagaggctgacagtggacgaggccgtgcggaagggactggtgggccctgagttgcacgaccgactgctcagtgctgagcgggccgtgaccggctatcgggacccctatactgaacaaaccatctctctgtttcaggcaatgaagaaggagctcatccccaccgaagaggccttgcggctcttagacgcccagttggcgacaggcggaatagttgatccacgcctaggattccaccttcctttggaagtggcataccaaagggggtacttgaacaaagatacccatgaccaactgtcggagccctcggaggtgcgatcttatgtggatccatccaccgatgagaggctgagttacacacagctgttgaggcggtgtagaagggacgatgggaccgggcagctgctgttgccactgtcagacgccaggaaactgacgttccgcgggcttcggaagcagatcactatggaggaactagtgaggtcccaggtgatggatgaggccactgcgctgcaactgcgagaggggctgacatcgatcgaagaggtgaccaagaacctgcagaagtttctggaaggcactagttgcattgccggggtgtttgttgatgccacaaaagagcgtctgtcagtttaccaagccatgaaaaaaggaatcattcggcctggtacagcttttgagctcctggaagcccaggcagccacaggttacgtgatagacccaatcaagggcctgaaacttaccgtggaggaggccgtgaggatgggcattgtgggccctgagttcaaagataagctcctgagcgccgagcgcgccgtgacggggtataaagatccctattctggcaaacttattagtctgttccaggctatgaagaaaggcctaattctgaaagatcatggcattagactcctggaggcccagatcgctacaggcggtattatcgaccccgaggagtcccaccgcctgccggtagaggtcgcttataaacgaggcctatttgatgaggagatgaacgagattctgaccgacccgtctgacgacaccaaaggcttttttgacccaaataccgaagagaacctaacatatcttcagctgatggagaggtgcatcaccgaccctcaaacagggctctgtctgctccccctcaaagagaagaaacgcgaaagaaaaacatccagcaagtctagtgtgaggaagcgccgagtggtgatcgtggatccggagaccggcaaagaaatgtccgtctatgaagcttaccgcaaaggccttattgatcaccagacctatttggagctatcggaacaggaatgtgaatgggaagaaattactatttcgtcaagcgacggtgtggtaaaatcaatgatcatcgatcgacggtcaggacgacagtacgatatcgacgacgccatagctaaaaatttgattgaccggtctgccttggaccaatatagggcaggcaccctctcgattacagaattcgcagacatgctttcaggcaatgctgggggctttaggtcccgttcttcttcagtcggatcatccagcagttatccaatctcacccgccgtttcccgcacacaactcgctagctggtctgatcctactgaggagacaggacccgtggctggaatccttgacacagagactctggaaaaggtgagtatcactgaagccatgcatcggaaccttgtggataacatcacaggtcagagactgttggaagcccaggcatgtaccgggggcattatagatccatccacgggcgagcgctttccggtcactgacgctgtaaacaagggactagtggataagatcatggtggatagaatcaacctcgcccagaaggccttttgcgggttcgaggatcccaggaccaagaccaaaatgtccgccgctcaagcccttaagaaaggctggctgtactatgaggccggccagcgctttctggaggttcagtatttaaccggcggcctgattgaaccagatacacctgggcgagtgccgcttgatgaagcgctgcagagaggtacagtagacgcacgaaccgcccaaaagctgcgggacgtaggcgcttattccaaatacctgacttgcccaaagaccaagctcaagatcagttacaaggacgcactcgatcggtccatggttgaggagggaacaggccttcgcttgctggaggctgccgcccagtccacgaagggatattactctccctattccgtatctgggtccggctctactgcggggtcaagaaccgggagccgcactggatcccgtgcgggaagtagaaggggatctttcgatgcaactggttcaggtttttctatgaccttttcctctagctcatactcctcctcaggctatggtaggcgctacgcgtctggctctagcgcgagcctcggggggcctgagtcagcagtggcatag

SEQ ID NO: 262168 - DNA, 13713 bp, Artificial Sequence
  derived and/or modified sequence
atgagcggcgaggacgccgaggtgcgggccgtgagcgaggacgtgtctaacggcagtagcggcagcccgtctcccggagacacgctgccatggaatctgggtaagacccaacgctccagacggagcggaggaggtgcaggctctaatggaagcgtgctggatccagctgagcgcgctgtaattcgtatcgccgacgagcgagaccgtgtccagaaaaagacctttacgaagtgggtgaacaagcaccttattaaagctcaaaggcacatttccgacctttacgaggatttaagggacggacataacttaatttccctgttagaggtgttgtcaggtgatagtctgccacgagagaagggccgtatgcggttccataagcttcagaacgtccagattgcgttagattacctgcgtcataggcaggtcaagctcgtgaacatacgcaacgacgatatagcggacggcaaccccaaactgaccctgggcttgatctggactattatcctgcactttcagatttcagacatccaagtctctggccagagtgaggacatgaccgccaaggagaagctgttgctatggtcccagcggatggtcgagggataccagggcctcagatgtgataactttaccagctcttggagggatggccgtctgtttaatgcaattattcataggcataagccactgctgatcgacatgaataaagtttacaggcagaccaacttagaaaacctggatcaggctttttctgtcgctgagcgggacctgggggtgactagacttcttgatccagaggatgttgatgtgccccagcccgacgaaaagtccatcattacctatgtgagctccctttatgatgccatgccacgggtgcctgatgtgcaggacggggaactgcaactccggtggcaggaatacagagaactggtactcttgctcttacagtggatgagacaccacacagccgcctttgaggaacggcgctttccatcttctttcgaggagattgagatcctgtggtcccaatttttaaaattcaaagagatggaactacctgcaaaagaggctgacaagaatcggtcgaaaggcatttaccagagcctagagggcgctgtgcaggccggtcaactgaaggttcctccgggttatcacccactggacgttgagaaagaatgggggaaactacacgtggctatcttggagcgagagaaacaactgcgtagcgagttcgagcgactggagtgtctgcagagaatagtgacaaagctgcaaatggaggccggactgtgtgaggagcagctgaaccaggcagacgcactcctgcaatctgacgttcgactgttagctgctgggaaggtgccacagcgtgcgggcgaagtggagagggacttggataaagcagacagtatgatccggctgctgtttaacgacgtccagacattgaaggatggcaggcacccccaaggggaacaaatgtacaggcgcgtctatagactgcacgaacgcttggtggcaatacggacagaatacaaccttagactcaaagcaggtgttgccgcacctgctacgcaggtggcccaagtgaccctgcagtctgtgcagagacgacccgaactcgaagactctactctcagatacctgcaggatctgcttgcttgggtggaagagaaccaacaccgtgtggacggcgctgagtggggtgttgatctcccaagtgttgaggctcagctcggttcgcacagaggccttcatcaaagcatcgaagagtttagggctaagatcgaacgagccagaagcgacgagggtcagctttctcccgctactcggggagcttaccgagattgtctggggcgactggacctacagtatgcgaaactcctgaactcaagtaaagcccggctgaggtctctagagtctctgcacagtttcgtggcagctgcaactaaggagcttatgtggctaaatgagaaggaagaggaggaggtcggttttgattggtccgaccgtaacacgaacatgaccgcaaagaaggaaagctactcagcgctcatgagggagttagagctgaaagagaagaaaatcaaagagctccagaatgcgggcgaccgactgctgcgtgaggatcatcctgccagaccaaccgtggagtcttttcaggccgcactgcaaactcaatggagctggatgctccagctctgctgttgcatcgaagctcacctgaaggagaatgctgcttattttcagttcttttctgacgtccgcgaggctgaaggtcagctccagaagctgcaggaagcattgcgccggaagtactcctgtgatcggagcgcaactgtgactaggctggaagatcttctccaggacgcccaggatgagaaggaacaacttaatgaatataaaggacacctgtcgggactggcaaagcgagctaaggcagtagtacagctaaagcctcggcaccccgcccacccaatgagggggagactgccgctcctggcagtgtgtgactacaaacaggtcgaagtgaccgtgcacaagggagacgagtgtcagttagtcgggcctgcacagcctagccattggaaggtgctgtcctccagtggatccgaggcagccgtgcccagtgtgtgctttctggtgcccccacctaatcaggaagcgcaggaggcagtcaccaggctcgaggctcagcaccaagctcttgtcaccctctggcaccaactacacgtagatatgaaatctttgcttgcgtggcagagtctgcgccgcgacgtgcagctcattcgttcatggtccctcgcaacctttcggacactcaagcctgaggaacagcgtcaggcacttcactcattggagctgcactaccaggcgttcctgcgggacagccaggacgcagggggatttggccctgaggataggctcatggctgagcgcgagtatggctcctgttcccatcattatcagcagcttctgcagagcctcgagcagggggcccaagaagagtctagatgtcagcgctgtatcagcgagctcaaagacattcgcctgcaattggaagcatgtgaaacccggactgtacatcgcctgcgccttccgctggacaaagagcctgcccgcgagtgtgcacagagaatcgctgagcagcaaaaagcgcaggcggaggtcgaagggctggggaagggcgtcgccagactcagcgctgaagccgaaaaagtcctcgcccttccggagccgtcccctgcagcacctaccttaaggagtgagctggagctgactctgggcaaattagaacaggttaggtccctgtctgcgatctacctcgaaaagctgaaaacaatttccctcgtgatcagaggcacccagggcgccgaggaggttcttcgcgctcatgaagagcagctaaaggaggcgcaggctgttccagcaacactgcccgaattagaagccactaaggcgtccctcaagaaactgagggcacaggccgaggcacagcagccaactttcgacgcgctgcgtgacgagctgcgaggtgctcaggaagttggagaaaggctccagcaaagacatggtgagagggacgtagaagtggagcgttggagggagcgggtcgcccaacttttagagcgctggcaggcggtgttggcacaaacggacgtgcgacaaagggaattagagcagttggggcgccaactgcggtattatcgggagtcagccgatcccctcggagcctggctgcaggatgcaagacgtcggcaagagcaaatccaagccatgccgctggcggactcccaagctgtgcgtgagcagttgagacaagaacaagctcttctggaagagattgaacgtcatggagaaaaggtggaggaatgccagcgattcgccaagcagtatataaatgccatcaaagactacgaactccagctcgttacctacaaggcccagctcgaaccagtggccagtcctgccaagaaacccaaagtgcagtccgggagcgagagcgtcatccaggaatacgtggatctgcgcacgcattactccgagttaacaacactaacttcacagtatatcaaattcatatctgaaaccttacgacgcatggaagaagaggaacggttagccgagcaacagcgggctgaggagcgcgaaagattagcagaagtggaggcagctctcgaaaaacaaaggcagctagcagaagctcatgctcaggccaaggcccaagccgaacgcgaggccaaagagttgcaacagaggatgcaggaagaggtggtgaggcgcgaagaggccgccgtggacgcccagcaacaaaagagaagcatccaggaggagctgcaacagctacggcagagcagtgaagctgagatccaagccaaggccaggcaggctgaggcggccgaaagatcacgcctccggatcgaggaagaaatacgggtggttagattacagcttgaggccaccgaaaggcagagggggggcgccgagggggaactacaggcattacgggcccgagctgaggaggcagaggctcagaagcggcaggcacaggaagaggctgagcgtctcaggaggcaggttcaggacgaatcccagagaaagagacaggctgaggtggaactggcatccagggtgaaagccgaggctgaagcggcccgggaaaaacagagggccttgcaggctctggaagaattgaggctacaggcagaggaggccgaaagacggctcagacaggctgaggtagagcgggctcgtcaagtgcaggtcgccttggagacagcccagcgcagcgcagaggctgaactgcagagcaagcgagcctcatttgctgagaagaccgctcagctggagcggagcctacaggaagaacacgtcgctgtggctcagctgcgcgaggaagctgaacggcgtgcccagcagcaagccgaagccgaaagagctcgcgaggaggcagaacgagaactggaacgttggcagctgaaggctaatgaggctctcaggctgaggctacaggccgaagaggtcgcacaacagaaatctctcgcacaggctgaggctgagaagcaaaaagaggaggctgagagagaggcacgacggagaggcaaagctgaggagcaagccgtgagacagcgcgaactcgccgagcaggaactggagaagcagcggcaactggcagagggtaccgctcagcagcggctagccgccgaacaggaacttattagactgagagcagaaaccgagcagggcgaacagcagaggcagcttctggaggaagaacttgcgcggctccaacgggaagctgccgcagccacgcagaaacgacaggagctggaggccgaactggcaaaggttagagccgaaatggaggtgttgcttgcctctaaagcgagggccgaagaggaatcccgttccacttccgaaaagagcaagcagcggctggaggccgaggctggtaggtttagggaactggcagaagaggctgctagattgcgtgctctggcagaggaggctaagcgtcagcggcagcttgccgaagaggacgcagcaaggcagagggctgaggcagagcgagtgcttgctgagaagctcgccgcgattggagaggcgaccagactgaagacggaggcagagattgccctcaaggagaaggaagccgagaatgaaagactacggcgccttgcggaggatgaggcatttcagaggcgtagactcgaggaacaggctgcacagcacaaggctgacatcgaggagcggctggcacagctccgcaaggcatcagatagtgagttagagcggcagaaaggtttagtcgaggacacacttcgccagaggagacaggtcgaagaggaaatcctggcactgaaggcatcctttgagaaagctgctgccggcaaagccgagctagaacttgagctgggacggatcaggtccaacgccgaggacacactgcgctctaaggaacaggcagagctggaagcggccaggcagaggcaactggcggctgaggaggaacgcagacgccgtgaggcggaggaaagggttcagaaatcactcgccgcagaagaggaagccgcccgccagaggaaggcagccctggaagaagtggaacgtttaaaggcgaaggtggaagaagcccggaggctccgtgaacgcgctgagcaggaatccgcccgccagctgcaactggcccaggaggccgctcagaagagattgcaggccgaggagaaggcgcacgcatttgccgtccagcagaaggaacaggagttgcagcagacgctgcagcaggagcagagtgtcttggatcaactgagaggggaggcagaagccgctagacgagccgctgaggaagccgaagaggcacgggtacaggcggagcgtgaagccgctcagagcaggaggcaagttgaggaggcagaacgccttaaacagagcgctgaggagcaagctcaggcgagagcccaagcgcaagctgctgcagagaaactgagaaaggaagcagagcaggaagctgccagacgcgcgcaagccgagcaggcggctcttagacaaaagcaagctgcagatgccgagatggagaaacacaaaaagttcgcggaacagacgttgaggcagaaagcacaggtagagcaggaacttactaccttacggctgcagctcgaagagacagatcaccagaaaaatctgctggacgaagagctccagcgtctgaaagcagaggctaccgaggcagcccgccagcgaagccaggttgaggaagaattattctcggtgagagtgcaaatggaggagttgtcgaaactaaaagctaggattgaggctgagaacagggcactgatcctgagagataaggataacacgcagcgttttctgcaggaagaagccgagaaaatgaagcaggtcgcggaggaggccgctcggctaagcgtcgcagcccaggaggccgcaagattacggcagctagcagaggaagacctcgctcaacagcgggctctagcagaaaagatgctgaaggagaaaatgcaggctgtgcaggaagcaacccgcctgaaagccgaggccgaactgctgcagcaacaaaaagaactggctcaagagcaggctagaagactgcaggaggacaaagaacagatggcacagcaattggcagaggaaacccagggctttcagagaaccttggaggcagagcggcagcgtcagctggaaatgagcgcagaggccgagcgcctcaagcttcgcgtggcagaaatgagtagggcccaggcacgagcggaagaggatgcccagcgctttagaaagcaggcagaggagattggtgaaaagctccatcgcacggagctcgcaacacaggagaaagtaaccttagtccaaaccctcgaaattcagagacagcagtcggatcacgacgctgagcggctcagagaggccattgcagaactcgagcgtgagaaagagaagctgcaacaggaagcaaaactgttgcagctcaaatccgaggagatgcaaacagtgcagcaagagcagctgttgcaggagacgcaggcgctccagcagtctttcctctccgaaaaagattccctgctgcaacgggaaaggttcatcgaacaggagaaggccaaactggaacagctgtttcaggacgaggtggctaaggcacaacagttgcgcgaagaacaacagcgacagcaacagcagatggagcaggagcggcagcggctggtggcttcaatggaggaggcgcggaggcggcagcatgaagcggaggaaggagtacggcggaaacaagaagaattacagcaacttgagcagcagcgccggcaacaagaagaacttcttgcagaagagaaccagaggctgagagaacagctgcaactgctcgaagagcagcaccgcgcggccctggcacacagcgaagaggtgaccgcaagccaggtagcagctactaagaccctgccaaatggacgagacgccttggacgggcccgctgcagaggcagaacccgaacattccttcgatgggctgaggcggaaagtgtctgcacagcgcctgcaggaagctggcatcctgtctgctgaagagctccaaaggctggcccagggtcacaccaccgtggatgaactggcccgacgagaggatgtcagacactacctgcagggccgcagcagtattgccggtctgctgctaaaggccaccaacgagaagctttcagtttacgccgccctgcagcgccagcttctgtcccctggaaccgcccttatcctgctggaggctcaggccgcctccgggttcctgctggaccctgttagaaacaggcggctgaccgtcaatgaggctgttaaagagggggtggttggacccgagctgcaccacaagctgctatcagcagaacgggctgtgaccggttacaaagacccttacacaggccagcagatttccctctttcaagccatgcagaaaggattgatagtccgcgagcatgggatccgcttattagaggctcagattgccactgggggggtgatagaccctgtgcatagccaccgcgtgcccgtggatgtggcatacaggagaggctatttcgacgaggaaatgaatcgggttctcgcagatcctagcgacgacactaaagggttctttgacccaaacacccatgaaaatctgacctacctgcagctactagagcggtgtgtggaggaccctgagactggcttgtgccttctgcctcttacagacaaggccgccaaagggggggagttggtctacaccgacagtgaggcgagagacgtctttgagaaagctacagtgagcgcaccctttgggaaattccagggcaagaccgtgacaatctgggagattataaatagcgagtatttcacagccgagcagcgccgagatttgctgcgccaatttcgtaccggccggataaccgtagagaaaattattaagataattatcaccgtggtcgaggagcaggaacagaagggacggttgtgcttcgaggggctccggtccctggtcccggcagcagagcttctggagtcccgggtcatcgaccgagaactgtatcagcagctgcagcgaggggagcgctcagttcgcgatgtagcggaggtcgatacagtgcgccgagcactacgaggggccaatgtcatcgcgggtgtttggctggaggaggcaggtcaaaagctgtcaatttataacgctctcaaaaaagatttgctaccttccgatatggccgtggctttgttagaagcccaggccggaactggccatatcattgacccggccacgagcgcacgtctcacagtagacgaggcagtgcgcgcgggcttggttggtccggagtttcatgagaaattgctctctgcagagaaagccgtgacagggtaccgcgatccctacactggacagtccgtatcactctttcaggcactcaaaaaaggcttgatccctagggagcaggggctccgtctgctggacgctcagctgtcaaccggaggcattgtagacccatctaaatctcaccgcgtgcctttggacgtggcttgcgcccgagggtgtctcgacgaggaaacatctcgagctctctctgctcctagagcagatgcaaaagcctactccgaccctagcaccggcgaacccgctacttacggagagctgcagcagcgctgccgccccgaccaactgacaggtctcagcctgctacccctctccgaaaaggccgcccgtgcccggcaagaggagctgtactcagaactgcaggcgcgggagacatttgagaagactcccgtggaggttccagtgggcggttttaaaggacggactgtcactgtttgggagctgattagcagcgagtattttactgccgagcagcgccaggagctgcttcgtcagttcaggactgggaaagttaccgttgagaaggttattaaaattttgatcacaattgttgaggaagtcgagacgttacggcaagagcggctgtctttttctggtctacgcgctccagttcccgcttccgagttgctcgcttctggcgttttatcccgcgcccaattcgaacaactaaaggacgggaaaacaacagtaaaggatctgtccgaactgggcagcgtgaggactctgcttcagggatccggctgtctggccgggatttacctggaggatactaaggagaaggtttctatttacgaggccatgcgccggggcctgctcagggccaccaccgccgccctgcttctggaagcccaagctgctacaggattcctggttgatcccgtgcgaaatcaaagactgtacgtgcatgaggcggtaaaggctggcgtggtgggccccgagctccacgagcagctgctcagtgccgagaaggcagtgactggataccgagacccctatagtggatctaccatttcactctttcaagccatgcagaagggccttgtattacggcaacacgggattcgcctgcttgaagcgcagattgcgacaggcggaattattgatccagtgcactcacatagagttcccgttgacgtggcttatcagagaggctacttcagcgaggagatgaaccgagtactcgctgacccatccgatgacaccaagggtttctttgatcccaatacccacgagaacttaacgtataggcagcttctggagcggtgcgtagaagaccccgagactggactcaggctactgccacttaaaggggcggagaaggcagaagtagttgagaccactcaagtgtatacagaagaagagacacggcgggcctttgaggagacccagatagatatcccgggaggggggtcacacggcggctccacaatgtcactatgggaagtcatgcagtctgacctgatcccagaggagcagcgcgcccagcttatggccgactttcaagcaggacgggtaacaaaggagagaatgatcataatcataatcgaaatcattgaaaagacagagataatcaggcagcagggactcgcttcatatgactatgtccgtagaaggctgaccgccgaagacctattcgaagccagaattatatctctggaaacctacaatctgctcagggaaggcacccgttctctgagagaggcactggaggccgagtcagcttggtgctatctctacggaacaggaagcgtcgcaggagtctatctgcccggcagccgtcagaccctttcaatctaccaggctctgaaaaagggattgctttcagccgaggtcgcacggctcctgttggaagcccaagccgcaactggattcttgctggaccccgtgaagggcgaacggcttacagtggatgaggctgtgcgcaaaggtctcgtgggacctgaacttcatgacagattactttccgctgaacgggcagtaaccgggtatagggatccctatacagagcagacaatttcactgtttcaggccatgaaaaaggagctcattcccactgaggaggccctacgccttctagatgctcagctcgctacaggaggtattgtggatccaagactaggatttcacttgcccctcgaagtagcctaccaacgggggtatcttaataaggatacgcatgaccagctgagtgagcctagcgaagtcaggagctatgtggatcccagcacggacgagcgcctgagctacactcagctcttaagaagatgtaggcgcgacgacggcacaggccagctgctactgcccttgtcggatgcccgtaagcttacgtttcgtggcctccgcaagcaaatcaccatggaggagctagtgcggtcacaggtgatggacgaagctacggctttgcagttgcgggagggcctcacctctatagaagaggtgacaaagaatcttcagaaattcttagagggcacaagttgcattgctggtgtgttcgtggacgctaccaaagaaaggttgagcgtgtaccaggccatgaaaaaaggtatcatcagacccggaacagcttttgagctcttggaggctcaagcagccaccggctacgttatcgaccccataaaggggctaaagcttaccgtggaagaggccgttaggatgggaattgtaggacctgaatttaaggataaactcctctctgcagaaagagcagtaacaggttacaaagacccctacagtgggaaacttatttctctgtttcaagccatgaaaaaaggtctgatcctgaaggaccacggcataagattactggaggcgcagatcgccacaggcggcatcattgaccctgaagagtcacaccgacttccggtggaagtggcctataagagggggctattcgatgaggagatgaacgagattctgacagatcccagcgacgacacaaagggattcttcgacccaaacactgaggagaacctcacgtatctccagctgatggaacggtgtataaccgacccacagacaggactttgtctcctgccactcaaggagaagaaacgggagcggaagacctccagcaaatcaagcgtgagaaagagaagggtggtgatcgtggaccccgagaccggcaaagagatgtccgtgtatgaagcataccgcaaaggcctaatagatcatcagacctatctcgagctgtcagaacaagagtgcgaatgggaggagatcacgatttcctctagcgacggtgtggtcaaaagtatgataatcgacagaaggtcaggcaggcaatatgacatagacgacgctatcgccaagaatttaattgatcggtccgcactcgatcagtatcgagctgggactctgtcgatcaccgaattcgccgatatgctgtcagggaatgccggagggttccgctcccggtccagtagcgtgggctcatcttcctcatatccgatctcgccagctgtcagcaggacccaactggcctcatggtctgacccaacagaagagacaggaccggtagcaggaatactcgacacagagactctcgagaaggtaagtattacagaggccatgcaccggaacctcgtggataacatcaccggacagcggcttttagaggcccaggcctgcacaggcggaatcatcgatcctagcaccggtgaacgcttccccgtgaccgacgccgtcaataaaggcttggtggacaagatcatggtggatcgcattaacctcgcccaaaaagctttttgtgggtttgaggatccacggacaaagacgaaaatgtctgccgcccaggccctcaagaaaggttggctctactatgaagctggacagcgttttctggaggtacaatacctgactggtggccttatcgagccggacacccccggcagagtcccactcgatgaggctctccagaggggtactgttgatgcacgaacagcccagaaacttcgggatgtgggagcctatagcaaatatctcacttgtccgaagacaaagctcaagattagctacaaagacgccctggacagaagcatggttgaagagggaacgggccttcggttgctggaagcggccgcgcagtctactaaaggctattattctccttacagcgtgtccggttccggctccacagccggaagtcggacagggagccgaacagggagccgagccggtagtcgccgagggagtttcgacgctaccggttccggttttagcatgactttcagtagctctagttatagctctagcggatacggccgacgatatgcttctgggtcttctgccagcctcgggggccctgaatcagctgtggcgtag

SEQ ID NO: 262169 - DNA, 15249 bp, Artificial Sequence
  derived and/or modified sequence
gagcccgcgccctcacgctcagcaccccagcctgcctgcccgcccgcctgccctgccgctgcccgctgtcacaccctgtagcgcgggagcttctcgcagcgccccgggccttctcgtggtaccctgcctgctgcctttgcccccgcactgactgcccggctccagcagccatggtggccggcatgctcatgccacgggaccagctgcgggccatctatgaggtgctcttccgcgagggcgtgatggtggccaagaaggaccggcggccccgcagcttgcacccccatgtgcccggcgtcaccaacctgcaggtcatgcgtgccatggcgtccctgcgggcacggggcctggtccgcgagacctttgcctggtgccacttttactggtacctcaccaatgaaggcatcgcccacctccgccagtacctgcacctgccgccagagatcgtgcccgcctctctgcagcgcgtgcgccgccccgtcgccatggtgatgcccgcacgccgcaccccccacgtgcaggctgtgcagggtcccctgggctccccacccaagcgggggccgctgccgacggaggagcagcgggtctaccgtcggaaggagcttgaggaggtgtcacctgagacccctgtggtgcctgctaccacccagcggaccctggccaggccaggcccggagcctgccccagccacagatgagcgggatcgtgtgcagaagaaaaccttcaccaagtgggtcaacaagcacctcatcaaggcccagaggcacatcagtgacctgtatgaagacctccgcgatggccacaacctcatctccctgctggaggtcctctcgggggacagcctgccccgggagaaggggaggatgcgtttccacaagctgcagaatgtccagattgccctggactacctccggcaccgccaggtgaagctggtgaacatcaggaatgatgacatcgctgacggcaaccccaagctgacccttggcctcatctggacaatcattctgcacttccagatctcagatatccaggtgagtgggcagtcggaggacatgacggccaaggagaagctgctgctgtggtcgcagcgaatggtggaggggtaccagggcctgcgatgcgacaacttcacctccagctggagagacggccgcctcttcaatgccatcatccaccggcacaagcccctgctcatcgacatgaacaaggtgtaccggcagaccaacctggagaacctggaccaggccttctctgtggcggagcgggacctgggagtgacgcggctcctggaccctgaggacgtggatgtccctcagcccgacgagaagtccatcatcacctacgtctcgtcgctgtatgacgccatgccccgcgtgccggacgtgcaggatggggtgagggccaacgagctgcagctgcgctggcaggagtaccgggagctggtgctgctgctgcttcagtggatgcgacaccacacggccgcctttgaggaacgcaggttcccctccagcttcgaggagattgagatcctgtggtctcagttcctgaagtttaaggagatggagctaccagccaaggaggccgacaagaacaggtccaagggcatctaccaatccctggagggagcggtgcaagcaggccagctcaaggtgccccctggctaccacccgctggatgtggagaaggagtggggcaagctgcacgtggccatcctggagcgggagaagcagctccgcagcgagtttgagaggctggagtgtcttcagcgcatcgtgaccaagctgcagatggaggcggggctgtgtgaggagcagctgaaccaggccgacgccctgctgcagtcggatgtccggctgctggctgcaggcaaagtgccacagcgggcgggggaggtggaacgggacttggacaaggcggatagcatgatccggctgctcttcaacgacgtgcagaccctcaaggatggacggcacccgcagggcgagcagatgtaccgcagggtgtaccgtctgcacgagcgcctggtagccatccgcaccgagtacaacctacggctgaaggcaggcgtggcggcccctgcaacccaggtggcccaggtgactctgcagagtgtgcagaggcgccccgagctggaggactccactctgcgctacctgcaggacctgctggcctgggtggaggagaaccagcaccgtgtggatggcgctgagtggggtgtggacctgcccagcgtggaggcgcagctgggcagccaccgaggcctgcaccagtccatcgaagaattccgggccaagatcgagcgggcacggagtgacgagggccagctctcccccgccacccggggtgcctaccgtgactgcctgggtcggctggacctgcagtacgccaagctgctgaactcctccaaggcccgcctcaggtccctggagagcttgcacagctttgtggcagccgccactaaggagctaatgtggctgaatgagaaggaggaggaggaggtgggcttcgactggagcgaccgcaacaccaacatgaccgccaagaaggagagctactcggcgctgatgcgggagctggagctgaaggagaagaagatcaaggagctccaaaatgctggggaccggctgctgcgggaggaccacccggcccggcccacggtggagtccttccaggcggccctgcagacgcagtggagctggatgctacagctgtgctgctgtatcgaggcacacctgaaggagaacgctgcctactttcagttcttctcagatgtgcgggaggccgaggggcagttgcagaagctgcaggaggcactgcgtaggaaatacagttgtgatcgctccgccaccgtcacccggctggaggacctgctgcaggatgcccaggacgagaaggaacagctgaacgagtacaagggccacctctcaggcctggccaagcgggccaaggccgtcgtgcagctgaagccccgccacccagcccaccccatgcggggccgcctgcccctgctggccgtgtgcgactataagcaggtggaggtgactgtgcacaagggtgacgagtgccagctggtgggccctgcacagccgtcccactggaaggtgctcagcagctccggcagcgaggccgccgtgccctccgtgtgcttcctggtgcccccgcccaaccaggaggcccaggaggccgtcaccaggctggaggcccagcaccaggccctggtcacgctgtggcaccagttgcacgtggacatgaagagccttctggcctggcagagccttcgccgcgacgtgcagctcatccgctcctggtccctggccacgttccgcaccctgaagccagaggagcagcgccaagccctgcacagcctggagctgcactaccaggccttcctgcgggacagccaggacgcgggcggcttcggacccgaggaccggctgatggctgagcgcgagtacggctcctgcagccaccactaccagcagctgctgcagagcctggaacagggtgcacaggaagagtctcgctgccagcgctgcatctccgagctcaaagacatccggctgcagctggaggcctgtgagacgcgcaccgtgcaccgcctgcggctgccgctggacaaagagccggcacgggagtgtgcccagcgcatcgccgagcagcagaaggcacaggcagaggtggaggggctgggcaagggggtcgcccggctctctgccgaggccgagaaggtcttggccctaccagagccatcgcctgcggcccccacgctgcgctcggagctggagctgacgctgggcaagctggagcaggtccgcagcctgtctgccatctacctggagaagctcaagaccatcagcctggtgatccgcggcacgcagggggccgaggaggtgctcagggcccacgaggagcagctcaaggaggcccaggccgtgccggccaccctcccggagctcgaggccaccaaggcctctctgaagaagctgcgggcccaggccgaggcacagcagcccacgttcgacgccctgcgggatgagctgcggggggcacaggaggtgggggagcgactgcagcagcggcacggggagcgggacgtggaggtggagcgctggcgggagcgggtcgcccagttgcttgagcgctggcaggctgtgctggcccagaccgacgtgcggcagcgcgagctcgagcaactgggccgccagctgcgttactaccgcgagagtgcagaccccttgggcgcctggctgcaggacgccaggcggcggcaggagcagatccaggccatgccgctggccgacagccaggctgtgcgggagcagctgcggcaggagcaggccctgctggaggagatcgagcgccacggcgagaaggtcgaggagtgccagaggtttgcgaaacagtacatcaacgccatcaaggactatgaactccagctggtgacgtacaaggcgcagcttgagccggtggcctccccggccaagaagcccaaggtccagtcgggatcagagagtgtcatccaggagtacgtggacctgcgtacgcactacagcgagctgaccacactgacgagccagtacatcaagttcatcagcgagactctgcggcgcatggaggaggaggagaggctggctgagcagcagcgggcagaggagcgcgagcggctggccgaggtggaggccgcgctggagaagcagcggcagctggccgaggcgcacgcccaggcaaaggcacaggcggagcgggaggcgaaggagctgcagcagcgcatgcaggaggaggtggtgcggcgggaggaggcggcggtggacgcgcagcagcagaagcgcagcattcaggaggagctgcagcagctgcggcagagctcggaggcggagatccaggccaaggcccggcaggcagaggcggctgagcgcagccggctgcgcatcgaggaggagatccgcgtggtgcgcctgcagttggaggccaccgagcgccagcgtggcggggctgagggggagctgcaggcactgcgtgcacgggcggaggaggctgaggcacaaaagcgacaggcgcaggaggaggccgagcgcttgcggaggcaggtgcaggacgagagccagcgtaagcggcaggcggaggtggagctggcctcgcgcgtgaaggccgaggccgaggcggcgcgcgagaagcagcgggccctgcaggccctggaggagctgcggctgcaggcggaggaggcggagcggcgcctgcggcaggccgaggtggagcgagcgcggcaggtacaggtggccctggagacggcgcagcgcagtgcagaggcggagctgcagagcaaacgcgcctccttcgccgagaagacggcacagctggagcgctccctgcaggaggaacacgtggctgtggcacagctgcgggaggaggctgagcggcgggcacagcagcaggccgaggccgagcgggcgcgcgaggaggcagagcgggagctggagcgctggcagctcaaggccaacgaggcgctacggctgcggctgcaggcggaggaggtggcgcagcagaagagcctggcgcaggccgaggctgagaagcagaaggaggaggcggagcgcgaggcgcggcggcgcggcaaggcggaggagcaggccgtccggcagcgggagctggctgaacaagagctggagaagcagcggcagctggcggaaggcaccgcgcagcagcgcctggccgcggagcaggagttgatccggctgcgggccgagacggagcagggggagcagcagcggcagctgctggaggaggagctggcccggctgcagcgtgaggcggctgcagccacgcagaaacggcaggagctggaagccgagctggccaaggtgcgggccgagatggaggtgctgctggccagcaaggcgagggctgaggaggagtcgcgctccaccagcgagaagtccaagcagaggctggaggccgaggccggccggttccgcgagctggccgaggaggccgcccgcctgcgtgccctggcggaagaggccaagcggcagcggcagctggccgaggaagacgcggcgcggcagcgggccgaggcggagcgggtgcttgcggagaagctggccgccatcggcgaggccacgcggctcaagacggaggcggagatcgcgctcaaggagaaggaggcggagaacgagcgcctgcggcggctggcggaggacgaggccttccagcggcggcggctggaggagcaggccgcgcaacacaaggctgacatcgaggagcgcctggcccagctgcgcaaggcatcggacagcgagctggagcggcagaaggggctggtggaggacacgctgaggcagcggcggcaggtggaggaggagatcctggcgctgaaggcgagcttcgagaaggcggccgctggcaaggcggagctggagctggagctgggacgcatccgcagcaacgcggaggacacgctgcgcagcaaggagcaggccgagctggaggctgcgaggcagcggcagctggcggcggaggaggagcggcggcgccgtgaggctgaggagcgcgtgcagaagagcctggcggccgaggaggaggccgcacggcagcggaaggcggcgctggaggaagtcgagcggctgaaagccaaggtggaggaggcgcggcgcctgcgggagcgagcggagcaggagtcggcgcggcagctgcagctggcccaggaggccgcccagaagcggctgcaggcggaagagaaggcacacgccttcgcggtgcagcagaaggagcaggagctacagcagacgctgcagcaggagcagagcgtgctggaccagctgcgcggcgaggcggaggcggcccggcgggcggctgaggaggcggaggaggcccgggtgcaggcggagcgtgaggcggcgcagtcccggcggcaggtggaagaggccgagcggctgaagcagtcggcagaggagcaggcacaggcccgggctcaggcacaggcggctgcagagaagctgcgcaaggaggccgagcaagaggcggcgcggcgggcacaggcggagcaggcggccctgcggcagaagcaggcagctgacgcggagatggagaagcataagaaattcgccgagcagacgctgcggcagaaggcgcaggtggagcaggagctgacaacactgcggctgcagctggaggagaccgaccaccagaagaacctgctggacgaggagctgcagcggctgaaggcggaggccacggaggccgcacgccagcgcagccaggtggaggaggagctcttctcggtgcgcgtgcagatggaggagctgagcaagctcaaggcacgcatcgaggctgagaaccgcgcactcatcttgcgtgacaaggacaatacgcagcgcttcctgcaggaggaggctgagaagatgaagcaggtggcggaggaggccgcgcggctgagtgtggcggcccaagaggctgcgcgactgcggcagctggcagaggaggacctggcacagcagcgggccttggcagagaagatgctcaaggagaagatgcaggcggtgcaggaggccacgcgactcaaggctgaggcggaactgctgcagcagcagaaggagcttgcgcaggagcaggcgcggcggctgcaggaggacaaggagcagatggcgcagcagctggcggaggagacgcagggcttccagcggacgctggaggccgagcggcagcggcagctggagatgagcgctgaggctgagcgcctcaagctgcgtgtggccgagatgagccgagcccaggcccgcgctgaggaggacgcccagcgcttccggaagcaggcggaggagatcggtgagaagctgcaccgcacggagctcgccacccaggagaaggtgaccctggtgcagacactggagatccagcgacagcagagtgaccatgatgccgagcgcctgcgggaggccatcgctgagctggagcgtgagaaggagaagctccaacaggaggccaaactgctgcagctcaagtctgaggagatgcagacggtgcagcaggagcagctgctgcaggagacgcaggccctgcagcaaagcttcctctctgaaaaggacagcctgctacagcgggagcgcttcatcgagcaggagaaggccaagctggagcagctcttccaggacgaggtggccaaggcacagcagctgcgtgaggagcagcagcggcagcagcagcagatggagcaggaacggcagcggctggtggccagcatggaggaggcgcggcggcggcagcatgaggccgaggagggcgtgcggcgcaagcaggaggagctgcagcagctggagcagcagcggcggcagcaggaggagctgctggctgaggagaaccagaggctgcgtgagcagctgcagctcctggaggagcagcaccgggccgcgctggcgcactcagaggaggtcactgcctcgcaggtggctgccacaaagaccctgcccaatggccgggatgcacttgatggccccgcggcagaggcagagccggagcacagcttcgatggcctgcggcggaaggtgtcagctcagaggctgcaggaggccggcatcctgagtgcggaggagctgcagcggttggcgcagggccacaccacggtggacgagctcgcacggcgggaagacgtgcgccactacctgcagggccgcagcagtatcgcagggctgttgctgaaggccaccaatgagaagctgagtgtttacgccgccctgcagaggcagctgctgagtcccggcacggccctcatcctgctggaggcgcaggcggcctcaggcttcctgctggaccctgtgcggaaccggcggctgaccgtcaacgaggctgtgaaggagggtgtggtgggccccgagctgcaccacaagctgctgtcggccgagcgcgccgtcactggctacaaggacccctacactggccagcagatctctctcttccaagccatgcagaagggcctcatcgtccgggagcacggcatccgcctgctggaggcccagatcgccacgggcggcgttatcgaccccgtgcacagccaccgcgtgcccgtggacgtggcctaccggcgcggctacttcgacgaggagatgaaccgcgtcctggcggaccccagcgacgacaccaagggcttctttgaccccaacacgcacgagaacctcacgtacctgcagctactggagcgctgcgtggaggaccccgagacgggcctgtgccttctgccactcacggataaggctgccaagggcggggagctggtctacactgactccgaggcccgggacgtctttgagaaggccaccgtgtctgcgccgttcggcaagttccagggcaagacggtgaccatttgggagatcatcaactcggaatacttcacggcagagcagcggcgggacctgctgcggcagttccgcacgggccggatcacagtggagaagatcatcaagatcatcatcacggtggtggaggagcaggagcagaagggccggctttgctttgagggcctgcgcagcctggtgccagccgccgagctgctggagagcagggtcatcgaccgcgagctctaccagcagctgcagcgaggtgagcgctctgtgcgagacgtagccgaggtggacactgtgcggcgggctctccggggtgccaacgtcatcgcgggtgtatggctggaggaggcggggcagaagctgagtatctacaatgccctgaagaaagacctgctgccatccgacatggccgtggccctgttggaagcccaggccggcaccgggcacatcatcgaccccgccaccagcgcccggctgaccgtggacgaggcagtgcgtgctggcctggtgggccccgagtttcatgagaagctgctatcagccgagaaggctgtgacagggtacagggacccctacacagggcagagcgtctccctgttccaggccctgaagaagggcctcattccccgggagcagggcctgcgcctgttggacgcccagctgtccacgggcggcatcgtggaccccagcaagagccaccgcgtgcccctggatgtcgcctgcgcccgaggctgcctggatgaggagaccagcagggccctgtcggcaccaagggccgacgccaaggcctacagtgaccccagcacaggggagccggccacctacggcgagctccagcagcggtgccggcccgaccagctgaccgggctgagcctgctgccgctctcagaaaaggctgctcgggcccggcaggaggagctctactcagagctgcaggcccgtgagacctttgaaaagaccccggttgaggtccccgtgggtggcttcaagggcaggacggtgacggtgtgggagctcatcagctctgagtacttcactgcggagcagcggcaggagctgttgcgtcagttccgcacgggcaaggtcaccgtggagaaggtcatcaagattctcattaccatcgtggaggaggtggagaccctgcggcaggagaggctgtccttcagcggcctccgtgcccctgtgccagccagcgagctcctggcttccggggtcctcagcagagcccagtttgagcagctcaaggacggcaagacgacggtcaaggacctttcggagctgggctccgtgcggacgctgctgcagggcagtggctgcctcgccggcatctacctggaggacaccaaggagaaggtgtccatctacgaggccatgcgccggggcctgctgagagccacaacggctgcgctcctgctggaggcgcaggcggccactggcttcctggtggaccccgtgcggaaccagcgcctgtatgtccacgaggccgtgaaggcgggcgtggtgggccccgagcttcacgagcagctgctgtctgccgagaaggccgtcaccggctacagagacccctactcgggcagcaccatctccctcttccaggccatgcagaagggcctggttctccggcagcacggcatccgcctgctggaggcccagatcgccacgggcggcatcatcgaccccgtgcacagccaccgcgtgcctgtggacgtggcctaccagcgcggctacttcagtgaggagatgaaccgcgtcctggcggaccccagcgacgacaccaagggcttctttgaccccaacacgcatgagaacctcacgtacaggcagctgctggagcggtgcgtggaggaccccgagacgggcttgcgccttctgccactgaaaggggcggagaaggctgaggtggtggagaccacgcaggtgtacactgaggaggagacaagaagggcatttgaagagacacagatcgacattcccggcggcggcagccacggcggctccaccatgtccctgtgggaggtgatgcagtcggacctgatccccgaggagcagcgggcccagctgatggctgacttccaggccggccgggtgaccaaggaacgcatgatcatcatcatcatcgagatcattgagaagacagagatcatccgccagcagggtctggcctcctacgactacgtgcgccgccgcctcacggctgaggacctgttcgaggctcggatcatctctctcgagacctacaacctgctccgggagggcaccaggagcctccgtgaggctctcgaggcggagtccgcctggtgctacctctatggcacgggctccgtggctggtgtctacctgcccggttccaggcagacactgagcatctaccaggctctcaagaaagggctgctgagtgccgaggtggcccgcctgctgctggaggcacaggcagccacaggcttcctgctggacccggtgaagggggagcggctgactgtggatgaggctgtgcggaagggcctcgtggggcccgagctgcacgaccgcctgctctcggctgagcgggcggtcaccggctaccgtgacccctacaccgagcagaccatctcgctcttccaggccatgaagaaggagctgatccctactgaggaggccctgcggctgctggatgcccagctggccaccggcggcatcgtggacccccgcctgggcttccaccttcccctggaggtggcttaccagcgtggctacctcaacaaggacacgcacgaccagctgtcagagcccagcgaggtgcgcagctacgtggacccgtccaccgacgagcgcctcagctacacgcagctgctcaggcggtgccgtcgtgacgacggcaccggccagctgctcctgccactgtcggacgcccgcaagctgaccttccgtggcctgcggaagcagatcaccatggaggagctggtgcgctcgcaggtcatggacgaggccacggcgctgcagctgcgggagggcctgacctccatcgaggaggtcaccaagaacttgcagaagttcctggaaggcaccagctgcatcgctggtgtcttcgtggacgccaccaaggaacggctctcggtgtaccaggccatgaagaagggcatcatccgccccggcacagcctttgagctcctggaggcgcaggcggccaccggttacgtcatcgaccccatcaagggactgaagctgacggtggaggaggctgtgcgtatgggcattgtgggccccgagttcaaggacaagctgctgtcggccgagcgcgccgtcactgggtacaaggacccctactctgggaagctcatctccctcttccaggccatgaagaagggcctgatcctgaaggaccatggcatccgcctgctggaggcccagatcgccacgggcggcatcatcgaccctgaggagagccaccggctgcccgtggaggtggcctacaagcgcggcctcttcgatgaggagatgaacgagatcctgaccgacccctcggacgacaccaagggcttctttgaccctaacacggaggagaacctcacctacctgcagctgatggagcgttgtatcactgacccccagacgggcctgtgtctcttgccgctgaaggagaagaagcgggagcggaagacgtcctccaagtcctccgtgcgcaagcgccgagtggtcatcgtggaccccgagacgggcaaggagatgtcagtgtacgaggcctaccgcaagggcctgattgaccaccagacgtacctggagctgtccgagcaggagtgcgagtgggaggagatcaccatctcctcctcggacggcgtggtcaagtccatgatcatcgaccgccgctccgggcgccagtacgacatcgatgatgccatcgccaagaacctcatcgaccgctcggcactggaccagtaccgcgccggcacgctctccatcaccgagttcgccgacatgctctcgggcaacgccggtggtttccgctcccgttcctcctcggtgggatcctcctcctcctaccccatcagccccgccgtctccaggacccagctggcctcctggtcagaccccactgaggagacgggccccgtggctggcatcctggacacggagacgctggagaaggtgtccatcaccgaggccatgcaccggaacctggtggataacatcacggggcagcggctgctggaggcgcaggcctgcaccgggggcatcatcgaccccagcaccggtgagcgcttccctgtcaccgacgccgtcaacaagggcctggtggacaagatcatggtggaccgcatcaacctggcccagaaggccttctgcggcttcgaggacccacgcaccaagaccaagatgtcggccgcccaggccctgaagaagggctggctctactacgaggccggccagcgcttcctggaggtgcagtacctgaccggcggcttgatcgagcccgacacgccgggccgcgtgcccctggacgaggccctgcagcgcggcacggtggacgcccgcaccgcacagaagctgcgtgacgtgggcgcctactccaagtacctcacctgccctaagaccaagctcaagatctcctataaggacgcgctggaccgcagcatggtggaggagggcacggggctgcggctgctggaggctgccgcgcagtccaccaagggctactacagcccctacagcgtcagcggctccggctctaccgctggctcccgcaccggctcgcgcaccggctcccgggccggctcccgccgcggcagctttgacgccaccggctccggcttctccatgaccttctcttcatcctcctactcctcctcgggctacggccgccgctacgcctcggggtcctcggcctccctggggggccctgagtctgccgtggcctgaggctgcctgcgcccaccccgctctgcatgcggcccagcccggctcccaccgaggcgcgggggccgttttcaacgcttaaaggtgtcttcctcccaagtggtgcctaaagtttaaccaaaaagaccagactaatatattaatatatatctgctgtccagacagcctgtatcttgggggacagggctggcccagccctgctggccgcctcaccccctcgggtctcctcactcccttctacctgccactcacacagccaggtgccttggagggtcccaagctgggccccagcccaccctcctgtcttcccagggtagcccgcctgccagtcctagctgcacagggcagctgggcccaaccctgtctgtagagggccctggtgtttctagcactggcctgcacggtgggccttgctggggacggggggccccagtcagcctctctcccagtctacccagagaagccccttccccatgggaagacgaggccctcgggcccagcccccacagtgctgtctgatctgtgctttccagctcaccccccacactcactcctgagacccctggcctccggcgtcagcctccagcctctgttcccctagtaagtgccttccatgtcggcctctaaccccaggccccgaggacccagacccagtggggaggcggacgttccagccggcatggctgggaactgcagacctgtcctcctggtgggtccaggggcccctccagcttgtggagccccacactggggtgccgcctgcccgtctctctcccatggagccccagccccctttgggcccagggacaccagccaggctctgtgctgaccctcctgttgcacccagccctggtctcagcagcgaccacccctgcctccaccctctgagctttgcatgttccactaaccccgggcgggtggcaggtggaggtgtcaggctgctggcgcctctgcaagggcagaacactaacctgaccgtgggcggggccttgcggtatccgcccccaataaaagcaattccaacctt

SEQ ID NO: 262170 - DNA, 14797 bp, Artificial Sequence
  derived and/or modified sequence
tgagctgagcctgtgccgagtgagcgtctcgtggggccgccagccttcagctgcctgtgtgccacacggggctgcccagagcaccgtgcctgaggccgagggtccgggcgacgaaggtgtgggggcagcatgtctcagcaccagctccgcgtgccgcagcccgagggcctgggccgaaagagaaccagctcggaggacaacctgtacctggctgtgctcagggcctctgagggcaagaaagatgagcgggatcgtgtgcagaagaaaaccttcaccaagtgggtcaacaagcacctcatcaaggcccagaggcacatcagtgacctgtatgaagacctccgcgatggccacaacctcatctccctgctggaggtcctctcgggggacagcctgccccgggagaaggggaggatgcgtttccacaagctgcagaatgtccagattgccctggactacctccggcaccgccaggtgaagctggtgaacatcaggaatgatgacatcgctgacggcaaccccaagctgacccttggcctcatctggacaatcattctgcacttccagatctcagatatccaggtgagtgggcagtcggaggacatgacggccaaggagaagctgctgctgtggtcgcagcgaatggtggaggggtaccagggcctgcgatgcgacaacttcacctccagctggagagacggccgcctcttcaatgccatcatccaccggcacaagcccctgctcatcgacatgaacaaggtgtaccggcagaccaacctggagaacctggaccaggccttctctgtggcggagcgggacctgggagtgacgcggctcctggaccctgaggacgtggatgtccctcagcccgacgagaagtccatcatcacctacgtctcgtcgctgtatgacgccatgccccgcgtgccggacgtgcaggatggggtgagggccaacgagctgcagctgcgctggcaggagtaccgggagctggtgctgctgctgcttcagtggatgcgacaccacacggccgcctttgaggaacgcaggttcccctccagcttcgaggagattgagatcctgtggtctcagttcctgaagtttaaggagatggagctaccagccaaggaggccgacaagaacaggtccaagggcatctaccaatccctggagggagcggtgcaagcaggccagctcaaggtgccccctggctaccacccgctggatgtggagaaggagtggggcaagctgcacgtggccatcctggagcgggagaagcagctccgcagcgagtttgagaggctggagtgtcttcagcgcatcgtgaccaagctgcagatggaggcggggctgtgtgaggagcagctgaaccaggccgacgccctgctgcagtcggatgtccggctgctggctgcaggcaaagtgccacagcgggcgggggaggtggaacgggacttggacaaggcggatagcatgatccggctgctcttcaacgacgtgcagaccctcaaggatggacggcacccgcagggcgagcagatgtaccgcagggtgtaccgtctgcacgagcgcctggtagccatccgcaccgagtacaacctacggctgaaggcaggcgtggcggcccctgcaacccaggtggcccaggtgactctgcagagtgtgcagaggcgccccgagctggaggactccactctgcgctacctgcaggacctgctggcctgggtggaggagaaccagcaccgtgtggatggcgctgagtggggtgtggacctgcccagcgtggaggcgcagctgggcagccaccgaggcctgcaccagtccatcgaagaattccgggccaagatcgagcgggcacggagtgacgagggccagctctcccccgccacccggggtgcctaccgtgactgcctgggtcggctggacctgcagtacgccaagctgctgaactcctccaaggcccgcctcaggtccctggagagcttgcacagctttgtggcagccgccactaaggagctaatgtggctgaatgagaaggaggaggaggaggtgggcttcgactggagcgaccgcaacaccaacatgaccgccaagaaggagagctactcggcgctgatgcgggagctggagctgaaggagaagaagatcaaggagctccaaaatgctggggaccggctgctgcgggaggaccacccggcccggcccacggtggagtccttccaggcggccctgcagacgcagtggagctggatgctacagctgtgctgctgtatcgaggcacacctgaaggagaacgctgcctactttcagttcttctcagatgtgcgggaggccgaggggcagttgcagaagctgcaggaggcactgcgtaggaaatacagttgtgatcgctccgccaccgtcacccggctggaggacctgctgcaggatgcccaggacgagaaggaacagctgaacgagtacaagggccacctctcaggcctggccaagcgggccaaggccgtcgtgcagctgaagccccgccacccagcccaccccatgcggggccgcctgcccctgctggccgtgtgcgactataagcaggtggaggtgactgtgcacaagggtgacgagtgccagctggtgggccctgcacagccgtcccactggaaggtgctcagcagctccggcagcgaggccgccgtgccctccgtgtgcttcctggtgcccccgcccaaccaggaggcccaggaggccgtcaccaggctggaggcccagcaccaggccctggtcacgctgtggcaccagttgcacgtggacatgaagagccttctggcctggcagagccttcgccgcgacgtgcagctcatccgctcctggtccctggccacgttccgcaccctgaagccagaggagcagcgccaagccctgcacagcctggagctgcactaccaggccttcctgcgggacagccaggacgcgggcggcttcggacccgaggaccggctgatggctgagcgcgagtacggctcctgcagccaccactaccagcagctgctgcagagcctggaacagggtgcacaggaagagtctcgctgccagcgctgcatctccgagctcaaagacatccggctgcagctggaggcctgtgagacgcgcaccgtgcaccgcctgcggctgccgctggacaaagagccggcacgggagtgtgcccagcgcatcgccgagcagcagaaggcacaggcagaggtggaggggctgggcaagggggtcgcccggctctctgccgaggccgagaaggtcttggccctaccagagccatcgcctgcggcccccacgctgcgctcggagctggagctgacgctgggcaagctggagcaggtccgcagcctgtctgccatctacctggagaagctcaagaccatcagcctggtgatccgcggcacgcagggggccgaggaggtgctcagggcccacgaggagcagctcaaggaggcccaggccgtgccggccaccctcccggagctcgaggccaccaaggcctctctgaagaagctgcgggcccaggccgaggcacagcagcccacgttcgacgccctgcgggatgagctgcggggggcacaggaggtgggggagcgactgcagcagcggcacggggagcgggacgtggaggtggagcgctggcgggagcgggtcgcccagttgcttgagcgctggcaggctgtgctggcccagaccgacgtgcggcagcgcgagctcgagcaactgggccgccagctgcgttactaccgcgagagtgcagaccccttgggcgcctggctgcaggacgccaggcggcggcaggagcagatccaggccatgccgctggccgacagccaggctgtgcgggagcagctgcggcaggagcaggccctgctggaggagatcgagcgccacggcgagaaggtcgaggagtgccagaggtttgcgaaacagtacatcaacgccatcaaggactatgaactccagctggtgacgtacaaggcgcagcttgagccggtggcctccccggccaagaagcccaaggtccagtcgggatcagagagtgtcatccaggagtacgtggacctgcgtacgcactacagcgagctgaccacactgacgagccagtacatcaagttcatcagcgagactctgcggcgcatggaggaggaggagaggctggctgagcagcagcgggcagaggagcgcgagcggctggccgaggtggaggccgcgctggagaagcagcggcagctggccgaggcgcacgcccaggcaaaggcacaggcggagcgggaggcgaaggagctgcagcagcgcatgcaggaggaggtggtgcggcgggaggaggcggcggtggacgcgcagcagcagaagcgcagcattcaggaggagctgcagcagctgcggcagagctcggaggcggagatccaggccaaggcccggcaggcagaggcggctgagcgcagccggctgcgcatcgaggaggagatccgcgtggtgcgcctgcagttggaggccaccgagcgccagcgtggcggggctgagggggagctgcaggcactgcgtgcacgggcggaggaggctgaggcacaaaagcgacaggcgcaggaggaggccgagcgcttgcggaggcaggtgcaggacgagagccagcgtaagcggcaggcggaggtggagctggcctcgcgcgtgaaggccgaggccgaggcggcgcgcgagaagcagcgggccctgcaggccctggaggagctgcggctgcaggcggaggaggcggagcggcgcctgcggcaggccgaggtggagcgagcgcggcaggtacaggtggccctggagacggcgcagcgcagtgcagaggcggagctgcagagcaaacgcgcctccttcgccgagaagacggcacagctggagcgctccctgcaggaggaacacgtggctgtggcacagctgcgggaggaggctgagcggcgggcacagcagcaggccgaggccgagcgggcgcgcgaggaggcagagcgggagctggagcgctggcagctcaaggccaacgaggcgctacggctgcggctgcaggcggaggaggtggcgcagcagaagagcctggcgcaggccgaggctgagaagcagaaggaggaggcggagcgcgaggcgcggcggcgcggcaaggcggaggagcaggccgtccggcagcgggagctggctgaacaagagctggagaagcagcggcagctggcggaaggcaccgcgcagcagcgcctggccgcggagcaggagttgatccggctgcgggccgagacggagcagggggagcagcagcggcagctgctggaggaggagctggcccggctgcagcgtgaggcggctgcagccacgcagaaacggcaggagctggaagccgagctggccaaggtgcgggccgagatggaggtgctgctggccagcaaggcgagggctgaggaggagtcgcgctccaccagcgagaagtccaagcagaggctggaggccgaggccggccggttccgcgagctggccgaggaggccgcccgcctgcgtgccctggcggaagaggccaagcggcagcggcagctggccgaggaagacgcggcgcggcagcgggccgaggcggagcgggtgcttgcggagaagctggccgccatcggcgaggccacgcggctcaagacggaggcggagatcgcgctcaaggagaaggaggcggagaacgagcgcctgcggcggctggcggaggacgaggccttccagcggcggcggctggaggagcaggccgcgcaacacaaggctgacatcgaggagcgcctggcccagctgcgcaaggcatcggacagcgagctggagcggcagaaggggctggtggaggacacgctgaggcagcggcggcaggtggaggaggagatcctggcgctgaaggcgagcttcgagaaggcggccgctggcaaggcggagctggagctggagctgggacgcatccgcagcaacgcggaggacacgctgcgcagcaaggagcaggccgagctggaggctgcgaggcagcggcagctggcggcggaggaggagcggcggcgccgtgaggctgaggagcgcgtgcagaagagcctggcggccgaggaggaggccgcacggcagcggaaggcggcgctggaggaagtcgagcggctgaaagccaaggtggaggaggcgcggcgcctgcgggagcgagcggagcaggagtcggcgcggcagctgcagctggcccaggaggccgcccagaagcggctgcaggcggaagagaaggcacacgccttcgcggtgcagcagaaggagcaggagctacagcagacgctgcagcaggagcagagcgtgctggaccagctgcgcggcgaggcggaggcggcccggcgggcggctgaggaggcggaggaggcccgggtgcaggcggagcgtgaggcggcgcagtcccggcggcaggtggaagaggccgagcggctgaagcagtcggcagaggagcaggcacaggcccgggctcaggcacaggcggctgcagagaagctgcgcaaggaggccgagcaagaggcggcgcggcgggcacaggcggagcaggcggccctgcggcagaagcaggcagctgacgcggagatggagaagcataagaaattcgccgagcagacgctgcggcagaaggcgcaggtggagcaggagctgacaacactgcggctgcagctggaggagaccgaccaccagaagaacctgctggacgaggagctgcagcggctgaaggcggaggccacggaggccgcacgccagcgcagccaggtggaggaggagctcttctcggtgcgcgtgcagatggaggagctgagcaagctcaaggcacgcatcgaggctgagaaccgcgcactcatcttgcgtgacaaggacaatacgcagcgcttcctgcaggaggaggctgagaagatgaagcaggtggcggaggaggccgcgcggctgagtgtggcggcccaagaggctgcgcgactgcggcagctggcagaggaggacctggcacagcagcgggccttggcagagaagatgctcaaggagaagatgcaggcggtgcaggaggccacgcgactcaaggctgaggcggaactgctgcagcagcagaaggagcttgcgcaggagcaggcgcggcggctgcaggaggacaaggagcagatggcgcagcagctggcggaggagacgcagggcttccagcggacgctggaggccgagcggcagcggcagctggagatgagcgctgaggctgagcgcctcaagctgcgtgtggccgagatgagccgagcccaggcccgcgctgaggaggacgcccagcgcttccggaagcaggcggaggagatcggtgagaagctgcaccgcacggagctcgccacccaggagaaggtgaccctggtgcagacactggagatccagcgacagcagagtgaccatgatgccgagcgcctgcgggaggccatcgctgagctggagcgtgagaaggagaagctccaacaggaggccaaactgctgcagctcaagtctgaggagatgcagacggtgcagcaggagcagctgctgcaggagacgcaggccctgcagcaaagcttcctctctgaaaaggacagcctgctacagcgggagcgcttcatcgagcaggagaaggccaagctggagcagctcttccaggacgaggtggccaaggcacagcagctgcgtgaggagcagcagcggcagcagcagcagatggagcaggaacggcagcggctggtggccagcatggaggaggcgcggcggcggcagcatgaggccgaggagggcgtgcggcgcaagcaggaggagctgcagcagctggagcagcagcggcggcagcaggaggagctgctggctgaggagaaccagaggctgcgtgagcagctgcagctcctggaggagcagcaccgggccgcgctggcgcactcagaggaggtcactgcctcgcaggtggctgccacaaagaccctgcccaatggccgggatgcacttgatggccccgcggcagaggcagagccggagcacagcttcgatggcctgcggcggaaggtgtcagctcagaggctgcaggaggccggcatcctgagtgcggaggagctgcagcggttggcgcagggccacaccacggtggacgagctcgcacggcgggaagacgtgcgccactacctgcagggccgcagcagtatcgcagggctgttgctgaaggccaccaatgagaagctgagtgtttacgccgccctgcagaggcagctgctgagtcccggcacggccctcatcctgctggaggcgcaggcggcctcaggcttcctgctggaccctgtgcggaaccggcggctgaccgtcaacgaggctgtgaaggagggtgtggtgggccccgagctgcaccacaagctgctgtcggccgagcgcgccgtcactggctacaaggacccctacactggccagcagatctctctcttccaagccatgcagaagggcctcatcgtccgggagcacggcatccgcctgctggaggcccagatcgccacgggcggcgttatcgaccccgtgcacagccaccgcgtgcccgtggacgtggcctaccggcgcggctacttcgacgaggagatgaaccgcgtcctggcggaccccagcgacgacaccaagggcttctttgaccccaacacgcacgagaacctcacgtacctgcagctactggagcgctgcgtggaggaccccgagacgggcctgtgccttctgccactcacggataaggctgccaagggcggggagctggtctacactgactccgaggcccgggacgtctttgagaaggccaccgtgtctgcgccgttcggcaagttccagggcaagacggtgaccatttgggagatcatcaactcggaatacttcacggcagagcagcggcgggacctgctgcggcagttccgcacgggccggatcacagtggagaagatcatcaagatcatcatcacggtggtggaggagcaggagcagaagggccggctttgctttgagggcctgcgcagcctggtgccagccgccgagctgctggagagcagggtcatcgaccgcgagctctaccagcagctgcagcgaggtgagcgctctgtgcgagacgtagccgaggtggacactgtgcggcgggctctccggggtgccaacgtcatcgcgggtgtatggctggaggaggcggggcagaagctgagtatctacaatgccctgaagaaagacctgctgccatccgacatggccgtggccctgttggaagcccaggccggcaccgggcacatcatcgaccccgccaccagcgcccggctgaccgtggacgaggcagtgcgtgctggcctggtgggccccgagtttcatgagaagctgctatcagccgagaaggctgtgacagggtacagggacccctacacagggcagagcgtctccctgttccaggccctgaagaagggcctcattccccgggagcagggcctgcgcctgttggacgcccagctgtccacgggcggcatcgtggaccccagcaagagccaccgcgtgcccctggatgtcgcctgcgcccgaggctgcctggatgaggagaccagcagggccctgtcggcaccaagggccgacgccaaggcctacagtgaccccagcacaggggagccggccacctacggcgagctccagcagcggtgccggcccgaccagctgaccgggctgagcctgctgccgctctcagaaaaggctgctcgggcccggcaggaggagctctactcagagctgcaggcccgtgagacctttgaaaagaccccggttgaggtccccgtgggtggcttcaagggcaggacggtgacggtgtgggagctcatcagctctgagtacttcactgcggagcagcggcaggagctgttgcgtcagttccgcacgggcaaggtcaccgtggagaaggtcatcaagattctcattaccatcgtggaggaggtggagaccctgcggcaggagaggctgtccttcagcggcctccgtgcccctgtgccagccagcgagctcctggcttccggggtcctcagcagagcccagtttgagcagctcaaggacggcaagacgacggtcaaggacctttcggagctgggctccgtgcggacgctgctgcagggcagtggctgcctcgccggcatctacctggaggacaccaaggagaaggtgtccatctacgaggccatgcgccggggcctgctgagagccacaacggctgcgctcctgctggaggcgcaggcggccactggcttcctggtggaccccgtgcggaaccagcgcctgtatgtccacgaggccgtgaaggcgggcgtggtgggccccgagcttcacgagcagctgctgtctgccgagaaggccgtcaccggctacagagacccctactcgggcagcaccatctccctcttccaggccatgcagaagggcctggttctccggcagcacggcatccgcctgctggaggcccagatcgccacgggcggcatcatcgaccccgtgcacagccaccgcgtgcctgtggacgtggcctaccagcgcggctacttcagtgaggagatgaaccgcgtcctggcggaccccagcgacgacaccaagggcttctttgaccccaacacgcatgagaacctcacgtacaggcagctgctggagcggtgcgtggaggaccccgagacgggcttgcgccttctgccactgaaaggggcggagaaggctgaggtggtggagaccacgcaggtgtacactgaggaggagacaagaagggcatttgaagagacacagatcgacattcccggcggcggcagccacggcggctccaccatgtccctgtgggaggtgatgcagtcggacctgatccccgaggagcagcgggcccagctgatggctgacttccaggccggccgggtgaccaaggaacgcatgatcatcatcatcatcgagatcattgagaagacagagatcatccgccagcagggtctggcctcctacgactacgtgcgccgccgcctcacggctgaggacctgttcgaggctcggatcatctctctcgagacctacaacctgctccgggagggcaccaggagcctccgtgaggctctcgaggcggagtccgcctggtgctacctctatggcacgggctccgtggctggtgtctacctgcccggttccaggcagacactgagcatctaccaggctctcaagaaagggctgctgagtgccgaggtggcccgcctgctgctggaggcacaggcagccacaggcttcctgctggacccggtgaagggggagcggctgactgtggatgaggctgtgcggaagggcctcgtggggcccgagctgcacgaccgcctgctctcggctgagcgggcggtcaccggctaccgtgacccctacaccgagcagaccatctcgctcttccaggccatgaagaaggagctgatccctactgaggaggccctgcggctgctggatgcccagctggccaccggcggcatcgtggacccccgcctgggcttccaccttcccctggaggtggcttaccagcgtggctacctcaacaaggacacgcacgaccagctgtcagagcccagcgaggtgcgcagctacgtggacccgtccaccgacgagcgcctcagctacacgcagctgctcaggcggtgccgtcgtgacgacggcaccggccagctgctcctgccactgtcggacgcccgcaagctgaccttccgtggcctgcggaagcagatcaccatggaggagctggtgcgctcgcaggtcatggacgaggccacggcgctgcagctgcgggagggcctgacctccatcgaggaggtcaccaagaacttgcagaagttcctggaaggcaccagctgcatcgctggtgtcttcgtggacgccaccaaggaacggctctcggtgtaccaggccatgaagaagggcatcatccgccccggcacagcctttgagctcctggaggcgcaggcggccaccggttacgtcatcgaccccatcaagggactgaagctgacggtggaggaggctgtgcgtatgggcattgtgggccccgagttcaaggacaagctgctgtcggccgagcgcgccgtcactgggtacaaggacccctactctgggaagctcatctccctcttccaggccatgaagaagggcctgatcctgaaggaccatggcatccgcctgctggaggcccagatcgccacgggcggcatcatcgaccctgaggagagccaccggctgcccgtggaggtggcctacaagcgcggcctcttcgatgaggagatgaacgagatcctgaccgacccctcggacgacaccaagggcttctttgaccctaacacggaggagaacctcacctacctgcagctgatggagcgttgtatcactgacccccagacgggcctgtgtctcttgccgctgaaggagaagaagcgggagcggaagacgtcctccaagtcctccgtgcgcaagcgccgagtggtcatcgtggaccccgagacgggcaaggagatgtcagtgtacgaggcctaccgcaagggcctgattgaccaccagacgtacctggagctgtccgagcaggagtgcgagtgggaggagatcaccatctcctcctcggacggcgtggtcaagtccatgatcatcgaccgccgctccgggcgccagtacgacatcgatgatgccatcgccaagaacctcatcgaccgctcggcactggaccagtaccgcgccggcacgctctccatcaccgagttcgccgacatgctctcgggcaacgccggtggtttccgctcccgttcctcctcggtgggatcctcctcctcctaccccatcagccccgccgtctccaggacccagctggcctcctggtcagaccccactgaggagacgggccccgtggctggcatcctggacacggagacgctggagaaggtgtccatcaccgaggccatgcaccggaacctggtggataacatcacggggcagcggctgctggaggcgcaggcctgcaccgggggcatcatcgaccccagcaccggtgagcgcttccctgtcaccgacgccgtcaacaagggcctggtggacaagatcatggtggaccgcatcaacctggcccagaaggccttctgcggcttcgaggacccacgcaccaagaccaagatgtcggccgcccaggccctgaagaagggctggctctactacgaggccggccagcgcttcctggaggtgcagtacctgaccggcggcttgatcgagcccgacacgccgggccgcgtgcccctggacgaggccctgcagcgcggcacggtggacgcccgcaccgcacagaagctgcgtgacgtgggcgcctactccaagtacctcacctgccctaagaccaagctcaagatctcctataaggacgcgctggaccgcagcatggtggaggagggcacggggctgcggctgctggaggctgccgcgcagtccaccaagggctactacagcccctacagcgtcagcggctccggctctaccgctggctcccgcaccggctcgcgcaccggctcccgggccggctcccgccgcggcagctttgacgccaccggctccggcttctccatgaccttctcttcatcctcctactcctcctcgggctacggccgccgctacgcctcggggtcctcggcctccctggggggccctgagtctgccgtggcctgaggctgcctgcgcccaccccgctctgcatgcggcccagcccggctcccaccgaggcgcgggggccgttttcaacgcttaaaggtgtcttcctcccaagtggtgcctaaagtttaaccaaaaagaccagactaatatattaatatatatctgctgtccagacagcctgtatcttgggggacagggctggcccagccctgctggccgcctcaccccctcgggtctcctcactcccttctacctgccactcacacagccaggtgccttggagggtcccaagctgggccccagcccaccctcctgtcttcccagggtagcccgcctgccagtcctagctgcacagggcagctgggcccaaccctgtctgtagagggccctggtgtttctagcactggcctgcacggtgggccttgctggggacggggggccccagtcagcctctctcccagtctacccagagaagccccttccccatgggaagacgaggccctcgggcccagcccccacagtgctgtctgatctgtgctttccagctcaccccccacactcactcctgagacccctggcctccggcgtcagcctccagcctctgttcccctagtaagtgccttccatgtcggcctctaaccccaggccccgaggacccagacccagtggggaggcggacgttccagccggcatggctgggaactgcagacctgtcctcctggtgggtccaggggcccctccagcttgtggagccccacactggggtgccgcctgcccgtctctctcccatggagccccagccccctttgggcccagggacaccagccaggctctgtgctgaccctcctgttgcacccagccctggtctcagcagcgaccacccctgcctccaccctctgagctttgcatgttccactaaccccgggcgggtggcaggtggaggtgtcaggctgctggcgcctctgcaagggcagaacactaacctgaccgtgggcggggccttgcggtatccgcccccaataaaagcaattccaacctt

SEQ ID NO: 262171 - DNA, 14736 bp, Artificial Sequence
  derived and/or modified sequence
gctgtctagcctggagcagccggttcccagcgcaggaagggcagccctggcggctccgcgtggcggctatggagccctcgggcagcctgtttccctccctggtggttgtgggtcacgttgtcaccctggccgctgtgtggcactggcgcaggggacgtcggtgggcgcaggacgagcaagatgagcgggatcgtgtgcagaagaaaaccttcaccaagtgggtcaacaagcacctcatcaaggcccagaggcacatcagtgacctgtatgaagacctccgcgatggccacaacctcatctccctgctggaggtcctctcgggggacagcctgccccgggagaaggggaggatgcgtttccacaagctgcagaatgtccagattgccctggactacctccggcaccgccaggtgaagctggtgaacatcaggaatgatgacatcgctgacggcaaccccaagctgacccttggcctcatctggacaatcattctgcacttccagatctcagatatccaggtgagtgggcagtcggaggacatgacggccaaggagaagctgctgctgtggtcgcagcgaatggtggaggggtaccagggcctgcgatgcgacaacttcacctccagctggagagacggccgcctcttcaatgccatcatccaccggcacaagcccctgctcatcgacatgaacaaggtgtaccggcagaccaacctggagaacctggaccaggccttctctgtggcggagcgggacctgggagtgacgcggctcctggaccctgaggacgtggatgtccctcagcccgacgagaagtccatcatcacctacgtctcgtcgctgtatgacgccatgccccgcgtgccggacgtgcaggatggggtgagggccaacgagctgcagctgcgctggcaggagtaccgggagctggtgctgctgctgcttcagtggatgcgacaccacacggccgcctttgaggaacgcaggttcccctccagcttcgaggagattgagatcctgtggtctcagttcctgaagtttaaggagatggagctaccagccaaggaggccgacaagaacaggtccaagggcatctaccaatccctggagggagcggtgcaagcaggccagctcaaggtgccccctggctaccacccgctggatgtggagaaggagtggggcaagctgcacgtggccatcctggagcgggagaagcagctccgcagcgagtttgagaggctggagtgtcttcagcgcatcgtgaccaagctgcagatggaggcggggctgtgtgaggagcagctgaaccaggccgacgccctgctgcagtcggatgtccggctgctggctgcaggcaaagtgccacagcgggcgggggaggtggaacgggacttggacaaggcggatagcatgatccggctgctcttcaacgacgtgcagaccctcaaggatggacggcacccgcagggcgagcagatgtaccgcagggtgtaccgtctgcacgagcgcctggtagccatccgcaccgagtacaacctacggctgaaggcaggcgtggcggcccctgcaacccaggtggcccaggtgactctgcagagtgtgcagaggcgccccgagctggaggactccactctgcgctacctgcaggacctgctggcctgggtggaggagaaccagcaccgtgtggatggcgctgagtggggtgtggacctgcccagcgtggaggcgcagctgggcagccaccgaggcctgcaccagtccatcgaagaattccgggccaagatcgagcgggcacggagtgacgagggccagctctcccccgccacccggggtgcctaccgtgactgcctgggtcggctggacctgcagtacgccaagctgctgaactcctccaaggcccgcctcaggtccctggagagcttgcacagctttgtggcagccgccactaaggagctaatgtggctgaatgagaaggaggaggaggaggtgggcttcgactggagcgaccgcaacaccaacatgaccgccaagaaggagagctactcggcgctgatgcgggagctggagctgaaggagaagaagatcaaggagctccaaaatgctggggaccggctgctgcgggaggaccacccggcccggcccacggtggagtccttccaggcggccctgcagacgcagtggagctggatgctacagctgtgctgctgtatcgaggcacacctgaaggagaacgctgcctactttcagttcttctcagatgtgcgggaggccgaggggcagttgcagaagctgcaggaggcactgcgtaggaaatacagttgtgatcgctccgccaccgtcacccggctggaggacctgctgcaggatgcccaggacgagaaggaacagctgaacgagtacaagggccacctctcaggcctggccaagcgggccaaggccgtcgtgcagctgaagccccgccacccagcccaccccatgcggggccgcctgcccctgctggccgtgtgcgactataagcaggtggaggtgactgtgcacaagggtgacgagtgccagctggtgggccctgcacagccgtcccactggaaggtgctcagcagctccggcagcgaggccgccgtgccctccgtgtgcttcctggtgcccccgcccaaccaggaggcccaggaggccgtcaccaggctggaggcccagcaccaggccctggtcacgctgtggcaccagttgcacgtggacatgaagagccttctggcctggcagagccttcgccgcgacgtgcagctcatccgctcctggtccctggccacgttccgcaccctgaagccagaggagcagcgccaagccctgcacagcctggagctgcactaccaggccttcctgcgggacagccaggacgcgggcggcttcggacccgaggaccggctgatggctgagcgcgagtacggctcctgcagccaccactaccagcagctgctgcagagcctggaacagggtgcacaggaagagtctcgctgccagcgctgcatctccgagctcaaagacatccggctgcagctggaggcctgtgagacgcgcaccgtgcaccgcctgcggctgccgctggacaaagagccggcacgggagtgtgcccagcgcatcgccgagcagcagaaggcacaggcagaggtggaggggctgggcaagggggtcgcccggctctctgccgaggccgagaaggtcttggccctaccagagccatcgcctgcggcccccacgctgcgctcggagctggagctgacgctgggcaagctggagcaggtccgcagcctgtctgccatctacctggagaagctcaagaccatcagcctggtgatccgcggcacgcagggggccgaggaggtgctcagggcccacgaggagcagctcaaggaggcccaggccgtgccggccaccctcccggagctcgaggccaccaaggcctctctgaagaagctgcgggcccaggccgaggcacagcagcccacgttcgacgccctgcgggatgagctgcggggggcacaggaggtgggggagcgactgcagcagcggcacggggagcgggacgtggaggtggagcgctggcgggagcgggtcgcccagttgcttgagcgctggcaggctgtgctggcccagaccgacgtgcggcagcgcgagctcgagcaactgggccgccagctgcgttactaccgcgagagtgcagaccccttgggcgcctggctgcaggacgccaggcggcggcaggagcagatccaggccatgccgctggccgacagccaggctgtgcgggagcagctgcggcaggagcaggccctgctggaggagatcgagcgccacggcgagaaggtcgaggagtgccagaggtttgcgaaacagtacatcaacgccatcaaggactatgaactccagctggtgacgtacaaggcgcagcttgagccggtggcctccccggccaagaagcccaaggtccagtcgggatcagagagtgtcatccaggagtacgtggacctgcgtacgcactacagcgagctgaccacactgacgagccagtacatcaagttcatcagcgagactctgcggcgcatggaggaggaggagaggctggctgagcagcagcgggcagaggagcgcgagcggctggccgaggtggaggccgcgctggagaagcagcggcagctggccgaggcgcacgcccaggcaaaggcacaggcggagcgggaggcgaaggagctgcagcagcgcatgcaggaggaggtggtgcggcgggaggaggcggcggtggacgcgcagcagcagaagcgcagcattcaggaggagctgcagcagctgcggcagagctcggaggcggagatccaggccaaggcccggcaggcagaggcggctgagcgcagccggctgcgcatcgaggaggagatccgcgtggtgcgcctgcagttggaggccaccgagcgccagcgtggcggggctgagggggagctgcaggcactgcgtgcacgggcggaggaggctgaggcacaaaagcgacaggcgcaggaggaggccgagcgcttgcggaggcaggtgcaggacgagagccagcgtaagcggcaggcggaggtggagctggcctcgcgcgtgaaggccgaggccgaggcggcgcgcgagaagcagcgggccctgcaggccctggaggagctgcggctgcaggcggaggaggcggagcggcgcctgcggcaggccgaggtggagcgagcgcggcaggtacaggtggccctggagacggcgcagcgcagtgcagaggcggagctgcagagcaaacgcgcctccttcgccgagaagacggcacagctggagcgctccctgcaggaggaacacgtggctgtggcacagctgcgggaggaggctgagcggcgggcacagcagcaggccgaggccgagcgggcgcgcgaggaggcagagcgggagctggagcgctggcagctcaaggccaacgaggcgctacggctgcggctgcaggcggaggaggtggcgcagcagaagagcctggcgcaggccgaggctgagaagcagaaggaggaggcggagcgcgaggcgcggcggcgcggcaaggcggaggagcaggccgtccggcagcgggagctggctgaacaagagctggagaagcagcggcagctggcggaaggcaccgcgcagcagcgcctggccgcggagcaggagttgatccggctgcgggccgagacggagcagggggagcagcagcggcagctgctggaggaggagctggcccggctgcagcgtgaggcggctgcagccacgcagaaacggcaggagctggaagccgagctggccaaggtgcgggccgagatggaggtgctgctggccagcaaggcgagggctgaggaggagtcgcgctccaccagcgagaagtccaagcagaggctggaggccgaggccggccggttccgcgagctggccgaggaggccgcccgcctgcgtgccctggcggaagaggccaagcggcagcggcagctggccgaggaagacgcggcgcggcagcgggccgaggcggagcgggtgcttgcggagaagctggccgccatcggcgaggccacgcggctcaagacggaggcggagatcgcgctcaaggagaaggaggcggagaacgagcgcctgcggcggctggcggaggacgaggccttccagcggcggcggctggaggagcaggccgcgcaacacaaggctgacatcgaggagcgcctggcccagctgcgcaaggcatcggacagcgagctggagcggcagaaggggctggtggaggacacgctgaggcagcggcggcaggtggaggaggagatcctggcgctgaaggcgagcttcgagaaggcggccgctggcaaggcggagctggagctggagctgggacgcatccgcagcaacgcggaggacacgctgcgcagcaaggagcaggccgagctggaggctgcgaggcagcggcagctggcggcggaggaggagcggcggcgccgtgaggctgaggagcgcgtgcagaagagcctggcggccgaggaggaggccgcacggcagcggaaggcggcgctggaggaagtcgagcggctgaaagccaaggtggaggaggcgcggcgcctgcgggagcgagcggagcaggagtcggcgcggcagctgcagctggcccaggaggccgcccagaagcggctgcaggcggaagagaaggcacacgccttcgcggtgcagcagaaggagcaggagctacagcagacgctgcagcaggagcagagcgtgctggaccagctgcgcggcgaggcggaggcggcccggcgggcggctgaggaggcggaggaggcccgggtgcaggcggagcgtgaggcggcgcagtcccggcggcaggtggaagaggccgagcggctgaagcagtcggcagaggagcaggcacaggcccgggctcaggcacaggcggctgcagagaagctgcgcaaggaggccgagcaagaggcggcgcggcgggcacaggcggagcaggcggccctgcggcagaagcaggcagctgacgcggagatggagaagcataagaaattcgccgagcagacgctgcggcagaaggcgcaggtggagcaggagctgacaacactgcggctgcagctggaggagaccgaccaccagaagaacctgctggacgaggagctgcagcggctgaaggcggaggccacggaggccgcacgccagcgcagccaggtggaggaggagctcttctcggtgcgcgtgcagatggaggagctgagcaagctcaaggcacgcatcgaggctgagaaccgcgcactcatcttgcgtgacaaggacaatacgcagcgcttcctgcaggaggaggctgagaagatgaagcaggtggcggaggaggccgcgcggctgagtgtggcggcccaagaggctgcgcgactgcggcagctggcagaggaggacctggcacagcagcgggccttggcagagaagatgctcaaggagaagatgcaggcggtgcaggaggccacgcgactcaaggctgaggcggaactgctgcagcagcagaaggagcttgcgcaggagcaggcgcggcggctgcaggaggacaaggagcagatggcgcagcagctggcggaggagacgcagggcttccagcggacgctggaggccgagcggcagcggcagctggagatgagcgctgaggctgagcgcctcaagctgcgtgtggccgagatgagccgagcccaggcccgcgctgaggaggacgcccagcgcttccggaagcaggcggaggagatcggtgagaagctgcaccgcacggagctcgccacccaggagaaggtgaccctggtgcagacactggagatccagcgacagcagagtgaccatgatgccgagcgcctgcgggaggccatcgctgagctggagcgtgagaaggagaagctccaacaggaggccaaactgctgcagctcaagtctgaggagatgcagacggtgcagcaggagcagctgctgcaggagacgcaggccctgcagcaaagcttcctctctgaaaaggacagcctgctacagcgggagcgcttcatcgagcaggagaaggccaagctggagcagctcttccaggacgaggtggccaaggcacagcagctgcgtgaggagcagcagcggcagcagcagcagatggagcaggaacggcagcggctggtggccagcatggaggaggcgcggcggcggcagcatgaggccgaggagggcgtgcggcgcaagcaggaggagctgcagcagctggagcagcagcggcggcagcaggaggagctgctggctgaggagaaccagaggctgcgtgagcagctgcagctcctggaggagcagcaccgggccgcgctggcgcactcagaggaggtcactgcctcgcaggtggctgccacaaagaccctgcccaatggccgggatgcacttgatggccccgcggcagaggcagagccggagcacagcttcgatggcctgcggcggaaggtgtcagctcagaggctgcaggaggccggcatcctgagtgcggaggagctgcagcggttggcgcagggccacaccacggtggacgagctcgcacggcgggaagacgtgcgccactacctgcagggccgcagcagtatcgcagggctgttgctgaaggccaccaatgagaagctgagtgtttacgccgccctgcagaggcagctgctgagtcccggcacggccctcatcctgctggaggcgcaggcggcctcaggcttcctgctggaccctgtgcggaaccggcggctgaccgtcaacgaggctgtgaaggagggtgtggtgggccccgagctgcaccacaagctgctgtcggccgagcgcgccgtcactggctacaaggacccctacactggccagcagatctctctcttccaagccatgcagaagggcctcatcgtccgggagcacggcatccgcctgctggaggcccagatcgccacgggcggcgttatcgaccccgtgcacagccaccgcgtgcccgtggacgtggcctaccggcgcggctacttcgacgaggagatgaaccgcgtcctggcggaccccagcgacgacaccaagggcttctttgaccccaacacgcacgagaacctcacgtacctgcagctactggagcgctgcgtggaggaccccgagacgggcctgtgccttctgccactcacggataaggctgccaagggcggggagctggtctacactgactccgaggcccgggacgtctttgagaaggccaccgtgtctgcgccgttcggcaagttccagggcaagacggtgaccatttgggagatcatcaactcggaatacttcacggcagagcagcggcgggacctgctgcggcagttccgcacgggccggatcacagtggagaagatcatcaagatcatcatcacggtggtggaggagcaggagcagaagggccggctttgctttgagggcctgcgcagcctggtgccagccgccgagctgctggagagcagggtcatcgaccgcgagctctaccagcagctgcagcgaggtgagcgctctgtgcgagacgtagccgaggtggacactgtgcggcgggctctccggggtgccaacgtcatcgcgggtgtatggctggaggaggcggggcagaagctgagtatctacaatgccctgaagaaagacctgctgccatccgacatggccgtggccctgttggaagcccaggccggcaccgggcacatcatcgaccccgccaccagcgcccggctgaccgtggacgaggcagtgcgtgctggcctggtgggccccgagtttcatgagaagctgctatcagccgagaaggctgtgacagggtacagggacccctacacagggcagagcgtctccctgttccaggccctgaagaagggcctcattccccgggagcagggcctgcgcctgttggacgcccagctgtccacgggcggcatcgtggaccccagcaagagccaccgcgtgcccctggatgtcgcctgcgcccgaggctgcctggatgaggagaccagcagggccctgtcggcaccaagggccgacgccaaggcctacagtgaccccagcacaggggagccggccacctacggcgagctccagcagcggtgccggcccgaccagctgaccgggctgagcctgctgccgctctcagaaaaggctgctcgggcccggcaggaggagctctactcagagctgcaggcccgtgagacctttgaaaagaccccggttgaggtccccgtgggtggcttcaagggcaggacggtgacggtgtgggagctcatcagctctgagtacttcactgcggagcagcggcaggagctgttgcgtcagttccgcacgggcaaggtcaccgtggagaaggtcatcaagattctcattaccatcgtggaggaggtggagaccctgcggcaggagaggctgtccttcagcggcctccgtgcccctgtgccagccagcgagctcctggcttccggggtcctcagcagagcccagtttgagcagctcaaggacggcaagacgacggtcaaggacctttcggagctgggctccgtgcggacgctgctgcagggcagtggctgcctcgccggcatctacctggaggacaccaaggagaaggtgtccatctacgaggccatgcgccggggcctgctgagagccacaacggctgcgctcctgctggaggcgcaggcggccactggcttcctggtggaccccgtgcggaaccagcgcctgtatgtccacgaggccgtgaaggcgggcgtggtgggccccgagcttcacgagcagctgctgtctgccgagaaggccgtcaccggctacagagacccctactcgggcagcaccatctccctcttccaggccatgcagaagggcctggttctccggcagcacggcatccgcctgctggaggcccagatcgccacgggcggcatcatcgaccccgtgcacagccaccgcgtgcctgtggacgtggcctaccagcgcggctacttcagtgaggagatgaaccgcgtcctggcggaccccagcgacgacaccaagggcttctttgaccccaacacgcatgagaacctcacgtacaggcagctgctggagcggtgcgtggaggaccccgagacgggcttgcgccttctgccactgaaaggggcggagaaggctgaggtggtggagaccacgcaggtgtacactgaggaggagacaagaagggcatttgaagagacacagatcgacattcccggcggcggcagccacggcggctccaccatgtccctgtgggaggtgatgcagtcggacctgatccccgaggagcagcgggcccagctgatggctgacttccaggccggccgggtgaccaaggaacgcatgatcatcatcatcatcgagatcattgagaagacagagatcatccgccagcagggtctggcctcctacgactacgtgcgccgccgcctcacggctgaggacctgttcgaggctcggatcatctctctcgagacctacaacctgctccgggagggcaccaggagcctccgtgaggctctcgaggcggagtccgcctggtgctacctctatggcacgggctccgtggctggtgtctacctgcccggttccaggcagacactgagcatctaccaggctctcaagaaagggctgctgagtgccgaggtggcccgcctgctgctggaggcacaggcagccacaggcttcctgctggacccggtgaagggggagcggctgactgtggatgaggctgtgcggaagggcctcgtggggcccgagctgcacgaccgcctgctctcggctgagcgggcggtcaccggctaccgtgacccctacaccgagcagaccatctcgctcttccaggccatgaagaaggagctgatccctactgaggaggccctgcggctgctggatgcccagctggccaccggcggcatcgtggacccccgcctgggcttccaccttcccctggaggtggcttaccagcgtggctacctcaacaaggacacgcacgaccagctgtcagagcccagcgaggtgcgcagctacgtggacccgtccaccgacgagcgcctcagctacacgcagctgctcaggcggtgccgtcgtgacgacggcaccggccagctgctcctgccactgtcggacgcccgcaagctgaccttccgtggcctgcggaagcagatcaccatggaggagctggtgcgctcgcaggtcatggacgaggccacggcgctgcagctgcgggagggcctgacctccatcgaggaggtcaccaagaacttgcagaagttcctggaaggcaccagctgcatcgctggtgtcttcgtggacgccaccaaggaacggctctcggtgtaccaggccatgaagaagggcatcatccgccccggcacagcctttgagctcctggaggcgcaggcggccaccggttacgtcatcgaccccatcaagggactgaagctgacggtggaggaggctgtgcgtatgggcattgtgggccccgagttcaaggacaagctgctgtcggccgagcgcgccgtcactgggtacaaggacccctactctgggaagctcatctccctcttccaggccatgaagaagggcctgatcctgaaggaccatggcatccgcctgctggaggcccagatcgccacgggcggcatcatcgaccctgaggagagccaccggctgcccgtggaggtggcctacaagcgcggcctcttcgatgaggagatgaacgagatcctgaccgacccctcggacgacaccaagggcttctttgaccctaacacggaggagaacctcacctacctgcagctgatggagcgttgtatcactgacccccagacgggcctgtgtctcttgccgctgaaggagaagaagcgggagcggaagacgtcctccaagtcctccgtgcgcaagcgccgagtggtcatcgtggaccccgagacgggcaaggagatgtcagtgtacgaggcctaccgcaagggcctgattgaccaccagacgtacctggagctgtccgagcaggagtgcgagtgggaggagatcaccatctcctcctcggacggcgtggtcaagtccatgatcatcgaccgccgctccgggcgccagtacgacatcgatgatgccatcgccaagaacctcatcgaccgctcggcactggaccagtaccgcgccggcacgctctccatcaccgagttcgccgacatgctctcgggcaacgccggtggtttccgctcccgttcctcctcggtgggatcctcctcctcctaccccatcagccccgccgtctccaggacccagctggcctcctggtcagaccccactgaggagacgggccccgtggctggcatcctggacacggagacgctggagaaggtgtccatcaccgaggccatgcaccggaacctggtggataacatcacggggcagcggctgctggaggcgcaggcctgcaccgggggcatcatcgaccccagcaccggtgagcgcttccctgtcaccgacgccgtcaacaagggcctggtggacaagatcatggtggaccgcatcaacctggcccagaaggccttctgcggcttcgaggacccacgcaccaagaccaagatgtcggccgcccaggccctgaagaagggctggctctactacgaggccggccagcgcttcctggaggtgcagtacctgaccggcggcttgatcgagcccgacacgccgggccgcgtgcccctggacgaggccctgcagcgcggcacggtggacgcccgcaccgcacagaagctgcgtgacgtgggcgcctactccaagtacctcacctgccctaagaccaagctcaagatctcctataaggacgcgctggaccgcagcatggtggaggagggcacggggctgcggctgctggaggctgccgcgcagtccaccaagggctactacagcccctacagcgtcagcggctccggctctaccgctggctcccgcaccggctcgcgcaccggctcccgggccggctcccgccgcggcagctttgacgccaccggctccggcttctccatgaccttctcttcatcctcctactcctcctcgggctacggccgccgctacgcctcggggtcctcggcctccctggggggccctgagtctgccgtggcctgaggctgcctgcgcccaccccgctctgcatgcggcccagcccggctcccaccgaggcgcgggggccgttttcaacgcttaaaggtgtcttcctcccaagtggtgcctaaagtttaaccaaaaagaccagactaatatattaatatatatctgctgtccagacagcctgtatcttgggggacagggctggcccagccctgctggccgcctcaccccctcgggtctcctcactcccttctacctgccactcacacagccaggtgccttggagggtcccaagctgggccccagcccaccctcctgtcttcccagggtagcccgcctgccagtcctagctgcacagggcagctgggcccaaccctgtctgtagagggccctggtgtttctagcactggcctgcacggtgggccttgctggggacggggggccccagtcagcctctctcccagtctacccagagaagccccttccccatgggaagacgaggccctcgggcccagcccccacagtgctgtctgatctgtgctttccagctcaccccccacactcactcctgagacccctggcctccggcgtcagcctccagcctctgttcccctagtaagtgccttccatgtcggcctctaaccccaggccccgaggacccagacccagtggggaggcggacgttccagccggcatggctgggaactgcagacctgtcctcctggtgggtccaggggcccctccagcttgtggagccccacactggggtgccgcctgcccgtctctctcccatggagccccagccccctttgggcccagggacaccagccaggctctgtgctgaccctcctgttgcacccagccctggtctcagcagcgaccacccctgcctccaccctctgagctttgcatgttccactaaccccgggcgggtggcaggtggaggtgtcaggctgctggcgcctctgcaagggcagaacactaacctgaccgtgggcggggccttgcggtatccgcccccaataaaagcaattccaacctt

SEQ ID NO: 262172 - DNA, 14751 bp, Artificial Sequence
  derived and/or modified sequence
attgatcagctgaagccccgcccctggccggcaagccctgccccggacctccgggctcctcccccggctgcggcgctggcctgggcagtgcggtgcggggctggactctgcctggtggtggcacagccgccctcagccccggcgcagacatggacccctcgcgagccatccagaacgagatcagctccctcaaagatgagcgggatcgtgtgcagaagaaaaccttcaccaagtgggtcaacaagcacctcatcaaggcccagaggcacatcagtgacctgtatgaagacctccgcgatggccacaacctcatctccctgctggaggtcctctcgggggacagcctgccccgggagaaggggaggatgcgtttccacaagctgcagaatgtccagattgccctggactacctccggcaccgccaggtgaagctggtgaacatcaggaatgatgacatcgctgacggcaaccccaagctgacccttggcctcatctggacaatcattctgcacttccagatctcagatatccaggtgagtgggcagtcggaggacatgacggccaaggagaagctgctgctgtggtcgcagcgaatggtggaggggtaccagggcctgcgatgcgacaacttcacctccagctggagagacggccgcctcttcaatgccatcatccaccggcacaagcccctgctcatcgacatgaacaaggtgtaccggcagaccaacctggagaacctggaccaggccttctctgtggcggagcgggacctgggagtgacgcggctcctggaccctgaggacgtggatgtccctcagcccgacgagaagtccatcatcacctacgtctcgtcgctgtatgacgccatgccccgcgtgccggacgtgcaggatggggtgagggccaacgagctgcagctgcgctggcaggagtaccgggagctggtgctgctgctgcttcagtggatgcgacaccacacggccgcctttgaggaacgcaggttcccctccagcttcgaggagattgagatcctgtggtctcagttcctgaagtttaaggagatggagctaccagccaaggaggccgacaagaacaggtccaagggcatctaccaatccctggagggagcggtgcaagcaggccagctcaaggtgccccctggctaccacccgctggatgtggagaaggagtggggcaagctgcacgtggccatcctggagcgggagaagcagctccgcagcgagtttgagaggctggagtgtcttcagcgcatcgtgaccaagctgcagatggaggcggggctgtgtgaggagcagctgaaccaggccgacgccctgctgcagtcggatgtccggctgctggctgcaggcaaagtgccacagcgggcgggggaggtggaacgggacttggacaaggcggatagcatgatccggctgctcttcaacgacgtgcagaccctcaaggatggacggcacccgcagggcgagcagatgtaccgcagggtgtaccgtctgcacgagcgcctggtagccatccgcaccgagtacaacctacggctgaaggcaggcgtggcggcccctgcaacccaggtggcccaggtgactctgcagagtgtgcagaggcgccccgagctggaggactccactctgcgctacctgcaggacctgctggcctgggtggaggagaaccagcaccgtgtggatggcgctgagtggggtgtggacctgcccagcgtggaggcgcagctgggcagccaccgaggcctgcaccagtccatcgaagaattccgggccaagatcgagcgggcacggagtgacgagggccagctctcccccgccacccggggtgcctaccgtgactgcctgggtcggctggacctgcagtacgccaagctgctgaactcctccaaggcccgcctcaggtccctggagagcttgcacagctttgtggcagccgccactaaggagctaatgtggctgaatgagaaggaggaggaggaggtgggcttcgactggagcgaccgcaacaccaacatgaccgccaagaaggagagctactcggcgctgatgcgggagctggagctgaaggagaagaagatcaaggagctccaaaatgctggggaccggctgctgcgggaggaccacccggcccggcccacggtggagtccttccaggcggccctgcagacgcagtggagctggatgctacagctgtgctgctgtatcgaggcacacctgaaggagaacgctgcctactttcagttcttctcagatgtgcgggaggccgaggggcagttgcagaagctgcaggaggcactgcgtaggaaatacagttgtgatcgctccgccaccgtcacccggctggaggacctgctgcaggatgcccaggacgagaaggaacagctgaacgagtacaagggccacctctcaggcctggccaagcgggccaaggccgtcgtgcagctgaagccccgccacccagcccaccccatgcggggccgcctgcccctgctggccgtgtgcgactataagcaggtggaggtgactgtgcacaagggtgacgagtgccagctggtgggccctgcacagccgtcccactggaaggtgctcagcagctccggcagcgaggccgccgtgccctccgtgtgcttcctggtgcccccgcccaaccaggaggcccaggaggccgtcaccaggctggaggcccagcaccaggccctggtcacgctgtggcaccagttgcacgtggacatgaagagccttctggcctggcagagccttcgccgcgacgtgcagctcatccgctcctggtccctggccacgttccgcaccctgaagccagaggagcagcgccaagccctgcacagcctggagctgcactaccaggccttcctgcgggacagccaggacgcgggcggcttcggacccgaggaccggctgatggctgagcgcgagtacggctcctgcagccaccactaccagcagctgctgcagagcctggaacagggtgcacaggaagagtctcgctgccagcgctgcatctccgagctcaaagacatccggctgcagctggaggcctgtgagacgcgcaccgtgcaccgcctgcggctgccgctggacaaagagccggcacgggagtgtgcccagcgcatcgccgagcagcagaaggcacaggcagaggtggaggggctgggcaagggggtcgcccggctctctgccgaggccgagaaggtcttggccctaccagagccatcgcctgcggcccccacgctgcgctcggagctggagctgacgctgggcaagctggagcaggtccgcagcctgtctgccatctacctggagaagctcaagaccatcagcctggtgatccgcggcacgcagggggccgaggaggtgctcagggcccacgaggagcagctcaaggaggcccaggccgtgccggccaccctcccggagctcgaggccaccaaggcctctctgaagaagctgcgggcccaggccgaggcacagcagcccacgttcgacgccctgcgggatgagctgcggggggcacaggaggtgggggagcgactgcagcagcggcacggggagcgggacgtggaggtggagcgctggcgggagcgggtcgcccagttgcttgagcgctggcaggctgtgctggcccagaccgacgtgcggcagcgcgagctcgagcaactgggccgccagctgcgttactaccgcgagagtgcagaccccttgggcgcctggctgcaggacgccaggcggcggcaggagcagatccaggccatgccgctggccgacagccaggctgtgcgggagcagctgcggcaggagcaggccctgctggaggagatcgagcgccacggcgagaaggtcgaggagtgccagaggtttgcgaaacagtacatcaacgccatcaaggactatgaactccagctggtgacgtacaaggcgcagcttgagccggtggcctccccggccaagaagcccaaggtccagtcgggatcagagagtgtcatccaggagtacgtggacctgcgtacgcactacagcgagctgaccacactgacgagccagtacatcaagttcatcagcgagactctgcggcgcatggaggaggaggagaggctggctgagcagcagcgggcagaggagcgcgagcggctggccgaggtggaggccgcgctggagaagcagcggcagctggccgaggcgcacgcccaggcaaaggcacaggcggagcgggaggcgaaggagctgcagcagcgcatgcaggaggaggtggtgcggcgggaggaggcggcggtggacgcgcagcagcagaagcgcagcattcaggaggagctgcagcagctgcggcagagctcggaggcggagatccaggccaaggcccggcaggcagaggcggctgagcgcagccggctgcgcatcgaggaggagatccgcgtggtgcgcctgcagttggaggccaccgagcgccagcgtggcggggctgagggggagctgcaggcactgcgtgcacgggcggaggaggctgaggcacaaaagcgacaggcgcaggaggaggccgagcgcttgcggaggcaggtgcaggacgagagccagcgtaagcggcaggcggaggtggagctggcctcgcgcgtgaaggccgaggccgaggcggcgcgcgagaagcagcgggccctgcaggccctggaggagctgcggctgcaggcggaggaggcggagcggcgcctgcggcaggccgaggtggagcgagcgcggcaggtacaggtggccctggagacggcgcagcgcagtgcagaggcggagctgcagagcaaacgcgcctccttcgccgagaagacggcacagctggagcgctccctgcaggaggaacacgtggctgtggcacagctgcgggaggaggctgagcggcgggcacagcagcaggccgaggccgagcgggcgcgcgaggaggcagagcgggagctggagcgctggcagctcaaggccaacgaggcgctacggctgcggctgcaggcggaggaggtggcgcagcagaagagcctggcgcaggccgaggctgagaagcagaaggaggaggcggagcgcgaggcgcggcggcgcggcaaggcggaggagcaggccgtccggcagcgggagctggctgaacaagagctggagaagcagcggcagctggcggaaggcaccgcgcagcagcgcctggccgcggagcaggagttgatccggctgcgggccgagacggagcagggggagcagcagcggcagctgctggaggaggagctggcccggctgcagcgtgaggcggctgcagccacgcagaaacggcaggagctggaagccgagctggccaaggtgcgggccgagatggaggtgctgctggccagcaaggcgagggctgaggaggagtcgcgctccaccagcgagaagtccaagcagaggctggaggccgaggccggccggttccgcgagctggccgaggaggccgcccgcctgcgtgccctggcggaagaggccaagcggcagcggcagctggccgaggaagacgcggcgcggcagcgggccgaggcggagcgggtgcttgcggagaagctggccgccatcggcgaggccacgcggctcaagacggaggcggagatcgcgctcaaggagaaggaggcggagaacgagcgcctgcggcggctggcggaggacgaggccttccagcggcggcggctggaggagcaggccgcgcaacacaaggctgacatcgaggagcgcctggcccagctgcgcaaggcatcggacagcgagctggagcggcagaaggggctggtggaggacacgctgaggcagcggcggcaggtggaggaggagatcctggcgctgaaggcgagcttcgagaaggcggccgctggcaaggcggagctggagctggagctgggacgcatccgcagcaacgcggaggacacgctgcgcagcaaggagcaggccgagctggaggctgcgaggcagcggcagctggcggcggaggaggagcggcggcgccgtgaggctgaggagcgcgtgcagaagagcctggcggccgaggaggaggccgcacggcagcggaaggcggcgctggaggaagtcgagcggctgaaagccaaggtggaggaggcgcggcgcctgcgggagcgagcggagcaggagtcggcgcggcagctgcagctggcccaggaggccgcccagaagcggctgcaggcggaagagaaggcacacgccttcgcggtgcagcagaaggagcaggagctacagcagacgctgcagcaggagcagagcgtgctggaccagctgcgcggcgaggcggaggcggcccggcgggcggctgaggaggcggaggaggcccgggtgcaggcggagcgtgaggcggcgcagtcccggcggcaggtggaagaggccgagcggctgaagcagtcggcagaggagcaggcacaggcccgggctcaggcacaggcggctgcagagaagctgcgcaaggaggccgagcaagaggcggcgcggcgggcacaggcggagcaggcggccctgcggcagaagcaggcagctgacgcggagatggagaagcataagaaattcgccgagcagacgctgcggcagaaggcgcaggtggagcaggagctgacaacactgcggctgcagctggaggagaccgaccaccagaagaacctgctggacgaggagctgcagcggctgaaggcggaggccacggaggccgcacgccagcgcagccaggtggaggaggagctcttctcggtgcgcgtgcagatggaggagctgagcaagctcaaggcacgcatcgaggctgagaaccgcgcactcatcttgcgtgacaaggacaatacgcagcgcttcctgcaggaggaggctgagaagatgaagcaggtggcggaggaggccgcgcggctgagtgtggcggcccaagaggctgcgcgactgcggcagctggcagaggaggacctggcacagcagcgggccttggcagagaagatgctcaaggagaagatgcaggcggtgcaggaggccacgcgactcaaggctgaggcggaactgctgcagcagcagaaggagcttgcgcaggagcaggcgcggcggctgcaggaggacaaggagcagatggcgcagcagctggcggaggagacgcagggcttccagcggacgctggaggccgagcggcagcggcagctggagatgagcgctgaggctgagcgcctcaagctgcgtgtggccgagatgagccgagcccaggcccgcgctgaggaggacgcccagcgcttccggaagcaggcggaggagatcggtgagaagctgcaccgcacggagctcgccacccaggagaaggtgaccctggtgcagacactggagatccagcgacagcagagtgaccatgatgccgagcgcctgcgggaggccatcgctgagctggagcgtgagaaggagaagctccaacaggaggccaaactgctgcagctcaagtctgaggagatgcagacggtgcagcaggagcagctgctgcaggagacgcaggccctgcagcaaagcttcctctctgaaaaggacagcctgctacagcgggagcgcttcatcgagcaggagaaggccaagctggagcagctcttccaggacgaggtggccaaggcacagcagctgcgtgaggagcagcagcggcagcagcagcagatggagcaggaacggcagcggctggtggccagcatggaggaggcgcggcggcggcagcatgaggccgaggagggcgtgcggcgcaagcaggaggagctgcagcagctggagcagcagcggcggcagcaggaggagctgctggctgaggagaaccagaggctgcgtgagcagctgcagctcctggaggagcagcaccgggccgcgctggcgcactcagaggaggtcactgcctcgcaggtggctgccacaaagaccctgcccaatggccgggatgcacttgatggccccgcggcagaggcagagccggagcacagcttcgatggcctgcggcggaaggtgtcagctcagaggctgcaggaggccggcatcctgagtgcggaggagctgcagcggttggcgcagggccacaccacggtggacgagctcgcacggcgggaagacgtgcgccactacctgcagggccgcagcagtatcgcagggctgttgctgaaggccaccaatgagaagctgagtgtttacgccgccctgcagaggcagctgctgagtcccggcacggccctcatcctgctggaggcgcaggcggcctcaggcttcctgctggaccctgtgcggaaccggcggctgaccgtcaacgaggctgtgaaggagggtgtggtgggccccgagctgcaccacaagctgctgtcggccgagcgcgccgtcactggctacaaggacccctacactggccagcagatctctctcttccaagccatgcagaagggcctcatcgtccgggagcacggcatccgcctgctggaggcccagatcgccacgggcggcgttatcgaccccgtgcacagccaccgcgtgcccgtggacgtggcctaccggcgcggctacttcgacgaggagatgaaccgcgtcctggcggaccccagcgacgacaccaagggcttctttgaccccaacacgcacgagaacctcacgtacctgcagctactggagcgctgcgtggaggaccccgagacgggcctgtgccttctgccactcacggataaggctgccaagggcggggagctggtctacactgactccgaggcccgggacgtctttgagaaggccaccgtgtctgcgccgttcggcaagttccagggcaagacggtgaccatttgggagatcatcaactcggaatacttcacggcagagcagcggcgggacctgctgcggcagttccgcacgggccggatcacagtggagaagatcatcaagatcatcatcacggtggtggaggagcaggagcagaagggccggctttgctttgagggcctgcgcagcctggtgccagccgccgagctgctggagagcagggtcatcgaccgcgagctctaccagcagctgcagcgaggtgagcgctctgtgcgagacgtagccgaggtggacactgtgcggcgggctctccggggtgccaacgtcatcgcgggtgtatggctggaggaggcggggcagaagctgagtatctacaatgccctgaagaaagacctgctgccatccgacatggccgtggccctgttggaagcccaggccggcaccgggcacatcatcgaccccgccaccagcgcccggctgaccgtggacgaggcagtgcgtgctggcctggtgggccccgagtttcatgagaagctgctatcagccgagaaggctgtgacagggtacagggacccctacacagggcagagcgtctccctgttccaggccctgaagaagggcctcattccccgggagcagggcctgcgcctgttggacgcccagctgtccacgggcggcatcgtggaccccagcaagagccaccgcgtgcccctggatgtcgcctgcgcccgaggctgcctggatgaggagaccagcagggccctgtcggcaccaagggccgacgccaaggcctacagtgaccccagcacaggggagccggccacctacggcgagctccagcagcggtgccggcccgaccagctgaccgggctgagcctgctgccgctctcagaaaaggctgctcgggcccggcaggaggagctctactcagagctgcaggcccgtgagacctttgaaaagaccccggttgaggtccccgtgggtggcttcaagggcaggacggtgacggtgtgggagctcatcagctctgagtacttcactgcggagcagcggcaggagctgttgcgtcagttccgcacgggcaaggtcaccgtggagaaggtcatcaagattctcattaccatcgtggaggaggtggagaccctgcggcaggagaggctgtccttcagcggcctccgtgcccctgtgccagccagcgagctcctggcttccggggtcctcagcagagcccagtttgagcagctcaaggacggcaagacgacggtcaaggacctttcggagctgggctccgtgcggacgctgctgcagggcagtggctgcctcgccggcatctacctggaggacaccaaggagaaggtgtccatctacgaggccatgcgccggggcctgctgagagccacaacggctgcgctcctgctggaggcgcaggcggccactggcttcctggtggaccccgtgcggaaccagcgcctgtatgtccacgaggccgtgaaggcgggcgtggtgggccccgagcttcacgagcagctgctgtctgccgagaaggccgtcaccggctacagagacccctactcgggcagcaccatctccctcttccaggccatgcagaagggcctggttctccggcagcacggcatccgcctgctggaggcccagatcgccacgggcggcatcatcgaccccgtgcacagccaccgcgtgcctgtggacgtggcctaccagcgcggctacttcagtgaggagatgaaccgcgtcctggcggaccccagcgacgacaccaagggcttctttgaccccaacacgcatgagaacctcacgtacaggcagctgctggagcggtgcgtggaggaccccgagacgggcttgcgccttctgccactgaaaggggcggagaaggctgaggtggtggagaccacgcaggtgtacactgaggaggagacaagaagggcatttgaagagacacagatcgacattcccggcggcggcagccacggcggctccaccatgtccctgtgggaggtgatgcagtcggacctgatccccgaggagcagcgggcccagctgatggctgacttccaggccggccgggtgaccaaggaacgcatgatcatcatcatcatcgagatcattgagaagacagagatcatccgccagcagggtctggcctcctacgactacgtgcgccgccgcctcacggctgaggacctgttcgaggctcggatcatctctctcgagacctacaacctgctccgggagggcaccaggagcctccgtgaggctctcgaggcggagtccgcctggtgctacctctatggcacgggctccgtggctggtgtctacctgcccggttccaggcagacactgagcatctaccaggctctcaagaaagggctgctgagtgccgaggtggcccgcctgctgctggaggcacaggcagccacaggcttcctgctggacccggtgaagggggagcggctgactgtggatgaggctgtgcggaagggcctcgtggggcccgagctgcacgaccgcctgctctcggctgagcgggcggtcaccggctaccgtgacccctacaccgagcagaccatctcgctcttccaggccatgaagaaggagctgatccctactgaggaggccctgcggctgctggatgcccagctggccaccggcggcatcgtggacccccgcctgggcttccaccttcccctggaggtggcttaccagcgtggctacctcaacaaggacacgcacgaccagctgtcagagcccagcgaggtgcgcagctacgtggacccgtccaccgacgagcgcctcagctacacgcagctgctcaggcggtgccgtcgtgacgacggcaccggccagctgctcctgccactgtcggacgcccgcaagctgaccttccgtggcctgcggaagcagatcaccatggaggagctggtgcgctcgcaggtcatggacgaggccacggcgctgcagctgcgggagggcctgacctccatcgaggaggtcaccaagaacttgcagaagttcctggaaggcaccagctgcatcgctggtgtcttcgtggacgccaccaaggaacggctctcggtgtaccaggccatgaagaagggcatcatccgccccggcacagcctttgagctcctggaggcgcaggcggccaccggttacgtcatcgaccccatcaagggactgaagctgacggtggaggaggctgtgcgtatgggcattgtgggccccgagttcaaggacaagctgctgtcggccgagcgcgccgtcactgggtacaaggacccctactctgggaagctcatctccctcttccaggccatgaagaagggcctgatcctgaaggaccatggcatccgcctgctggaggcccagatcgccacgggcggcatcatcgaccctgaggagagccaccggctgcccgtggaggtggcctacaagcgcggcctcttcgatgaggagatgaacgagatcctgaccgacccctcggacgacaccaagggcttctttgaccctaacacggaggagaacctcacctacctgcagctgatggagcgttgtatcactgacccccagacgggcctgtgtctcttgccgctgaaggagaagaagcgggagcggaagacgtcctccaagtcctccgtgcgcaagcgccgagtggtcatcgtggaccccgagacgggcaaggagatgtcagtgtacgaggcctaccgcaagggcctgattgaccaccagacgtacctggagctgtccgagcaggagtgcgagtgggaggagatcaccatctcctcctcggacggcgtggtcaagtccatgatcatcgaccgccgctccgggcgccagtacgacatcgatgatgccatcgccaagaacctcatcgaccgctcggcactggaccagtaccgcgccggcacgctctccatcaccgagttcgccgacatgctctcgggcaacgccggtggtttccgctcccgttcctcctcggtgggatcctcctcctcctaccccatcagccccgccgtctccaggacccagctggcctcctggtcagaccccactgaggagacgggccccgtggctggcatcctggacacggagacgctggagaaggtgtccatcaccgaggccatgcaccggaacctggtggataacatcacggggcagcggctgctggaggcgcaggcctgcaccgggggcatcatcgaccccagcaccggtgagcgcttccctgtcaccgacgccgtcaacaagggcctggtggacaagatcatggtggaccgcatcaacctggcccagaaggccttctgcggcttcgaggacccacgcaccaagaccaagatgtcggccgcccaggccctgaagaagggctggctctactacgaggccggccagcgcttcctggaggtgcagtacctgaccggcggcttgatcgagcccgacacgccgggccgcgtgcccctggacgaggccctgcagcgcggcacggtggacgcccgcaccgcacagaagctgcgtgacgtgggcgcctactccaagtacctcacctgccctaagaccaagctcaagatctcctataaggacgcgctggaccgcagcatggtggaggagggcacggggctgcggctgctggaggctgccgcgcagtccaccaagggctactacagcccctacagcgtcagcggctccggctctaccgctggctcccgcaccggctcgcgcaccggctcccgggccggctcccgccgcggcagctttgacgccaccggctccggcttctccatgaccttctcttcatcctcctactcctcctcgggctacggccgccgctacgcctcggggtcctcggcctccctggggggccctgagtctgccgtggcctgaggctgcctgcgcccaccccgctctgcatgcggcccagcccggctcccaccgaggcgcgggggccgttttcaacgcttaaaggtgtcttcctcccaagtggtgcctaaagtttaaccaaaaagaccagactaatatattaatatatatctgctgtccagacagcctgtatcttgggggacagggctggcccagccctgctggccgcctcaccccctcgggtctcctcactcccttctacctgccactcacacagccaggtgccttggagggtcccaagctgggccccagcccaccctcctgtcttcccagggtagcccgcctgccagtcctagctgcacagggcagctgggcccaaccctgtctgtagagggccctggtgtttctagcactggcctgcacggtgggccttgctggggacggggggccccagtcagcctctctcccagtctacccagagaagccccttccccatgggaagacgaggccctcgggcccagcccccacagtgctgtctgatctgtgctttccagctcaccccccacactcactcctgagacccctggcctccggcgtcagcctccagcctctgttcccctagtaagtgccttccatgtcggcctctaaccccaggccccgaggacccagacccagtggggaggcggacgttccagccggcatggctgggaactgcagacctgtcctcctggtgggtccaggggcccctccagcttgtggagccccacactggggtgccgcctgcccgtctctctcccatggagccccagccccctttgggcccagggacaccagccaggctctgtgctgaccctcctgttgcacccagccctggtctcagcagcgaccacccctgcctccaccctctgagctttgcatgttccactaaccccgggcgggtggcaggtggaggtgtcaggctgctggcgcctctgcaagggcagaacactaacctgaccgtgggcggggccttgcggtatccgcccccaataaaagcaattccaacctt

SEQ ID NO: 262173 - DNA, 14683 bp, Artificial Sequence
  derived and/or modified sequence
agagtggccgccgggtgctggaggctccgctgcaccccgcgccccgcgcccgccggcatggccggcccgctgcccgacgagcaggacttcatccaggcctacgaggaggtgcgcgagaagtacaaagatgagcgggatcgtgtgcagaagaaaaccttcaccaagtgggtcaacaagcacctcatcaaggcccagaggcacatcagtgacctgtatgaagacctccgcgatggccacaacctcatctccctgctggaggtcctctcgggggacagcctgccccgggagaaggggaggatgcgtttccacaagctgcagaatgtccagattgccctggactacctccggcaccgccaggtgaagctggtgaacatcaggaatgatgacatcgctgacggcaaccccaagctgacccttggcctcatctggacaatcattctgcacttccagatctcagatatccaggtgagtgggcagtcggaggacatgacggccaaggagaagctgctgctgtggtcgcagcgaatggtggaggggtaccagggcctgcgatgcgacaacttcacctccagctggagagacggccgcctcttcaatgccatcatccaccggcacaagcccctgctcatcgacatgaacaaggtgtaccggcagaccaacctggagaacctggaccaggccttctctgtggcggagcgggacctgggagtgacgcggctcctggaccctgaggacgtggatgtccctcagcccgacgagaagtccatcatcacctacgtctcgtcgctgtatgacgccatgccccgcgtgccggacgtgcaggatggggtgagggccaacgagctgcagctgcgctggcaggagtaccgggagctggtgctgctgctgcttcagtggatgcgacaccacacggccgcctttgaggaacgcaggttcccctccagcttcgaggagattgagatcctgtggtctcagttcctgaagtttaaggagatggagctaccagccaaggaggccgacaagaacaggtccaagggcatctaccaatccctggagggagcggtgcaagcaggccagctcaaggtgccccctggctaccacccgctggatgtggagaaggagtggggcaagctgcacgtggccatcctggagcgggagaagcagctccgcagcgagtttgagaggctggagtgtcttcagcgcatcgtgaccaagctgcagatggaggcggggctgtgtgaggagcagctgaaccaggccgacgccctgctgcagtcggatgtccggctgctggctgcaggcaaagtgccacagcgggcgggggaggtggaacgggacttggacaaggcggatagcatgatccggctgctcttcaacgacgtgcagaccctcaaggatggacggcacccgcagggcgagcagatgtaccgcagggtgtaccgtctgcacgagcgcctggtagccatccgcaccgagtacaacctacggctgaaggcaggcgtggcggcccctgcaacccaggtggcccaggtgactctgcagagtgtgcagaggcgccccgagctggaggactccactctgcgctacctgcaggacctgctggcctgggtggaggagaaccagcaccgtgtggatggcgctgagtggggtgtggacctgcccagcgtggaggcgcagctgggcagccaccgaggcctgcaccagtccatcgaagaattccgggccaagatcgagcgggcacggagtgacgagggccagctctcccccgccacccggggtgcctaccgtgactgcctgggtcggctggacctgcagtacgccaagctgctgaactcctccaaggcccgcctcaggtccctggagagcttgcacagctttgtggcagccgccactaaggagctaatgtggctgaatgagaaggaggaggaggaggtgggcttcgactggagcgaccgcaacaccaacatgaccgccaagaaggagagctactcggcgctgatgcgggagctggagctgaaggagaagaagatcaaggagctccaaaatgctggggaccggctgctgcgggaggaccacccggcccggcccacggtggagtccttccaggcggccctgcagacgcagtggagctggatgctacagctgtgctgctgtatcgaggcacacctgaaggagaacgctgcctactttcagttcttctcagatgtgcgggaggccgaggggcagttgcagaagctgcaggaggcactgcgtaggaaatacagttgtgatcgctccgccaccgtcacccggctggaggacctgctgcaggatgcccaggacgagaaggaacagctgaacgagtacaagggccacctctcaggcctggccaagcgggccaaggccgtcgtgcagctgaagccccgccacccagcccaccccatgcggggccgcctgcccctgctggccgtgtgcgactataagcaggtggaggtgactgtgcacaagggtgacgagtgccagctggtgggccctgcacagccgtcccactggaaggtgctcagcagctccggcagcgaggccgccgtgccctccgtgtgcttcctggtgcccccgcccaaccaggaggcccaggaggccgtcaccaggctggaggcccagcaccaggccctggtcacgctgtggcaccagttgcacgtggacatgaagagccttctggcctggcagagccttcgccgcgacgtgcagctcatccgctcctggtccctggccacgttccgcaccctgaagccagaggagcagcgccaagccctgcacagcctggagctgcactaccaggccttcctgcgggacagccaggacgcgggcggcttcggacccgaggaccggctgatggctgagcgcgagtacggctcctgcagccaccactaccagcagctgctgcagagcctggaacagggtgcacaggaagagtctcgctgccagcgctgcatctccgagctcaaagacatccggctgcagctggaggcctgtgagacgcgcaccgtgcaccgcctgcggctgccgctggacaaagagccggcacgggagtgtgcccagcgcatcgccgagcagcagaaggcacaggcagaggtggaggggctgggcaagggggtcgcccggctctctgccgaggccgagaaggtcttggccctaccagagccatcgcctgcggcccccacgctgcgctcggagctggagctgacgctgggcaagctggagcaggtccgcagcctgtctgccatctacctggagaagctcaagaccatcagcctggtgatccgcggcacgcagggggccgaggaggtgctcagggcccacgaggagcagctcaaggaggcccaggccgtgccggccaccctcccggagctcgaggccaccaaggcctctctgaagaagctgcgggcccaggccgaggcacagcagcccacgttcgacgccctgcgggatgagctgcggggggcacaggaggtgggggagcgactgcagcagcggcacggggagcgggacgtggaggtggagcgctggcgggagcgggtcgcccagttgcttgagcgctggcaggctgtgctggcccagaccgacgtgcggcagcgcgagctcgagcaactgggccgccagctgcgttactaccgcgagagtgcagaccccttgggcgcctggctgcaggacgccaggcggcggcaggagcagatccaggccatgccgctggccgacagccaggctgtgcgggagcagctgcggcaggagcaggccctgctggaggagatcgagcgccacggcgagaaggtcgaggagtgccagaggtttgcgaaacagtacatcaacgccatcaaggactatgaactccagctggtgacgtacaaggcgcagcttgagccggtggcctccccggccaagaagcccaaggtccagtcgggatcagagagtgtcatccaggagtacgtggacctgcgtacgcactacagcgagctgaccacactgacgagccagtacatcaagttcatcagcgagactctgcggcgcatggaggaggaggagaggctggctgagcagcagcgggcagaggagcgcgagcggctggccgaggtggaggccgcgctggagaagcagcggcagctggccgaggcgcacgcccaggcaaaggcacaggcggagcgggaggcgaaggagctgcagcagcgcatgcaggaggaggtggtgcggcgggaggaggcggcggtggacgcgcagcagcagaagcgcagcattcaggaggagctgcagcagctgcggcagagctcggaggcggagatccaggccaaggcccggcaggcagaggcggctgagcgcagccggctgcgcatcgaggaggagatccgcgtggtgcgcctgcagttggaggccaccgagcgccagcgtggcggggctgagggggagctgcaggcactgcgtgcacgggcggaggaggctgaggcacaaaagcgacaggcgcaggaggaggccgagcgcttgcggaggcaggtgcaggacgagagccagcgtaagcggcaggcggaggtggagctggcctcgcgcgtgaaggccgaggccgaggcggcgcgcgagaagcagcgggccctgcaggccctggaggagctgcggctgcaggcggaggaggcggagcggcgcctgcggcaggccgaggtggagcgagcgcggcaggtacaggtggccctggagacggcgcagcgcagtgcagaggcggagctgcagagcaaacgcgcctccttcgccgagaagacggcacagctggagcgctccctgcaggaggaacacgtggctgtggcacagctgcgggaggaggctgagcggcgggcacagcagcaggccgaggccgagcgggcgcgcgaggaggcagagcgggagctggagcgctggcagctcaaggccaacgaggcgctacggctgcggctgcaggcggaggaggtggcgcagcagaagagcctggcgcaggccgaggctgagaagcagaaggaggaggcggagcgcgaggcgcggcggcgcggcaaggcggaggagcaggccgtccggcagcgggagctggctgaacaagagctggagaagcagcggcagctggcggaaggcaccgcgcagcagcgcctggccgcggagcaggagttgatccggctgcgggccgagacggagcagggggagcagcagcggcagctgctggaggaggagctggcccggctgcagcgtgaggcggctgcagccacgcagaaacggcaggagctggaagccgagctggccaaggtgcgggccgagatggaggtgctgctggccagcaaggcgagggctgaggaggagtcgcgctccaccagcgagaagtccaagcagaggctggaggccgaggccggccggttccgcgagctggccgaggaggccgcccgcctgcgtgccctggcggaagaggccaagcggcagcggcagctggccgaggaagacgcggcgcggcagcgggccgaggcggagcgggtgcttgcggagaagctggccgccatcggcgaggccacgcggctcaagacggaggcggagatcgcgctcaaggagaaggaggcggagaacgagcgcctgcggcggctggcggaggacgaggccttccagcggcggcggctggaggagcaggccgcgcaacacaaggctgacatcgaggagcgcctggcccagctgcgcaaggcatcggacagcgagctggagcggcagaaggggctggtggaggacacgctgaggcagcggcggcaggtggaggaggagatcctggcgctgaaggcgagcttcgagaaggcggccgctggcaaggcggagctggagctggagctgggacgcatccgcagcaacgcggaggacacgctgcgcagcaaggagcaggccgagctggaggctgcgaggcagcggcagctggcggcggaggaggagcggcggcgccgtgaggctgaggagcgcgtgcagaagagcctggcggccgaggaggaggccgcacggcagcggaaggcggcgctggaggaagtcgagcggctgaaagccaaggtggaggaggcgcggcgcctgcgggagcgagcggagcaggagtcggcgcggcagctgcagctggcccaggaggccgcccagaagcggctgcaggcggaagagaaggcacacgccttcgcggtgcagcagaaggagcaggagctacagcagacgctgcagcaggagcagagcgtgctggaccagctgcgcggcgaggcggaggcggcccggcgggcggctgaggaggcggaggaggcccgggtgcaggcggagcgtgaggcggcgcagtcccggcggcaggtggaagaggccgagcggctgaagcagtcggcagaggagcaggcacaggcccgggctcaggcacaggcggctgcagagaagctgcgcaaggaggccgagcaagaggcggcgcggcgggcacaggcggagcaggcggccctgcggcagaagcaggcagctgacgcggagatggagaagcataagaaattcgccgagcagacgctgcggcagaaggcgcaggtggagcaggagctgacaacactgcggctgcagctggaggagaccgaccaccagaagaacctgctggacgaggagctgcagcggctgaaggcggaggccacggaggccgcacgccagcgcagccaggtggaggaggagctcttctcggtgcgcgtgcagatggaggagctgagcaagctcaaggcacgcatcgaggctgagaaccgcgcactcatcttgcgtgacaaggacaatacgcagcgcttcctgcaggaggaggctgagaagatgaagcaggtggcggaggaggccgcgcggctgagtgtggcggcccaagaggctgcgcgactgcggcagctggcagaggaggacctggcacagcagcgggccttggcagagaagatgctcaaggagaagatgcaggcggtgcaggaggccacgcgactcaaggctgaggcggaactgctgcagcagcagaaggagcttgcgcaggagcaggcgcggcggctgcaggaggacaaggagcagatggcgcagcagctggcggaggagacgcagggcttccagcggacgctggaggccgagcggcagcggcagctggagatgagcgctgaggctgagcgcctcaagctgcgtgtggccgagatgagccgagcccaggcccgcgctgaggaggacgcccagcgcttccggaagcaggcggaggagatcggtgagaagctgcaccgcacggagctcgccacccaggagaaggtgaccctggtgcagacactggagatccagcgacagcagagtgaccatgatgccgagcgcctgcgggaggccatcgctgagctggagcgtgagaaggagaagctccaacaggaggccaaactgctgcagctcaagtctgaggagatgcagacggtgcagcaggagcagctgctgcaggagacgcaggccctgcagcaaagcttcctctctgaaaaggacagcctgctacagcgggagcgcttcatcgagcaggagaaggccaagctggagcagctcttccaggacgaggtggccaaggcacagcagctgcgtgaggagcagcagcggcagcagcagcagatggagcaggaacggcagcggctggtggccagcatggaggaggcgcggcggcggcagcatgaggccgaggagggcgtgcggcgcaagcaggaggagctgcagcagctggagcagcagcggcggcagcaggaggagctgctggctgaggagaaccagaggctgcgtgagcagctgcagctcctggaggagcagcaccgggccgcgctggcgcactcagaggaggtcactgcctcgcaggtggctgccacaaagaccctgcccaatggccgggatgcacttgatggccccgcggcagaggcagagccggagcacagcttcgatggcctgcggcggaaggtgtcagctcagaggctgcaggaggccggcatcctgagtgcggaggagctgcagcggttggcgcagggccacaccacggtggacgagctcgcacggcgggaagacgtgcgccactacctgcagggccgcagcagtatcgcagggctgttgctgaaggccaccaatgagaagctgagtgtttacgccgccctgcagaggcagctgctgagtcccggcacggccctcatcctgctggaggcgcaggcggcctcaggcttcctgctggaccctgtgcggaaccggcggctgaccgtcaacgaggctgtgaaggagggtgtggtgggccccgagctgcaccacaagctgctgtcggccgagcgcgccgtcactggctacaaggacccctacactggccagcagatctctctcttccaagccatgcagaagggcctcatcgtccgggagcacggcatccgcctgctggaggcccagatcgccacgggcggcgttatcgaccccgtgcacagccaccgcgtgcccgtggacgtggcctaccggcgcggctacttcgacgaggagatgaaccgcgtcctggcggaccccagcgacgacaccaagggcttctttgaccccaacacgcacgagaacctcacgtacctgcagctactggagcgctgcgtggaggaccccgagacgggcctgtgccttctgccactcacggataaggctgccaagggcggggagctggtctacactgactccgaggcccgggacgtctttgagaaggccaccgtgtctgcgccgttcggcaagttccagggcaagacggtgaccatttgggagatcatcaactcggaatacttcacggcagagcagcggcgggacctgctgcggcagttccgcacgggccggatcacagtggagaagatcatcaagatcatcatcacggtggtggaggagcaggagcagaagggccggctttgctttgagggcctgcgcagcctggtgccagccgccgagctgctggagagcagggtcatcgaccgcgagctctaccagcagctgcagcgaggtgagcgctctgtgcgagacgtagccgaggtggacactgtgcggcgggctctccggggtgccaacgtcatcgcgggtgtatggctggaggaggcggggcagaagctgagtatctacaatgccctgaagaaagacctgctgccatccgacatggccgtggccctgttggaagcccaggccggcaccgggcacatcatcgaccccgccaccagcgcccggctgaccgtggacgaggcagtgcgtgctggcctggtgggccccgagtttcatgagaagctgctatcagccgagaaggctgtgacagggtacagggacccctacacagggcagagcgtctccctgttccaggccctgaagaagggcctcattccccgggagcagggcctgcgcctgttggacgcccagctgtccacgggcggcatcgtggaccccagcaagagccaccgcgtgcccctggatgtcgcctgcgcccgaggctgcctggatgaggagaccagcagggccctgtcggcaccaagggccgacgccaaggcctacagtgaccccagcacaggggagccggccacctacggcgagctccagcagcggtgccggcccgaccagctgaccgggctgagcctgctgccgctctcagaaaaggctgctcgggcccggcaggaggagctctactcagagctgcaggcccgtgagacctttgaaaagaccccggttgaggtccccgtgggtggcttcaagggcaggacggtgacggtgtgggagctcatcagctctgagtacttcactgcggagcagcggcaggagctgttgcgtcagttccgcacgggcaaggtcaccgtggagaaggtcatcaagattctcattaccatcgtggaggaggtggagaccctgcggcaggagaggctgtccttcagcggcctccgtgcccctgtgccagccagcgagctcctggcttccggggtcctcagcagagcccagtttgagcagctcaaggacggcaagacgacggtcaaggacctttcggagctgggctccgtgcggacgctgctgcagggcagtggctgcctcgccggcatctacctggaggacaccaaggagaaggtgtccatctacgaggccatgcgccggggcctgctgagagccacaacggctgcgctcctgctggaggcgcaggcggccactggcttcctggtggaccccgtgcggaaccagcgcctgtatgtccacgaggccgtgaaggcgggcgtggtgggccccgagcttcacgagcagctgctgtctgccgagaaggccgtcaccggctacagagacccctactcgggcagcaccatctccctcttccaggccatgcagaagggcctggttctccggcagcacggcatccgcctgctggaggcccagatcgccacgggcggcatcatcgaccccgtgcacagccaccgcgtgcctgtggacgtggcctaccagcgcggctacttcagtgaggagatgaaccgcgtcctggcggaccccagcgacgacaccaagggcttctttgaccccaacacgcatgagaacctcacgtacaggcagctgctggagcggtgcgtggaggaccccgagacgggcttgcgccttctgccactgaaaggggcggagaaggctgaggtggtggagaccacgcaggtgtacactgaggaggagacaagaagggcatttgaagagacacagatcgacattcccggcggcggcagccacggcggctccaccatgtccctgtgggaggtgatgcagtcggacctgatccccgaggagcagcgggcccagctgatggctgacttccaggccggccgggtgaccaaggaacgcatgatcatcatcatcatcgagatcattgagaagacagagatcatccgccagcagggtctggcctcctacgactacgtgcgccgccgcctcacggctgaggacctgttcgaggctcggatcatctctctcgagacctacaacctgctccgggagggcaccaggagcctccgtgaggctctcgaggcggagtccgcctggtgctacctctatggcacgggctccgtggctggtgtctacctgcccggttccaggcagacactgagcatctaccaggctctcaagaaagggctgctgagtgccgaggtggcccgcctgctgctggaggcacaggcagccacaggcttcctgctggacccggtgaagggggagcggctgactgtggatgaggctgtgcggaagggcctcgtggggcccgagctgcacgaccgcctgctctcggctgagcgggcggtcaccggctaccgtgacccctacaccgagcagaccatctcgctcttccaggccatgaagaaggagctgatccctactgaggaggccctgcggctgctggatgcccagctggccaccggcggcatcgtggacccccgcctgggcttccaccttcccctggaggtggcttaccagcgtggctacctcaacaaggacacgcacgaccagctgtcagagcccagcgaggtgcgcagctacgtggacccgtccaccgacgagcgcctcagctacacgcagctgctcaggcggtgccgtcgtgacgacggcaccggccagctgctcctgccactgtcggacgcccgcaagctgaccttccgtggcctgcggaagcagatcaccatggaggagctggtgcgctcgcaggtcatggacgaggccacggcgctgcagctgcgggagggcctgacctccatcgaggaggtcaccaagaacttgcagaagttcctggaaggcaccagctgcatcgctggtgtcttcgtggacgccaccaaggaacggctctcggtgtaccaggccatgaagaagggcatcatccgccccggcacagcctttgagctcctggaggcgcaggcggccaccggttacgtcatcgaccccatcaagggactgaagctgacggtggaggaggctgtgcgtatgggcattgtgggccccgagttcaaggacaagctgctgtcggccgagcgcgccgtcactgggtacaaggacccctactctgggaagctcatctccctcttccaggccatgaagaagggcctgatcctgaaggaccatggcatccgcctgctggaggcccagatcgccacgggcggcatcatcgaccctgaggagagccaccggctgcccgtggaggtggcctacaagcgcggcctcttcgatgaggagatgaacgagatcctgaccgacccctcggacgacaccaagggcttctttgaccctaacacggaggagaacctcacctacctgcagctgatggagcgttgtatcactgacccccagacgggcctgtgtctcttgccgctgaaggagaagaagcgggagcggaagacgtcctccaagtcctccgtgcgcaagcgccgagtggtcatcgtggaccccgagacgggcaaggagatgtcagtgtacgaggcctaccgcaagggcctgattgaccaccagacgtacctggagctgtccgagcaggagtgcgagtgggaggagatcaccatctcctcctcggacggcgtggtcaagtccatgatcatcgaccgccgctccgggcgccagtacgacatcgatgatgccatcgccaagaacctcatcgaccgctcggcactggaccagtaccgcgccggcacgctctccatcaccgagttcgccgacatgctctcgggcaacgccggtggtttccgctcccgttcctcctcggtgggatcctcctcctcctaccccatcagccccgccgtctccaggacccagctggcctcctggtcagaccccactgaggagacgggccccgtggctggcatcctggacacggagacgctggagaaggtgtccatcaccgaggccatgcaccggaacctggtggataacatcacggggcagcggctgctggaggcgcaggcctgcaccgggggcatcatcgaccccagcaccggtgagcgcttccctgtcaccgacgccgtcaacaagggcctggtggacaagatcatggtggaccgcatcaacctggcccagaaggccttctgcggcttcgaggacccacgcaccaagaccaagatgtcggccgcccaggccctgaagaagggctggctctactacgaggccggccagcgcttcctggaggtgcagtacctgaccggcggcttgatcgagcccgacacgccgggccgcgtgcccctggacgaggccctgcagcgcggcacggtggacgcccgcaccgcacagaagctgcgtgacgtgggcgcctactccaagtacctcacctgccctaagaccaagctcaagatctcctataaggacgcgctggaccgcagcatggtggaggagggcacggggctgcggctgctggaggctgccgcgcagtccaccaagggctactacagcccctacagcgtcagcggctccggctctaccgctggctcccgcaccggctcgcgcaccggctcccgggccggctcccgccgcggcagctttgacgccaccggctccggcttctccatgaccttctcttcatcctcctactcctcctcgggctacggccgccgctacgcctcggggtcctcggcctccctggggggccctgagtctgccgtggcctgaggctgcctgcgcccaccccgctctgcatgcggcccagcccggctcccaccgaggcgcgggggccgttttcaacgcttaaaggtgtcttcctcccaagtggtgcctaaagtttaaccaaaaagaccagactaatatattaatatatatctgctgtccagacagcctgtatcttgggggacagggctggcccagccctgctggccgcctcaccccctcgggtctcctcactcccttctacctgccactcacacagccaggtgccttggagggtcccaagctgggccccagcccaccctcctgtcttcccagggtagcccgcctgccagtcctagctgcacagggcagctgggcccaaccctgtctgtagagggccctggtgtttctagcactggcctgcacggtgggccttgctggggacggggggccccagtcagcctctctcccagtctacccagagaagccccttccccatgggaagacgaggccctcgggcccagcccccacagtgctgtctgatctgtgctttccagctcaccccccacactcactcctgagacccctggcctccggcgtcagcctccagcctctgttcccctagtaagtgccttccatgtcggcctctaaccccaggccccgaggacccagacccagtggggaggcggacgttccagccggcatggctgggaactgcagacctgtcctcctggtgggtccaggggcccctccagcttgtggagccccacactggggtgccgcctgcccgtctctctcccatggagccccagccccctttgggcccagggacaccagccaggctctgtgctgaccctcctgttgcacccagccctggtctcagcagcgaccacccctgcctccaccctctgagctttgcatgttccactaaccccgggcgggtggcaggtggaggtgtcaggctgctggcgcctctgcaagggcagaacactaacctgaccgtgggcggggccttgcggtatccgcccccaataaaagcaattccaacctt

SEQ ID NO: 262174 - DNA, 14689 bp, Artificial Sequence
  derived and/or modified sequence
gtggccggcatgtcgggggcggggggcgcctttgcctcgccgagggaggtcttgctggagcggccgtgctggctggacgggggctgcgagccggcccgcaggggctacctctaccagcagctgtgctgcgtagatgagcgggatcgtgtgcagaagaaaaccttcaccaagtgggtcaacaagcacctcatcaaggcccagaggcacatcagtgacctgtatgaagacctccgcgatggccacaacctcatctccctgctggaggtcctctcgggggacagcctgccccgggagaaggggaggatgcgtttccacaagctgcagaatgtccagattgccctggactacctccggcaccgccaggtgaagctggtgaacatcaggaatgatgacatcgctgacggcaaccccaagctgacccttggcctcatctggacaatcattctgcacttccagatctcagatatccaggtgagtgggcagtcggaggacatgacggccaaggagaagctgctgctgtggtcgcagcgaatggtggaggggtaccagggcctgcgatgcgacaacttcacctccagctggagagacggccgcctcttcaatgccatcatccaccggcacaagcccctgctcatcgacatgaacaaggtgtaccggcagaccaacctggagaacctggaccaggccttctctgtggcggagcgggacctgggagtgacgcggctcctggaccctgaggacgtggatgtccctcagcccgacgagaagtccatcatcacctacgtctcgtcgctgtatgacgccatgccccgcgtgccggacgtgcaggatggggtgagggccaacgagctgcagctgcgctggcaggagtaccgggagctggtgctgctgctgcttcagtggatgcgacaccacacggccgcctttgaggaacgcaggttcccctccagcttcgaggagattgagatcctgtggtctcagttcctgaagtttaaggagatggagctaccagccaaggaggccgacaagaacaggtccaagggcatctaccaatccctggagggagcggtgcaagcaggccagctcaaggtgccccctggctaccacccgctggatgtggagaaggagtggggcaagctgcacgtggccatcctggagcgggagaagcagctccgcagcgagtttgagaggctggagtgtcttcagcgcatcgtgaccaagctgcagatggaggcggggctgtgtgaggagcagctgaaccaggccgacgccctgctgcagtcggatgtccggctgctggctgcaggcaaagtgccacagcgggcgggggaggtggaacgggacttggacaaggcggatagcatgatccggctgctcttcaacgacgtgcagaccctcaaggatggacggcacccgcagggcgagcagatgtaccgcagggtgtaccgtctgcacgagcgcctggtagccatccgcaccgagtacaacctacggctgaaggcaggcgtggcggcccctgcaacccaggtggcccaggtgactctgcagagtgtgcagaggcgccccgagctggaggactccactctgcgctacctgcaggacctgctggcctgggtggaggagaaccagcaccgtgtggatggcgctgagtggggtgtggacctgcccagcgtggaggcgcagctgggcagccaccgaggcctgcaccagtccatcgaagaattccgggccaagatcgagcgggcacggagtgacgagggccagctctcccccgccacccggggtgcctaccgtgactgcctgggtcggctggacctgcagtacgccaagctgctgaactcctccaaggcccgcctcaggtccctggagagcttgcacagctttgtggcagccgccactaaggagctaatgtggctgaatgagaaggaggaggaggaggtgggcttcgactggagcgaccgcaacaccaacatgaccgccaagaaggagagctactcggcgctgatgcgggagctggagctgaaggagaagaagatcaaggagctccaaaatgctggggaccggctgctgcgggaggaccacccggcccggcccacggtggagtccttccaggcggccctgcagacgcagtggagctggatgctacagctgtgctgctgtatcgaggcacacctgaaggagaacgctgcctactttcagttcttctcagatgtgcgggaggccgaggggcagttgcagaagctgcaggaggcactgcgtaggaaatacagttgtgatcgctccgccaccgtcacccggctggaggacctgctgcaggatgcccaggacgagaaggaacagctgaacgagtacaagggccacctctcaggcctggccaagcgggccaaggccgtcgtgcagctgaagccccgccacccagcccaccccatgcggggccgcctgcccctgctggccgtgtgcgactataagcaggtggaggtgactgtgcacaagggtgacgagtgccagctggtgggccctgcacagccgtcccactggaaggtgctcagcagctccggcagcgaggccgccgtgccctccgtgtgcttcctggtgcccccgcccaaccaggaggcccaggaggccgtcaccaggctggaggcccagcaccaggccctggtcacgctgtggcaccagttgcacgtggacatgaagagccttctggcctggcagagccttcgccgcgacgtgcagctcatccgctcctggtccctggccacgttccgcaccctgaagccagaggagcagcgccaagccctgcacagcctggagctgcactaccaggccttcctgcgggacagccaggacgcgggcggcttcggacccgaggaccggctgatggctgagcgcgagtacggctcctgcagccaccactaccagcagctgctgcagagcctggaacagggtgcacaggaagagtctcgctgccagcgctgcatctccgagctcaaagacatccggctgcagctggaggcctgtgagacgcgcaccgtgcaccgcctgcggctgccgctggacaaagagccggcacgggagtgtgcccagcgcatcgccgagcagcagaaggcacaggcagaggtggaggggctgggcaagggggtcgcccggctctctgccgaggccgagaaggtcttggccctaccagagccatcgcctgcggcccccacgctgcgctcggagctggagctgacgctgggcaagctggagcaggtccgcagcctgtctgccatctacctggagaagctcaagaccatcagcctggtgatccgcggcacgcagggggccgaggaggtgctcagggcccacgaggagcagctcaaggaggcccaggccgtgccggccaccctcccggagctcgaggccaccaaggcctctctgaagaagctgcgggcccaggccgaggcacagcagcccacgttcgacgccctgcgggatgagctgcggggggcacaggaggtgggggagcgactgcagcagcggcacggggagcgggacgtggaggtggagcgctggcgggagcgggtcgcccagttgcttgagcgctggcaggctgtgctggcccagaccgacgtgcggcagcgcgagctcgagcaactgggccgccagctgcgttactaccgcgagagtgcagaccccttgggcgcctggctgcaggacgccaggcggcggcaggagcagatccaggccatgccgctggccgacagccaggctgtgcgggagcagctgcggcaggagcaggccctgctggaggagatcgagcgccacggcgagaaggtcgaggagtgccagaggtttgcgaaacagtacatcaacgccatcaaggactatgaactccagctggtgacgtacaaggcgcagcttgagccggtggcctccccggccaagaagcccaaggtccagtcgggatcagagagtgtcatccaggagtacgtggacctgcgtacgcactacagcgagctgaccacactgacgagccagtacatcaagttcatcagcgagactctgcggcgcatggaggaggaggagaggctggctgagcagcagcgggcagaggagcgcgagcggctggccgaggtggaggccgcgctggagaagcagcggcagctggccgaggcgcacgcccaggcaaaggcacaggcggagcgggaggcgaaggagctgcagcagcgcatgcaggaggaggtggtgcggcgggaggaggcggcggtggacgcgcagcagcagaagcgcagcattcaggaggagctgcagcagctgcggcagagctcggaggcggagatccaggccaaggcccggcaggcagaggcggctgagcgcagccggctgcgcatcgaggaggagatccgcgtggtgcgcctgcagttggaggccaccgagcgccagcgtggcggggctgagggggagctgcaggcactgcgtgcacgggcggaggaggctgaggcacaaaagcgacaggcgcaggaggaggccgagcgcttgcggaggcaggtgcaggacgagagccagcgtaagcggcaggcggaggtggagctggcctcgcgcgtgaaggccgaggccgaggcggcgcgcgagaagcagcgggccctgcaggccctggaggagctgcggctgcaggcggaggaggcggagcggcgcctgcggcaggccgaggtggagcgagcgcggcaggtacaggtggccctggagacggcgcagcgcagtgcagaggcggagctgcagagcaaacgcgcctccttcgccgagaagacggcacagctggagcgctccctgcaggaggaacacgtggctgtggcacagctgcgggaggaggctgagcggcgggcacagcagcaggccgaggccgagcgggcgcgcgaggaggcagagcgggagctggagcgctggcagctcaaggccaacgaggcgctacggctgcggctgcaggcggaggaggtggcgcagcagaagagcctggcgcaggccgaggctgagaagcagaaggaggaggcggagcgcgaggcgcggcggcgcggcaaggcggaggagcaggccgtccggcagcgggagctggctgaacaagagctggagaagcagcggcagctggcggaaggcaccgcgcagcagcgcctggccgcggagcaggagttgatccggctgcgggccgagacggagcagggggagcagcagcggcagctgctggaggaggagctggcccggctgcagcgtgaggcggctgcagccacgcagaaacggcaggagctggaagccgagctggccaaggtgcgggccgagatggaggtgctgctggccagcaaggcgagggctgaggaggagtcgcgctccaccagcgagaagtccaagcagaggctggaggccgaggccggccggttccgcgagctggccgaggaggccgcccgcctgcgtgccctggcggaagaggccaagcggcagcggcagctggccgaggaagacgcggcgcggcagcgggccgaggcggagcgggtgcttgcggagaagctggccgccatcggcgaggccacgcggctcaagacggaggcggagatcgcgctcaaggagaaggaggcggagaacgagcgcctgcggcggctggcggaggacgaggccttccagcggcggcggctggaggagcaggccgcgcaacacaaggctgacatcgaggagcgcctggcccagctgcgcaaggcatcggacagcgagctggagcggcagaaggggctggtggaggacacgctgaggcagcggcggcaggtggaggaggagatcctggcgctgaaggcgagcttcgagaaggcggccgctggcaaggcggagctggagctggagctgggacgcatccgcagcaacgcggaggacacgctgcgcagcaaggagcaggccgagctggaggctgcgaggcagcggcagctggcggcggaggaggagcggcggcgccgtgaggctgaggagcgcgtgcagaagagcctggcggccgaggaggaggccgcacggcagcggaaggcggcgctggaggaagtcgagcggctgaaagccaaggtggaggaggcgcggcgcctgcgggagcgagcggagcaggagtcggcgcggcagctgcagctggcccaggaggccgcccagaagcggctgcaggcggaagagaaggcacacgccttcgcggtgcagcagaaggagcaggagctacagcagacgctgcagcaggagcagagcgtgctggaccagctgcgcggcgaggcggaggcggcccggcgggcggctgaggaggcggaggaggcccgggtgcaggcggagcgtgaggcggcgcagtcccggcggcaggtggaagaggccgagcggctgaagcagtcggcagaggagcaggcacaggcccgggctcaggcacaggcggctgcagagaagctgcgcaaggaggccgagcaagaggcggcgcggcgggcacaggcggagcaggcggccctgcggcagaagcaggcagctgacgcggagatggagaagcataagaaattcgccgagcagacgctgcggcagaaggcgcaggtggagcaggagctgacaacactgcggctgcagctggaggagaccgaccaccagaagaacctgctggacgaggagctgcagcggctgaaggcggaggccacggaggccgcacgccagcgcagccaggtggaggaggagctcttctcggtgcgcgtgcagatggaggagctgagcaagctcaaggcacgcatcgaggctgagaaccgcgcactcatcttgcgtgacaaggacaatacgcagcgcttcctgcaggaggaggctgagaagatgaagcaggtggcggaggaggccgcgcggctgagtgtggcggcccaagaggctgcgcgactgcggcagctggcagaggaggacctggcacagcagcgggccttggcagagaagatgctcaaggagaagatgcaggcggtgcaggaggccacgcgactcaaggctgaggcggaactgctgcagcagcagaaggagcttgcgcaggagcaggcgcggcggctgcaggaggacaaggagcagatggcgcagcagctggcggaggagacgcagggcttccagcggacgctggaggccgagcggcagcggcagctggagatgagcgctgaggctgagcgcctcaagctgcgtgtggccgagatgagccgagcccaggcccgcgctgaggaggacgcccagcgcttccggaagcaggcggaggagatcggtgagaagctgcaccgcacggagctcgccacccaggagaaggtgaccctggtgcagacactggagatccagcgacagcagagtgaccatgatgccgagcgcctgcgggaggccatcgctgagctggagcgtgagaaggagaagctccaacaggaggccaaactgctgcagctcaagtctgaggagatgcagacggtgcagcaggagcagctgctgcaggagacgcaggccctgcagcaaagcttcctctctgaaaaggacagcctgctacagcgggagcgcttcatcgagcaggagaaggccaagctggagcagctcttccaggacgaggtggccaaggcacagcagctgcgtgaggagcagcagcggcagcagcagcagatggagcaggaacggcagcggctggtggccagcatggaggaggcgcggcggcggcagcatgaggccgaggagggcgtgcggcgcaagcaggaggagctgcagcagctggagcagcagcggcggcagcaggaggagctgctggctgaggagaaccagaggctgcgtgagcagctgcagctcctggaggagcagcaccgggccgcgctggcgcactcagaggaggtcactgcctcgcaggtggctgccacaaagaccctgcccaatggccgggatgcacttgatggccccgcggcagaggcagagccggagcacagcttcgatggcctgcggcggaaggtgtcagctcagaggctgcaggaggccggcatcctgagtgcggaggagctgcagcggttggcgcagggccacaccacggtggacgagctcgcacggcgggaagacgtgcgccactacctgcagggccgcagcagtatcgcagggctgttgctgaaggccaccaatgagaagctgagtgtttacgccgccctgcagaggcagctgctgagtcccggcacggccctcatcctgctggaggcgcaggcggcctcaggcttcctgctggaccctgtgcggaaccggcggctgaccgtcaacgaggctgtgaaggagggtgtggtgggccccgagctgcaccacaagctgctgtcggccgagcgcgccgtcactggctacaaggacccctacactggccagcagatctctctcttccaagccatgcagaagggcctcatcgtccgggagcacggcatccgcctgctggaggcccagatcgccacgggcggcgttatcgaccccgtgcacagccaccgcgtgcccgtggacgtggcctaccggcgcggctacttcgacgaggagatgaaccgcgtcctggcggaccccagcgacgacaccaagggcttctttgaccccaacacgcacgagaacctcacgtacctgcagctactggagcgctgcgtggaggaccccgagacgggcctgtgccttctgccactcacggataaggctgccaagggcggggagctggtctacactgactccgaggcccgggacgtctttgagaaggccaccgtgtctgcgccgttcggcaagttccagggcaagacggtgaccatttgggagatcatcaactcggaatacttcacggcagagcagcggcgggacctgctgcggcagttccgcacgggccggatcacagtggagaagatcatcaagatcatcatcacggtggtggaggagcaggagcagaagggccggctttgctttgagggcctgcgcagcctggtgccagccgccgagctgctggagagcagggtcatcgaccgcgagctctaccagcagctgcagcgaggtgagcgctctgtgcgagacgtagccgaggtggacactgtgcggcgggctctccggggtgccaacgtcatcgcgggtgtatggctggaggaggcggggcagaagctgagtatctacaatgccctgaagaaagacctgctgccatccgacatggccgtggccctgttggaagcccaggccggcaccgggcacatcatcgaccccgccaccagcgcccggctgaccgtggacgaggcagtgcgtgctggcctggtgggccccgagtttcatgagaagctgctatcagccgagaaggctgtgacagggtacagggacccctacacagggcagagcgtctccctgttccaggccctgaagaagggcctcattccccgggagcagggcctgcgcctgttggacgcccagctgtccacgggcggcatcgtggaccccagcaagagccaccgcgtgcccctggatgtcgcctgcgcccgaggctgcctggatgaggagaccagcagggccctgtcggcaccaagggccgacgccaaggcctacagtgaccccagcacaggggagccggccacctacggcgagctccagcagcggtgccggcccgaccagctgaccgggctgagcctgctgccgctctcagaaaaggctgctcgggcccggcaggaggagctctactcagagctgcaggcccgtgagacctttgaaaagaccccggttgaggtccccgtgggtggcttcaagggcaggacggtgacggtgtgggagctcatcagctctgagtacttcactgcggagcagcggcaggagctgttgcgtcagttccgcacgggcaaggtcaccgtggagaaggtcatcaagattctcattaccatcgtggaggaggtggagaccctgcggcaggagaggctgtccttcagcggcctccgtgcccctgtgccagccagcgagctcctggcttccggggtcctcagcagagcccagtttgagcagctcaaggacggcaagacgacggtcaaggacctttcggagctgggctccgtgcggacgctgctgcagggcagtggctgcctcgccggcatctacctggaggacaccaaggagaaggtgtccatctacgaggccatgcgccggggcctgctgagagccacaacggctgcgctcctgctggaggcgcaggcggccactggcttcctggtggaccccgtgcggaaccagcgcctgtatgtccacgaggccgtgaaggcgggcgtggtgggccccgagcttcacgagcagctgctgtctgccgagaaggccgtcaccggctacagagacccctactcgggcagcaccatctccctcttccaggccatgcagaagggcctggttctccggcagcacggcatccgcctgctggaggcccagatcgccacgggcggcatcatcgaccccgtgcacagccaccgcgtgcctgtggacgtggcctaccagcgcggctacttcagtgaggagatgaaccgcgtcctggcggaccccagcgacgacaccaagggcttctttgaccccaacacgcatgagaacctcacgtacaggcagctgctggagcggtgcgtggaggaccccgagacgggcttgcgccttctgccactgaaaggggcggagaaggctgaggtggtggagaccacgcaggtgtacactgaggaggagacaagaagggcatttgaagagacacagatcgacattcccggcggcggcagccacggcggctccaccatgtccctgtgggaggtgatgcagtcggacctgatccccgaggagcagcgggcccagctgatggctgacttccaggccggccgggtgaccaaggaacgcatgatcatcatcatcatcgagatcattgagaagacagagatcatccgccagcagggtctggcctcctacgactacgtgcgccgccgcctcacggctgaggacctgttcgaggctcggatcatctctctcgagacctacaacctgctccgggagggcaccaggagcctccgtgaggctctcgaggcggagtccgcctggtgctacctctatggcacgggctccgtggctggtgtctacctgcccggttccaggcagacactgagcatctaccaggctctcaagaaagggctgctgagtgccgaggtggcccgcctgctgctggaggcacaggcagccacaggcttcctgctggacccggtgaagggggagcggctgactgtggatgaggctgtgcggaagggcctcgtggggcccgagctgcacgaccgcctgctctcggctgagcgggcggtcaccggctaccgtgacccctacaccgagcagaccatctcgctcttccaggccatgaagaaggagctgatccctactgaggaggccctgcggctgctggatgcccagctggccaccggcggcatcgtggacccccgcctgggcttccaccttcccctggaggtggcttaccagcgtggctacctcaacaaggacacgcacgaccagctgtcagagcccagcgaggtgcgcagctacgtggacccgtccaccgacgagcgcctcagctacacgcagctgctcaggcggtgccgtcgtgacgacggcaccggccagctgctcctgccactgtcggacgcccgcaagctgaccttccgtggcctgcggaagcagatcaccatggaggagctggtgcgctcgcaggtcatggacgaggccacggcgctgcagctgcgggagggcctgacctccatcgaggaggtcaccaagaacttgcagaagttcctggaaggcaccagctgcatcgctggtgtcttcgtggacgccaccaaggaacggctctcggtgtaccaggccatgaagaagggcatcatccgccccggcacagcctttgagctcctggaggcgcaggcggccaccggttacgtcatcgaccccatcaagggactgaagctgacggtggaggaggctgtgcgtatgggcattgtgggccccgagttcaaggacaagctgctgtcggccgagcgcgccgtcactgggtacaaggacccctactctgggaagctcatctccctcttccaggccatgaagaagggcctgatcctgaaggaccatggcatccgcctgctggaggcccagatcgccacgggcggcatcatcgaccctgaggagagccaccggctgcccgtggaggtggcctacaagcgcggcctcttcgatgaggagatgaacgagatcctgaccgacccctcggacgacaccaagggcttctttgaccctaacacggaggagaacctcacctacctgcagctgatggagcgttgtatcactgacccccagacgggcctgtgtctcttgccgctgaaggagaagaagcgggagcggaagacgtcctccaagtcctccgtgcgcaagcgccgagtggtcatcgtggaccccgagacgggcaaggagatgtcagtgtacgaggcctaccgcaagggcctgattgaccaccagacgtacctggagctgtccgagcaggagtgcgagtgggaggagatcaccatctcctcctcggacggcgtggtcaagtccatgatcatcgaccgccgctccgggcgccagtacgacatcgatgatgccatcgccaagaacctcatcgaccgctcggcactggaccagtaccgcgccggcacgctctccatcaccgagttcgccgacatgctctcgggcaacgccggtggtttccgctcccgttcctcctcggtgggatcctcctcctcctaccccatcagccccgccgtctccaggacccagctggcctcctggtcagaccccactgaggagacgggccccgtggctggcatcctggacacggagacgctggagaaggtgtccatcaccgaggccatgcaccggaacctggtggataacatcacggggcagcggctgctggaggcgcaggcctgcaccgggggcatcatcgaccccagcaccggtgagcgcttccctgtcaccgacgccgtcaacaagggcctggtggacaagatcatggtggaccgcatcaacctggcccagaaggccttctgcggcttcgaggacccacgcaccaagaccaagatgtcggccgcccaggccctgaagaagggctggctctactacgaggccggccagcgcttcctggaggtgcagtacctgaccggcggcttgatcgagcccgacacgccgggccgcgtgcccctggacgaggccctgcagcgcggcacggtggacgcccgcaccgcacagaagctgcgtgacgtgggcgcctactccaagtacctcacctgccctaagaccaagctcaagatctcctataaggacgcgctggaccgcagcatggtggaggagggcacggggctgcggctgctggaggctgccgcgcagtccaccaagggctactacagcccctacagcgtcagcggctccggctctaccgctggctcccgcaccggctcgcgcaccggctcccgggccggctcccgccgcggcagctttgacgccaccggctccggcttctccatgaccttctcttcatcctcctactcctcctcgggctacggccgccgctacgcctcggggtcctcggcctccctggggggccctgagtctgccgtggcctgaggctgcctgcgcccaccccgctctgcatgcggcccagcccggctcccaccgaggcgcgggggccgttttcaacgcttaaaggtgtcttcctcccaagtggtgcctaaagtttaaccaaaaagaccagactaatatattaatatatatctgctgtccagacagcctgtatcttgggggacagggctggcccagccctgctggccgcctcaccccctcgggtctcctcactcccttctacctgccactcacacagccaggtgccttggagggtcccaagctgggccccagcccaccctcctgtcttcccagggtagcccgcctgccagtcctagctgcacagggcagctgggcccaaccctgtctgtagagggccctggtgtttctagcactggcctgcacggtgggccttgctggggacggggggccccagtcagcctctctcccagtctacccagagaagccccttccccatgggaagacgaggccctcgggcccagcccccacagtgctgtctgatctgtgctttccagctcaccccccacactcactcctgagacccctggcctccggcgtcagcctccagcctctgttcccctagtaagtgccttccatgtcggcctctaaccccaggccccgaggacccagacccagtggggaggcggacgttccagccggcatggctgggaactgcagacctgtcctcctggtgggtccaggggcccctccagcttgtggagccccacactggggtgccgcctgcccgtctctctcccatggagccccagccccctttgggcccagggacaccagccaggctctgtgctgaccctcctgttgcacccagccctggtctcagcagcgaccacccctgcctccaccctctgagctttgcatgttccactaaccccgggcgggtggcaggtggaggtgtcaggctgctggcgcctctgcaagggcagaacactaacctgaccgtgggcggggccttgcggtatccgcccccaataaaagcaattccaacctt

SEQ ID NO: 262175 - DNA, 14646 bp, Artificial Sequence
  derived and/or modified sequence
cctccgaggggcctgtgacctcccacacccctggcccgctccgtctgccccgtgggctcctgccaccgtccccgatgaagatcgtgcccgatgagcgggatcgtgtgcagaagaaaaccttcaccaagtgggtcaacaagcacctcatcaaggcccagaggcacatcagtgacctgtatgaagacctccgcgatggccacaacctcatctccctgctggaggtcctctcgggggacagcctgccccgggagaaggggaggatgcgtttccacaagctgcagaatgtccagattgccctggactacctccggcaccgccaggtgaagctggtgaacatcaggaatgatgacatcgctgacggcaaccccaagctgacccttggcctcatctggacaatcattctgcacttccagatctcagatatccaggtgagtgggcagtcggaggacatgacggccaaggagaagctgctgctgtggtcgcagcgaatggtggaggggtaccagggcctgcgatgcgacaacttcacctccagctggagagacggccgcctcttcaatgccatcatccaccggcacaagcccctgctcatcgacatgaacaaggtgtaccggcagaccaacctggagaacctggaccaggccttctctgtggcggagcgggacctgggagtgacgcggctcctggaccctgaggacgtggatgtccctcagcccgacgagaagtccatcatcacctacgtctcgtcgctgtatgacgccatgccccgcgtgccggacgtgcaggatggggtgagggccaacgagctgcagctgcgctggcaggagtaccgggagctggtgctgctgctgcttcagtggatgcgacaccacacggccgcctttgaggaacgcaggttcccctccagcttcgaggagattgagatcctgtggtctcagttcctgaagtttaaggagatggagctaccagccaaggaggccgacaagaacaggtccaagggcatctaccaatccctggagggagcggtgcaagcaggccagctcaaggtgccccctggctaccacccgctggatgtggagaaggagtggggcaagctgcacgtggccatcctggagcgggagaagcagctccgcagcgagtttgagaggctggagtgtcttcagcgcatcgtgaccaagctgcagatggaggcggggctgtgtgaggagcagctgaaccaggccgacgccctgctgcagtcggatgtccggctgctggctgcaggcaaagtgccacagcgggcgggggaggtggaacgggacttggacaaggcggatagcatgatccggctgctcttcaacgacgtgcagaccctcaaggatggacggcacccgcagggcgagcagatgtaccgcagggtgtaccgtctgcacgagcgcctggtagccatccgcaccgagtacaacctacggctgaaggcaggcgtggcggcccctgcaacccaggtggcccaggtgactctgcagagtgtgcagaggcgccccgagctggaggactccactctgcgctacctgcaggacctgctggcctgggtggaggagaaccagcaccgtgtggatggcgctgagtggggtgtggacctgcccagcgtggaggcgcagctgggcagccaccgaggcctgcaccagtccatcgaagaattccgggccaagatcgagcgggcacggagtgacgagggccagctctcccccgccacccggggtgcctaccgtgactgcctgggtcggctggacctgcagtacgccaagctgctgaactcctccaaggcccgcctcaggtccctggagagcttgcacagctttgtggcagccgccactaaggagctaatgtggctgaatgagaaggaggaggaggaggtgggcttcgactggagcgaccgcaacaccaacatgaccgccaagaaggagagctactcggcgctgatgcgggagctggagctgaaggagaagaagatcaaggagctccaaaatgctggggaccggctgctgcgggaggaccacccggcccggcccacggtggagtccttccaggcggccctgcagacgcagtggagctggatgctacagctgtgctgctgtatcgaggcacacctgaaggagaacgctgcctactttcagttcttctcagatgtgcgggaggccgaggggcagttgcagaagctgcaggaggcactgcgtaggaaatacagttgtgatcgctccgccaccgtcacccggctggaggacctgctgcaggatgcccaggacgagaaggaacagctgaacgagtacaagggccacctctcaggcctggccaagcgggccaaggccgtcgtgcagctgaagccccgccacccagcccaccccatgcggggccgcctgcccctgctggccgtgtgcgactataagcaggtggaggtgactgtgcacaagggtgacgagtgccagctggtgggccctgcacagccgtcccactggaaggtgctcagcagctccggcagcgaggccgccgtgccctccgtgtgcttcctggtgcccccgcccaaccaggaggcccaggaggccgtcaccaggctggaggcccagcaccaggccctggtcacgctgtggcaccagttgcacgtggacatgaagagccttctggcctggcagagccttcgccgcgacgtgcagctcatccgctcctggtccctggccacgttccgcaccctgaagccagaggagcagcgccaagccctgcacagcctggagctgcactaccaggccttcctgcgggacagccaggacgcgggcggcttcggacccgaggaccggctgatggctgagcgcgagtacggctcctgcagccaccactaccagcagctgctgcagagcctggaacagggtgcacaggaagagtctcgctgccagcgctgcatctccgagctcaaagacatccggctgcagctggaggcctgtgagacgcgcaccgtgcaccgcctgcggctgccgctggacaaagagccggcacgggagtgtgcccagcgcatcgccgagcagcagaaggcacaggcagaggtggaggggctgggcaagggggtcgcccggctctctgccgaggccgagaaggtcttggccctaccagagccatcgcctgcggcccccacgctgcgctcggagctggagctgacgctgggcaagctggagcaggtccgcagcctgtctgccatctacctggagaagctcaagaccatcagcctggtgatccgcggcacgcagggggccgaggaggtgctcagggcccacgaggagcagctcaaggaggcccaggccgtgccggccaccctcccggagctcgaggccaccaaggcctctctgaagaagctgcgggcccaggccgaggcacagcagcccacgttcgacgccctgcgggatgagctgcggggggcacaggaggtgggggagcgactgcagcagcggcacggggagcgggacgtggaggtggagcgctggcgggagcgggtcgcccagttgcttgagcgctggcaggctgtgctggcccagaccgacgtgcggcagcgcgagctcgagcaactgggccgccagctgcgttactaccgcgagagtgcagaccccttgggcgcctggctgcaggacgccaggcggcggcaggagcagatccaggccatgccgctggccgacagccaggctgtgcgggagcagctgcggcaggagcaggccctgctggaggagatcgagcgccacggcgagaaggtcgaggagtgccagaggtttgcgaaacagtacatcaacgccatcaaggactatgaactccagctggtgacgtacaaggcgcagcttgagccggtggcctccccggccaagaagcccaaggtccagtcgggatcagagagtgtcatccaggagtacgtggacctgcgtacgcactacagcgagctgaccacactgacgagccagtacatcaagttcatcagcgagactctgcggcgcatggaggaggaggagaggctggctgagcagcagcgggcagaggagcgcgagcggctggccgaggtggaggccgcgctggagaagcagcggcagctggccgaggcgcacgcccaggcaaaggcacaggcggagcgggaggcgaaggagctgcagcagcgcatgcaggaggaggtggtgcggcgggaggaggcggcggtggacgcgcagcagcagaagcgcagcattcaggaggagctgcagcagctgcggcagagctcggaggcggagatccaggccaaggcccggcaggcagaggcggctgagcgcagccggctgcgcatcgaggaggagatccgcgtggtgcgcctgcagttggaggccaccgagcgccagcgtggcggggctgagggggagctgcaggcactgcgtgcacgggcggaggaggctgaggcacaaaagcgacaggcgcaggaggaggccgagcgcttgcggaggcaggtgcaggacgagagccagcgtaagcggcaggcggaggtggagctggcctcgcgcgtgaaggccgaggccgaggcggcgcgcgagaagcagcgggccctgcaggccctggaggagctgcggctgcaggcggaggaggcggagcggcgcctgcggcaggccgaggtggagcgagcgcggcaggtacaggtggccctggagacggcgcagcgcagtgcagaggcggagctgcagagcaaacgcgcctccttcgccgagaagacggcacagctggagcgctccctgcaggaggaacacgtggctgtggcacagctgcgggaggaggctgagcggcgggcacagcagcaggccgaggccgagcgggcgcgcgaggaggcagagcgggagctggagcgctggcagctcaaggccaacgaggcgctacggctgcggctgcaggcggaggaggtggcgcagcagaagagcctggcgcaggccgaggctgagaagcagaaggaggaggcggagcgcgaggcgcggcggcgcggcaaggcggaggagcaggccgtccggcagcgggagctggctgaacaagagctggagaagcagcggcagctggcggaaggcaccgcgcagcagcgcctggccgcggagcaggagttgatccggctgcgggccgagacggagcagggggagcagcagcggcagctgctggaggaggagctggcccggctgcagcgtgaggcggctgcagccacgcagaaacggcaggagctggaagccgagctggccaaggtgcgggccgagatggaggtgctgctggccagcaaggcgagggctgaggaggagtcgcgctccaccagcgagaagtccaagcagaggctggaggccgaggccggccggttccgcgagctggccgaggaggccgcccgcctgcgtgccctggcggaagaggccaagcggcagcggcagctggccgaggaagacgcggcgcggcagcgggccgaggcggagcgggtgcttgcggagaagctggccgccatcggcgaggccacgcggctcaagacggaggcggagatcgcgctcaaggagaaggaggcggagaacgagcgcctgcggcggctggcggaggacgaggccttccagcggcggcggctggaggagcaggccgcgcaacacaaggctgacatcgaggagcgcctggcccagctgcgcaaggcatcggacagcgagctggagcggcagaaggggctggtggaggacacgctgaggcagcggcggcaggtggaggaggagatcctggcgctgaaggcgagcttcgagaaggcggccgctggcaaggcggagctggagctggagctgggacgcatccgcagcaacgcggaggacacgctgcgcagcaaggagcaggccgagctggaggctgcgaggcagcggcagctggcggcggaggaggagcggcggcgccgtgaggctgaggagcgcgtgcagaagagcctggcggccgaggaggaggccgcacggcagcggaaggcggcgctggaggaagtcgagcggctgaaagccaaggtggaggaggcgcggcgcctgcgggagcgagcggagcaggagtcggcgcggcagctgcagctggcccaggaggccgcccagaagcggctgcaggcggaagagaaggcacacgccttcgcggtgcagcagaaggagcaggagctacagcagacgctgcagcaggagcagagcgtgctggaccagctgcgcggcgaggcggaggcggcccggcgggcggctgaggaggcggaggaggcccgggtgcaggcggagcgtgaggcggcgcagtcccggcggcaggtggaagaggccgagcggctgaagcagtcggcagaggagcaggcacaggcccgggctcaggcacaggcggctgcagagaagctgcgcaaggaggccgagcaagaggcggcgcggcgggcacaggcggagcaggcggccctgcggcagaagcaggcagctgacgcggagatggagaagcataagaaattcgccgagcagacgctgcggcagaaggcgcaggtggagcaggagctgacaacactgcggctgcagctggaggagaccgaccaccagaagaacctgctggacgaggagctgcagcggctgaaggcggaggccacggaggccgcacgccagcgcagccaggtggaggaggagctcttctcggtgcgcgtgcagatggaggagctgagcaagctcaaggcacgcatcgaggctgagaaccgcgcactcatcttgcgtgacaaggacaatacgcagcgcttcctgcaggaggaggctgagaagatgaagcaggtggcggaggaggccgcgcggctgagtgtggcggcccaagaggctgcgcgactgcggcagctggcagaggaggacctggcacagcagcgggccttggcagagaagatgctcaaggagaagatgcaggcggtgcaggaggccacgcgactcaaggctgaggcggaactgctgcagcagcagaaggagcttgcgcaggagcaggcgcggcggctgcaggaggacaaggagcagatggcgcagcagctggcggaggagacgcagggcttccagcggacgctggaggccgagcggcagcggcagctggagatgagcgctgaggctgagcgcctcaagctgcgtgtggccgagatgagccgagcccaggcccgcgctgaggaggacgcccagcgcttccggaagcaggcggaggagatcggtgagaagctgcaccgcacggagctcgccacccaggagaaggtgaccctggtgcagacactggagatccagcgacagcagagtgaccatgatgccgagcgcctgcgggaggccatcgctgagctggagcgtgagaaggagaagctccaacaggaggccaaactgctgcagctcaagtctgaggagatgcagacggtgcagcaggagcagctgctgcaggagacgcaggccctgcagcaaagcttcctctctgaaaaggacagcctgctacagcgggagcgcttcatcgagcaggagaaggccaagctggagcagctcttccaggacgaggtggccaaggcacagcagctgcgtgaggagcagcagcggcagcagcagcagatggagcaggaacggcagcggctggtggccagcatggaggaggcgcggcggcggcagcatgaggccgaggagggcgtgcggcgcaagcaggaggagctgcagcagctggagcagcagcggcggcagcaggaggagctgctggctgaggagaaccagaggctgcgtgagcagctgcagctcctggaggagcagcaccgggccgcgctggcgcactcagaggaggtcactgcctcgcaggtggctgccacaaagaccctgcccaatggccgggatgcacttgatggccccgcggcagaggcagagccggagcacagcttcgatggcctgcggcggaaggtgtcagctcagaggctgcaggaggccggcatcctgagtgcggaggagctgcagcggttggcgcagggccacaccacggtggacgagctcgcacggcgggaagacgtgcgccactacctgcagggccgcagcagtatcgcagggctgttgctgaaggccaccaatgagaagctgagtgtttacgccgccctgcagaggcagctgctgagtcccggcacggccctcatcctgctggaggcgcaggcggcctcaggcttcctgctggaccctgtgcggaaccggcggctgaccgtcaacgaggctgtgaaggagggtgtggtgggccccgagctgcaccacaagctgctgtcggccgagcgcgccgtcactggctacaaggacccctacactggccagcagatctctctcttccaagccatgcagaagggcctcatcgtccgggagcacggcatccgcctgctggaggcccagatcgccacgggcggcgttatcgaccccgtgcacagccaccgcgtgcccgtggacgtggcctaccggcgcggctacttcgacgaggagatgaaccgcgtcctggcggaccccagcgacgacaccaagggcttctttgaccccaacacgcacgagaacctcacgtacctgcagctactggagcgctgcgtggaggaccccgagacgggcctgtgccttctgccactcacggataaggctgccaagggcggggagctggtctacactgactccgaggcccgggacgtctttgagaaggccaccgtgtctgcgccgttcggcaagttccagggcaagacggtgaccatttgggagatcatcaactcggaatacttcacggcagagcagcggcgggacctgctgcggcagttccgcacgggccggatcacagtggagaagatcatcaagatcatcatcacggtggtggaggagcaggagcagaagggccggctttgctttgagggcctgcgcagcctggtgccagccgccgagctgctggagagcagggtcatcgaccgcgagctctaccagcagctgcagcgaggtgagcgctctgtgcgagacgtagccgaggtggacactgtgcggcgggctctccggggtgccaacgtcatcgcgggtgtatggctggaggaggcggggcagaagctgagtatctacaatgccctgaagaaagacctgctgccatccgacatggccgtggccctgttggaagcccaggccggcaccgggcacatcatcgaccccgccaccagcgcccggctgaccgtggacgaggcagtgcgtgctggcctggtgggccccgagtttcatgagaagctgctatcagccgagaaggctgtgacagggtacagggacccctacacagggcagagcgtctccctgttccaggccctgaagaagggcctcattccccgggagcagggcctgcgcctgttggacgcccagctgtccacgggcggcatcgtggaccccagcaagagccaccgcgtgcccctggatgtcgcctgcgcccgaggctgcctggatgaggagaccagcagggccctgtcggcaccaagggccgacgccaaggcctacagtgaccccagcacaggggagccggccacctacggcgagctccagcagcggtgccggcccgaccagctgaccgggctgagcctgctgccgctctcagaaaaggctgctcgggcccggcaggaggagctctactcagagctgcaggcccgtgagacctttgaaaagaccccggttgaggtccccgtgggtggcttcaagggcaggacggtgacggtgtgggagctcatcagctctgagtacttcactgcggagcagcggcaggagctgttgcgtcagttccgcacgggcaaggtcaccgtggagaaggtcatcaagattctcattaccatcgtggaggaggtggagaccctgcggcaggagaggctgtccttcagcggcctccgtgcccctgtgccagccagcgagctcctggcttccggggtcctcagcagagcccagtttgagcagctcaaggacggcaagacgacggtcaaggacctttcggagctgggctccgtgcggacgctgctgcagggcagtggctgcctcgccggcatctacctggaggacaccaaggagaaggtgtccatctacgaggccatgcgccggggcctgctgagagccacaacggctgcgctcctgctggaggcgcaggcggccactggcttcctggtggaccccgtgcggaaccagcgcctgtatgtccacgaggccgtgaaggcgggcgtggtgggccccgagcttcacgagcagctgctgtctgccgagaaggccgtcaccggctacagagacccctactcgggcagcaccatctccctcttccaggccatgcagaagggcctggttctccggcagcacggcatccgcctgctggaggcccagatcgccacgggcggcatcatcgaccccgtgcacagccaccgcgtgcctgtggacgtggcctaccagcgcggctacttcagtgaggagatgaaccgcgtcctggcggaccccagcgacgacaccaagggcttctttgaccccaacacgcatgagaacctcacgtacaggcagctgctggagcggtgcgtggaggaccccgagacgggcttgcgccttctgccactgaaaggggcggagaaggctgaggtggtggagaccacgcaggtgtacactgaggaggagacaagaagggcatttgaagagacacagatcgacattcccggcggcggcagccacggcggctccaccatgtccctgtgggaggtgatgcagtcggacctgatccccgaggagcagcgggcccagctgatggctgacttccaggccggccgggtgaccaaggaacgcatgatcatcatcatcatcgagatcattgagaagacagagatcatccgccagcagggtctggcctcctacgactacgtgcgccgccgcctcacggctgaggacctgttcgaggctcggatcatctctctcgagacctacaacctgctccgggagggcaccaggagcctccgtgaggctctcgaggcggagtccgcctggtgctacctctatggcacgggctccgtggctggtgtctacctgcccggttccaggcagacactgagcatctaccaggctctcaagaaagggctgctgagtgccgaggtggcccgcctgctgctggaggcacaggcagccacaggcttcctgctggacccggtgaagggggagcggctgactgtggatgaggctgtgcggaagggcctcgtggggcccgagctgcacgaccgcctgctctcggctgagcgggcggtcaccggctaccgtgacccctacaccgagcagaccatctcgctcttccaggccatgaagaaggagctgatccctactgaggaggccctgcggctgctggatgcccagctggccaccggcggcatcgtggacccccgcctgggcttccaccttcccctggaggtggcttaccagcgtggctacctcaacaaggacacgcacgaccagctgtcagagcccagcgaggtgcgcagctacgtggacccgtccaccgacgagcgcctcagctacacgcagctgctcaggcggtgccgtcgtgacgacggcaccggccagctgctcctgccactgtcggacgcccgcaagctgaccttccgtggcctgcggaagcagatcaccatggaggagctggtgcgctcgcaggtcatggacgaggccacggcgctgcagctgcgggagggcctgacctccatcgaggaggtcaccaagaacttgcagaagttcctggaaggcaccagctgcatcgctggtgtcttcgtggacgccaccaaggaacggctctcggtgtaccaggccatgaagaagggcatcatccgccccggcacagcctttgagctcctggaggcgcaggcggccaccggttacgtcatcgaccccatcaagggactgaagctgacggtggaggaggctgtgcgtatgggcattgtgggccccgagttcaaggacaagctgctgtcggccgagcgcgccgtcactgggtacaaggacccctactctgggaagctcatctccctcttccaggccatgaagaagggcctgatcctgaaggaccatggcatccgcctgctggaggcccagatcgccacgggcggcatcatcgaccctgaggagagccaccggctgcccgtggaggtggcctacaagcgcggcctcttcgatgaggagatgaacgagatcctgaccgacccctcggacgacaccaagggcttctttgaccctaacacggaggagaacctcacctacctgcagctgatggagcgttgtatcactgacccccagacgggcctgtgtctcttgccgctgaaggagaagaagcgggagcggaagacgtcctccaagtcctccgtgcgcaagcgccgagtggtcatcgtggaccccgagacgggcaaggagatgtcagtgtacgaggcctaccgcaagggcctgattgaccaccagacgtacctggagctgtccgagcaggagtgcgagtgggaggagatcaccatctcctcctcggacggcgtggtcaagtccatgatcatcgaccgccgctccgggcgccagtacgacatcgatgatgccatcgccaagaacctcatcgaccgctcggcactggaccagtaccgcgccggcacgctctccatcaccgagttcgccgacatgctctcgggcaacgccggtggtttccgctcccgttcctcctcggtgggatcctcctcctcctaccccatcagccccgccgtctccaggacccagctggcctcctggtcagaccccactgaggagacgggccccgtggctggcatcctggacacggagacgctggagaaggtgtccatcaccgaggccatgcaccggaacctggtggataacatcacggggcagcggctgctggaggcgcaggcctgcaccgggggcatcatcgaccccagcaccggtgagcgcttccctgtcaccgacgccgtcaacaagggcctggtggacaagatcatggtggaccgcatcaacctggcccagaaggccttctgcggcttcgaggacccacgcaccaagaccaagatgtcggccgcccaggccctgaagaagggctggctctactacgaggccggccagcgcttcctggaggtgcagtacctgaccggcggcttgatcgagcccgacacgccgggccgcgtgcccctggacgaggccctgcagcgcggcacggtggacgcccgcaccgcacagaagctgcgtgacgtgggcgcctactccaagtacctcacctgccctaagaccaagctcaagatctcctataaggacgcgctggaccgcagcatggtggaggagggcacggggctgcggctgctggaggctgccgcgcagtccaccaagggctactacagcccctacagcgtcagcggctccggctctaccgctggctcccgcaccggctcgcgcaccggctcccgggccggctcccgccgcggcagctttgacgccaccggctccggcttctccatgaccttctcttcatcctcctactcctcctcgggctacggccgccgctacgcctcggggtcctcggcctccctggggggccctgagtctgccgtggcctgaggctgcctgcgcccaccccgctctgcatgcggcccagcccggctcccaccgaggcgcgggggccgttttcaacgcttaaaggtgtcttcctcccaagtggtgcctaaagtttaaccaaaaagaccagactaatatattaatatatatctgctgtccagacagcctgtatcttgggggacagggctggcccagccctgctggccgcctcaccccctcgggtctcctcactcccttctacctgccactcacacagccaggtgccttggagggtcccaagctgggccccagcccaccctcctgtcttcccagggtagcccgcctgccagtcctagctgcacagggcagctgggcccaaccctgtctgtagagggccctggtgtttctagcactggcctgcacggtgggccttgctggggacggggggccccagtcagcctctctcccagtctacccagagaagccccttccccatgggaagacgaggccctcgggcccagcccccacagtgctgtctgatctgtgctttccagctcaccccccacactcactcctgagacccctggcctccggcgtcagcctccagcctctgttcccctagtaagtgccttccatgtcggcctctaaccccaggccccgaggacccagacccagtggggaggcggacgttccagccggcatggctgggaactgcagacctgtcctcctggtgggtccaggggcccctccagcttgtggagccccacactggggtgccgcctgcccgtctctctcccatggagccccagccccctttgggcccagggacaccagccaggctctgtgctgaccctcctgttgcacccagccctggtctcagcagcgaccacccctgcctccaccctctgagctttgcatgttccactaaccccgggcgggtggcaggtggaggtgtcaggctgctggcgcctctgcaagggcagaacactaacctgaccgtgggcggggccttgcggtatccgcccccaataaaagcaattccaacctt

SEQ ID NO: 262176 - DNA, 14787 bp, Artificial Sequence
  derived and/or modified sequence
ggcggcagagctgaagtgagcggagccaccaggaggccatgtcgggtgaggacgctgaggtccgggcagtctctgaagatgtctccaatggaagcagtggctcgcccagccctggggacacactgccctggaaccttgggaaaacgcagcggagccggcgcagcgggggtggcgctgggagcaacgggagtgtcctggacccagctgagcgggcggtcattcgcatcgcagatgagcgggatcgtgtgcagaagaaaaccttcaccaagtgggtcaacaagcacctcatcaaggcccagaggcacatcagtgacctgtatgaagacctccgcgatggccacaacctcatctccctgctggaggtcctctcgggggacagcctgccccgggagaaggggaggatgcgtttccacaagctgcagaatgtccagattgccctggactacctccggcaccgccaggtgaagctggtgaacatcaggaatgatgacatcgctgacggcaaccccaagctgacccttggcctcatctggacaatcattctgcacttccagatctcagatatccaggtgagtgggcagtcggaggacatgacggccaaggagaagctgctgctgtggtcgcagcgaatggtggaggggtaccagggcctgcgatgcgacaacttcacctccagctggagagacggccgcctcttcaatgccatcatccaccggcacaagcccctgctcatcgacatgaacaaggtgtaccggcagaccaacctggagaacctggaccaggccttctctgtggcggagcgggacctgggagtgacgcggctcctggaccctgaggacgtggatgtccctcagcccgacgagaagtccatcatcacctacgtctcgtcgctgtatgacgccatgccccgcgtgccggacgtgcaggatggggtgagggccaacgagctgcagctgcgctggcaggagtaccgggagctggtgctgctgctgcttcagtggatgcgacaccacacggccgcctttgaggaacgcaggttcccctccagcttcgaggagattgagatcctgtggtctcagttcctgaagtttaaggagatggagctaccagccaaggaggccgacaagaacaggtccaagggcatctaccaatccctggagggagcggtgcaagcaggccagctcaaggtgccccctggctaccacccgctggatgtggagaaggagtggggcaagctgcacgtggccatcctggagcgggagaagcagctccgcagcgagtttgagaggctggagtgtcttcagcgcatcgtgaccaagctgcagatggaggcggggctgtgtgaggagcagctgaaccaggccgacgccctgctgcagtcggatgtccggctgctggctgcaggcaaagtgccacagcgggcgggggaggtggaacgggacttggacaaggcggatagcatgatccggctgctcttcaacgacgtgcagaccctcaaggatggacggcacccgcagggcgagcagatgtaccgcagggtgtaccgtctgcacgagcgcctggtagccatccgcaccgagtacaacctacggctgaaggcaggcgtggcggcccctgcaacccaggtggcccaggtgactctgcagagtgtgcagaggcgccccgagctggaggactccactctgcgctacctgcaggacctgctggcctgggtggaggagaaccagcaccgtgtggatggcgctgagtggggtgtggacctgcccagcgtggaggcgcagctgggcagccaccgaggcctgcaccagtccatcgaagaattccgggccaagatcgagcgggcacggagtgacgagggccagctctcccccgccacccggggtgcctaccgtgactgcctgggtcggctggacctgcagtacgccaagctgctgaactcctccaaggcccgcctcaggtccctggagagcttgcacagctttgtggcagccgccactaaggagctaatgtggctgaatgagaaggaggaggaggaggtgggcttcgactggagcgaccgcaacaccaacatgaccgccaagaaggagagctactcggcgctgatgcgggagctggagctgaaggagaagaagatcaaggagctccaaaatgctggggaccggctgctgcgggaggaccacccggcccggcccacggtggagtccttccaggcggccctgcagacgcagtggagctggatgctacagctgtgctgctgtatcgaggcacacctgaaggagaacgctgcctactttcagttcttctcagatgtgcgggaggccgaggggcagttgcagaagctgcaggaggcactgcgtaggaaatacagttgtgatcgctccgccaccgtcacccggctggaggacctgctgcaggatgcccaggacgagaaggaacagctgaacgagtacaagggccacctctcaggcctggccaagcgggccaaggccgtcgtgcagctgaagccccgccacccagcccaccccatgcggggccgcctgcccctgctggccgtgtgcgactataagcaggtggaggtgactgtgcacaagggtgacgagtgccagctggtgggccctgcacagccgtcccactggaaggtgctcagcagctccggcagcgaggccgccgtgccctccgtgtgcttcctggtgcccccgcccaaccaggaggcccaggaggccgtcaccaggctggaggcccagcaccaggccctggtcacgctgtggcaccagttgcacgtggacatgaagagccttctggcctggcagagccttcgccgcgacgtgcagctcatccgctcctggtccctggccacgttccgcaccctgaagccagaggagcagcgccaagccctgcacagcctggagctgcactaccaggccttcctgcgggacagccaggacgcgggcggcttcggacccgaggaccggctgatggctgagcgcgagtacggctcctgcagccaccactaccagcagctgctgcagagcctggaacagggtgcacaggaagagtctcgctgccagcgctgcatctccgagctcaaagacatccggctgcagctggaggcctgtgagacgcgcaccgtgcaccgcctgcggctgccgctggacaaagagccggcacgggagtgtgcccagcgcatcgccgagcagcagaaggcacaggcagaggtggaggggctgggcaagggggtcgcccggctctctgccgaggccgagaaggtcttggccctaccagagccatcgcctgcggcccccacgctgcgctcggagctggagctgacgctgggcaagctggagcaggtccgcagcctgtctgccatctacctggagaagctcaagaccatcagcctggtgatccgcggcacgcagggggccgaggaggtgctcagggcccacgaggagcagctcaaggaggcccaggccgtgccggccaccctcccggagctcgaggccaccaaggcctctctgaagaagctgcgggcccaggccgaggcacagcagcccacgttcgacgccctgcgggatgagctgcggggggcacaggaggtgggggagcgactgcagcagcggcacggggagcgggacgtggaggtggagcgctggcgggagcgggtcgcccagttgcttgagcgctggcaggctgtgctggcccagaccgacgtgcggcagcgcgagctcgagcaactgggccgccagctgcgttactaccgcgagagtgcagaccccttgggcgcctggctgcaggacgccaggcggcggcaggagcagatccaggccatgccgctggccgacagccaggctgtgcgggagcagctgcggcaggagcaggccctgctggaggagatcgagcgccacggcgagaaggtcgaggagtgccagaggtttgcgaaacagtacatcaacgccatcaaggactatgaactccagctggtgacgtacaaggcgcagcttgagccggtggcctccccggccaagaagcccaaggtccagtcgggatcagagagtgtcatccaggagtacgtggacctgcgtacgcactacagcgagctgaccacactgacgagccagtacatcaagttcatcagcgagactctgcggcgcatggaggaggaggagaggctggctgagcagcagcgggcagaggagcgcgagcggctggccgaggtggaggccgcgctggagaagcagcggcagctggccgaggcgcacgcccaggcaaaggcacaggcggagcgggaggcgaaggagctgcagcagcgcatgcaggaggaggtggtgcggcgggaggaggcggcggtggacgcgcagcagcagaagcgcagcattcaggaggagctgcagcagctgcggcagagctcggaggcggagatccaggccaaggcccggcaggcagaggcggctgagcgcagccggctgcgcatcgaggaggagatccgcgtggtgcgcctgcagttggaggccaccgagcgccagcgtggcggggctgagggggagctgcaggcactgcgtgcacgggcggaggaggctgaggcacaaaagcgacaggcgcaggaggaggccgagcgcttgcggaggcaggtgcaggacgagagccagcgtaagcggcaggcggaggtggagctggcctcgcgcgtgaaggccgaggccgaggcggcgcgcgagaagcagcgggccctgcaggccctggaggagctgcggctgcaggcggaggaggcggagcggcgcctgcggcaggccgaggtggagcgagcgcggcaggtacaggtggccctggagacggcgcagcgcagtgcagaggcggagctgcagagcaaacgcgcctccttcgccgagaagacggcacagctggagcgctccctgcaggaggaacacgtggctgtggcacagctgcgggaggaggctgagcggcgggcacagcagcaggccgaggccgagcgggcgcgcgaggaggcagagcgggagctggagcgctggcagctcaaggccaacgaggcgctacggctgcggctgcaggcggaggaggtggcgcagcagaagagcctggcgcaggccgaggctgagaagcagaaggaggaggcggagcgcgaggcgcggcggcgcggcaaggcggaggagcaggccgtccggcagcgggagctggctgaacaagagctggagaagcagcggcagctggcggaaggcaccgcgcagcagcgcctggccgcggagcaggagttgatccggctgcgggccgagacggagcagggggagcagcagcggcagctgctggaggaggagctggcccggctgcagcgtgaggcggctgcagccacgcagaaacggcaggagctggaagccgagctggccaaggtgcgggccgagatggaggtgctgctggccagcaaggcgagggctgaggaggagtcgcgctccaccagcgagaagtccaagcagaggctggaggccgaggccggccggttccgcgagctggccgaggaggccgcccgcctgcgtgccctggcggaagaggccaagcggcagcggcagctggccgaggaagacgcggcgcggcagcgggccgaggcggagcgggtgcttgcggagaagctggccgccatcggcgaggccacgcggctcaagacggaggcggagatcgcgctcaaggagaaggaggcggagaacgagcgcctgcggcggctggcggaggacgaggccttccagcggcggcggctggaggagcaggccgcgcaacacaaggctgacatcgaggagcgcctggcccagctgcgcaaggcatcggacagcgagctggagcggcagaaggggctggtggaggacacgctgaggcagcggcggcaggtggaggaggagatcctggcgctgaaggcgagcttcgagaaggcggccgctggcaaggcggagctggagctggagctgggacgcatccgcagcaacgcggaggacacgctgcgcagcaaggagcaggccgagctggaggctgcgaggcagcggcagctggcggcggaggaggagcggcggcgccgtgaggctgaggagcgcgtgcagaagagcctggcggccgaggaggaggccgcacggcagcggaaggcggcgctggaggaagtcgagcggctgaaagccaaggtggaggaggcgcggcgcctgcgggagcgagcggagcaggagtcggcgcggcagctgcagctggcccaggaggccgcccagaagcggctgcaggcggaagagaaggcacacgccttcgcggtgcagcagaaggagcaggagctacagcagacgctgcagcaggagcagagcgtgctggaccagctgcgcggcgaggcggaggcggcccggcgggcggctgaggaggcggaggaggcccgggtgcaggcggagcgtgaggcggcgcagtcccggcggcaggtggaagaggccgagcggctgaagcagtcggcagaggagcaggcacaggcccgggctcaggcacaggcggctgcagagaagctgcgcaaggaggccgagcaagaggcggcgcggcgggcacaggcggagcaggcggccctgcggcagaagcaggcagctgacgcggagatggagaagcataagaaattcgccgagcagacgctgcggcagaaggcgcaggtggagcaggagctgacaacactgcggctgcagctggaggagaccgaccaccagaagaacctgctggacgaggagctgcagcggctgaaggcggaggccacggaggccgcacgccagcgcagccaggtggaggaggagctcttctcggtgcgcgtgcagatggaggagctgagcaagctcaaggcacgcatcgaggctgagaaccgcgcactcatcttgcgtgacaaggacaatacgcagcgcttcctgcaggaggaggctgagaagatgaagcaggtggcggaggaggccgcgcggctgagtgtggcggcccaagaggctgcgcgactgcggcagctggcagaggaggacctggcacagcagcgggccttggcagagaagatgctcaaggagaagatgcaggcggtgcaggaggccacgcgactcaaggctgaggcggaactgctgcagcagcagaaggagcttgcgcaggagcaggcgcggcggctgcaggaggacaaggagcagatggcgcagcagctggcggaggagacgcagggcttccagcggacgctggaggccgagcggcagcggcagctggagatgagcgctgaggctgagcgcctcaagctgcgtgtggccgagatgagccgagcccaggcccgcgctgaggaggacgcccagcgcttccggaagcaggcggaggagatcggtgagaagctgcaccgcacggagctcgccacccaggagaaggtgaccctggtgcagacactggagatccagcgacagcagagtgaccatgatgccgagcgcctgcgggaggccatcgctgagctggagcgtgagaaggagaagctccaacaggaggccaaactgctgcagctcaagtctgaggagatgcagacggtgcagcaggagcagctgctgcaggagacgcaggccctgcagcaaagcttcctctctgaaaaggacagcctgctacagcgggagcgcttcatcgagcaggagaaggccaagctggagcagctcttccaggacgaggtggccaaggcacagcagctgcgtgaggagcagcagcggcagcagcagcagatggagcaggaacggcagcggctggtggccagcatggaggaggcgcggcggcggcagcatgaggccgaggagggcgtgcggcgcaagcaggaggagctgcagcagctggagcagcagcggcggcagcaggaggagctgctggctgaggagaaccagaggctgcgtgagcagctgcagctcctggaggagcagcaccgggccgcgctggcgcactcagaggaggtcactgcctcgcaggtggctgccacaaagaccctgcccaatggccgggatgcacttgatggccccgcggcagaggcagagccggagcacagcttcgatggcctgcggcggaaggtgtcagctcagaggctgcaggaggccggcatcctgagtgcggaggagctgcagcggttggcgcagggccacaccacggtggacgagctcgcacggcgggaagacgtgcgccactacctgcagggccgcagcagtatcgcagggctgttgctgaaggccaccaatgagaagctgagtgtttacgccgccctgcagaggcagctgctgagtcccggcacggccctcatcctgctggaggcgcaggcggcctcaggcttcctgctggaccctgtgcggaaccggcggctgaccgtcaacgaggctgtgaaggagggtgtggtgggccccgagctgcaccacaagctgctgtcggccgagcgcgccgtcactggctacaaggacccctacactggccagcagatctctctcttccaagccatgcagaagggcctcatcgtccgggagcacggcatccgcctgctggaggcccagatcgccacgggcggcgttatcgaccccgtgcacagccaccgcgtgcccgtggacgtggcctaccggcgcggctacttcgacgaggagatgaaccgcgtcctggcggaccccagcgacgacaccaagggcttctttgaccccaacacgcacgagaacctcacgtacctgcagctactggagcgctgcgtggaggaccccgagacgggcctgtgccttctgccactcacggataaggctgccaagggcggggagctggtctacactgactccgaggcccgggacgtctttgagaaggccaccgtgtctgcgccgttcggcaagttccagggcaagacggtgaccatttgggagatcatcaactcggaatacttcacggcagagcagcggcgggacctgctgcggcagttccgcacgggccggatcacagtggagaagatcatcaagatcatcatcacggtggtggaggagcaggagcagaagggccggctttgctttgagggcctgcgcagcctggtgccagccgccgagctgctggagagcagggtcatcgaccgcgagctctaccagcagctgcagcgaggtgagcgctctgtgcgagacgtagccgaggtggacactgtgcggcgggctctccggggtgccaacgtcatcgcgggtgtatggctggaggaggcggggcagaagctgagtatctacaatgccctgaagaaagacctgctgccatccgacatggccgtggccctgttggaagcccaggccggcaccgggcacatcatcgaccccgccaccagcgcccggctgaccgtggacgaggcagtgcgtgctggcctggtgggccccgagtttcatgagaagctgctatcagccgagaaggctgtgacagggtacagggacccctacacagggcagagcgtctccctgttccaggccctgaagaagggcctcattccccgggagcagggcctgcgcctgttggacgcccagctgtccacgggcggcatcgtggaccccagcaagagccaccgcgtgcccctggatgtcgcctgcgcccgaggctgcctggatgaggagaccagcagggccctgtcggcaccaagggccgacgccaaggcctacagtgaccccagcacaggggagccggccacctacggcgagctccagcagcggtgccggcccgaccagctgaccgggctgagcctgctgccgctctcagaaaaggctgctcgggcccggcaggaggagctctactcagagctgcaggcccgtgagacctttgaaaagaccccggttgaggtccccgtgggtggcttcaagggcaggacggtgacggtgtgggagctcatcagctctgagtacttcactgcggagcagcggcaggagctgttgcgtcagttccgcacgggcaaggtcaccgtggagaaggtcatcaagattctcattaccatcgtggaggaggtggagaccctgcggcaggagaggctgtccttcagcggcctccgtgcccctgtgccagccagcgagctcctggcttccggggtcctcagcagagcccagtttgagcagctcaaggacggcaagacgacggtcaaggacctttcggagctgggctccgtgcggacgctgctgcagggcagtggctgcctcgccggcatctacctggaggacaccaaggagaaggtgtccatctacgaggccatgcgccggggcctgctgagagccacaacggctgcgctcctgctggaggcgcaggcggccactggcttcctggtggaccccgtgcggaaccagcgcctgtatgtccacgaggccgtgaaggcgggcgtggtgggccccgagcttcacgagcagctgctgtctgccgagaaggccgtcaccggctacagagacccctactcgggcagcaccatctccctcttccaggccatgcagaagggcctggttctccggcagcacggcatccgcctgctggaggcccagatcgccacgggcggcatcatcgaccccgtgcacagccaccgcgtgcctgtggacgtggcctaccagcgcggctacttcagtgaggagatgaaccgcgtcctggcggaccccagcgacgacaccaagggcttctttgaccccaacacgcatgagaacctcacgtacaggcagctgctggagcggtgcgtggaggaccccgagacgggcttgcgccttctgccactgaaaggggcggagaaggctgaggtggtggagaccacgcaggtgtacactgaggaggagacaagaagggcatttgaagagacacagatcgacattcccggcggcggcagccacggcggctccaccatgtccctgtgggaggtgatgcagtcggacctgatccccgaggagcagcgggcccagctgatggctgacttccaggccggccgggtgaccaaggaacgcatgatcatcatcatcatcgagatcattgagaagacagagatcatccgccagcagggtctggcctcctacgactacgtgcgccgccgcctcacggctgaggacctgttcgaggctcggatcatctctctcgagacctacaacctgctccgggagggcaccaggagcctccgtgaggctctcgaggcggagtccgcctggtgctacctctatggcacgggctccgtggctggtgtctacctgcccggttccaggcagacactgagcatctaccaggctctcaagaaagggctgctgagtgccgaggtggcccgcctgctgctggaggcacaggcagccacaggcttcctgctggacccggtgaagggggagcggctgactgtggatgaggctgtgcggaagggcctcgtggggcccgagctgcacgaccgcctgctctcggctgagcgggcggtcaccggctaccgtgacccctacaccgagcagaccatctcgctcttccaggccatgaagaaggagctgatccctactgaggaggccctgcggctgctggatgcccagctggccaccggcggcatcgtggacccccgcctgggcttccaccttcccctggaggtggcttaccagcgtggctacctcaacaaggacacgcacgaccagctgtcagagcccagcgaggtgcgcagctacgtggacccgtccaccgacgagcgcctcagctacacgcagctgctcaggcggtgccgtcgtgacgacggcaccggccagctgctcctgccactgtcggacgcccgcaagctgaccttccgtggcctgcggaagcagatcaccatggaggagctggtgcgctcgcaggtcatggacgaggccacggcgctgcagctgcgggagggcctgacctccatcgaggaggtcaccaagaacttgcagaagttcctggaaggcaccagctgcatcgctggtgtcttcgtggacgccaccaaggaacggctctcggtgtaccaggccatgaagaagggcatcatccgccccggcacagcctttgagctcctggaggcgcaggcggccaccggttacgtcatcgaccccatcaagggactgaagctgacggtggaggaggctgtgcgtatgggcattgtgggccccgagttcaaggacaagctgctgtcggccgagcgcgccgtcactgggtacaaggacccctactctgggaagctcatctccctcttccaggccatgaagaagggcctgatcctgaaggaccatggcatccgcctgctggaggcccagatcgccacgggcggcatcatcgaccctgaggagagccaccggctgcccgtggaggtggcctacaagcgcggcctcttcgatgaggagatgaacgagatcctgaccgacccctcggacgacaccaagggcttctttgaccctaacacggaggagaacctcacctacctgcagctgatggagcgttgtatcactgacccccagacgggcctgtgtctcttgccgctgaaggagaagaagcgggagcggaagacgtcctccaagtcctccgtgcgcaagcgccgagtggtcatcgtggaccccgagacgggcaaggagatgtcagtgtacgaggcctaccgcaagggcctgattgaccaccagacgtacctggagctgtccgagcaggagtgcgagtgggaggagatcaccatctcctcctcggacggcgtggtcaagtccatgatcatcgaccgccgctccgggcgccagtacgacatcgatgatgccatcgccaagaacctcatcgaccgctcggcactggaccagtaccgcgccggcacgctctccatcaccgagttcgccgacatgctctcgggcaacgccggtggtttccgctcccgttcctcctcggtgggatcctcctcctcctaccccatcagccccgccgtctccaggacccagctggcctcctggtcagaccccactgaggagacgggccccgtggctggcatcctggacacggagacgctggagaaggtgtccatcaccgaggccatgcaccggaacctggtggataacatcacggggcagcggctgctggaggcgcaggcctgcaccgggggcatcatcgaccccagcaccggtgagcgcttccctgtcaccgacgccgtcaacaagggcctggtggacaagatcatggtggaccgcatcaacctggcccagaaggccttctgcggcttcgaggacccacgcaccaagaccaagatgtcggccgcccaggccctgaagaagggctggctctactacgaggccggccagcgcttcctggaggtgcagtacctgaccggcggcttgatcgagcccgacacgccgggccgcgtgcccctggacgaggccctgcagcgcggcacggtggacgcccgcaccgcacagaagctgcgtgacgtgggcgcctactccaagtacctcacctgccctaagaccaagctcaagatctcctataaggacgcgctggaccgcagcatggtggaggagggcacggggctgcggctgctggaggctgccgcgcagtccaccaagggctactacagcccctacagcgtcagcggctccggctctaccgctggctcccgcaccggctcgcgcaccggctcccgggccggctcccgccgcggcagctttgacgccaccggctccggcttctccatgaccttctcttcatcctcctactcctcctcgggctacggccgccgctacgcctcggggtcctcggcctccctggggggccctgagtctgccgtggcctgaggctgcctgcgcccaccccgctctgcatgcggcccagcccggctcccaccgaggcgcgggggccgttttcaacgcttaaaggtgtcttcctcccaagtggtgcctaaagtttaaccaaaaagaccagactaatatattaatatatatctgctgtccagacagcctgtatcttgggggacagggctggcccagccctgctggccgcctcaccccctcgggtctcctcactcccttctacctgccactcacacagccaggtgccttggagggtcccaagctgggccccagcccaccctcctgtcttcccagggtagcccgcctgccagtcctagctgcacagggcagctgggcccaaccctgtctgtagagggccctggtgtttctagcactggcctgcacggtgggccttgctggggacggggggccccagtcagcctctctcccagtctacccagagaagccccttccccatgggaagacgaggccctcgggcccagcccccacagtgctgtctgatctgtgctttccagctcaccccccacactcactcctgagacccctggcctccggcgtcagcctccagcctctgttcccctagtaagtgccttccatgtcggcctctaaccccaggccccgaggacccagacccagtggggaggcggacgttccagccggcatggctgggaactgcagacctgtcctcctggtgggtccaggggcccctccagcttgtggagccccacactggggtgccgcctgcccgtctctctcccatggagccccagccccctttgggcccagggacaccagccaggctctgtgctgaccctcctgttgcacccagccctggtctcagcagcgaccacccctgcctccaccctctgagctttgcatgttccactaaccccgggcgggtggcaggtggaggtgtcaggctgctggcgcctctgcaagggcagaacactaacctgaccgtgggcggggccttgcggtatccgcccccaataaaagcaattccaacctt

SEQ ID NO: 262177 - DNA, 13713 bp, Artificial Sequence
  derived and/or modified sequence
atgtcgggtgaggacgctgaggtccgggcagtctctgaagatgtctccaatggaagcagtggctcgcccagccctggggacacactgccctggaaccttgggaaaacgcagcggagccggcgcagcgggggtggcgctgggagcaacgggagtgtcctggacccagctgagcgggcggtcattcgcatcgcagatgagcgggatcgtgtgcagaagaaaaccttcaccaagtgggtcaacaagcacctcatcaaggcccagaggcacatcagtgacctgtatgaagacctccgcgatggccacaacctcatctccctgctggaggtcctctcgggggacagcctgccccgggagaaggggaggatgcgtttccacaagctgcagaatgtccagattgccctggactacctccggcaccgccaggtgaagctggtgaacatcaggaatgatgacatcgctgacggcaaccccaagctgacccttggcctcatctggacaatcattctgcacttccagatctcagatatccaggtgagtgggcagtcggaggacatgacggccaaggagaagctgctgctgtggtcgcagcgaatggtggaggggtaccagggcctgcgatgcgacaacttcacctccagctggagagacggccgcctcttcaatgccatcatccaccggcacaagcccctgctcatcgacatgaacaaggtgtaccggcagaccaacctggagaacctggaccaggccttctctgtggcggagcgggacctgggagtgacgcggctcctggaccctgaggacgtggatgtccctcagcccgacgagaagtccatcatcacctacgtctcgtcgctgtatgacgccatgccccgcgtgccggacgtgcaggatggggagctgcagctgcgctggcaggagtaccgggagctggtgctgctgctgcttcagtggatgcgacaccacacggccgcctttgaggaacgcaggttcccctccagcttcgaggagattgagatcctgtggtctcagttcctgaagtttaaggagatggagctaccagccaaggaggccgacaagaacaggtccaagggcatctaccaatccctggagggagcggtgcaagcaggccagctcaaggtgccccctggctaccacccgctggatgtggagaaggagtggggcaagctgcacgtggccatcctggagcgggagaagcagctccgcagcgagtttgagaggctggagtgtcttcagcgcatcgtgaccaagctgcagatggaggcggggctgtgtgaggagcagctgaaccaggccgacgccctgctgcagtcggatgtccggctgctggctgcaggcaaagtgccacagcgggcgggggaggtggaacgggacttggacaaggcggatagcatgatccggctgctcttcaacgacgtgcagaccctcaaggatggacggcacccgcagggcgagcagatgtaccgcagggtgtaccgtctgcacgagcgcctggtagccatccgcaccgagtacaacctacggctgaaggcaggcgtggcggcccctgcaacccaggtggcccaggtgactctgcagagtgtgcagaggcgccccgagctggaggactccactctgcgctacctgcaggacctgctggcctgggtggaggagaaccagcaccgtgtggatggcgctgagtggggtgtggacctgcccagcgtggaggcgcagctgggcagccaccgaggcctgcaccagtccatcgaagaattccgggccaagatcgagcgggcacggagtgacgagggccagctctcccccgccacccggggtgcctaccgtgactgcctgggtcggctggacctgcagtacgccaagctgctgaactcctccaaggcccgcctcaggtccctggagagcttgcacagctttgtggcagccgccactaaggagctaatgtggctgaatgagaaggaggaggaggaggtgggcttcgactggagcgaccgcaacaccaacatgaccgccaagaaggagagctactcggcgctgatgcgggagctggagctgaaggagaagaagatcaaggagctccaaaatgctggggaccggctgctgcgggaggaccacccggcccggcccacggtggagtccttccaggcggccctgcagacgcagtggagctggatgctacagctgtgctgctgtatcgaggcacacctgaaggagaacgctgcctactttcagttcttctcagatgtgcgggaggccgaggggcagttgcagaagctgcaggaggcactgcgtaggaaatacagttgtgatcgctccgccaccgtcacccggctggaggacctgctgcaggatgcccaggacgagaaggaacagctgaacgagtacaagggccacctctcaggcctggccaagcgggccaaggccgtcgtgcagctgaagccccgccacccagcccaccccatgcggggccgcctgcccctgctggccgtgtgcgactataagcaggtggaggtgactgtgcacaagggtgacgagtgccagctggtgggccctgcacagccgtcccactggaaggtgctcagcagctccggcagcgaggccgccgtgccctccgtgtgcttcctggtgcccccgcccaaccaggaggcccaggaggccgtcaccaggctggaggcccagcaccaggccctggtcacgctgtggcaccagttgcacgtggacatgaagagccttctggcctggcagagccttcgccgcgacgtgcagctcatccgctcctggtccctggccacgttccgcaccctgaagccagaggagcagcgccaagccctgcacagcctggagctgcactaccaggccttcctgcgggacagccaggacgcgggcggcttcggacccgaggaccggctgatggctgagcgcgagtacggctcctgcagccaccactaccagcagctgctgcagagcctggaacagggtgcacaggaagagtctcgctgccagcgctgcatctccgagctcaaagacatccggctgcagctggaggcctgtgagacgcgcaccgtgcaccgcctgcggctgccgctggacaaagagccggcacgggagtgtgcccagcgcatcgccgagcagcagaaggcacaggcagaggtggaggggctgggcaagggggtcgcccggctctctgccgaggccgagaaggtcttggccctaccagagccatcgcctgcggcccccacgctgcgctcggagctggagctgacgctgggcaagctggagcaggtccgcagcctgtctgccatctacctggagaagctcaagaccatcagcctggtgatccgcggcacgcagggggccgaggaggtgctcagggcccacgaggagcagctcaaggaggcccaggccgtgccggccaccctcccggagctcgaggccaccaaggcctctctgaagaagctgcgggcccaggccgaggcacagcagcccacgttcgacgccctgcgggatgagctgcggggggcacaggaggtgggggagcgactgcagcagcggcacggggagcgggacgtggaggtggagcgctggcgggagcgggtcgcccagttgcttgagcgctggcaggctgtgctggcccagaccgacgtgcggcagcgcgagctcgagcaactgggccgccagctgcgttactaccgcgagagtgcagaccccttgggcgcctggctgcaggacgccaggcggcggcaggagcagatccaggccatgccgctggccgacagccaggctgtgcgggagcagctgcggcaggagcaggccctgctggaggagatcgagcgccacggcgagaaggtcgaggagtgccagaggtttgcgaaacagtacatcaacgccatcaaggactatgaactccagctggtgacgtacaaggcgcagcttgagccggtggcctccccggccaagaagcccaaggtccagtcgggatcagagagtgtcatccaggagtacgtggacctgcgtacgcactacagcgagctgaccacactgacgagccagtacatcaagttcatcagcgagactctgcggcgcatggaggaggaggagaggctggctgagcagcagcgggcagaggagcgcgagcggctggccgaggtggaggccgcgctggagaagcagcggcagctggccgaggcgcacgcccaggcaaaggcacaggcggagcgggaggcgaaggagctgcagcagcgcatgcaggaggaggtggtgcggcgggaggaggcggcggtggacgcgcagcagcagaagcgcagcattcaggaggagctgcagcagctgcggcagagctcggaggcggagatccaggccaaggcccggcaggcagaggcggctgagcgcagccggctgcgcatcgaggaggagatccgcgtggtgcgcctgcagttggaggccaccgagcgccagcgtggcggggctgagggggagctgcaggcactgcgtgcacgggcggaggaggctgaggcacaaaagcgacaggcgcaggaggaggccgagcgcttgcggaggcaggtgcaggacgagagccagcgtaagcggcaggcggaggtggagctggcctcgcgcgtgaaggccgaggccgaggcggcgcgcgagaagcagcgggccctgcaggccctggaggagctgcggctgcaggcggaggaggcggagcggcgcctgcggcaggccgaggtggagcgagcgcggcaggtacaggtggccctggagacggcgcagcgcagtgcagaggcggagctgcagagcaaacgcgcctccttcgccgagaagacggcacagctggagcgctccctgcaggaggaacacgtggctgtggcacagctgcgggaggaggctgagcggcgggcacagcagcaggccgaggccgagcgggcgcgcgaggaggcagagcgggagctggagcgctggcagctcaaggccaacgaggcgctacggctgcggctgcaggcggaggaggtggcgcagcagaagagcctggcgcaggccgaggctgagaagcagaaggaggaggcggagcgcgaggcgcggcggcgcggcaaggcggaggagcaggccgtccggcagcgggagctggctgaacaagagctggagaagcagcggcagctggcggaaggcaccgcgcagcagcgcctggccgcggagcaggagttgatccggctgcgggccgagacggagcagggggagcagcagcggcagctgctggaggaggagctggcccggctgcagcgtgaggcggctgcagccacgcagaaacggcaggagctggaagccgagctggccaaggtgcgggccgagatggaggtgctgctggccagcaaggcgagggctgaggaggagtcgcgctccaccagcgagaagtccaagcagaggctggaggccgaggccggccggttccgcgagctggccgaggaggccgcccgcctgcgtgccctggcggaagaggccaagcggcagcggcagctggccgaggaagacgcggcgcggcagcgggccgaggcggagcgggtgcttgcggagaagctggccgccatcggcgaggccacgcggctcaagacggaggcggagatcgcgctcaaggagaaggaggcggagaacgagcgcctgcggcggctggcggaggacgaggccttccagcggcggcggctggaggagcaggccgcgcaacacaaggctgacatcgaggagcgcctggcccagctgcgcaaggcatcggacagcgagctggagcggcagaaggggctggtggaggacacgctgaggcagcggcggcaggtggaggaggagatcctggcgctgaaggcgagcttcgagaaggcggccgctggcaaggcggagctggagctggagctgggacgcatccgcagcaacgcggaggacacgctgcgcagcaaggagcaggccgagctggaggctgcgaggcagcggcagctggcggcggaggaggagcggcggcgccgtgaggctgaggagcgcgtgcagaagagcctggcggccgaggaggaggccgcacggcagcggaaggcggcgctggaggaagtcgagcggctgaaagccaaggtggaggaggcgcggcgcctgcgggagcgagcggagcaggagtcggcgcggcagctgcagctggcccaggaggccgcccagaagcggctgcaggcggaagagaaggcacacgccttcgcggtgcagcagaaggagcaggagctacagcagacgctgcagcaggagcagagcgtgctggaccagctgcgcggcgaggcggaggcggcccggcgggcggctgaggaggcggaggaggcccgggtgcaggcggagcgtgaggcggcgcagtcccggcggcaggtggaagaggccgagcggctgaagcagtcggcagaggagcaggcacaggcccgggctcaggcacaggcggctgcagagaagctgcgcaaggaggccgagcaagaggcggcgcggcgggcacaggcggagcaggcggccctgcggcagaagcaggcagctgacgcggagatggagaagcataagaaattcgccgagcagacgctgcggcagaaggcgcaggtggagcaggagctgacaacactgcggctgcagctggaggagaccgaccaccagaagaacctgctggacgaggagctgcagcggctgaaggcggaggccacggaggccgcacgccagcgcagccaggtggaggaggagctcttctcggtgcgcgtgcagatggaggagctgagcaagctcaaggcacgcatcgaggctgagaaccgcgcactcatcttgcgtgacaaggacaatacgcagcgcttcctgcaggaggaggctgagaagatgaagcaggtggcggaggaggccgcgcggctgagtgtggcggcccaagaggctgcgcgactgcggcagctggcagaggaggacctggcacagcagcgggccttggcagagaagatgctcaaggagaagatgcaggcggtgcaggaggccacgcgactcaaggctgaggcggaactgctgcagcagcagaaggagcttgcgcaggagcaggcgcggcggctgcaggaggacaaggagcagatggcgcagcagctggcggaggagacgcagggcttccagcggacgctggaggccgagcggcagcggcagctggagatgagcgctgaggctgagcgcctcaagctgcgtgtggccgagatgagccgagcccaggcccgcgctgaggaggacgcccagcgcttccggaagcaggcggaggagatcggtgagaagctgcaccgcacggagctcgccacccaggagaaggtgaccctggtgcagacactggagatccagcgacagcagagtgaccatgatgccgagcgcctgcgggaggccatcgctgagctggagcgtgagaaggagaagctccaacaggaggccaaactgctgcagctcaagtctgaggagatgcagacggtgcagcaggagcagctgctgcaggagacgcaggccctgcagcaaagcttcctctctgaaaaggacagcctgctacagcgggagcgcttcatcgagcaggagaaggccaagctggagcagctcttccaggacgaggtggccaaggcacagcagctgcgtgaggagcagcagcggcagcagcagcagatggagcaggaacggcagcggctggtggccagcatggaggaggcgcggcggcggcagcatgaggccgaggagggcgtgcggcgcaagcaggaggagctgcagcagctggagcagcagcggcggcagcaggaggagctgctggctgaggagaaccagaggctgcgtgagcagctgcagctcctggaggagcagcaccgggccgcgctggcgcactcagaggaggtcactgcctcgcaggtggctgccacaaagaccctgcccaatggccgggatgcacttgatggccccgcggcagaggcagagccggagcacagcttcgatggcctgcggcggaaggtgtcagctcagaggctgcaggaggccggcatcctgagtgcggaggagctgcagcggttggcgcagggccacaccacggtggacgagctcgcacggcgggaagacgtgcgccactacctgcagggccgcagcagtatcgcagggctgttgctgaaggccaccaatgagaagctgagtgtttacgccgccctgcagaggcagctgctgagtcccggcacggccctcatcctgctggaggcgcaggcggcctcaggcttcctgctggaccctgtgcggaaccggcggctgaccgtcaacgaggctgtgaaggagggtgtggtgggccccgagctgcaccacaagctgctgtcggccgagcgcgccgtcactggctacaaggacccctacactggccagcagatctctctcttccaagccatgcagaagggcctcatcgtccgggagcacggcatccgcctgctggaggcccagatcgccacgggcggcgttatcgaccccgtgcacagccaccgcgtgcccgtggacgtggcctaccggcgcggctacttcgacgaggagatgaaccgcgtcctggcggaccccagcgacgacaccaagggcttctttgaccccaacacgcacgagaacctcacgtacctgcagctactggagcgctgcgtggaggaccccgagacgggcctgtgccttctgccactcacggataaggctgccaagggcggggagctggtctacactgactccgaggcccgggacgtctttgagaaggccaccgtgtctgcgccgttcggcaagttccagggcaagacggtgaccatttgggagatcatcaactcggaatacttcacggcagagcagcggcgggacctgctgcggcagttccgcacgggccggatcacagtggagaagatcatcaagatcatcatcacggtggtggaggagcaggagcagaagggccggctttgctttgagggcctgcgcagcctggtgccagccgccgagctgctggagagcagggtcatcgaccgcgagctctaccagcagctgcagcgaggtgagcgctctgtgcgagacgtagccgaggtggacactgtgcggcgggctctccggggtgccaacgtcatcgcgggtgtatggctggaggaggcggggcagaagctgagtatctacaatgccctgaagaaagacctgctgccatccgacatggccgtggccctgttggaagcccaggccggcaccgggcacatcatcgaccccgccaccagcgcccggctgaccgtggacgaggcagtgcgtgctggcctggtgggccccgagtttcatgagaagctgctatcagccgagaaggctgtgacagggtacagggacccctacacagggcagagcgtctccctgttccaggccctgaagaagggcctcattccccgggagcagggcctgcgcctgttggacgcccagctgtccacgggcggcatcgtggaccccagcaagagccaccgcgtgcccctggatgtcgcctgcgcccgaggctgcctggatgaggagaccagcagggccctgtcggcaccaagggccgacgccaaggcctacagtgaccccagcacaggggagccggccacctacggcgagctccagcagcggtgccggcccgaccagctgaccgggctgagcctgctgccgctctcagaaaaggctgctcgggcccggcaggaggagctctactcagagctgcaggcccgtgagacctttgaaaagaccccggttgaggtccccgtgggtggcttcaagggcaggacggtgacggtgtgggagctcatcagctctgagtacttcactgcggagcagcggcaggagctgttgcgtcagttccgcacgggcaaggtcaccgtggagaaggtcatcaagattctcattaccatcgtggaggaggtggagaccctgcggcaggagaggctgtccttcagcggcctccgtgcccctgtgccagccagcgagctcctggcttccggggtcctcagcagagcccagtttgagcagctcaaggacggcaagacgacggtcaaggacctttcggagctgggctccgtgcggacgctgctgcagggcagtggctgcctcgccggcatctacctggaggacaccaaggagaaggtgtccatctacgaggccatgcgccggggcctgctgagagccacaacggctgcgctcctgctggaggcgcaggcggccactggcttcctggtggaccccgtgcggaaccagcgcctgtatgtccacgaggccgtgaaggcgggcgtggtgggccccgagcttcacgagcagctgctgtctgccgagaaggccgtcaccggctacagagacccctactcgggcagcaccatctccctcttccaggccatgcagaagggcctggttctccggcagcacggcatccgcctgctggaggcccagatcgccacgggcggcatcatcgaccccgtgcacagccaccgcgtgcctgtggacgtggcctaccagcgcggctacttcagtgaggagatgaaccgcgtcctggcggaccccagcgacgacaccaagggcttctttgaccccaacacgcatgagaacctcacgtacaggcagctgctggagcggtgcgtggaggaccccgagacgggcttgcgccttctgccactgaaaggggcggagaaggctgaggtggtggagaccacgcaggtgtacactgaggaggagacaagaagggcatttgaagagacacagatcgacattcccggcggcggcagccacggcggctccaccatgtccctgtgggaggtgatgcagtcggacctgatccccgaggagcagcgggcccagctgatggctgacttccaggccggccgggtgaccaaggaacgcatgatcatcatcatcatcgagatcattgagaagacagagatcatccgccagcagggtctggcctcctacgactacgtgcgccgccgcctcacggctgaggacctgttcgaggctcggatcatctctctcgagacctacaacctgctccgggagggcaccaggagcctccgtgaggctctcgaggcggagtccgcctggtgctacctctatggcacgggctccgtggctggtgtctacctgcccggttccaggcagacactgagcatctaccaggctctcaagaaagggctgctgagtgccgaggtggcccgcctgctgctggaggcacaggcagccacaggcttcctgctggacccggtgaagggggagcggctgactgtggatgaggctgtgcggaagggcctcgtggggcccgagctgcacgaccgcctgctctcggctgagcgggcggtcaccggctaccgtgacccctacaccgagcagaccatctcgctcttccaggccatgaagaaggagctgatccctactgaggaggccctgcggctgctggatgcccagctggccaccggcggcatcgtggacccccgcctgggcttccaccttcccctggaggtggcttaccagcgtggctacctcaacaaggacacgcacgaccagctgtcagagcccagcgaggtgcgcagctacgtggacccgtccaccgacgagcgcctcagctacacgcagctgctcaggcggtgccgtcgtgacgacggcaccggccagctgctcctgccactgtcggacgcccgcaagctgaccttccgtggcctgcggaagcagatcaccatggaggagctggtgcgctcgcaggtcatggacgaggccacggcgctgcagctgcgggagggcctgacctccatcgaggaggtcaccaagaacttgcagaagttcctggaaggcaccagctgcatcgctggtgtcttcgtggacgccaccaaggaacggctctcggtgtaccaggccatgaagaagggcatcatccgccccggcacagcctttgagctcctggaggcgcaggcggccaccggttacgtcatcgaccccatcaagggactgaagctgacggtggaggaggctgtgcgtatgggcattgtgggccccgagttcaaggacaagctgctgtcggccgagcgcgccgtcactgggtacaaggacccctactctgggaagctcatctccctcttccaggccatgaagaagggcctgatcctgaaggaccatggcatccgcctgctggaggcccagatcgccacgggcggcatcatcgaccctgaggagagccaccggctgcccgtggaggtggcctacaagcgcggcctcttcgatgaggagatgaacgagatcctgaccgacccctcggacgacaccaagggcttctttgaccctaacacggaggagaacctcacctacctgcagctgatggagcgttgtatcactgacccccagacgggcctgtgtctcttgccgctgaaggagaagaagcgggagcggaagacgtcctccaagtcctccgtgcgcaagcgccgagtggtcatcgtggaccccgagacgggcaaggagatgtcagtgtacgaggcctaccgcaagggcctgattgaccaccagacgtacctggagctgtccgagcaggagtgcgagtgggaggagatcaccatctcctcctcggacggcgtggtcaagtccatgatcatcgaccgccgctccgggcgccagtacgacatcgatgatgccatcgccaagaacctcatcgaccgctcggcactggaccagtaccgcgccggcacgctctccatcaccgagttcgccgacatgctctcgggcaacgccggtggtttccgctcccgttcctcctcggtgggatcctcctcctcctaccccatcagccccgccgtctccaggacccagctggcctcctggtcagaccccactgaggagacgggccccgtggctggcatcctggacacggagacgctggagaaggtgtccatcaccgaggccatgcaccggaacctggtggataacatcacggggcagcggctgctggaggcgcaggcctgcaccgggggcatcatcgaccccagcaccggtgagcgcttccctgtcaccgacgccgtcaacaagggcctggtggacaagatcatggtggaccgcatcaacctggcccagaaggccttctgcggcttcgaggacccacgcaccaagaccaagatgtcggccgcccaggccctgaagaagggctggctctactacgaggccggccagcgcttcctggaggtgcagtacctgaccggcggcttgatcgagcccgacacgccgggccgcgtgcccctggacgaggccctgcagcgcggcacggtggacgcccgcaccgcacagaagctgcgtgacgtgggcgcctactccaagtacctcacctgccctaagaccaagctcaagatctcctataaggacgcgctggaccgcagcatggtggaggagggcacggggctgcggctgctggaggctgccgcgcagtccaccaagggctactacagcccctacagcgtcagcggctccggctctaccgctggctcccgcaccggctcgcgcaccggctcccgggccggctcccgccgcggcagctttgacgccaccggctccggcttctccatgaccttctcttcatcctcctactcctcctcgggctacggccgccgctacgcctcggggtcctcggcctccctggggggccctgagtctgccgtggcctga

SEQ ID NO: 262178 - DNA, 14055 bp, Artificial Sequence
  derived and/or modified sequence
atggttgctggaatgttgatgcccagagaccagctgagagcaatttacgaggttttattccgggagggcgtgatggtggctaagaaagacaggcggccaagaagccttcatccgcacgtgcctggcgtaacaaacctgcaggtgatgagggcaatggcttcactgagggcacggggactggtgagggagacattcgcctggtgtcacttttattggtacctgacaaacgaagggatcgctcacctccgacaatacttacacttgcccccagaaatcgtgcccgcatcactccagcgggtgcgtaggcctgtggcgatggttatgcccgcaagacggacaccacacgtccaagccgtgcagggacctctggggagcccacccaagcgcggacccctgcccacagaggagcagagggtctacaggagaaaagagcttgaggaggtttcccccgaaacaccagtggtgccagcaaccacacaaagaacactcgcccgtcctgggccagaacccgcacctgcaaccgacgagcgagacagagtgcaaaaaaaaaccttcactaagtgggtgaacaagcacctgatcaaagcccagcgccacataagcgatctgtatgaggacctcagagatgggcacaatcttatcagtcttcttgaagtgctatccggggattccctaccgagagagaagggtcggatgagatttcataaactgcagaacgtgcaaatcgccttggactacctccgtcaccggcaggtcaagctagttaatattcggaacgatgacatcgccgatggaaaccctaagctcacccttggcctcatatggaccattattcttcacttccagattagtgatatacaggtctccggacagagcgaggatatgactgccaaggagaagcttcttctgtggtcacaacgcatggtcgagggttaccagggattacggtgtgacaattttacatcgtcatggagagatgggcgactgttcaatgctataattcatcgacacaaacctttgcttatcgacatgaataaggtgtatagacagaccaacttggagaacctggatcaggcatttagtgtggctgagagggatctcggtgttacacggcttctggatccagaggatgttgacgtcccacaacctgacgaaaaatcaattattacatacgtttcttctctgtacgatgccatgcctagagtcccagacgtccaggacggagtgagggccaatgaactacagctgagatggcaggagtatcgggaattggtgctgctgctgctccagtggatgaggcaccacaccgcagcgttcgaagagaggcgatttccctcctccttcgaagagatcgaaatcttgtggagccagttccttaaattcaaagagatggagctgccagctaaagaggccgacaaaaatagaagcaagggaatttatcagtctctcgagggtgctgttcaagccggtcagctcaaagtgcccccaggataccatcccctggatgtggagaaagagtggggcaagctccacgtggcaatactcgagagagagaaacagctgagaagcgagttcgagcgcttagagtgcctgcagcgtatcgtcacaaagctgcagatggaagccggactctgtgaagaacagctcaaccaggcagatgcgctgttacagagtgatgtcagactgctggccgcaggcaaggtaccccagcgcgctggtgaagtggagagagatctggacaaggccgacagtatgattcgtctcctttttaacgatgtgcaaacgctcaaagacgggcgtcatcctcagggagagcagatgtaccgccgagtgtacaggcttcacgagagacttgtcgccatcaggacagagtacaacctcagacttaaagcaggggtggcggctccagcaacccaggtcgctcaggtgacactgcaatctgttcagcgccgaccagaattagaggactctaccctaagatacctgcaggacctcctggcctgggtcgaggagaatcaacatagagtggacggagccgagtggggcgtggatctcccttctgtggaggcccagcttggctctcaccgcggtctgcaccagtctatcgaagagttcagggccaagattgaaagagcgagaagcgacgaggggcagctgagccctgccacccgcggagcttaccgggactgcttgggtcgtttagacctgcagtacgctaaactgctgaacagcagcaaagctcgtctcaggagtctggagagtctgcattcatttgtggctgctgcgactaaagagctcatgtggctgaatgagaaagaagaagaggaagttggcttcgactggtccgacagaaacaccaacatgaccgctaagaaggagagctactcagctttaatgcgggaacttgaactgaaggaaaaaaaaataaaagagcttcagaatgcgggagacaggctgctgagggaggaccatcctgcgagacctacagtcgaatcttttcaggcggctctccagacacagtggtcttggatgctccagctctgttgttgcatcgaagcccaccttaaggaaaacgctgcttactttcaattctttagcgatgtccgggaagccgagggacagttgcagaaattgcaggaggccttaagacgtaaatattcttgcgaccggtcagcgacagtgaccaggctggaggacctactccaggacgcacaggacgagaaggagcagttaaatgagtacaaaggccatctttctggcctggctaagagggccaaggccgtggttcagctgaagcccagacatcctgcccaccccatgcgaggcaggttacctttactggctgtatgcgattacaagcaggtcgaggtgactgtccataaaggcgacgagtgtcagctggtgggacccgctcagcccagtcactggaaagtcctgtcttcatccggctccgaggcggctgtcccttctgtgtgcttcctggtacctccacccaatcaggaggctcaggaggccgtgactcggctggaagctcaacatcaggcattggtgactttatggcaccagctccatgttgacatgaaaagcctgcttgcctggcagtcgctgcggagagatgtacagctgatcagaagctggtccctggcgaccttccgcactttgaaaccagaagaacagagacaggctcttcactctctcgaactgcattatcaggcatttcttagagactcacaagatgcgggagggttcggcccagaggacaggctgatggctgaacgtgaatacggctcatgctcacaccattaccagcagctcttgcagtcactggaacagggggctcaggaggaaagccgctgtcaacggtgcattagtgaactcaaggacattcgccttcaacttgaagcgtgtgaaacaaggacagtccataggctgaggctcccacttgacaaagagcccgctagagaatgcgcccagcgcattgccgaacagcaaaaggcccaggcagaagtggaagggcttggaaagggggtcgccagattgtctgccgaagcggaaaaggtacttgccttgcctgaaccatcccctgcagcacctactctgagaagcgaacttgaactgacccttggtaagctggagcaagtacgctccctctctgctatctatctcgagaaattaaagaccatttctcttgtcatccgtggaacgcagggtgcagaagaagtgcttcgagcccatgaggagcagctgaaagaagcccaggccgtgcctgcaaccctgccagaactggaggctaccaaagcaagcctgaagaagctgcgagcccaggctgaggctcagcagccaacatttgacgccctaagagacgagctgaggggcgctcaagaggtgggggaacgcttgcagcagcggcacggcgagcgagatgtggaagtggagcgttggcgagaaagagtggcccagctgctggaaaggtggcaggcagtgctcgcccaaacagatgtccggcagagagagctagagcagctaggcaggcagttgcgctattaccgggaatctgccgatccactgggagcgtggctccaggatgccagacgcagacaggagcaaatccaggccatgcctctggcagattctcaggctgtacgtgagcagttgcgtcaagagcaagctctgttggaggagatcgaaagacatggcgaaaaggtcgaggagtgccagcgatttgccaagcagtacattaatgcaataaaagattacgagctgcagttagtgacttataaagcgcagcttgaaccagtggccagcccagccaagaagcctaaagtccagagcggtagcgaaagtgtgatccaggagtatgtggacctgagaacccactactcagaactgactaccctgacctcccagtacatcaagtttatcagcgagacgctgcgaagaatggaagaggaagagaggttggctgagcagcagagggctgaggagcgggagaggctggctgaggtcgaagctgcactggagaaacagcgccagctagcagaggcgcacgcgcaagccaaagcgcaagctgaaagagaggccaaagagctgcagcagcggatgcaagaagaagtggtgcggcgagaggaagccgctgtagatgcgcaacagcaaaaacgctctattcaggaagagctgcagcagctccgccagtcctccgaggccgagatccaggccaaagccagacaggccgaggccgcagaacggagccgtttgcgcattgaggaagaaatcagagtggtccgcttgcagctcgaggctaccgaacgacagaggggcggtgctgaaggagaactccaggccttgcgggcacgcgctgaggaagcggaggcgcagaaacgacaagcccaggaagaagctgagcgcctccggagacaagttcaggatgaaagccaaaggaaacgtcaggctgaggtggaactagccagccgcgttaaggcagaggccgaagcagctagggagaaacagagagctctgcaggccctggaagaactccgcctgcaggcagaagaagctgagcggaggttgaggcaggcagaagtcgagcgggcaaggcaggtccaggtcgctctggaaactgctcaacgtagtgcagaggccgaactacagtctaagcgcgcaagcttcgcagaaaaaacagcgcagctggagagaagtcttcaagaagagcacgtggctgtggcccagctgagggaagaagctgaacggcgagcacagcaacaggccgaagcagagagggccagggaggaagctgagcgtgagttggaaaggtggcagcttaaggccaatgaggctctgagactcaggttgcaggctgaagaagtggctcaacagaaatctctcgcccaggcggaagctgagaaacagaaggaagaagccgagcgtgaggctagaaggagagggaaggctgaggaacaggccgtacggcagcgcgagctggctgaacaggaactggagaagcagaggcaacttgcagagggtacagcccagcagcgcctcgccgcagagcaggaactgattagactccgagctgagacggaacagggggaacagcagcgacaactgctggaagaagaattggctagactccaacgagaagccgctgccgcaacacagaagagacaggagctggaggctgaacttgcgaaggttagggccgagatggaggtgctattagcctcgaaagcacgagccgaggaagagtcccgatcgacctccgaaaagagtaagcagcgtttagaagctgaggccggaagatttagagagcttgctgaggaggccgctcggcttcgcgctctagctgaggaggctaagcggcagagacagctggccgaggaagacgccgcaagacaaagagccgaggcggaacgggttttggccgaaaaattggctgctattggggaggctacgagactcaagacagaagcggaaattgctctgaaggaaaaggaagccgaaaacgagaggctacgacggttggctgaagacgaggcgtttcaaagacgacggctggaggagcaagcggctcaacacaaagccgacattgaagagcggcttgcacagttgcgcaaagcgtcggacagtgaactggagcgacagaagggcctggttgaagacaccttgcgccaaaggaggcaagtggaggaggagattctggctctgaaggcgtcatttgaaaaggctgccgcaggcaaggccgaattggaactagaactgggcaggattaggagcaacgctgaggacaccctgagaagcaaggagcaggcagaactcgaagcggcaagacagagacaactcgccgcagaggaggagaggcgtcgcagagaagcagaggaaagagtacaaaagagcttggctgcggaagaggaggccgctcgccagcgcaaggcggcacttgaggaagtagagaggcttaaggcaaaagttgaagaagccaggcgactgcgtgaacgggctgagcaggagtctgcacgccaacttcaactggcccaggaggcggcacagaagcgcctgcaggccgaggagaaggcacatgcctttgctgtgcaacaaaaagagcaggaactgcagcaaactctgcaacaggaacaaagcgtcctggatcagctgcgaggagaagccgaagcggctcgccgagcggctgaggaggcagaagaggcacgcgtccaggccgaaagggaggctgcccagagccgccgacaggtggaggaagccgaaaggttaaagcaatcagccgaggagcaggcgcaggctagagcccaggctcaggcggctgccgaaaagttacggaaagaggctgaacaagaggctgcaaggagagcacaggccgaacaagccgcactcagacaaaaacaagcagcggacgccgaaatggagaaacataaaaagtttgcagagcagacactcagacaaaaagctcaggtggaacaagaactgacgacgctgcggctgcagctggaggagacagatcatcaaaagaatctcctggacgaagaacttcagagactcaaggctgaggctacagaagcggctaggcagcgaagtcaggttgaagaagaattgttcagcgtacgcgtacagatggaagagctctccaaactgaaggcacgcatagaggcagagaacagagccctcatcctgagagacaaagacaacacacagcgctttctgcaagaggaggccgagaaaatgaaacaagtagctgaagaggcggcaagattatcagtggccgctcaggaagcagcaagactgaggcagcttgcggaggaggatttggcccagcagagggccctcgctgaaaaaatgttgaaggagaaaatgcaggctgtacaggaggcaaccaggctgaaagctgaagccgaactactgcaacagcagaaggagctcgctcaggagcaggccaggcgcttgcaagaagataaggaacagatggctcagcaactcgctgaagaaacccaaggctttcagcgcaccctggaagctgaaaggcagcgacagctggagatgagcgcagaggccgaacggctgaagcttcgtgtcgccgaaatgtctcgtgcccaggcacgcgctgaagaggatgcgcaaaggttcagaaaacaggcggaggagatcggagaaaaattgcacaggactgagcttgcaacccaggaaaaggtcactcttgtgcagactctggaaatccaacggcagcagtccgatcatgatgctgagcggctaagggaggctatagctgagcttgagcgcgaaaaggagaagctgcagcaggaggctaagctactgcagctaaaaagcgaagagatgcagaccgttcagcaggaacagctcttgcaggaaacccaagcactgcagcagtccttcctatccgagaaagacagcttgttgcagcgagagaggtttatcgaacaggagaaggccaagcttgagcagctctttcaagatgaggtggctaaggcgcagcaactgcgtgaagagcagcagcgccaacagcagcaaatggaacaggagcgccagaggctggtggcctcaatggaggaagccaggcgtcgccagcacgaggccgaagaaggcgtgcgacgcaagcaggaggaactgcaacagctagagcaacagcgccgtcagcaggaagagctcctggcagaggagaaccaacgtctgcgggaacagctgcagctgttagaagagcagcaccgcgcagccctggctcacagcgaggaggtgacggcttcccaagttgctgccacaaagacactgcccaatggtcgtgacgcccttgatgggcctgcagcagaagcagagccggaacattcttttgatgggcttcgcagaaaagtctctgcccagaggctacaggaggccggtatcctgagcgctgaagagctgcagcggctcgctcaaggtcacaccaccgtggacgagcttgctagaagggaggacgtgcgccattacctccagggcaggtccagcatcgccggtctgcttcttaaggctactaacgagaaactgtctgtgtatgctgccctacagcggcagctgctcagccctggaacagcattaatcctgctcgaggctcaggccgcatccggtttcctattagatcccgtgagaaaccgtcgcttaacagtcaacgaagcagttaaagaaggcgtcgttggtccagagttacaccataaattgctgtcagctgagcgagctgttactggctataaagacccttatacaggacaacagatctccctgtttcaggcgatgcagaaaggcctgattgttcgcgaacatggaatccgactcctggaggctcagatcgccacagggggtgtaatcgacccagtccacagccacagggtccccgtggatgtggcttataggaggggctactttgacgaggagatgaaccgggtcttagccgacccctccgatgatacaaaggggttctttgaccctaacacgcacgaaaacctcacctatctgcagctactggagcgatgtgtcgaggaccccgaaacgggcttatgtctgcttcctctcacggacaaggctgccaagggcggagaactggtgtataccgactccgaggccagagacgtattcgagaaggccacagttagcgctcctttcggtaagtttcagggcaagacagtcaccatctgggaaatcatcaactccgaatacttcacggctgaacaaagacgggatttgctgcggcaattccggactggtcggatcactgtggagaagatcatcaaaatcatcatcacagtggtggaggaacaagagcaaaaaggccgtctgtgttttgagggactgcgctctttggtgcccgctgcagaactgctggaatcacgcgtgatcgacagggagttgtatcagcagttgcagcgaggggaacggtcagtacgggacgtggccgaggttgatactgtcaggagagccctgaggggtgcgaatgttatcgctggggtgtggctcgaggaggcaggccagaaattgagcatctacaacgcattgaagaaggatttactcccatcggatatggccgttgctctactggaggctcaggctggtaccggccacatcatcgatccggctacctccgcgagactgacagtcgacgaagctgtccgggcaggcctggttggaccagagttccatgaaaagctgctttccgcggagaaagcggtaaccggatatcgcgatccgtacactggacagtctgtaagccttttccaggctctgaagaaagggctgatcccacgggaacaggggctgcggttgctggatgctcagctgagcaccgggggaatagtagatccttctaagtcccacagggtgccactggacgtagcttgtgcgaggggctgccttgacgaggaaaccagtcgggcattgagtgcgcctcgtgctgacgccaaagcttactccgacccaagcacaggcgagccagctacatacggggaattgcagcagcgatgtaggccagatcagctgaccggtttgtcacttctgcctctctctgaaaaggcagccagagctcgacaggaagaactctactcggagctgcaggcacgggagacgttcgaaaaaacgcccgtggaggtgcctgtggggggatttaagggcagaaccgttaccgtttgggaacttataagctccgagtacttcactgccgagcagcgccaagagcttctcagacaattccggacagggaaagtgaccgttgagaaggttataaagattctgattacgatcgtggaagaagttgagactttgcgccaggagcgactgagcttctcaggccttcgcgctccagtccctgcttcagaactgctggcttcaggggtcctttccagagcgcaatttgagcagctaaaagatgggaaaaccactgtaaaggacttaagtgagctcggcagcgttcgtaccctgttacagggttctggctgtctggccggaatttacctggaggatactaaagagaaggtgagcatttacgaggcaatgcggcgaggcctgctgagggccactactgccgcactgctcttggaggcccaagcagctactggatttttggtggatccagtgcggaaccaaagactttacgtgcacgaggccgtgaaagcaggcgtcgtgggaccagaactgcatgaacaacttctgagcgcagaaaaagcggtcacaggttaccgggacccatacagcggcagcacaattagccttttccaagccatgcaaaagggtctggtcttgagacagcatggcatccgattgttagaagcacaaattgccactggtggaattatagatcctgtccactcccatcgggtgcccgtggatgtcgcctaccagcgtgggtactttagcgaagaaatgaatcgagtcttggcggatccatcagacgacaccaaggggttttttgatccaaacacccatgagaacttgacctatagacagttgctggaacggtgtgtggaggatcctgagaccggactgcgattgctgccgttgaaaggcgctgaaaaggccgaggtggtcgagacaacccaggtgtatactgaggaagaaacgcgtcgggcattcgaggaaacgcagatagacattccaggcggaggtagccatggtggatcaactatgtccctgtgggaagtcatgcagagcgacttaatccccgaggagcaacgtgctcagctgatggccgatttccaggcaggtagagttaccaaagaaagaatgatcattataatcattgagatcatcgagaaaacagaaatcatccgccagcagggcctcgcaagctacgactacgttcggaggcgcctcactgccgaggacctgttcgaagcacgcattatttcgctcgagacctacaacctgttaagagagggaacacgatccctccgggaggcacttgaggcagaatccgcgtggtgctatctgtatgggaccggttccgtggctggtgtatacctccccggtagccgtcagaccctgagcatctaccaggccttaaagaagggcttactctctgcggaggtggcccgtctcctccttgaagctcaggccgctactggttttctacttgatccagtgaaaggggagagactgactgtggacgaggccgtccgtaaaggtctggtcggaccggaacttcatgatcggctgctgtcggctgaacgggctgtaaccggctaccgggatccatatactgagcagaccatttccctgtttcaggctatgaaaaaggaactgattccaactgaggaagccttaaggctcctggatgcccagttggctacaggtggaattgtggatcctagattgggcttccacctccccctagaggttgcctatcagcgcggatacctgaataaggacacacacgatcagctttctgaaccctccgaagtgcgttcatatgtagacccaagcaccgacgaacggttatcatatacccaactactcaggaggtgtcggagggacgacggcacagggcagctattacttccgctgtccgatgccagaaaactgacattcaggggccttcgtaaacagatcaccatggaagaactcgtgagaagccaagttatggatgaagctactgccctgcagctgcgggagggactgacctctatcgaggaagtgactaaaaacctacagaaatttctggagggcacatcttgcattgcaggagttttcgttgatgccactaaggagcgcttaagcgtttatcaagcaatgaagaagggcataatcagaccgggaaccgcattcgagctgcttgaagcccaagccgctacgggctatgtgatcgacccaatcaagggactgaaactgacagtcgaggaggcagtgagaatgggaatcgtgggtcccgaatttaaggataagctgctgtccgctgaaagggcagtgactggttataaggatccttattccggtaagctaatatcactgtttcaggccatgaaaaaggggctgatcctgaaagatcatggaatccgcttgcttgaggcacagatcgccaccggtggaattattgacccagaagagagtcatcggctccccgtggaagtggcctataaacgaggcctcttcgatgaggaaatgaacgagattctcaccgacccatccgacgataccaaagggttctttgaccctaacaccgaggagaaccttacctacctgcagcttatggagaggtgcatcactgacccccagaccgggttgtgcctgctgccgctgaaggaaaagaaacgcgaacggaaaaccagctcgaaatctagcgtgcgcaaacgcagggtcgtgatagtggatcccgagaccggcaaggagatgtccgtgtacgaggcctatcgaaagggcttaatcgaccatcaaacatatctcgagctgtctgagcaggaatgtgagtgggaagaaattaccatatcaagcagtgacggcgttgttaaaagtatgatcatcgataggagatctggtcgccagtacgacatcgacgacgctatcgcaaaaaatctaatagaccgatccgccctcgatcagtacagggctggaaccctctctatcacggagttcgctgacatgctctccggaaacgccggtggctttagatcacggagctcgtcagtaggttcgagttcaagctacccgatttccccagcagtgtctcgtacccagctggcttcatggagcgatcccacggaagagacaggcccagtggcagggatactcgataccgagacgttagagaaggtttccattaccgaagccatgcataggaacctggtcgacaacattactggtcagaggctcctcgaggcgcaagcatgtaccggtggtattatcgatcctagcaccggagaaaggtttccagttaccgacgccgtgaacaagggcctcgttgataagataatggtagatcgtataaatcttgcacagaaggcattctgtggattcgaagatcctcgcactaaaaccaagatgtctgcagcccaggccctaaagaaggggtggctgtactatgaggccggtcagcggtttttggaggtgcagtaccttacgggagggctcatcgaacccgatacacccggaagagtgccgctcgacgaagcactgcaaagaggcaccgtggacgcaaggacggcacagaagctgagggacgtcggcgcatactctaagtacctcacctgccccaagaccaaactcaagatctcctacaaggatgccctagatagatcaatggtggaagagggcactggactacggctgctggaggcagcagctcaatccactaagggctattacagcccttattctgtgtctgggagcggtagcacagctgggtctaggacaggctcacgtactgggtctcgggcaggttctaggcggggttcttttgatgcaacaggatcaggattttcaatgactttctcttcctctagctatagcagttcagggtatggtcggagatatgcaagcgggtcctcggctagccttgggggtcctgagagcgcggtcgcctag

SEQ ID NO: 262179 - DNA, 13644 bp, Artificial Sequence
  derived and/or modified sequence
atgtctcaacatcaactgcgtgtgccacaacccgaaggtctgggcaggaagcgcacctccagtgaggacaacctgtacctggcagtcctgcgcgctagcgaaggtaagaaggacgagagagaccgtgtgcaaaaaaagacattcacgaagtgggttaataaacatctaattaaggcgcagaggcatattagcgatttgtacgaggatctgcgggatggccacaacctcatctcccttctggaggtgttaagcggagactcactgcctcgcgagaaaggtcgaatgcgattccacaagctgcagaacgtccagatcgcattggactatctacggcatcgacaagtgaagttggtcaacatcagaaacgacgacatcgcagatggtaaccccaaactgaccttgggtctcatttggactatcatccttcattttcagatatctgacatccaggtgagtggccaatctgaggatatgaccgccaaagaaaagcttctcctctggagtcagaggatggtcgaagggtaccagggcctccgctgcgacaatttcactagcagttggcgcgatggacgactgtttaacgctattatccaccgtcataaacctttgcttattgacatgaataaggtttataggcagaccaacctggaaaatctggatcaagccttcagcgttgctgagagagatctgggtgtgacaagacttctcgaccctgaggatgtggatgtgccccagcctgacgagaaatcaataatcacttatgtgagtagtttatacgatgccatgcctagggtgcctgatgtgcaggacggggtgcgggcaaatgaactgcagctccgctggcaggaatatagggaacttgtgctcctgctgcttcagtggatgcgtcaccacaccgcggcatttgaggagcgcaggttcccctcgtctttcgaggaaattgagatcttgtggagccaatttctgaagttcaaagagatggaactcccagcgaaggaagccgacaagaacaggagcaagggcatatatcaatccttggagggagccgtgcaggcaggccagctcaaggtccctccagggtaccatccgcttgatgttgagaaggaatgggggaagctgcacgttgcaattctggaaagagaaaaacaattgcggtccgagtttgaacgcttggagtgcttgcagaggattgtaaccaagctgcaaatggaggcaggattgtgtgaggagcagctcaatcaagccgatgctctgttgcagtccgatgtgcgcctgctcgcggctggcaaagtgccccagagggccggtgaagtggagagagacttggataaagcagacagcatgattcggctcttgtttaatgacgtgcagactctgaaggatggccgtcacccccagggggagcagatgtaccggcgagtgtaccgtctccacgagaggttagtcgccataaggacagaatacaacctgcggctcaaagcgggtgtcgcagctccagcaactcaggtggcccaggtcaccctccaaagtgtgcaacggcgacccgaactagaggatagtaccttgcggtatctccaggatctcctcgcttgggttgaggagaatcagcacagggtcgacggggcagaatggggtgtggacctcccaagcgtggaagcccaattaggcagccaccgtggcctgcaccagtccatcgaggaattccgcgctaagatcgaacgcgcaagatccgacgagggtcaattgtctccggcaactaggggggcttaccgtgattgtctggggagacttgaccttcagtacgcaaagctactcaatagtagcaaggcaagactccgctccctcgaatcgctgcacagttttgttgccgctgctacaaaggaactgatgtggttgaacgaaaaggaagaagaggaggtgggctttgactggtctgatcggaatacaaacatgactgctaaaaaggaatcatattccgccttaatgcgggaactcgagcttaaggagaagaagattaaggagctccagaacgccggtgacagactgctcagagaagaccacccagcacgaccaacagtagagagctttcaagcagccttgcaaacacagtggagttggatgttgcagctgtgttgctgtatcgaggctcacctcaaggagaacgctgcatattttcagtttttcagcgatgtgagggaggccgagggacaactgcaaaaactgcaggaagcgttgagacgcaagtactcttgcgacagaagcgccaccgttacccgcctcgaagatttactgcaggacgctcaggacgagaaggaacaactgaacgaatataagggacacttgtcaggcctggcaaaacgtgccaaggccgtggtgcagctgaagcctcgacacccagcccatcctatgcgcggacggctacccctgcttgccgtgtgcgactataaacaagtggaagttaccgtacacaagggcgacgaatgtcagctagtgggaccagcccaaccatcacattggaaagttttgtcttcctctgggtctgaagctgcggtaccttcggtatgcttcttggtgccccctccaaatcaagaggcccaggaagcagtcactagactcgaggcccagcatcaggccctggtgactctttggcatcagctgcacgtagatatgaagagcttgctcgcttggcagtcgctccggagagatgtgcagctcatccggtcttggtcattggccacatttcgcactctaaagccagaagagcagcgacaggccctgcactcccttgaactacactaccaagcctttttgagggatagtcaggacgcgggagggttcggccctgaggatagacttatggcggagcgtgaatacgggagttgttcccaccactaccagcaactgctgcagtctctcgaacagggagcacaggaagagagccgatgtcagaggtgcattagcgagcttaaagatattcgcctgcagcttgaggcttgtgaaacgaggacagtccatcgattgagactacctttggacaaggaaccagctcgcgaatgcgcacagcgaatcgccgagcagcagaaggcgcaggcagaagtggagggtctcggcaagggagtggcacggctgtcagctgaggcagagaaggtactcgctttgcctgagccatcccctgcagcccctaccctgcgcagtgagcttgagctcacccttggcaagctggagcaagtacggtccctatcggccatctatctagaaaagttgaaaactatctcattagtgatccggggtacacagggtgccgaggaagtcctccgggctcacgaggaacagctgaaagaggctcaggcagtaccagctacgttgccagagctggaggcaaccaaagcttcccttaaaaagctgcgggcacaggctgaagctcaacagccaactttcgatgcgctgcgcgacgagctgcggggagcccaggaggtgggtgaacgcctgcaacaacgacacggcgagcgcgacgttgaagtggagcggtggcgagagagagtggcccaactgctcgaaaggtggcaggcagttctggctcagacagacgtgcggcaacgcgagctagagcaactgggcagacagctacgctactaccgcgagagtgcggaccccctcggcgcatggttgcaggacgcacgcagacggcaggaacagatccaagctatgcccctcgccgattctcaagctgtaagggaacagttgagacaagaacaggccttgctggaagaaattgaacggcacggggaaaaggtcgaggagtgccagagatttgctaaacagtatattaatgcaattaaggattacgagttgcagttagtcacatacaaggctcagctggaaccagtggcctcaccagccaagaaaccaaaggtgcaatccgggtcagagtctgtgatacaagagtatgttgatctgagaacccattactctgaacttactaccctgacttctcagtacatcaagttcatctccgaaacgttgaggcgcatggaagaagaggagcgccttgccgagcagcagcgagccgaggagagagagcgcctggcagaggtcgaagccgctttagaaaagcagcgacagcttgcagaggcccacgcgcaggctaaggctcaggctgagcgcgaagcaaaagaacttcagcagagaatgcaggaggaggtggttaggcgcgaggaggctgccgtggacgcacagcagcagaagaggtccattcaggaagagctccagcagctgcgccagtcgagcgaggccgagattcaggctaaagctcgccaggccgaagctgcggagcggtctcgactgcggattgaggaagagatcagggtggtgaggcttcagttggaagccaccgaaaggcagaggggtggtgctgaaggcgaactacaggcactccgagctcgggctgaggaagcagaggcacagaaaagacaggcccaagaagaagcagaaaggctgcgacgacaggtgcaggatgagtctcagcgtaaacggcaggccgaggtcgaactagccagccgtgtgaaggcagaggccgaagccgcacgtgaaaagcagcgggcattgcaagcactggaggaactgcgcctccaggctgaggaggctgaacgaaggttgaggcaggctgaagtggaaagggccaggcaggttcaggtagccctcgaaactgctcaaagaagtgccgaggctgaactgcagtctaagcgcgcaagtttcgccgagaagaccgctcaattagagcgctcgctgcaagaagagcatgtggccgtcgcccagctacgggaggaggccgagagacgggctcaacagcaggcagaggccgagagggcacgggaggaagccgaaagagaattggagcgatggcagttaaaagctaatgaggcgctcagattacggctgcaggcagaagaagtcgcacaacagaaatctcttgcccaggccgaggccgaaaagcagaaagaagaggccgaacgtgaagcccgacgtcggggaaaggctgaggagcaggccgttcgccagagggagctggctgaacaggaattagaaaagcagcgtcagctggcagagggcacggctcagcagcggctggccgctgagcaagaactgattaggctgagggccgagacagaacagggcgagcaacagaggcagctcctggaagaagagctggcacgcctccagcgagaagctgcggctgccactcagaagcgacaggaactcgaggcagaacttgccaaagtccgcgctgaaatggaagtgctgctcgcctctaaagccagagccgaagaggagagccgttcaacttcagaaaaatctaagcagcgattagaggcagaggcgggacgctttagagaactggctgaagaagctgcacgcctgcgggctcttgccgaggaggcgaagagacagaggcagttggctgaggaggacgcagcccgacaaagggctgaggcagagcgcgttcttgccgaaaagcttgccgcaatcggagaggcaactcgcctcaagacagaggccgagatcgccctcaaagagaaagaggctgagaatgaaagattacggagactagctgaagacgaggcttttcagagacggaggctggaagagcaagcagcccagcacaaggctgacatagaggagcgcctggcccaattaagaaaagcttctgatagcgaactagaaagacagaagggcctggttgaggacactctgcgccagcggaggcaagtcgaggaggagattttagctctcaaggcctcatttgagaaggccgctgcagggaaggctgagttagagttggagctgggacgcattcgatcaaatgccgaggacacactgcgctccaaagagcaggccgagcttgaagcggcacgacaaagacaacttgcagctgaagaagaacggagacgcagagaagccgaggagagagtgcagaagagcctggccgctgaggaggaggcagcaaggcagagaaaggcagctctggaggaggtggagcggctcaaagcgaaggtggaagaagcacgaagacttcgagagagggcggagcaagaatctgccagacagctacaactagcccaggaggccgctcagaaacgcctgcaagctgaggagaaggctcacgccttcgccgtgcagcagaaggaacaggagctccagcagacccttcagcaggaacaatctgtgcttgatcaactgcggggagaggccgaagcggcaagaagagccgcagaggaggccgaagaggctcgtgtccaggccgaacgcgaagcagctcagtcccgtcgtcaggtcgaggaggctgagaggctgaagcagtcagctgaggaacaggctcaggcccgagctcaagcacaggccgcagccgaaaagctgagaaaggaggccgaacaagaggctgctagaagagcccaagccgagcaagccgcactccggcagaagcaggccgctgacgccgaaatggaaaaacacaagaagtttgctgagcaaacgcttcggcaaaaagcacaagtcgagcaggaactcaccaccttaagattgcaattagaagagacagatcaccaaaaaaatctgctggatgaggagctccaaaggctcaaagcagaagccacggaagccgcaagacagagatcacaagtggaggaagagttgttcagcgtgcgcgtgcaaatggaagagctatccaagttgaaagcacggatcgaagccgagaaccgggctttgatcttacgcgacaaagacaacactcagagatttctgcaggaggaagctgaaaaaatgaaacaggtggcagaggaggccgcacggctgtccgtggctgctcaagaggctgcgagattgcggcagctggcagaggaggatctggcccaacagcgggctctggccgagaaaatgcttaaggaaaaaatgcaggctgtccaagaggctacacggctgaaggcagaagccgaactactacagcagcaaaaggagttagcgcaagaacaggcccgacgactgcaggaagacaaggagcagatggcccagcagttagcggaagaaacacagggatttcagcgcaccctcgaggccgaaaggcagcgtcagttggagatgagcgccgaagctgagcggttaaaactccgggtcgccgaaatgtcaagagcacaggccagagctgaggaggatgctcagaggtttcgcaagcaggctgaggaaattggagaaaagctgcatcgtacagagctcgcgacccaggagaaggttaccctggttcagacactggaaatccagagacagcagagcgatcatgatgccgaaaggctcagggaggcaattgccgaattggagcgcgagaaggagaaactccagcaggaagctaaactgctccagctgaagtcagaagaaatgcaaaccgtccagcaggagcaacttcttcaggagacccaggctctccagcagagttttctgtctgaaaaggactcactgctgcagagggaaagattcattgagcaggaaaaggctaaactcgagcagctgtttcaggacgaggtggccaaggcccagcaacttagagaggagcagcaacggcagcagcagcaaatggagcaggagagacagcgtcttgtcgcctccatggaagaggcaaggcgcaggcagcacgaggctgaggaaggcgtgaggcggaagcaggaggaactgcagcagctcgaacagcagcggagacagcaggaagagcttctcgctgaggagaaccaaagacttagagagcagctccagctcctggaagaacaacaccgggctgctctggcccactccgaggaagtgactgctagtcaggtcgccgctacaaagacactgcctaatgggagagacgcacttgacgggcctgccgctgaggctgaacctgagcattcattcgacgggctgcgcagaaaggtttcagcacagcggctgcaggaggcgggaatcctgtctgctgaggagctacaaaggttagctcaggggcatactaccgtggatgaactggctaggagggaggatgtccggcactacctacaggggagatcttcaattgcaggtctgttactcaaggccaccaacgaaaagcttagtgtgtacgcagcacttcagcggcagctgctttccccaggaaccgccctgatactcttagaggctcaagccgcaagcggattcttactggatcctgtgcggaaccggagactgaccgttaacgaagccgtgaaagaaggagtggtcgggcctgagcttcatcataaactgctctcagccgaacgggcagtaaccgggtacaaggatccttacaccggccaacagataagcctgtttcaggcgatgcagaaaggtctgatcgtgcgcgaacatggcatacggctcctggaggcacaaatagctaccggcggagtaatcgaccctgtacactctcaccgggttccagtggatgtcgcttatcgccgaggttattttgacgaggaaatgaaccgtgtactggcagacccttcagacgacactaagggtttttttgaccctaacacacatgagaatctgacctacctccagctgctcgaacgttgcgtggaagaccctgaaacaggcctgtgcctattacctcttacagacaaggccgctaaagggggtgaactagtgtataccgattccgaagccagagacgtgttcgaaaaagcaaccgtttctgccccatttgggaagttccagggtaagaccgtcacaatctgggaaatcatcaattccgaatatttcaccgccgaacagaggagagacctcctgcgtcagttcaggaccggaaggattacagtggagaaaatcattaaaattatcattaccgtggtagaagaacaggagcagaagggcaggctgtgcttcgagggcctccgctcactggtccctgcagccgaactcctagagagtagagtcattgacagggaactgtaccagcagctgcagcgcggtgaacggtcagttagagacgtagccgaagtggatactgtgcgcagggcgctgagaggggctaacgttatcgctggagtgtggctggaggaggctggccagaaactgtccatttataacgcgttgaagaaggacttactcccgtcagacatggccgtggccctgctggaagcgcaggcgggaacaggtcatatcatcgacccagcgacctctgcgaggctcacagtcgacgaggccgttagggctggcctggtgggaccagaatttcacgagaagctgctttccgccgagaaagctgtcacaggatatcgggacccgtacacaggacaatcagtctcactcttccaggctctgaaaaaaggcctgatacccagggagcagggcctgcggcttctggacgcccagttaagcacgggaggaatcgtggatccttcaaagtcccacagggtccccctggacgtcgcctgtgctagagggtgtctggatgaggagacaagtagggcactttccgcgccacgggcagatgcaaaggcgtatagtgatccttccaccggggaacccgcaacctacggcgaactgcaacagcgttgccggcctgatcaattgaccgggctgtctttactccctctgagcgagaaagcagctcgagccagacaagaagagctctacagcgaactgcaggcaagggagacatttgaaaaaacgcctgttgaggtccctgtaggcggattcaaaggacggactgtaacagtgtgggagctgatcagcagcgagtacttcactgcggaacagcgtcaggagctgctacggcagttccgaactgggaaggtgacagtggaaaaagttattaagatcctgattactatagtcgaagaggtggaaacgctgcgacaggagcgcctgtcattcagtggcttaagagcccctgtgccagcaagcgagctgctcgctagtggagtgctgagtcgagcccagtttgaacagttaaaagatggaaagaccacagtgaaggatttgagcgagctaggctccgtgaggactctactccaagggtctggctgccttgcaggcatttacctcgaagacactaaagaaaaggtgtcaatctacgaggcaatgaggagaggcctgcttagggcaactacagcagctttacttctagaggcccaggccgctactggtttcctggtggacccagtccggaatcagcggttgtacgtccatgaggccgttaaagcaggtgtcgtcggaccggagttgcatgagcagttgttaagcgctgagaaagccgtgaccggctacagggatccatactcaggttcgaccatttcactgtttcaggctatgcagaagggtttggtgctgcggcagcacggaattcgcttacttgaagcccaaatcgctacaggtggaatcattgacccagtacatagtcacagggtgcccgtagatgtggcctatcagcggggatatttctctgaggagatgaatagagttctagcagatccctctgatgacaccaaggggttctttgacccaaatactcacgagaatctgacgtatagacagctcctggagagatgcgtcgaagatcctgagactggcttgaggcttttgccgctaaagggcgcagagaaagcagaggtggtagaaaccacacaggtatacacagaggaggagacacgacgcgcatttgaggaaacccagattgatatcccagggggtgggtcccacggcggatccactatgtcgctttgggaggtaatgcagtccgatctgatcccagaagaacagagggcccagctaatggccgatttccaggcaggccgagtgacaaaggaacggatgatcatcatcattatagagatcatcgaaaaaaccgaaataataaggcaacagggcctcgcaagctacgactacgtaaggcgacgcttaaccgccgaagacttgtttgaggccagaatcatttctctggaaacctataacctcctgcgcgagggaacgaggagtctgcgtgaagctctggaggctgaatccgcctggtgctatctgtatggcaccggatctgtagccggtgtgtacctccctggaagccgacagacactgtcgatttaccaagccctgaagaaggggcttctttccgctgaggtcgctaggttacttcttgaagcacaggcagcaactggatttctgctggatccagtcaaaggcgagcggcttacagtggatgaggccgtgcgcaaaggcctcgtcggccctgagttacacgataggctactctcagccgaacgcgcagtgaccgggtacagagatccctacactgagcagactatcagtctattccaggccatgaagaaggaactgatccccacagaggaggcattaagactcctagacgcacagcttgccacaggaggaatcgtggacccacggctcgggttccatctgcccttagaagtggcttatcagcgaggctatcttaacaaagacacacacgatcagttgagcgagccttctgaggtcaggtcctacgtggatccatcaactgacgagcgtttgtcttatactcagctgctgagaagatgtagacgcgacgatggcacaggacaactgctcctgcctctgtcagatgcacggaagctcacattccgaggccttaggaaacagattacgatggaagagcttgttcgaagccaggtaatggacgaagccacagcccttcagctcagagagggcttgactagcatcgaggaggtcactaagaatctgcagaagtttttagaagggacgagttgtattgctggagtcttcgttgacgcgacaaaggagcgactgtccgtgtatcaggccatgaagaaggggattataagacccggtaccgcgttcgagctactggaggcacaggcagcaacaggctacgtcatcgaccccatcaaaggtcttaaacttactgtggaggaggctgtacgaatggggatcgttggtccagagttcaaggataaactgctgagcgccgaaagagcagtcacaggatataaagatccttatagcggtaaactcatttctctgttccaagctatgaagaaggggctgatcttgaaggaccacggaataagactattggaggcacagatcgccactgggggaatcatagacccagaggaatcccaccgtttgcctgtggaggtggcttataagagggggctatttgacgaagagatgaatgagatcctgacagacccctcagacgataccaaagggtttttcgacccgaacactgaggaaaaccttacatacttacaactaatggagcgctgcataactgacccccagaccggactgtgcttgctaccactgaaggagaagaagcgagaacgtaagacctcctcaaaatctagcgttagaaaacgtcgcgtggtcatcgtggacccagagaccgggaaggagatgagcgtctacgaggcctacagaaagggacttatagaccatcaaacgtacctggaactgagtgaacaggaatgcgaatgggaggaaataaccattagttcctccgacggcgtcgtgaagagcatgattattgataggcggtctggacggcaatacgacatcgacgatgccatagccaaaaacctaattgaccgctccgccctggaccagtaccgggcaggtaccttatccatcaccgaattcgccgatatgctgtccggcaatgctggtggtttccggtcacgctcaagttctgtcgggagctctagctcctatcccatcagccctgccgtgagccgcactcagttggccagctggtccgaccccaccgaggagacgggtccggtggccggaatcctggatactgaaactctcgagaaggtgagcattactgaggccatgcaccgcaatctcgtggataacatcacggggcagcgtctgttggaggcgcaagcgtgtaccggtgggattatcgacccctccaccggggagaggttccccgtaacagatgcagtgaataagggactggtggacaaaatcatggtggacagaattaatttggcccaaaaggccttctgtgggtttgaagaccccagaaccaaaacgaaaatgtctgccgctcaggccttgaaaaaaggctggttgtattacgaagccggacagcgtttcctcgaagttcagtatctgaccggcggactgatcgaaccagatacccccggacgggtacccctggacgaggcactgcagcgtggtactgtcgacgctcgcaccgctcaaaaattgagagacgtcggcgcttactccaagtatctgacatgtcccaaaaccaagctgaaaatcagctacaaagatgctttagacagatccatggtggaggaagggaccggactaagactgttggaagcagccgctcagtcaacgaagggctactactctccgtacagcgtctcaggctcaggatcaacagctgggtcacggacagggagccggactggcagcagggccggatcccgcaggggatcctttgatgccacagggagcggcttctccatgacatttagctctagttcctactcaagctccggctatggtcggagatacgcttccgggtccagcgcctcgctgggtggccctgaaagtgccgtggcataa

SEQ ID NO: 262180 - DNA, 13644 bp, Artificial Sequence
  derived and/or modified sequence
atggaacccagcggatccttgtttccctcattagtggtagttggccacgtcgtcactctggcagcagtctggcattggcgtagaggtcggaggtgggctcaggacgaacaagatgagcgtgatagggttcagaagaaaacctttacaaagtgggtgaataagcatcttattaaggcacagcgtcacatctccgatctctacgaagacctccgggacggacacaacctaatatctctgcttgaagttctgtcaggcgattctcttcctagagaaaaaggcagaatgcgatttcataagctgcagaacgtgcaaattgccctcgattaccttcggcatcgacaggtcaagttggtgaacattcgcaacgacgatattgcagatgggaaccctaagctcactctaggcctaatttggactatcatcttgcatttccagatttccgatatccaagtgagcggacagtccgaagacatgacagccaaggagaagttgctcctgtggtctcagaggatggttgaaggctatcaggggcttcgctgtgataattttacctcatcgtggcgcgatggcagattgttcaacgccattatccaccggcacaagccactgctgattgatatgaacaaggtgtatagacagactaatttagaaaaccttgatcaagcctttagtgttgccgaaagggacctgggcgtgacccggctgctagaccccgaagatgtggacgttccacagccggacgagaagtccatcattacttacgtgtcctcactttacgacgccatgccaagagtgcctgacgttcaggatggggtgcgcgctaacgaattacaattgcgatggcaggagtaccgcgaactggtgctcctgctgcttcagtggatgcgccatcacacagccgctttcgaagagcggaggttcccctcaagtttcgaggagatcgagatcctgtggtcccaatttcttaaattcaaagaaatggaactgcctgccaaagaagcggacaagaatcggtctaagggtatctaccaatctctagagggggctgtgcaagcagggcagctaaaagtgccacccggataccaccccctagatgttgagaaggagtggggcaagctacatgtggccatcctcgaaagagaaaagcaactgagaagcgagttcgagaggctggagtgcctccagcgcatagtgacaaagttacagatggaggcgggactctgtgaagaacagctgaaccaggctgacgccttattgcaaagcgacgttagacttctggccgcaggaaaagtgccacagagggccggagaggttgaacgtgatctggataaagctgattcaatgatccgcctgctgtttaacgacgtacagacactgaaggacggcagacatcctcagggcgagcagatgtatcgtagagtctacaggttgcacgagcgactcgttgcgattcgcaccgagtataatcttagattgaaggccggtgtggccgcacctgccacccaggtcgcccaggtgactctacaatccgttcagcgtcgcccagagctggaagactccacactgagatacctgcaggatctcctcgcatgggttgaggaaaatcaacacagggtggatggcgcagagtggggtgtggaccttccctctgtggaagctcagttaggctcgcatagaggattacatcagtctattgaggaatttcgtgccaaaatcgagagggctaggtctgacgagggccagctgagccccgctacaaggggagcttaccgggattgccttggtagacttgatctccagtacgccaagctgctcaactcctcaaaggcacgattacgctcgctggaatccttgcactcttttgtcgccgctgcaactaaggagcttatgtggctcaacgagaaagaggaggaagaggtgggcttcgattggagcgatcggaataccaatatgacagctaaaaaggagagttacagcgccctcatgcgcgagttggaacttaaggagaagaaaattaaagagctgcagaatgccggagataggctgctccgtgaagaccatcctgcacggcctacagtggaatcattccaggcagcgctgcagacacagtggtcttggatgctgcagctgtgctgttgtattgaggctcacctaaaagagaacgcagcatattttcagttcttcagcgacgtcagggaggctgagggtcagctgcagaagctacaggaggccctaaggagaaaatattcatgcgaccgatccgcgacagtgacccgcctcgaagacctgctgcaggatgctcaagatgagaaagagcagctcaacgagtataaaggacatctatcaggacttgcaaagcgcgcaaaggctgttgtccagctcaagcctagacatcccgctcacccaatgaggggccgtttacctctgttggccgtttgcgactacaagcaggtggaggtaacagtccacaagggcgatgaatgccagctggtcggccctgcccagcctagtcactggaaagtgctctcatctagcggaagtgaggccgctgttcctagcgtgtgcttcctggtccccccacccaatcaggaagcacaagaggcggtgacccgcctcgaggcacaacaccaggccctggtcacgctgtggcatcagttgcacgtggatatgaaaagtttgctggcctggcagtcccttcggagagatgttcagcttattcgatcctggagcctggccacattcaggacactgaagccagaggagcaaaggcaagccttacatagtctggaactgcattaccaggctttcctccgcgattcccaggacgccggtggcttcggaccagaggaccgcttgatggctgaacgcgagtacggaagttgtagccaccattaccagcagctcctgcagagcttggagcaaggcgctcaggaagagagcaggtgccagaggtgcatttccgagctcaaagacatcagactgcagttggaggcatgtgaaacacggactgtgcatcggctcagactgcctcttgacaaggaaccagcaagggaatgtgctcagagaatcgctgaacagcaaaaagcccaggccgaagtagaagggcttggcaaaggagtcgcgagactgtcagctgaagccgagaaggtcctcgcgctgcctgagcccagtcccgctgcccctactctgcgtagcgaactcgagttaactctggggaaacttgagcaggtcagaagtctgtcagcaatttacttagagaaattgaagactatctccctcgtgattagaggcacgcaaggagctgaggaagtgcttagggcccacgaggagcaattaaaagaggcccaggccgtcccagccactctgcccgaattagaggctacgaaggcgagcctcaaaaagttaagagcccaggctgaggcgcagcagccaacttttgacgccctccgggatgagctcaggggcgcacaggaggtaggtgagaggttgcagcagcgacacggagaaagagacgttgaggtggaacggtggcgcgagagagttgcacaactgctcgaaaggtggcaggccgtgctggcgcagacggatgtcagacagcgagaactggaacaactaggcaggcagttaaggtactacagagaatccgccgatcccctcggagcctggctgcaggatgccagacgtaggcaggaacagatccaggcgatgcccttagccgactcccaggccgtgcgggagcagttaagacaggaacaggcattgctggaggagatagagagacatggagaaaaggtggaggaatgccaacggttcgcaaagcaatacattaacgccatcaaggattacgagctgcagctggtcacctataaggcccagttggagcccgtggcaagccctgctaaaaagcccaaggtccagagcggctccgagtctgtgatccaggagtacgtggacctacgcacccattattcagaactgaccacgctaactagtcaatatatcaaattcatcagcgagaccttaagacgaatggaagaggaagaaagattggccgaacaacagcgtgcagaagagagggagaggttagctgaggtcgaagccgctctggaaaagcaaaggcagctggcggaagcgcacgcccaggcgaaagctcaggccgagagagaggcaaaggagctccagcagcgtatgcaggaggaggttgtgcgacgcgaagaggcagctgtggacgcccagcagcagaagcgatcgattcaggaggaacttcagcagctccggcagtcttcagaagccgagatacaggcaaaagccagacaggccgaggcggcagagaggtcacgcttaagaattgaagaagaaatacgggtggtccgtctacagctcgaagcgaccgagagacagagaggcggtgcggaaggagagcttcaagccctacgtgcccgtgccgaagaagctgaagcccagaagcgacaggcccaggaggaagcagagcgactacgcaggcaggtccaggacgagagccagcgtaagcgccaggccgaagtggaattggcctcccgtgtgaaagcagaagccgaagccgctagagagaagcagcgggcactgcaggctctggaagaactgcgccttcaggcagaggaggctgaacgaagattgcgtcaggcggaggttgaacgagcacggcaagtgcaagtagccttggagactgctcagcgatccgccgaggcggaattgcagtcaaagagagccagctttgctgaaaagaccgctcagctggaaagatctctgcaggaagaacatgttgcggtagcacagttgcgagaggaggcagagcggagagcacagcagcaagcagaagcggagcgggctagagaggaggcagagagagagctcgagcgctggcagctcaaggcaaatgaagcgctcaggttaaggctgcaggccgaggaggtggctcagcagaagtcccttgcgcaggcagaggccgaaaagcagaaagaggaagcggagcgagaagcacggcgacgtgggaaggcggaggaacaggcggtgcggcagcgggaactggcagagcaggagttagagaaacaacggcaactagcagaggggaccgcccagcagcgcctggccgctgagcaagaattgataagactgcgggcagagacggagcagggagaacaacagagacaactgctcgaggaggaactggctagacttcagagagaggcagctgctgctacacagaagcgtcaggagttagaggctgaactcgcgaaagtgcgagccgaaatggaggtcttacttgctagtaaggcaagagccgaggaggagtcgcggtcaacttctgaaaagagcaaacagcgcctcgaggcagaggccggtcgttttcgggagctggctgaagaagccgcaagactgcgggctctcgcagaagaagctaaacggcagcgccagctcgctgaggaggacgccgctcgacagcgtgccgaggctgaaagagtactcgccgagaagctggcagctatcggagaggccacgaggttaaagaccgaagcagagatcgctcttaaggagaaggaggcagagaatgaaaggctccggaggctggcagaggatgaggccttccagaggaggcgtctggaggaacaggccgctcagcacaaagctgacatcgaggagagactcgctcagctacggaaagcctctgattcagaattggagcggcaaaagggcctggtcgaggatacattacggcagcgcagacaggtggaggaggagatcttagcccttaaggctagcttcgaaaaagcggctgccggaaaagcagagctcgagctcgaattgggcagaatccgatcaaatgcggaagatacgcttagaagtaaagagcaggcggaactagaagcagcaagacagcggcagctggctgcagaggaggaaagaagacggagagaggccgaggaaagagtccaaaaatcactggccgcagaggaagaggccgcacgccagcgcaaggccgcattggaggaagtcgaaagattgaaagcaaaggttgaggaggccaggcgcctcagagagcgtgcggagcaggaaagtgccaggcagctccagctggcacaggaggctgcccagaagaggctacaagctgaagagaaggctcacgccttcgccgtgcaacagaaggaacaagaacttcagcagactttacagcaggagcagtcggtgttggatcaactgcgtggcgaggcggaggccgcacgccgtgctgctgaggaggcggaggaggctagagtccaggctgagagagaggccgcacagtcgcgaagacaggtcgaagaggccgagcgcctcaagcagtccgcagaggaacaggctcaggccagggcgcaggcacaggctgccgcagagaagctgcgcaaggaagcggagcaggaagccgctcggagggcccaggcggagcaggcagctctgcgtcagaagcaggcagccgatgctgaaatggaaaaacataagaaatttgccgagcagactctcagacaaaaggctcaggtcgagcaggaactcacaacattgagactgcaactggaggagacagatcatcagaagaatcttttggatgaggagctgcagcgattgaaagctgaagccacagaggcggctcgccagcgttctcaggttgaggaggagcttttttcagtgcgcgtccagatggaggagttgtcaaaactcaaggccaggattgaagcagaaaaccgggctctcattctgcgcgataaggacaatacacagaggtttcttcaggaagaggccgagaaaatgaagcaggtggcagaggaggcagcgagactcagcgttgccgctcaggaagcggctcggctgcgccagcttgccgaagaagatctggctcaacagagagctctggccgaaaagatgctgaaggagaagatgcaggctgtgcaagaagccactaggttaaaagcagaagccgaactcttgcagcagcaaaaagaactcgctcaggagcaggcgaggcgcctccaggaggataaggagcagatggcccaacagctcgccgaggagacgcagggattccaaaggaccctcgaagccgagagacagcgacagctcgaaatgtccgctgaagccgagcggctgaagctgagggttgccgagatgtcacgcgcacaagctagggccgaggaagacgctcaaaggtttaggaaacaagctgaagaaattggggaaaagttacaccggaccgaattggcaacacaggaaaaagtaacactggttcagactttggagatccaacgacagcagtctgaccacgacgccgagcggcttcgtgaagccattgccgagctggaacgggaaaaagagaaactgcagcaggaggccaagttgctccagttaaagtctgaagagatgcaaacagtacagcaagagcagctgctacaggagacacaggcccttcagcagagcttcctctcagagaaagatagcctgctgcaaagagagaggttcatcgaacaggaaaaagcaaaactggaacagttgttccaggatgaagtggcaaaggcccaacaactgcgagaagaacaacagcgacaacagcagcaaatggaacaggaacggcagcgcttggttgcctcgatggaagaagccagaaggcgacagcacgaggccgaagagggcgtgaggagaaaacaggaagagctccaacagttggaacagcagcggaggcagcaggaagagttgctggccgaggagaaccaacgcctgcgggagcaactgcagttgctggaagaacagcaccgggcagcgctggcccattctgaggaggtcactgcaagtcaggtggcagccaccaaaacactgccgaatggcagggacgccctggacggccctgccgcagaagctgagccggaacattcatttgacggcttacgccgaaaggtctctgctcagcgcctgcaggaggccggaattctcagtgccgaagagctgcagcgattagcgcagggtcacactaccgtcgatgagctggctagacgagaagacgtgagacactacttgcagggacgatcaagcattgctggcctgttgttgaaggctactaatgagaaattgagtgtttatgcagcactgcagagacaattactgagccctggcaccgctttgatcctgctcgaggcacaggccgcttcgggctttttgcttgacccagttcgcaaccggaggttgacagtcaacgaggctgtgaaggaaggcgttgtaggccctgagctacaccacaaactattgtcggctgagagggcagtgacaggctataaagacccttatacaggccagcagatcagtctgttccaggccatgcagaagggcttgatagtgagggaacacggtattcgattgttggaagctcagattgcaacggggggtgtgatagatccagttcacagccacagggttcctgtggatgttgcatacagaagagggtacttcgacgaggagatgaatcgagttctggcagatccttcggatgatactaaagggtttttcgatcccaatacgcacgaaaacctgacatacctgcagctgctggaacgctgcgtcgaagacccggaaaccgggttgtgtctgctgccgctgaccgataaggcggctaaaggcggtgaactggtgtacactgacagtgaagccagagacgtgtttgaaaaagccactgttagcgccccattcggcaaatttcaaggtaagacagtgaccatctgggagattataaattcggagtactttacagccgagcaacggagagatctcctaaggcagtttcggaccggcaggatcacagtggaaaagatcatcaagataattattaccgtagtggaggagcaggagcagaagggacggctctgctttgaaggactgcgcagcctagtgcctgctgccgagttgctcgaatcacgcgtaatcgatcgcgaactctaccagcagttacagagaggtgagcgaagcgtgcgggacgttgcagaggtcgacaccgtgagaagggctttgagaggtgctaacgtgatcgccggagtctggctagaagaggccggacagaaactgtccatttataatgccctgaagaaagaccttcttccatctgacatggctgtggccttgttggaagcccaggcaggcaccggacacatcattgatcccgcaacttccgctagactaacggttgacgaagccgtccgggcaggcttggtaggaccggaattccatgagaagttgctgtccgcagaaaaggccgtcactggctaccgggatccctacaccgggcagagtgtttcacttttccaagctctgaaaaagggactcatccctcgagagcagggcttgaggcttcttgacgcccaactctcaacagggggaattgtagaccctagtaagtcccacagggtgccactggatgtcgcttgcgcacgcggatgcttggatgaggaaacatctagggcactcagtgctcctagggctgacgccaaagcttattctgaccctagcaccggggagcccgctacatacggagagctgcagcagcgctgcagacccgaccagttaacgggcctttcactcttacccctcagcgaaaaggctgccagggcgcgacaggaagagctgtacagtgaactccaggctcgggagactttcgagaaaacccccgttgaagtcccagtgggaggctttaaaggaagaactgtgaccgtgtgggaactgatcagctctgagtattttactgccgagcagcgccaggaactgctgcgccaattccgtactgggaaagtcaccgttgagaaggtcatcaaaattcttattacaatagtagaggaagtcgagaccctgcgacaggaacgactgtcgttcagcggtcttagggcccctgttcccgctagtgaactcctggcttccggcgtgctttcccgtgcccagttcgagcagctaaaggacggcaagaccactgtgaaggacctttctgagctgggcagtgtcaggacattacttcaaggatccgggtgtctggcgggaatctatctggaggacacaaaggagaaagtaagcatctatgaggccatgagaagaggtctgctgcgggctaccactgccgctttattattagaagcccaggcagctaccggcttcctcgtcgaccccgtgaggaaccagaggttatatgtgcacgaagcagtgaaagcaggggtggtgggtccagagctccacgagcagctcctcagcgccgaaaaggcagtgactggctaccgagatccctatagcgggtctactatcagcctgtttcaggccatgcagaaaggactcgtattgcgacagcatgggatccggttgctcgaggcccagatcgctacaggcggaattatcgacccagtccactcccacagagtaccagtggatgttgcttatcagcgtggctacttctcagaggagatgaaccgggtcctggccgacccctccgatgacacgaaaggcttctttgatccgaacacccatgaaaacctgacgtaccgacagttattagagagatgtgtggaggatcctgaaaccggactccggctgctgcctctcaaaggcgcagagaaagccgaggtcgtagaaacaactcaggtttataccgaggaggagactagacgggcttttgaagagacacagattgatatcccaggaggtggtagccatggaggttccaccatgagcttgtgggaggtgatgcaatccgacttgatcccggaagaacaacgcgcacagttgatggccgactttcaggccggtcgcgtcactaaagagcgaatgatcataattatcatcgaaattatcgagaaaacggagattatccgacagcagggcctcgcaagctacgattatgtcaggagacgactgaccgcggaagacctctttgaggcgcgtatcatcagcctagagacatacaacctgttgcgggaaggcacgagaagcctgcgcgaggcactcgaggccgaaagtgcttggtgctatctctacggcactggaagcgtggccggtgtttatctgcctggatccagacagaccctttcgatttatcaggccttgaagaaggggttgctgtccgccgaggtggcccgactgctcttagaggcccaggccgctacgggattcctcctggacccggtgaagggcgaacggttgactgtggatgaagccgtgagaaagggactcgtggggcctgagcttcatgaccgcctactgagcgcagagcgcgcagtcacagggtatagggatccctacacagagcaaactatctccttgtttcaggccatgaagaaggagctcatcccaaccgaggaagcgctgagactactcgatgctcagctcgctaccgggggtattgtggacccacgcttaggattccacctcccactggaagttgcttatcagcgaggttatcttaacaaagacacacatgatcagctatcagaacccagtgaggtgcgctcctacgtggacccttccacagacgagcgcctctcctacacacagctgctcaggcggtgccgaagggacgatgggaccggacaattactgcttcccctcagtgatgcacggaagctcactttccggggactccggaagcagataaccatggaagaactggtgaggtctcaggtgatggacgaagctaccgccctgcaactgcgggagggtctgacctcgatcgaagaggtgacgaagaacctgcagaagtttctcgagggaacaagctgtattgccggtgtgtttgtcgacgcgacgaaagagaggctgtcggtgtatcaggccatgaaaaaaggtattatcagaccaggtacggctttcgagctgctggaggctcaggctgcaactggctatgtgattgaccctatcaagggtttaaagctaaccgtggaagaggctgtgaggatgggcatcgtgggccctgagttcaaagacaaactgctgagcgcagaacgagccgtcactggctataaggatccgtatagtggaaaactcatttcactgtttcaggccatgaagaaggggttgattctgaaagatcacgggatccgactgcttgaggcccaaatcgccacgggaggaatcatcgaccccgaggagtcccaccgcctgccagtggaagtagcttataagcggggtctgtttgatgaagagatgaacgagatcttaaccgatcctagcgacgataccaaaggctttttcgatccgaacaccgaggaaaatcttacttatttgcagcttatggaaagatgtataaccgacccgcaaaccggtctgtgtttactgcccctcaaggagaaaaagagggagcggaagacctcatcaaaatcctcagtgaggaaacgaagggtggtgatcgtagatccagagaccggaaaagaaatgtctgtgtatgaggcctacagaaagggtctcatcgaccatcaaacctatctggaactcagcgaacaggaatgcgaatgggaagagatcacaatttccagcagcgacggcgtcgttaaatcaatgattattgaccgacgatctggacgccaatacgatatcgatgacgccattgctaagaacttgatcgatcggagtgctctcgaccagtatcgcgctggaaccctgagcattaccgagttcgctgatatgttgagcggtaatgctgggggattcagaagccggagttcgagtgtgggcagttcttcgtcctaccccatttcaccggctgtgtccagaacccagctggcctcctggagcgaccccaccgaagaaaccggacccgttgctggcattctggacacagagactttagaaaaggtgtcaattacagaggccatgcacagaaatctggtggataatataaccggccagcgattgttggaagcgcaggcctgcacaggtgggattattgatccttctaccggcgaaagattcccggtcacagatgcggttaacaaaggcttagtcgacaaaataatggtcgatcggatcaatctagcacagaaggctttttgtgggttcgaagacccaaggacaaaaaccaagatgagtgcagcacaggctttaaagaaagggtggctgtattacgaagccggacaaaggtttctagaggtgcagtacctgacgggcggtcttattgagccagacacaccaggcagggtccccctcgatgaggctctgcagcggggaaccgtcgacgctaggaccgcgcaaaagttgcgggacgtgggtgcgtactccaagtatctgacatgccctaaaactaaactcaaaataagctataaagacgcccttgacaggtccatggttgaggaggggaccgggcttagactgttagaagcagcggcacagagcactaaggggtattattccccttattctgtttcaggttccgggtccaccgctgggagcaggacagggtccaggaccggttctcgcgcagggtctcgacgtggaagctttgacgcaactggctccggattttcaatgaccttttcatcttccagctactcatcttccggatacggacggcgttacgcgagcggctcttccgcaagtctcggcggacctgagagcgcggtggcatag

SEQ ID NO: 262181 - DNA, 13578 bp, Artificial Sequence
  derived and/or modified sequence
atggacccatctagggctattcagaatgaaatctccagcctgaaagatgagagggatcgtgtccaaaagaaaaccttcacgaagtgggtaaataaacatctcattaaagctcaacgccacatttctgacttatatgaagatcttagagatggacataatctgataagtcttctcgaagtgctgtcaggcgactcgctccctcgggaaaaaggacggatgagatttcacaagctgcagaacgtgcagattgccctggattatctgaggcaccgtcaagtgaaactggtaaatattagaaacgacgatatcgccgatggcaatccaaaactcactttgggcctgatttggaccatcattctccattttcagattagtgacatacaggtgtccgggcagtctgaggacatgactgccaaagagaaacttcttctctggtctcagcgtatggtggaggggtaccaaggcctccgatgtgataacttcaccagctcatggagagacggacgactttttaacgccatcatccacagacataaaccacttctgattgacatgaacaaggtttaccgtcagaccaatctcgagaatttggaccaggccttttcggtcgccgagcgtgacctcggagttacacgactgctggatccagaggacgtggacgtgcctcagcccgatgagaagagtatcatcacatatgtgagctccctttacgatgcaatgcccagggtgcctgatgttcaggacggagtgagagcaaacgaactccaattgcgctggcaggagtatcgcgagctagtgctacttttactgcagtggatgagacatcacacggccgcttttgaagagaggcgctttccctctagttttgaggagatcgagatcctatggagccagttcttgaagtttaaagagatggagttaccagccaaagaagcagataagaaccgctctaaggggatttaccagtccctcgagggagccgtgcaggctgggcagctcaaggtgccccctggctaccatcccttggacgttgagaaagaatggggaaagttacatgtggctatacttgaaagagagaaacagctgcgctctgaatttgagcggctcgagtgtcttcagcgtattgtcaccaagcttcagatggaggccggtctatgtgaggagcagttaaaccaggctgatgcattactgcaatccgacgtgcgcctgcttgctgcaggtaaagtgcctcaacgcgctggtgaggtggagcgcgatctggacaaagcggacagtatgataagattgctctttaacgatgtgcagaccctaaaagacggacgccacccacagggagagcagatgtacagacgagtatacagactgcacgagaggctggtagcaatacgcaccgaatataacttgagattgaaagctggggtggcagccccagcaacacaggtggcacaggtgactctgcaaagcgtacagagacgccctgagctggaagactctacacttaggtacctccaggacctcctggcctgggtggaggagaaccagcacagagtggacggggcagagtggggagtggatctgccgtcagtggaggcacagctgggctcccatcgtggactccaccagagtattgaagaatttcgggcaaagatcgaacgcgctcggtcagacgagggccaactgtcccctgccactaggggcgcataccgtgactgtttaggtagactggatctccagtacgctaaactcctgaattccagtaaagccagactgcgatcccttgagagccttcacagcttcgtggcagctgcaaccaaggaattgatgtggctgaatgaaaaagaggaagaggaggtgggtttcgattggagcgacaggaacactaacatgaccgctaagaaggaatcttactctgccctaatgcgcgagttagagctcaaggaaaagaaaattaaagaactacaaaacgccggtgaccggctcttacgagaggatcaccctgcaagacctactgtagagtcattccaggctgcactgcagacacagtggagttggatgctgcaactttgctgctgtatcgaggctcaccttaaggagaatgccgcttactttcagttcttctcagatgtgcgagaggccgaagggcagcttcagaagctacaggaggcactgcggcgaaagtattcgtgtgacaggagtgccactgtaacacggttggaggacctcttgcaggacgcccaggatgagaaggaacagttaaatgagtacaagggtcatttgagcggccttgccaagcgagcaaaggccgttgttcagttgaagccaagacacccagcgcatcccatgcgaggacgccttccgctgctggccgtgtgtgattacaagcaggtagaggtaactgtgcacaaaggggatgagtgccagctcgtgggacccgcacagccaagccattggaaggtactgtcatcgagcgggagtgaggctgccgtcccgagcgtgtgcttcctggttccaccccctaaccaggaagcacaggaggcagtgaccagactcgaggcacagcaccaagccctggtaacactatggcaccagcttcacgtggacatgaaatccctgctagcttggcagtcccttcgcagagacgtacagctcatcagaagttggagtctggctaccttccgcaccttgaaaccagaagagcaaaggcaagccctgcacagtctggaactgcactaccaagccttcctccgggatagtcaagacgccggtggctttgggcctgaagatcgcctgatggcagaaagggagtatggatcttgcagtcaccattaccaacagcttctgcaaagcctcgagcagggagcccaggaagaatcaaggtgccagagatgcattagtgagctgaaagacatcaggctgcagctcgaggcttgcgagacgcgaactgtacatagacttcggctgcccctggacaaagagcccgcacgtgaatgcgcccaaagaatcgcagagcagcaaaaagcgcaggccgaagtggaagggctgggaaagggagtggcacggctgagtgcagaggcagaaaaggtgctggctttaccagagcccagtccagctgctcccaccctacgatccgagctggagctgactttaggtaagctagagcaggtgcgaagcctgagcgccatctatctggagaagctgaagactatctccctggttatccggggaactcagggcgcagaggaagtactaagggcccacgaggagcagctcaaggaggcacaggcagttcccgcaactctacccgagctcgaggccacaaaggcctccctcaagaagctcagagcacaggctgaggcccagcagcccaccttcgatgcactccgagacgagctgagaggcgctcaggaagtgggcgaacggctgcagcagcgccacggagaaagagacgtggaagtggagaggtggagggagcgagttgcgcaactgctcgaacggtggcaggccgtgctggctcagaccgacgtccggcagcgggagctcgaacagctcggacgacaactgagatactatcgcgaaagcgcggaccccctaggggcatggctgcaagacgccaggcgccgtcaggagcaaattcaggcaatgcctctggccgatagccaggctgtgcgtgagcagcttcgccaggagcaggctttgcttgaagaaatcgagagacatggagagaaggttgaggagtgccagcgctttgcaaaacagtacattaatgctatcaaagattatgagctccaactagtgacctataaggcccagcttgagcctgtggcatcaccagctaaaaaaccaaaggtccagtctggctctgaaagcgttatacaggagtatgtcgacttgcgaactcattactcggaactgaccactttgacatcccagtatatcaaattcattagtgagaccctgaggcggatggaggaggaagagagattggcagaacagcagcgggctgaggaacgggaacggttggcggaggttgaggccgctctggagaaacaaaggcagcttgcagaggcccatgcccaggctaaagctcaggccgagcgcgaggctaaggaactgcagcaacggatgcaggaagaggtcgtccggagggaagaggctgccgtggacgcacagcagcagaagcgctccatccaggaagagctgcagcagttgaggcagtccagtgaggctgaaatccaggccaaggcccgtcaggccgaagccgctgagaggagccgacttcgaatcgaggaggaaattcgggttgtacggctgcagttggaagccacagaacggcagaggggcggagccgagggagaacttcaggctctcagagcccgtgccgaggaggccgaggctcagaagcgccaggcccaagaggaagcagaacgcctcagacgtcaggtgcaggacgagagccagcgcaagcgccaggccgaggtggagcttgcgagcagggtcaaagccgaagccgaggcagccagagaaaaacaaagagccctccaggcgctggaagagctccgtcttcaggcagaggaggcagagcgacgcttgcggcaggctgaggtcgaaagggcacggcaggtgcaagtggcactcgagaccgcccagcgttctgccgaagccgagcttcagagcaagcgggcttccttcgctgagaagacagcacagctcgaaaggtcgctgcaagaggaacacgtggcggtagctcaactgcgagaggaagcagaacgccgagctcagcagcaggctgaggccgaaagggctagggaggaggctgagcgtgagctggagagatggcagctgaaggcaaacgaagccctccggctgcgccttcaggccgaggaagttgctcaacagaagtctcttgcccaggcggaggctgaaaagcaaaaagaggaagcagagcgagaggccagacgcagaggcaaagcagaggagcaggccgtacgacagagggagctggctgaacaagaactcgaaaaacagcgtcagctggcggaaggcacagcccagcagcgcctggctgctgagcaggagctcattaggctgagggcagaaacggaacagggcgaacagcagagacaactcctggaagaagaactggcaagactacagcgagaggcggctgccgctacgcagaagagacaagaactggaggctgagctggctaaggtgcgagccgagatggaggtgctgctcgcttccaaggctcgcgctgaggaagagagtaggagcacttctgagaagtctaagcagcggctagaggctgaagcgggtaggtttcgtgaactggccgaggaagcagccagattgcgagccctcgcggaggaggccaagcgacaaagacaattagctgaagaggatgcggcacgtcagcgcgctgaagcggaaagagttctcgctgagaagttggccgctataggggaggccaccaggttgaaaaccgaagccgagatcgctcttaaggagaaagaggctgaaaacgaaaggttacgcaggcttgccgaggacgaagcctttcagagaagaagactggaggaacaggcggcacagcacaaagccgatattgaggagcggctcgctcagctccggaaagcctcagattcagaattggaaagacaaaaaggattagtcgaagacacgctgagacagagaagacaggttgaagaggaaatccttgcgcttaaagcatctttcgagaaagctgcagccggtaaagccgagttagagctcgaactaggtcggatacgaagcaacgcagaagatacccttcgttcaaaagaacaagctgaactggaagccgctcgacagcgccaactggcggcagaagaggagcgacgcagacgtgaagccgaggagagggtgcaaaaaagtctcgccgctgaggaggaggccgcaaggcagcgcaaagctgccctggaagaggtggaacgcctgaaagccaaagtcgaggaagcccgacgcttgcgggaacgagccgaacaggaatctgccaggcagctccagttggcccaggaagcagcccagaaaaggctgcaggctgaagaaaaggctcatgcattcgcggttcagcagaaggagcaggagcttcaacagactctgcagcaggagcagtctgttctcgaccagctaaggggggaggcagaagcggcacgacgcgctgcagaagaggctgaagaagccagggtccaggccgaacgggaggcagcccagtcaaggaggcaggttgaggaggcagaacgactgaagcagagcgcagaagaacaggcacaggcacgcgctcaggcgcaggctgcagctgagaagctacgcaaggaggcagagcaggaagccgcacgtcgcgcacaggcagagcaggcggcactgagacagaaacaagccgctgatgcagaaatggagaaacacaagaagttcgccgagcagacgctgcgtcagaaggcgcaggtcgaacaggagctgaccaccctcaggcttcagctagaggagaccgaccaccagaagaacctcctagacgaggagttgcagcgattgaaggcagaggccacggaagcggcaaggcagcgctcacaagtggaggaggaactgttctctgtccgtgtgcagatggaggaactcagcaagctgaaagccaggatcgaagctgagaatagagctctaattttgcgggataaagacaacactcagcgtttcctacaggaagaggcggaaaagatgaagcaggtcgccgaggaggctgccaggttaagcgttgcagcacaggaggcggctaggctccgacagttggccgaagaagacctcgcgcagcaacgcgctcttgccgagaagatgcttaaggaaaagatgcaggccgtgcaggaagcgacaagactcaaggccgaggccgaactgctgcagcagcagaaagaactggcccaggagcaggcacgccgactacaggaagacaaagaacagatggcccagcagctagctgaagagacccagggatttcaaagaactctcgaagcggaacggcaacgccagttagaaatgtcagccgaggctgaacgcctgaagctgcgggtcgccgagatgagcagagcccaggcccgagcagaggaagatgcgcaacgtttcagaaagcaagccgaggaaataggcgaaaaactgcatcgcaccgagctagccactcaggaaaaggtcacgctggtacaaactctggaaatccagagacagcaaagcgatcacgatgcagagcgcctgcgcgaagcaattgctgagctcgagcgagagaaagagaaactgcagcaggaggccaaactgctgcaactaaaaagcgaagagatgcagaccgtccaacaggaacagctgctgcaggagacccaggcattgcagcagtctttccttagcgagaaagatagtctgcttcagcgagagcgttttatagagcaggagaaggccaaactggagcaattgtttcaggacgaggtggctaaagcccagcagctgagagaggaacagcagcgccaacaacagcagatggagcaagaacgacagcgcttggtggcttccatggaggaagcgaggcgcaggcagcacgaggccgaggagggagtacgcagaaaacaggaagagcttcaacagctagagcagcagcgacggcagcaggaggagctcttggccgaggaaaatcagaggcttcgcgagcagctgcagctgctcgaggaacaacaccgcgcagctctagcccacagcgaagaagtgacagcaagccaggtggccgcaactaagactctgccaaacggcagagacgcacttgacggccctgctgcagaggccgagccagagcactctttcgacggactccgaaggaaggtgtccgcccaaaggctgcaggaagcgggaatcctgtccgcagaggagctgcagcgactggcacagggccatacaacagtggacgaactcgcacgacgggaagatgtccgtcattacctgcagggtagaagctccattgcaggccttctgctgaaggccacaaacgaaaagttgagtgtgtacgcagctctgcagcggcaactcctctcccccggaaccgccctgatcctgctcgaagcccaagcggctagcggctttctccttgaccctgttcgaaatcggcgattgacggtcaatgaagccgtgaaagagggcgttgttgggccagaattgcatcataaactgttaagcgcagagcgcgcagttaccggatataaggacccctacactggacagcaaatctcactcttccaggcaatgcaaaaaggcttgattgtccgcgagcacggtatccgtcttctggaggcccagatcgcgacaggaggagtcatcgaccccgtgcacagtcaccgggtacctgtcgatgtggcctaccgcagaggatatttcgatgaggagatgaatagagtattggcggatccttcagatgacactaagggcttcttcgacccaaacactcatgaaaacctaacttatcttcaactcctggaaagatgtgtcgaggatccagaaactgggttgtgcctgctgcccctcaccgacaaagcagccaagggcggtgaactggtgtacactgactccgaggcacgcgacgtgttcgaaaaagcaaccgtgtctgccccttttggaaagtttcagggaaagactgtgacaatttgggaaataatcaactccgagtattttactgcggagcagcgcagagacctgttacgccagttccggaccggaagaataactgttgagaaaatcataaagatcattatcacagttgtggaggagcaggagcagaagggaaggttgtgtttcgagggtttgcgcagcctggtgcccgcagcagagctgcttgagagccgcgtgattgacagagagctgtaccagcagctccaaagaggcgaacgctctgtgcgtgatgtagccgaggttgacaccgtaaggagagctctgcgtggtgcaaacgttattgcaggtgtttggctcgaggaggccggacagaaacttagtatatacaacgccttgaagaaagatctccttccatccgacatggccgtggcgctcctggaggcgcaggccggtacagggcacatcatcgatccggcaacatcagcccgactgactgtagatgaagcagttcgagctggcttagtcggaccggaatttcatgagaagttgttgtctgccgaaaaggctgttacggggtacagagacccctacactggtcagtcagtgagcctgtttcaggctcttaagaaaggccttatccctcgcgaacaaggcctgcgtctccttgatgctcaactgagcaccggcggtatcgtggacccgtcgaaaagtcaccgagttcctcttgatgtagcatgtgcgcgtggttgcctggatgaggaaacaagtagggcactttcagctcctagggctgacgcaaaggcctattcggacccgtcaaccggcgagcctgctacctatggggagctgcagcagcgctgccgccctgatcagctgaccggtctgagtctgctgcccttatctgagaaggccgctcgggcacgacaggaagaattgtactctgaactgcaggcaagagagactttcgaaaagactcccgtggaagtacctgtggggggtttcaagggacgcactgtgacagtctgggagctgatatcttcagagtacttcacagccgagcaacgccaggaactcttgagacagtttaggactggaaaggtgactgttgaaaaagtgatcaagatcctgataaccatcgtggaagaagtcgaaactctgcgccaggagcgcttgagcttttctggcttaagagcgcctgtccccgcaagcgaacttctggctagcggcgtgctgagtcgggctcagttcgagcagctgaaggacggaaaaacgaccgtaaaggacctctcagaactgggcagtgtgcggaccctgctacaggggagcggatgtctcgccggtatctaccttgaggatactaaagagaaagtgtcaatttacgaggccatgcggcgtggcctgctgagagccacgactgctgccctcctcctagaggcccaggctgccactggcttccttgtggatcccgtcaggaaccagagactctatgtacatgaggctgtcaaagcgggtgtcgtggggcctgagttgcacgagcagctgctcagtgctgagaaagcagtgaccggctaccgagacccctactctgggtcaacgatcagcctgttccaggccatgcaaaaaggtttggtgctgcgtcagcatggcattcgcctgctggaagcacagattgctacgggaggcatcattgaccccgtacatagccatagggtgcccgtggacgttgcctatcaacgtggatatttcagtgaggagatgaaccgggtgctggcggacccttctgacgatacaaagggcttttttgatccaaatacccacgaaaacctgacttacagacaattgctcgaaaggtgcgtcgaagatccagagaccggattaaggctccttcctttgaaaggtgccgagaaagccgaggtagttgaaaccactcaggtgtacaccgaagaggagacgcgaagggcgttcgaggagacacagattgatatccctgggggtggctcccacgggggttccaccatgagcttatgggaggtaatgcagtccgacctgataccggaggagcagagggcacagctgatggccgactttcaagctggccgtgtaacaaaagagcgaatgatcataattatcattgaaattatcgagaagactgagataattcgccagcaaggccttgcctcctacgattacgtgcgccgaagactgacagccgaggacctatttgaggccaggatcatttccctcgaaacatacaatttgttaagagaaggtacaagatctctgcgagaggcactggaagccgaatcagcctggtgttacctgtatggcaccggctccgtggctggggtgtacctcccgggatctcgacagaccctgtccatctaccaggctctgaaaaagggattattgtcggccgaagtggctagattactgctcgaagctcaggccgctaccggcttcctcctggacccagtgaaaggcgaacgcttgacggtcgatgaggccgtgcggaaggggctggtgggaccagagctgcatgaccgattactctctgcagagagagcggtaactggatatcgggatccctatactgagcagacaattagtctgtttcaggccatgaagaaggagctaatccctactgaggaggctctgcgcttactagatgctcagctggctacgggcggaattgtcgaccctagacttgggttccacctcccattggaagtggcctaccaacgcggatacctgaataaggatacgcatgaccaactttccgagcctagcgaggtgagatcctacgtggacccatcaacagatgaaagactctcatatacccaactactcaggcgctgccgccgagacgacggtaccggacaactgctgctccctctgtccgacgcccgtaagctgaccttccgtggcctgcggaagcagatcacaatggaggaacttgtccggtctcaggtgatggatgaggctacagcacttcagttgcgcgagggcctaacctcaatcgaagaggtgacaaagaatctgcaaaagtttctggagggaaccagctgcatcgctggtgtgttcgtggatgctaccaaggaaagactgtctgtttatcaggcgatgaagaagggaatcatccgtccaggtaccgccttcgaactgttggaagcacaagctgcaactgggtatgtgattgatcctataaagggcctgaaactaactgtagaggaggcagtgcgaatgggaatagtgggccctgagttcaaagataagctgttgtccgcagaacgagctgtgacaggatataaggatccctatagtgggaaactgatctcccttttccaggccatgaagaagggtcttatcctgaaagaccatggcattagactgctggaggcacagattgcaacaggcggtattatcgacccagaggaatcacaccggcttcctgtcgaggtggcctacaaacggggactgttcgatgaagaaatgaatgagattctgactgacccaagtgatgacacaaaaggtttctttgatccgaacacagaagagaatctgacatacctgcagttaatggagcgttgtataactgatcctcagaccggactctgtctgttgccacttaaagaaaagaaacgcgagaggaaaactagttcaaagagttccgttcgcaaacgtagggtggttattgtcgatcctgagacaggaaaagaaatgtctgtttatgaggcctacagaaagggacttattgaccaccagacctatctggaacttagcgaacaggaatgtgaatgggaggaaataaccatctcctcctctgatggtgtagtcaagtctatgattattgatcggaggtccgggcgacagtatgacatcgacgacgccattgcaaagaatttgattgacaggtctgcactggatcagtaccgcgcagggactctgtcgatcaccgaatttgcggacatgctgtccggcaacgcagggggattccgctcccgaagctcctccgtcgggagctccagttcctatccgatctctcccgcagtctcccggacacagttggccagttggagtgaccctaccgaagaaacaggccctgtggcagggattctggataccgagacgctagagaaggtcagtatcactgaggctatgcacaggaatctggtagataatatcactggccaacgcctgctcgaagctcaggcctgcactggtggtataatagacccttccacgggggaacggtttcccgtcacagatgcagttaataagggcctggttgataagatcatggtcgatcgcatcaaccttgcccagaaggccttttgtggctttgaggaccccaggactaaaaccaagatgagcgccgcacaggcattgaaaaaaggctggctgtactatgaagcaggacagcggtttctcgaagttcagtacctgactgggggactgatcgagcctgacacacctgggcgagttccacttgacgaagcacttcagcggggtaccgttgatgccagaaccgctcagaagttgagagacgtcggtgcctatagtaagtatctgacctgtccaaagaccaaactaaaaatcagttacaaggatgcgctagatagatctatggtggaggaaggtacgggattgagattgttggaagctgctgcccagagcaccaaaggatattactcaccctattctgtttctggcagcggttctactgcagggagtaggacagggagtcggacaggcagccgcgctgggtcaagacgcggatccttcgacgcaacaggttctggttttagtatgacatttagttcaagtagttacagcagctccgggtatggcaggcgttacgcaagtggatcaagtgcctccctcggcggtcccgaatccgcggttgcttac

SEQ ID NO: 262182 - DNA, 13602 bp, Artificial Sequence
  derived and/or modified sequence
atggctgggccattacccgacgaacaagacttcatacaggcctatgaggaagtccgggagaaatacaaagatgagagggatcgggtccagaaaaagacattcacaaagtgggtgaataaacacctgattaaagctcaacggcatatcagcgatctgtacgaagacctgcgcgacggtcataacctcataagtctgcttgaggttctgagcggggattctcttccgagagagaagggccgaatgcgattccacaagcttcaaaatgttcagattgctttggactacctgagacataggcaggtgaagctagtcaacattcgcaatgacgatatcgccgatggaaaccctaaactcacactcggcctgatttggacaattatcctgcatttccaaattagcgatatccaggtgagtggtcagagtgaggatatgactgccaaagagaagcttctcctgtggtctcagcgaatggttgagggataccagggtctaaggtgcgataatttcacctcctcctggagagacgggaggctgtttaacgcgataatccacagacataaacccctgctcattgacatgaacaaggtctataggcaaacgaatctcgaaaatcttgatcaggctttttcagtggctgagagagaccttggggtgactcgcttgctcgacccagaagatgtggatgtgccacaacctgacgagaagagcattattacttatgtgtcctccttatatgacgcgatgccaagggtccctgatgtgcaagatggagttagggccaacgaactgcagctgaggtggcaagagtacagggaactcgttttgcttctcttgcagtggatgcggcatcataccgctgcatttgaggaaaggcgcttcccttcctcttttgaggagattgaaattttgtggtcccaatttctaaagtttaaagaaatggaactaccggctaaagaggcagacaagaatcggagcaaagggatctaccagtccctggaaggtgcagtacaggccggacagcttaaggttcctccaggctatcaccccctcgatgtggagaaggagtggggcaaattacatgtagcaatcctggagagagagaagcagctccgctccgagtttgaacggctggagtgtcttcagaggatcgtgaccaagcttcagatggaggcaggcctttgcgaagagcaactgaatcaagctgatgctttacttcagagcgacgtgagactcttggcagcaggaaaggtaccccagagagcaggcgaggtagagcgggacctggataaagcagactccatgattcggctgctgtttaacgacgtgcagactctgaaagacggccgtcacccacagggggagcagatgtatcggagagtgtaccgccttcatgagaggcttgttgctatccgtacagaatataatctgcgactaaaagccggagtcgccgcacccgcaacgcaggttgcccaggtaacgctccaaagcgtacaacgaaggccggagctcgaagattccaccctgcggtatctgcaggatctactggcctgggtcgaggagaaccaacacagagtcgatggcgctgaatggggcgtggacctgccgtctgtcgaggctcagctgggctcccacaggggtctacaccagagcatcgaggaatttcgggctaagatagagagagctaggagtgacgagggacagctctcccctgcaacacggggtgcatatagggattgtttggggagattggatctgcagtacgctaagttattgaactcgagtaaggctagactcaggagcttggaaagcctgcattccttcgtggctgctgccaccaaggagctcatgtggctgaatgagaaggaagaggaagaagtgggatttgactggtctgaccgcaacacaaacatgacagctaaaaaagaaagttattctgccctgatgagggaactcgagctcaaggagaagaagatcaaggaactccaaaacgcgggtgatcgattgttaagggaggatcatcctgccaggcctactgttgaaagctttcaggctgccttacaaacccagtggtcatggatgctacagttatgctgttgtatcgaagcccatctcaaagagaacgcagcatacttccagttttttagtgacgtgagagaagcagaggggcagctgcaaaagctccaagaagcgttacgtaggaagtattcatgcgaccggtcagctacagtgacccgtctggaggacctgctgcaggatgcccaggatgaaaaggagcagcttaacgagtataaaggacaccttagtggactggctaagagggctaaggccgtcgtgcagctcaagcctaggcaccccgctcacccgatgaggggaaggctgcctctcctggctgtctgcgattacaagcaggtcgaggtgacagtgcataagggcgatgagtgccagctggtagggcctgctcagcctagccactggaaggtcctatcatctagtggttccgaagctgctgttcccagtgtctgctttctcgtcccacccccaaaccaggaggcccaggaggcagtaactcgtttagaagcacagcaccaggccctggtcactctgtggcatcagctgcatgtcgacatgaagagtctcctggcctggcagagtctgcgaagagacgtccagctgatcaggagctggtccctggcaacctttagaacactgaaacctgaagagcaacgccaggccctgcattccctggaattgcattaccaggcttttctgcgggatagccaggatgcaggcggtttcgggcctgaggacaggctgatggccgaacgcgagtatgggagctgcagtcaccactaccaacagctgctgcagtcacttgagcagggtgcccaggaggagtcaaggtgccagaggtgcatcagcgagcttaaggacatccgtctgcagcttgaagcctgtgaaacacggaccgttcacagactccgccttcctctggataaggagcctgcccgagagtgtgctcaaagaatcgcggagcagcagaaggctcaagctgaagttgaaggactcggcaaaggagtggcacggctgtcggccgaggccgaaaaggttctggccctgcctgagcccagccctgcggcaccaaccctgaggtcagaactcgagcttaccctgggcaagctggaacaggtaagatctctcagtgctatttatttagaaaagcttaaaacaatatccctagtaatccgcggtactcagggagccgaggaggtgttaagggcgcacgaggaacagctaaaagaagcacaggccgttcccgctacactcccagaattagaggcaactaaggcctctctaaaaaaactgcgggctcaggccgaggctcagcagcccacctttgacgccctgagggatgagctgcggggagcccaggaggtgggcgagcggttgcaacaaagacacggggagcgcgatgtagaagtcgagagatggcgagagcgcgtggcccagctgttagagaggtggcaggcggtcctggcccagacagatgttcggcagagggaactggaacagcttggtcggcaactaagatattatcgggagtcagcggatccactgggagcctggctccaggatgcaaggcggcgacaggagcagatacaggcaatgccccttgctgattcccaggcagtaagggaacagctgcggcaggaacaggctctgctcgaggaaattgagcgccacggggaaaaagtcgaagagtgccagcgattcgccaagcagtatattaacgccatcaaggactacgaactacagcttgtcacatacaaggcgcaactggagccagttgcctcgcccgcaaaaaagcctaaagtccaatccggaagcgagtccgtcattcaggagtatgtggatctgcggacccactacagtgaactcacaacactgacatcacaatacataaagttcatatccgaaacactcaggaggatggaagaagaagagcggttagcagagcagcagagagccgaagaacgggaacggctggccgaggtagaagccgctttggaaaaacaaagacaattagccgaagcccatgcccaggccaaggctcaagctgagagggaggcaaaggagctgcagcagcggatgcaggaggaggtcgtgaggcgagaagaggccgcagtggatgcccaacaacaaaaacggtcgattcaggaggagttacagcaactaaggcaatcttccgaggcagagattcaagccaaagcacgacaagccgaagcagccgaaaggagccggctcaggatcgaggaagagattcgggtggtcaggctgcagttggaggccacagagcgccagagggggggagcggaaggggaattacaggccctacgggcacgcgctgaggaagccgaggcacagaagagacaggcccaggaagaagctgagcggcttcgcagacaggttcaggacgaatctcagcgcaaacgacaagcggaggtcgagctcgcatcgcgggtcaaggcagaggcggaagcagcacgtgagaagcaacgcgctctgcaggcactggaagagctgcgcctccaagctgaagaggcagaaaggagactgcggcaagccgaggtcgaacgggcaagacaggttcaagtagctttagagacggcgcaacggagcgctgaggcagagctgcagagcaagcgagcctctttcgctgaaaagaccgcccagctagagcggtcgctccaggaggaacacgtggccgtggcccagcttagagaagaagcagagagacgggctcagcagcaggccgaggccgagagagccagggaggaggctgaacgggagctcgagcggtggcagctgaaagccaacgaggcactgcgtttgaggctgcaggctgaagaagtggcccaacagaagtcattggcccaggccgaagccgaaaagcaaaaagaggaagcagagcgagaggcacgcagaagaggcaaggccgaagaacaggcggtcaggcagcgtgagcttgctgagcaggagctcgaaaagcagagacagctggcggaggggactgcacaacaaagactcgctgcggaacaggagctgatcaggctgagagcggaaaccgaacagggcgagcagcagagacagctgcttgaggaagagctcgcccgattacagagggaagctgccgctgcaacacagaagaggcaggagttagaagccgagcttgcgaaggtccgtgccgagatggaggtgctcttggccagtaaggcacgggctgaagaggagagccgttccaccagcgagaaatcaaaacagcgcctggaagccgaggccggaagatttagggaactcgctgaggaggctgcacggctcagggccctggccgaagaagccaagaggcaacggcagctggccgaagaggacgccgctcgtcagcgggctgaggccgagcgagtgctcgctgagaaactggccgctatcggagaggcaacacgactcaaaacagaggcagaaattgccttgaaagaaaaagaggctgaaaacgagcgcctgcgcaggctggcagaagatgaggccttccagagaagacggctggaagagcaggcagcccagcacaaggcggacatcgaagagagattggcccaattgcggaaggcctccgactcggaattggagcgtcaaaaaggcttagtggaggatacacttcgtcagcgcagacaggtggaggaggagatactggccctgaaggcatcgtttgagaaggccgcagctggaaaagcagaactggaactagagttgggcagaatccggagcaatgccgaggataccctccgcagtaaagaacaggccgaactcgaggccgctcggcaacgacagttagccgcagaggaagaaagacgaagacgggaggcggaggagcgcgtacagaaatccctggccgctgaggaggaagcagctcgccagaggaaagctgccctcgaggaggtcgagaggctgaaggccaaagttgaggaggccaggaggctgcgggagcgagctgagcaggagagcgccagacagctgcagctggcccaggaagcagctcaaaagcggcttcaagccgaggaaaaggcccacgctttcgccgtgcagcagaaggagcaggaactgcaacaaacactgcaacaagaacagagtgtcctggatcagctgcggggtgaggctgaggccgcacgaagggccgctgaggaagccgaggaggcacgcgttcaggcagagcgcgaggctgcccaaagcaggcgtcaggtggaggaagccgagcgcctcaaacagagtgctgaagaacaagcccaggcgcgagcacaggcccaggcagccgcagaaaaactccggaaagaagccgagcaagaagctgcccgtagagcccaggcagaacaggcagcactgaggcagaagcaagctgccgacgccgagatggagaagcataagaagtttgctgaacaaaccttgaggcagaaagcccaagtagaacaggaacttactactttgaggttgcaactcgaggaaacggatcaccagaaaaacctgctagacgaggagttacagagactgaaagctgaggccaccgaggcagctcggcaaaggagccaagtggaggaggagttattttccgtacgcgtacaaatggaggagctctccaagttgaaagctcgcatcgaagccgagaatcgggctcttattctcagagacaaagataatacccagcgtttcctgcaggaagaggccgagaaaatgaagcaagtggctgaggaggctgctcgtctttcagtcgctgcccaagaagcagcacgtctgcggcagcttgccgaagaagatctcgcccaacaacgggcactcgccgagaagatgctcaaggagaaaatgcaggcagtgcaggaggctacccgactgaaggcagaagctgagctcctccaacaacaaaaagagcttgcccaggagcaggccagaagactgcaggaagataaagagcagatggcacaacagctcgccgaggagacacaaggtttccagcggacgctcgaggctgagagacaaaggcagctcgaaatgtcagccgaggcggagagactcaagctcagagtggcagaaatgtcaagggcgcaggcgcgagccgaagaagacgcgcagcgatttaggaagcaggctgaggaaataggcgagaaacttcaccgcactgaacttgccacacaggagaaggtcaccttggtgcagaccctcgagattcagaggcagcagagcgatcatgatgccgagcggttgagagaggctattgccgagcttgagagggaaaaagagaagctccagcaagaagctaagcttctccagctgaaatctgaagaaatgcagactgtgcagcaggagcagttgctgcaggagacacaggccctccaacagagctttctttcagagaaagattcccttctgcagcgtgaaagatttattgagcaagaaaaggccaagctcgaacagctcttccaagacgaagtggccaaggcgcagcaattgcgggaagagcagcaacgccagcagcagcagatggaacaggaaaggcaacgactcgtggccagcatggaggaagctagaagaagacagcacgaggcagaagagggcgttcggagaaaacaggaggaactccagcaactcgaacagcagaggcgccagcaggaagagctcctcgcagaagaaaaccaacggttacgggagcagttacagctcctcgaggagcagcatcgtgctgcactggctcacagcgaggaagtgacagccagccaggtagcggcaaccaagacccttcctaacggccgtgacgccctggacgggcctgctgccgaggccgagccagaacacagtttcgacggactgaggagaaaggtgagcgcccagcgcctccaggaggcagggatactcagtgccgaagaattacaacggctggctcagggccacacgactgtggacgaactcgccagacgagaagatgttcgtcattatctgcaggggagatcctccattgctggactgctgctcaaagcaacaaatgaaaagctcagtgtgtacgcagccttgcaacggcagctcttaagtccgggaacagccctgatcctactcgaggcgcaagctgcttctggctttctgctggacccagtgaggaatcgtagactgaccgtgaacgaggccgtgaaagaaggtgtggtggggccagaattgcatcataaactactgagcgccgagcgtgccgttacagggtacaaggatccatacacaggacaacagatctcgctgtttcaggccatgcaaaaagggcttatagtacgggagcacggtatcaggttactggaagcacaaattgccaccggcggagtgatcgatcctgtgcactctcacagagttcctgtcgatgtggcataccgcagaggctatttcgacgaagaaatgaaccgggtgctggcagatccaagcgacgacacgaaaggcttctttgaccccaatacacatgaaaaccttacgtatctgcagctactggagagatgcgtagaggacccagagactggcctgtgcctcctgccgctcaccgacaaagctgctaagggaggggaacttgtttacacggatagcgaagcacgagacgtgttcgagaaagccaccgtatccgcacctttcggaaaattccagggcaaaaccgtcactatttgggaaattattaacagtgagtatttcacagccgagcagcgacgggacctactccggcagtttagaactgggaggattactgttgaaaagattattaagattattataaccgtggtggaggaacaagaacagaaggggcgtctctgcttcgaaggactcagatcactggttcccgcagctgagttgctcgagtccagagtaatagacagagaattatatcagcagctacagcggggagagcgttcagtgcgcgatgtcgcagaagttgacaccgtgcgccgagcactgaggggggcaaatgttattgccggagtttggctcgaggaagcaggtcagaaactttccatctacaatgcactgaaaaaggaccttctaccttctgacatggccgtggccctgttggaggcccaggccggaactggccacatcattgaccctgccaccagcgcccgtttgactgtggacgaagctgtacgggctgggctggttggtccagaatttcacgagaagcttctgtctgctgagaaggctgtcactggctatagggatccatacacgggccagagcgtgtcgctgttccaagccttgaaaaaggggttgatcccgcgtgagcaagggctgaggctgctcgacgcccaactaagcacaggagggattgtggatccatccaaatcacacagagtacccctggacgttgcctgtgctcggggttgtctggacgaggagacatctcgggctctctctgcacctagagccgatgccaaggcgtactccgatccttctacaggagaacccgcaacatacggagagttacagcaacgttgcagaccagaccagctgacaggcctatcgctgctgcccctgtctgaaaaggccgcaagggcccgtcaggaagaattgtattccgagcttcaggcacgcgagacttttgagaaaactcctgtggaagtgcccgtgggtggttttaaaggacgaactgtgaccgtgtgggaacttattagctctgagtattttaccgctgagcagcgccaggaactgctgcgacagtttcgcactggaaaggtgaccgtggaaaaggtgatcaagattctgatcacaatcgttgaggaggtcgaaaccctacggcaggagcggttgagtttttccggactccgcgctcctgtgccagcgtcagaactgttggcctcaggcgtactttcccgggcacagttcgagcagctgaaggatggcaaaacgacagtgaaggatcttagcgagctggggtcggtgagaacacttctacaaggatccggatgtcttgccggtatttacctggaagatacaaaggaaaaagtgagcatctatgaagccatgagaagaggcctactgcgggcaactacagctgcgctgctccttgaggcccaggccgctacaggcttcctggtcgatcccgtcagaaaccagagactttatgtccatgaggctgtgaaagctggagtggtcggtcctgaacttcacgagcagctgcttagtgccgaaaaagctgtcaccggataccgggacccttatagtggatccaccatatcactgttccaggccatgcagaaagggctggtgctccggcaacatggcattaggttacttgaggctcagatagcaactggcggtatcattgaccctgttcatagtcatcgggtacccgtggatgtggcttaccagcgcggatacttctctgaagaaatgaacagggttctggccgatccatccgacgacactaaggggttcttcgaccccaacacacacgaaaacctgacttatcggcagctcctagagcgatgtgttgaggatcccgaaactggcctccggctccttcctttaaaaggagccgagaaggcagaggtagtcgaaaccacacaggtttatacagaggaggaaactcgcagggcatttgaagagacccagatagatatccctggtggcggaagtcacggcggaagcaccatgtcgctgtgggaagttatgcagtcagacttgatccctgaagaacagcgcgcacaactcatggcggattttcaagcaggtcgcgtcacaaaggaacggatgatcatcattatcattgaaattatcgagaagactgagatcatccggcaacagggtctggcatcttacgattacgtgcgccgacgtctgacggccgaggacctgttcgaggctagaataatatctctggagacctacaacctgctaagagaaggaacacggtcgctcagagaagccctggaagccgaaagcgcttggtgttatctctatggcacgggatcagtggctggcgtctatctgccaggaagcagacagacactctcgatttatcaggcgctcaagaagggccttctttccgcagaagtagccagactgttgttggaggcccaggcggcaactggcttcttattggatccagtaaagggggaaagactgacagtggatgaggcggtgcggaagggtctggtgggaccagagctccatgaccggctcttgagcgcggagcgggctgtcacaggatatcgtgacccctatacagagcaaactatctctttgttccaagcaatgaaaaaggagctgatacccactgaggaagccctgcgtctgttggatgcccagcttgcaacagggggtattgttgatcctagacttgggttccatctacccctcgaagtggcctatcagcggggttacctgaacaaggatacccacgaccagcttagcgagccgtcggaggtgcgctcctatgtggaccctagtacagacgagaggctgtcatacacccaactgctgagacggtgcagacgcgacgacggcaccggtcagttgctcttgccgctcagcgacgccagaaagctcaccttccggggattgaggaaacagatcaccatggaagaattagttaggtcccaggtcatggacgaggctacagcgctgcagttaagagaaggtcttacgtcgattgaagaggtcacaaaaaaccttcagaagtttttagagggtactagctgtattgctggagtattcgtggacgccaccaaggaacgactcagcgtttaccaggctatgaaaaagggcatcatccgccctggcaccgccttcgagttgctggaggctcaggcagccacaggctatgttattgatcctatcaaaggactgaagcttactgtagaggaagctgtacgcatgggtattgttgggccagagttcaaggacaagctgctgagcgccgaaagagctgtgacggggtacaaagacccgtatagcgggaagttaattagcctctttcaagcaatgaaaaaaggcttgatacttaaggatcacgggatccgtttgctcgaggcacaaatcgccacaggcggtattatcgaccctgaggaatctcatcggctgccagtggaggtggcctacaagcggggactgttcgatgaggagatgaacgaaattcttacagatcccagcgacgataccaagggctttttcgatcctaacaccgaagaaaacttgacatacttgcagctcatggagcggtgcatcacagatccccaaaccggattgtgtcttctccctctgaaagaaaaaaagcgagaaagaaagacctcctctaagtcgtcggtacgcaagaggcgcgttgtgattgttgatccagaaactggcaaagagatgtccgtttatgaagcttataggaaaggtctgattgatcatcaaacctatctggagctttcagaacaggagtgcgagtgggaagagataaccatcagcagctctgatggggttgtgaaatccatgataatagatcgccgatcagggaggcaatatgatatcgacgacgccattgctaagaacctgattgacaggtctgctctggaccagtatcgggctggtaccctgagcattaccgaatttgcagatatgctctcaggcaacgctgggggattcaggtctcgttcttcctctgtgggatcttcttcatcttaccccatctcgcccgctgtctcaagaacccagcttgcttcctggtccgatccaaccgaggagactgggcctgtcgcaggaatcctggataccgagacccttgagaaagtgtctatcacagaggcaatgcatcgcaacctagttgataacatcacgggccagcgcctgctggaagcgcaggcttgtactggcggtataattgacccctcaaccggcgagcggttcccggtgactgacgccgttaacaagggtctggttgataagataatggttgaccggataaacctggcccagaaggctttttgtggttttgaagatcctaggactaagaccaagatgagtgccgctcaggccttgaaaaagggttggctatactacgaagccggacagagattcctggaggttcaatacctcacaggcggattaatcgaacctgatacgcccggtagagtgccgctggatgaagcgctccagcgtggcaccgtcgatgccagaactgcccagaagcttcgcgacgtgggggcttacagtaaatatttgacctgccccaaaacaaaactgaaaatctcatataaagacgcattggaccgaagtatggtggaggaggggaccggtctgaggttactggaggcagccgctcagtctactaaggggtattattcaccttactctgtgagtggttctggctctaccgctggctctaggacagggagcagaacaggctctcgagctggatcccgtcggggtagttttgatgcaaccggctcaggattcagcatgacatttagctcatcaagttacagttcttctggctacggcaggcgatacgcaagcggcagcagcgctagcctcgggggacccgagtccgctgtggcgtag

SEQ ID NO: 262183 - DNA, 13656 bp, Artificial Sequence
  derived and/or modified sequence
atgtctggggcaggcggagcctttgcctcacctagagaggtgctgctggaacgcccttgttggctcgatgggggatgtgagccagccaggcggggatatttgtaccagcagttatgctgcgtcgacgaaagagacagagtgcagaagaagaccttcaccaaatgggtaaacaaacacctaattaaagcccaacgccacataagcgacctctacgaggatcttcgggatggccacaatttaatcagcttgcttgaagtgctgagtggggactcgttaccccgagagaagggcaggatgcgattccacaaactgcagaacgtccagattgccctggactacctgcggcatcggcaggttaaattagtgaatattcgcaacgacgacattgccgacggcaaccccaagctcactctaggcctgatctggaccattatcctgcattttcagatctccgatattcaggtttcggggcagtccgaagacatgacagccaaggagaagctgttactgtggagtcaacgcatggtggaggggtaccagggcctgcgatgcgacaactttacctcttcatggagggacggcaggctgtttaacgccattatccatcgccataagcctctgcttatcgacatgaataaggtctacaggcagacaaacctggaaaacttggaccaggccttttccgtcgctgaaagagatctgggcgtgacacgactgctggaccccgaggatgtggacgtccctcaacctgacgaaaagagcattataacctacgtttcctctttgtatgacgcaatgcccagggtgcccgatgtgcaagatggagttagagctaatgaactgcagctccggtggcaggagtaccgcgaactcgtgttgctgctcctgcagtggatgaggcaccacactgctgcatttgaggaaagaagattccctagcagttttgaagagatcgagatcctctggtctcagttcctgaaattcaaagagatggagctcccagcaaaagaagccgacaaaaaccggagtaaggggatctaccagtccctggaaggagctgtccaagctggacagttgaaggtgcccccagggtatcatccccttgacgtcgagaaagaatggggaaagctgcacgtagctatccttgagagggagaagcaactgcgaagcgaattcgagaggctggaatgcctgcagcgtatagtgaccaagctgcaaatggaagccggactctgcgaagagcagctcaaccaggccgacgctttgctgcagtccgatgtgcgactattggccgcagggaaggttccacaaagagctggagaggttgaaagggatttggataaagcggactctatgattaggcttctttttaacgatgtccagaccttaaaggatggcaggcacccacaaggagagcagatgtataggagagtgtacaggttgcacgagagacttgtggcgattagaaccgaatataacttacggctgaaggctggggtcgcagccccagccacacaggtggctcaggtcacgctccagtcggtgcagcgacgtccagagttggaggattcaacacttcgatatctgcaagacctcttggcgtgggttgaggagaatcagcaccgcgtggatggcgcagaatggggggtcgacctgccatctgttgaggcacaactcggcagccaccggggactacaccagagtatcgaagagtttagggccaagatcgagcgtgcccgatctgatgagggacaattatcaccagcaacgcggggagcatatagggactgcttgggaaggctggatcttcagtatgctaaactgttgaacagttccaaggccaggctgcgcagcctcgagagtctgcactccttcgtggccgcagccactaaagaactgatgtggctgaacgagaaggaggaagaggaggttggatttgattggtctgaccgcaataccaacatgaccgctaagaaggagagctattccgctctgatgagagagctcgaacttaaagagaaaaaaattaaagagctgcagaacgccggagaccgcctgctccgtgaggaccaccctgcacggcctacggtcgaatcttttcaggcagcattgcagactcagtggagctggatgcttcagctttgctgctgtattgaagctcacctgaaggaaaacgccgcatatttccagttcttttcagacgtgagggaagccgaaggccagctccagaaattgcaggaggccttacggcgtaaatattcctgcgatcgcagtgcaacagttaccaggctggaggacttattgcaggacgcccaggatgagaaggaacagctgaatgagtataagggtcacttgtccggcctggccaaacgggctaaagctgtggtccaactcaaaccccgtcaccctgcgcatccaatgcgcggaaggctaccccttctggccgtatgcgattacaagcaagtggaggtcaccgtgcataaaggcgatgagtgccaactggtgggtcctgcccagccaagccactggaaagtgctatcttctagcggaagcgaggcagcggttccatccgtgtgcttcctggtccctcctccaaatcaagaggcccaggaggctgtcaccagattggaagcccaacaccaagccctggtcaccctctggcaccagctgcatgtggacatgaaatccttgttagcgtggcagtccttaaggagggacgttcagctcattcggtcgtggtcactggccacttttcggaccctcaagccagaggagcagcgacaggctctccactctctggagctccactaccaggctttccttagagattcacaagacgcgggaggcttcggaccagaagatcgacttatggccgagcgtgagtatggctcctgtagccaccattaccagcaactgcttcagagtttggagcagggggcacaggaagaatctcgctgccaaaggtgcattagtgagctgaaggacatacgcctgcagcttgaagcctgtgaaactcgcaccgtccaccgcctcagactgcctctagataaggagccagcccgagagtgtgctcaacgaatcgccgagcaacaaaaggcccaagccgaagtagaaggcctgggcaaaggagttgctcggctctccgccgaagcagaaaaagtgctggcgctcccagagccaagccctgccgcacctaccctccgctctgagctcgaactgaccctgggtaagcttgaacaggtacgatccctgagcgcaatctacctcgagaaactgaagacaatcagtctggtcatcaggggaacacagggggcagaagaagttctacgcgctcatgaggagcagctcaaagaagcccaggcagtccctgcaacacttcccgagctggaagcgacgaaggcctccctgaagaagctgagggctcaggctgaggctcagcagcccacattcgacgcactgcgcgacgagttgcgcggagcgcaggaggtgggcgaaagactgcagcaaaggcatggtgagcgggatgtcgaagtggaacggtggcgcgagcgcgtggctcaactgctggaacggtggcaggctgtattggctcaaactgacgtccggcaaagggagctggagcagttgggccgtcagctgcgctattacagagagtccgcagatcctcttggcgcttggctccaagacgcacggcgacgccaagagcagattcaagcaatgcctcttgcagattcgcaggcagttcgcgagcagctgcgacaggagcaagccttgttggaagaaatcgaaagacacggcgagaaagttgaagaatgtcagcgatttgcgaaacaatacatcaacgctattaaagattacgagctgcaactggtgacatacaaggcccagctagaacctgtggcctcccctgccaagaagcccaaggtacagtcagggagtgagagcgtgattcaagaatatgtcgatctcaggacccactattctgagctcaccaccctcacttcccagtacatcaagtttatatccgaaacactcaggaggatggaggaagaggaaagactagccgagcagcagcgcgctgaggagagggaacgcctggcggaggtggaggccgctctggagaaacagagacaactagctgaggcacacgctcaggcaaaagcccaggctgagcgcgaagctaaggagcttcagcagcgcatgcaagaagaagtggtacgcagggaagaggccgctgttgacgcacagcagcagaagagatctattcaagaagagctccagcaattaaggcagtcaagtgaagcagagatccaagctaaagccaggcaggccgaagcagcggaaaggtcaaggctgcgcatagaggaggagatacgggtagtgaggctgcagctggaggccactgagcggcagagaggcggtgccgagggcgaactccaagcactaagagcccgagcagaggaggcggaggcacaaaagagacaggcgcaggaggaggccgaacgactcaggaggcaggttcaggatgaatcccaaagaaaacgccaagccgaggtggaattagcctccagagtgaaggcagaggctgaagccgcacgggagaagcagagagccctgcaggctctggaggagctgcgtttacaagccgaagaggctgaaaggagactaaggcaggctgaagttgagagggctagacaggttcaggtggccttggaaactgcacagagatccgccgaagctgaattgcagagcaagcgggcttcgtttgccgagaagaccgcgcagctcgaacgctccctgcaagaagaacacgtggcggtagcccagctacgcgaggaagccgagcgcagagctcaacagcaagctgaggccgagcgggcacgcgaagaggctgagcgggaactcgaacggtggcagctgaaagctaacgaagccctgaggctgcggctgcaggccgaagaggtcgcacagcagaaaagccttgcccaagcagaagccgagaagcagaaggaggaggccgaaagggaagcccgtcggagaggcaaagcggaggagcaggcggtgcggcagagggaactagccgaacaagaactcgagaagcaaaggcagctggccgaaggcacagcgcagcaaaggctggcagcagagcaggagttgattaggctccgcgcagaaactgagcagggagagcagcagcgacaactgctggaggaggaacttgccagattacagcgggaggccgcagcagctactcaaaagagacaggaactggaggcggaactggccaaagtgcgggctgagatggaggtactgttggccagcaaggctcgcgcagaagaagagtcccggtccacctccgagaagtccaaacagcgactggaagccgaagccggtcggtttcgggagttggctgaggaagcagctagactgcgtgctctggctgaagaggccaagcgccagcggcagctcgcagaggaggacgcagcacgccagcgcgctgaggccgaaagggttctcgctgaaaaactggcagctatcggggaagccacacgcttgaagaccgaagctgagattgccctaaaagagaaagaggctgaaaatgagcgcctcaggagactggcagaggatgaggcattccagcgtcggagactggaggaacaggcagcccaacacaaggccgacatcgaggagagattagctcagttgcgcaaagcaagtgactctgaactggagcgccaaaaaggcctggttgaggatacactgagacagcgcagacaggttgaggaagaaattctcgctctgaaagctagctttgagaaagcggcagccggaaaggctgagctggaactagagctgggtaggatccggagtaatgctgaggacaccctgagatccaaggagcaggctgaactcgaggcagctcgtcaaaggcagctggccgcagaagaggaaaggcgccgtcgggaagccgaggagcgcgttcagaagagtctggcagcagaagaagaagccgcacgccaacggaaagcagcccttgaggaggttgaacggttgaaagcgaaggtggaggaggcacgccgtcttcgcgagcgtgccgagcaggagagtgcgaggcagctacagctcgcacaggaggctgctcaaaaacggcttcaggctgaagaaaaggcccacgcatttgctgtgcaacagaaggagcaggagctccagcaaaccctgcagcaagaacaatctgtgctcgatcaacttcgaggtgaagcggaggctgcgagaagggccgcagaggaggctgaggaagcccgtgtgcaggctgaacgtgaggcagcacagtccagaaggcaagtggaggaggccgagcggctaaaacagagcgctgaggagcaagcacaggccagagctcaggctcaggcggcagcagagaaactgcgtaaagaagccgagcaagaagctgcacggagagcccaggccgagcaggccgctcttaggcagaaacaggccgctgacgctgagatggagaaacataaaaaattcgcagagcaaactttacgccagaaggcacaggtagagcaagagctgaccacacttagattacagctcgaagagaccgaccaccaaaagaacctgctcgatgaagaactacagcggcttaaagcggaggcaaccgaggctgcacgacagcgatcgcaggttgaggaggaattgttcagcgtccgggtgcagatggaggaattgtctaagctaaaagccaggatcgaggccgagaatcgggctctgatcctccgagataaagataacacccagagatttctgcaggaagaagctgaaaaaatgaaacaggtcgccgaggaagcagccaggctgagcgtggccgctcaggaggcagcgcgactcaggcaactcgcagaagaagatctggcacaacagcgcgcactggcagagaagatgctgaaggaaaagatgcaggcagtccaggaagctactcgcctgaaggcggaggctgagctgctgcagcagcagaaagaattagcccaggagcaagctagaaggctacaggaggataaggagcagatggcccagcagttggcagaggagacgcaggggttccagcgtaccctcgaggctgagcgacagcgacagttggaaatgtcagcagaggcagagcgccttaaactacgcgtggccgaaatgagccgggctcaagcccgagccgaagaagacgctcagcgcttccgcaaacaggctgaggagatcggtgagaagctgcatagaaccgagttagccacccaggaaaaagtcacgctggtgcaaactctggaaatccaacgccagcagagcgaccatgacgccgaacggcttcgagaggcgatcgctgaattagaacgcgagaaagaaaagcttcagcaggaagccaagctgctgcaacttaaaagcgaagaaatgcagacagtacagcaggagcagctgttgcaagagacacaggcactgcaacagtcattcctgtccgagaaggattcactgctacagagggaaaggttcatcgagcaggagaaggcaaaacttgaacagctcttccaggacgaagtagccaaggcgcagcaactgcgggaggagcaacagcgacaacagcagcagatggagcaggagagacaacgattagtcgcatcaatggaagaggctcggagaaggcagcacgaggccgaggaaggcgtccggagaaagcaggaagaattgcaacagttggaacagcaaagacggcagcaggaagaactactcgcagaagaaaatcagaggctgagggaacagttgcagctgctcgaggagcagcaccgtgccgcactggctcatagcgaggaggttaccgcctcgcaggtcgccgctaccaaaactctgcccaacgggagagatgctttggatggccctgccgcagaagcagagcccgagcactccttcgacggtctccgtcggaaagtgagtgctcagaggcttcaagaagctggaatcctctcggcagaagagctgcagagactggcacaaggccacaccacagtggacgagttggctcgccgagaagacgtacgccactacctacagggccgtagtagcatcgcaggactcttgctcaaagcaacgaatgagaaactatcggtctatgcagctctgcagcgccagctcctgtctcctggaaccgctttgattttactcgaggcccaagcagcttctggcttcctcttggatcccgtgcgcaacagaagactgaccgtgaatgaggcagtgaaggaaggcgtggtgggtcctgaattacaccacaagttgctgtccgcggaacgggcagtgaccgggtataaagatccgtatactggccagcagatttctctgttccaggccatgcagaagggcctcatcgtcagggaacatggaattcgacttctagaagcccagatagctactgggggtgtgatagaccccgtccacagccaccgggtcccagtcgatgttgcttatcgtcggggttactttgatgaggaaatgaacagggtgctcgctgatcctagcgatgacacaaagggtttctttgatcccaacacacacgagaacctgacatatctgcagttattggaacggtgcgttgaggaccctgagactggcctctgcttactgcccctgaccgacaaggcagctaaaggtggcgaactggtctacacagactctgaagctagggatgtgtttgaaaaggccacagtctccgctccctttggcaaattccaaggcaagactgttacgatctgggagattattaatagcgagtattttacagccgaacaaaggcgcgacctgcttagacagtttcgaactggccgtattactgtggaaaagatcataaagatcatcatcactgtggtggaggaacaagagcagaaaggccgactttgcttcgaaggactccgatcactggtccctgccgcagaactgctggagagccgggtcatcgatagggaactctatcagcagctgcagcgcggtgagcgctcagtgcgagacgtagccgaagtggacaccgtaagacgggctctccgcggtgcaaacgtgatcgccggagtgtggctggaggaagcagggcaaaagctttcaatctataatgccctgaagaaggatctgctcccgagcgatatggctgtcgccctcttggaggctcaggctggaacaggacatattattgaccctgctactagcgccagattaacagtcgatgaagccgtccgcgctggactcgtggggccagaattccacgagaaactgcttagcgctgaaaaagctgtgacgggatacagagatccctatactggccaaagtgtgtccctgtttcaggcactcaagaaagggctcattcccagagaacagggcctaaggctgcttgacgcacagctgagtactggcggaatcgtcgacccttctaagtctcacagggtgccactggatgtggcctgtgcacggggatgcctcgatgaggagacctctagagccctgtcggccccacgggcagacgccaaggcttactcggatccatcaacaggagaaccagctacgtatggtgagttgcaacagagatgtcggccagaccagttgactggtctgtccctgctgcccctgagcgaaaaagcagctagagcacgacaggaagagctctattccgaactacaggcccgtgaaacgttcgagaaaacccccgtggaagtgcccgttgggggatttaaaggcaggaccgtcacagtgtgggagcttatttcctcagaatattttaccgcagagcagcggcaggagctgctgcgtcagttccgcaccggtaaagttactgttgagaaggtaatcaaaattctgattaccattgtggaagaggtagagacactgcgccaggagagactgagcttcagcggactaagggcgccagtgcccgcatcagaattgctggcctctggcgtgctgagtagagctcagttcgagcagcttaaagatggaaagactacagtgaaggatctcagtgagctgggttccgttcgcactcttctccagggatcaggctgcctcgctgggatctacctcgaagacactaaggagaaggtgagcatatacgaggcgatgcgacgcggacttctcagagctacaactgcggctctgctcctcgaggcgcaggccgcaaccgggttcctggtggatccggtccgaaaccaacgcttgtacgtccacgaggccgttaaagctggggtcgtgggccctgagctacacgagcagcttttgtctgccgaaaaggctgtgaccggctatagagatccttactccggcagtactatcagtctgttccaggcgatgcaaaagggcctcgtcctgaggcagcacgggatcagactgctagaggctcaaattgccaccggaggaatcatcgatcctgtgcactcacacagggtgcccgtcgacgtggcttaccagcgagggtacttttccgaagagatgaatcgcgtcttggccgatccctcagacgacactaaagggtttttcgatcccaacacacacgaaaacttaacctatcgccaactactagagcggtgtgttgaggacccagagactggtctgagactgctgcccctaaagggcgcagagaaggcagaagtcgttgagaccactcaggtgtacaccgaagaggaaacccggcgtgcattcgaggagactcaaattgatatacccggtggtggttctcacggaggctctaccatgtccctatgggaagtgatgcagagcgacttgatacctgaggaacaacgcgctcagttgatggccgactttcaagccggtagagtcacaaaagagcggatgattataattattattgagatcattgaaaaaaccgagatcatacgccaacaggggctcgctagttatgattacgtcaggcgcagactcactgctgaggatctgttcgaggccaggattatcagtctggagacttacaacctgctgcgcgaagggaccaggtctctgcgcgaagcccttgaggcggagagtgcctggtgctacctctacggaacgggttctgtggccggtgtgtacctaccaggcagtagacagacattgtcaatctatcaggcgctcaagaagggcttgctatcagcagaggtggctcggctgctgttggaggctcaagcagccaccggattcctgctcgatcccgtgaagggagaacggctaactgtggatgaggcggtacgcaaagggttggtgggacctgagttgcatgatcggttgctgtcagccgaacgagccgtgactggatacagagatccttatacagaacaaacgattagcctttttcaggctatgaagaaagagctgatacccactgaagaagctctgcgactgttggatgcccagttagctactgggggtatcgtggatccaaggctgggcttccacctgccacttgaggttgcttatcagcgcggttaccttaataaggacacccacgaccagctttcagagcccagcgaagttcgctcatatgtagatccatccacggacgagagactgtcctatacgcagctgctgcgcagatgccgacgggatgacggaacaggccagttgctcctcccgctatccgatgcgagaaagctgacctttcgcggtctgcgcaagcaaattacaatggaagagctggttagatcgcaagttatggatgaggccacggctttgcaactgcgcgagggactaacctccatagaagaagtaacaaaaaatctgcaaaaattcttggaagggacctcctgcattgcaggcgtttttgtggatgctaccaaggaacgtctgtccgtttaccaagccatgaaaaagggcatcatccggcctggaactgctttcgagctgcttgaggctcaggccgctacggggtacgtcatagatcccattaaaggcctaaagcttacagtggaagaggccgtgaggatgggcatcgtaggcccagagtttaaggataagcttctgtccgccgagcgcgctgttacaggctacaaggacccttatagtggcaagctgattagcctcttccaggctatgaaaaagggcctgatcctcaaggatcacggaatccggcttctagaggcccaaatcgctactgggggaataatagaccctgaagagtcccatcgcctgccagttgaagtagcctataagaggggcctgttcgatgaggaaatgaatgagatcctgaccgacccatcagatgatacaaaaggattcttcgatccgaatactgaagaaaacctgacttatcttcagttaatggaaagatgcatcacagacccgcaaacgggactgtgtttactgccacttaaggagaagaaaagggagcggaaaacatcctcaaaaagctccgtgcggaagaggagagtcgtaatagtcgaccccgagaccggaaaggaaatgagtgtgtacgaagcctacagaaagggattaatcgatcaccagacctacctggagttgtctgaacaggaatgtgaatgggaggagattaccatctccagttctgacggcgttgtgaagtctatgattatcgatagacgaagtgggcgtcagtacgacatcgatgacgccatcgcaaagaacttaatcgatcgctcagcactagatcaatatcgggcagggaccttaagcataaccgaatttgctgacatgctctcaggaaatgctgggggattcagatcgagaagcagctcagtgggttcctcctcatcttaccccatctcccccgcagtcagtagaacccagctcgcctcctggtcagacccaactgaggagacgggccctgtcgccggtatcttggatactgaaacccttgagaaggtgtctattactgaagccatgcatcggaatctggttgataacattaccggccagcggcttctcgaggctcaagcttgcacagggggtattattgacccgtctaccggggagcgttttccggtgacagacgccgttaataaaggcttggtcgataagatcatggtggatagaatcaacctcgcccagaaggctttctgtggatttgaggatccccgtaccaaaaccaagatgtcggcggctcaggcgcttaagaaaggatggctctactacgaggctgggcagcgatttctcgaagtacaatacctgaccggtggcctaattgaacctgacacccccggtcgcgtaccattggatgaggccctccaacgcggaactgtcgatgcacgcacagcccagaaactgcgtgacgtgggtgcttattctaagtacctcacttgccctaagaccaagctgaaaatctcttacaaggacgctttggatagaagcatggtggaggagggcaccggactgcggttgctggaggctgctgctcaaagcacaaaagggtattattctccatacagtgtgagcgggtccggttctacagctggctccagaacggggagcagaaccggaagtcgggctggaagtaggcggggatcttttgacgccacgggatctggcttctctatgacattttcctcgtcctcctacagcagctctggatacgggcgtcgctatgcatccggaagttcagcttccttaggaggccctgaatctgcagtggcttag

SEQ ID NO: 262184 - DNA, 13548 bp, Artificial Sequence
  derived and/or modified sequence
atgaagattgtgcccgacgagcgggatcgagtccagaagaagactttcaccaagtgggtcaacaaacatctaattaaggcacagcgtcacatcagcgacctctacgaagacctccgtgacgggcacaatctgattagcttattggaagtcctgtccggcgattcactgccaagagaaaaaggtcggatgagatttcacaaattgcaaaacgttcaaatcgccctcgactatttgaggcatcggcaggttaagctggtgaatatccgcaatgacgacatcgcagacgggaacccaaagctgacactgggtctgatctggactattatcctgcattttcagatctcagatatccaggtgtccgggcaatcagaagatatgacagccaaagagaagttattgctgtggagccagagaatggtcgaaggctaccaggggctcagatgcgataattttacaagttcctggagagatggcagacttttcaacgcgattattcatagacataaacctttacttatcgatatgaacaaagtctatcggcaaacgaacttagaaaatctggaccaggccttctcagtggccgagcgggacttgggagtgacacgtctactcgacccggaagacgttgacgtgcctcagcctgatgagaaaagtatcataacctacgtctcctcgctgtacgacgctatgccacgcgtcccagatgtgcaggacggagtgcgcgcaaacgagctccagctacggtggcaggaatacagggagctggtgctcttactgctgcagtggatgagacaccacactgctgcattcgaggagaggaggtttccatctagctttgaagagatcgaaattctctggagccaatttctcaagttcaaggaaatggagctgcctgcaaaggaagccgacaagaatcgctcaaaggggatctatcagtctctggaaggcgctgtccaggcaggccagcttaaagtgccaccgggttatcatccgctggatgtggagaaagagtggggaaagctgcatgttgctatcttggaacgcgagaaacaactgcgatccgagttcgaacgcctggaatgcctgcaacgaatcgtaaccaaattgcaaatggaggccggactgtgtgaggagcagctcaaccaggccgacgcattgttgcaatccgatgtcagattactcgctgcaggcaaagtgccacaacgcgcaggcgaagtggaacgagacctggataaggcggacagtatgatccgcctcctgtttaacgatgtgcagacattaaaggacggaaggcatccccagggtgagcagatgtacaggcgcgtgtaccgactgcatgagagattagtggcaatccggaccgagtacaacctgcggctgaaggcgggagtcgctgcaccggcaacgcaggttgcacaggtcacccttcaatccgtacagcggaggcccgagctcgaggatagtacgttgcggtatctgcaggacctgctggcttgggttgaggaaaaccagcaccgagtggacggagcggagtggggcgtggatttaccttcggtggaggcacagctggggtcccacagaggactgcatcagtctatcgaggagttcagagcaaaaattgagagggcaaggagtgacgagggtcaactctcacctgcaacccgcggagcataccgcgattgcctgggtagacttgacctgcagtacgccaagctgctgaactccagtaaagctcggttgagatccttggaaagtctacattccttcgttgcggcagcaacaaaggaactcatgtggctcaatgagaaagaggaggaagaagtcggatttgactggagcgaccgtaacaccaatatgaccgccaaaaaggaaagttactctgcgctcatgagagaactcgagctaaaggaaaaaaagattaaggagctacagaacgcaggcgaccgcctgctgcgtgaggaccacccagcaagacccacagtagaatcctttcaggccgctcttcagacccagtggtcatggatgcttcagctgtgttgctgcattgaagcacacctgaaagagaatgccgcttatttccagttcttttcagatgtgcgtgaagctgagggacagcttcagaaactccaggaggccctcagacgaaaatatagctgcgaccgaagtgctacagtgaccaggttggaggatctccttcaggatgcccaggacgagaaagaacagttgaacgaatataagggccacctgagtggcttagctaagcgagctaaggccgtagtgcagctgaaaccccgtcacccagcccaccccatgcggggacgacttcctctgctggctgtgtgtgactataaacaagtggaggtgactgtccacaaaggcgatgaatgtcagttggtcggtccggctcagccaagccattggaaagtcctctctagctccggctcagaagccgcagttcccagcgtgtgcttcttagtccccccacccaatcaggaggctcaagaagcggttaccagactcgaggcccaacatcaggctctcgtgactctatggcatcagctccacgtggacatgaaatcactgcttgcatggcagagcctacgcagagatgtgcaattgatcaggagctggtctctggctacgttcaggactctaaagcctgaagagcagcggcaagctctgcatagcttagagctccactatcaggccttcctgcgcgattcacaggatgctggagggtttggcccagaggatagactgatggcagaacgagagtacggatcctgttcacaccactaccagcagctcctgcaatctctcgagcagggcgcacaagaagagagcagatgccaacgatgtatatccgagctcaaagatatcaggctgcagctcgaggcctgtgaaacccgcacagtccatcgactccgcctgccattggataaggagccagctagagaatgtgctcaacgaatcgccgagcaacagaaggcccaggcggaagttgaaggcctgggaaagggcgtcgcacgactcagcgcagaggccgaaaaggtccttgctctcccagagccatctcccgctgcacctaccctgcgcagcgagctggaactaacactgggcaaactggaacaggtcagaagcctgtcagccatatacctggagaagctcaagaccatttccctggtgatcagagggacccagggcgctgaggaggtactccgagctcacgaggagcagctgaaagaagcccaagccgttccagctactctcccagagttggaggccacaaaggcaagtttgaagaagctgcgtgcccaggctgaagcccagcagccaacattcgacgccttgcgagacgagctccgtggcgctcaggaggtgggcgagcgtctgcagcaacgtcacggtgaacgggatgtggaagtcgaaagatggcgtgagagggtggcccagctcctagagcggtggcaggcagttcttgcccaaactgacgtccgccaacgggaattggagcagctcggacgccagctgaggtattacagagagagcgctgacccactgggagcatggttgcaagacgctagaagacgtcaggagcagatacaagcgatgccgctcgccgattcacaggccgtaagggagcagctgcgtcaggagcaggcactgcttgaagaaattgaaaggcacggcgaaaaagtagaagaatgccaacggttcgccaaacaatacatcaacgcaatcaaagattacgagctccagctggtgacctacaaggcccagctcgagcccgtcgcctcgccagccaagaaacctaaggtgcagtccggctctgagagcgtgattcaggagtacgtagatctgcgaactcattattctgagttgacaactctaacttctcagtacatcaaattcatttccgagacactcaggcgtatggaggaggaggaacggctggctgaacagcaaagagccgaggaacgcgagcggctggctgaagttgaagctgctcttgaaaaacagaggcagctggccgaggcccacgctcaggctaaggcgcaagcagaaagggaagcgaaagagctccaacagagaatgcaggaagaggtcgttcgcagagaagaagccgctgtcgatgcccaacagcagaagaggagtatccaggaagaactccagcagctgaggcagagctcagaagccgagattcaggctaaggcacgccaagctgaggccgctgaaagatctcggctccgaattgaggaagaaattagagtggtaagattgcagctggaggctacagagcggcaaagaggaggggctgagggcgagctccaagcactgcgagcaagagccgaagaagccgaggcacagaagcgacaagcgcaggaagaagctgaacgactccggcgtcaggtccaggacgagtctcagagaaagagacaggcggaggtggagctggccagcagggtgaaagcagaagctgaggctgctcgggaaaaacagagggcgctccaggctctggaggagctgagactccaagccgaggaagccgagaggcggcttcggcaggccgaggtggagcgagccaggcaggtccaagttgcgctggagaccgctcagcggagcgcagaggcagagctgcaatctaaacgggcatcttttgctgagaaaactgcgcaactggaaaggtctctgcaagaggaacacgtcgcagtcgcccaactgcgtgaggaggccgaacgaagggctcaacagcaggctgaggcggagagggccagggaggaagccgagagagaactggagcgttggcagctgaaggctaatgaagcactgcgcctcagactgcaggccgaggaagtggctcagcagaagtctctggcccaggccgaagccgagaagcaaaaggaagaggcagagagagaggccagacgcagaggaaaggcagaggaacaggcagtgaggcagagagagctggcggaacaagaactcgaaaagcaaagacaattggcagaaggcactgcacagcaacggcttgcggctgagcaggagctcatccgcctgagggctgagaccgaacaaggagagcagcagaggcaattgttggaagaagaattggctcggttgcaaagggaagcagccgctgctacccagaaaaggcaggagctggaagctgagctggctaaggtgagggctgaaatggaggtgctcctagcctccaaagcgagggccgaggaggaaagtaggtccacgtcagagaagagcaagcagcgactggaggctgaggctggccgtttcagagagcttgcagaggaggctgcaagacttcgcgctctggcagaggaagctaaaaggcaacgacagctggccgaggaagacgctgcacggcaacgagcggaggcagagcgagtcctcgctgagaagctggctgctatcggggaggctacccggctgaagaccgaggccgagatcgccctcaaagagaaagaagccgaaaacgaaagactccgccgtctcgcagaggacgaagcctttcagcgtcgtaggttggaggagcaggccgctcaacacaaagcagatatagaagagcgcttggcacagctgagaaaggccagcgacagtgagcttgagcgccaaaaggggctcgtcgaagacaccctccgacaaaggcgacaggtggaggaggagatcctggcactaaaagcctccttcgagaaggctgctgcaggcaaggctgaactggagctggagctgggcaggatcaggtctaacgctgaggataccctgcgaagcaaagaacaggcagagctggaggccgctaggcagcgccaactcgctgccgaagaagagagacgccgacgagaagctgaggaacgcgtgcagaagagcctcgccgctgaggaggaggctgctaggcagaggaaggcagcgctggaggaggtggagcgtctaaaggcaaaggtcgaagaagcaaggcgtttgagggaacgggcagagcaggaaagcgcaaggcagctgcaactggcacaggaggccgctcagaagagacttcaggcagaggaaaaggctcatgcctttgcagtacaacagaaagaacaggaactgcaacaaaccttacagcaagaacaaagtgtgctcgatcagctcaggggggaggctgaagctgctagaagggccgcagaggaggccgaggaagcacgagttcaggcagaacgcgaggctgcccagtctcgaagacaggttgaggaggccgagcgtttgaagcagagcgctgaagaacaagcccaggccagggcgcaggctcaggccgcagccgaaaagttgagaaaagaggctgagcaagaagctgctcggcgtgctcaggccgagcaggcagccctgaggcagaagcaggccgctgatgctgagatggagaagcacaagaaattcgcagagcagactctccggcagaaggcccaagttgagcaggagctcacaacactgaggctgcagctggaggaaacagatcaccagaaaaacctgctcgacgaggagttgcagcggcttaaagcagaagctaccgaggcagcgcgtcagcgctcacaggtggaggaggaactgttttcagtgcgtgtgcaaatggaggaacttagtaaactgaaggctcggatcgaagcagagaatcgagctctgatccttagggacaaagacaacacccagaggttcctacaagaggaggccgaaaaaatgaagcaggtggctgaggaagccgcacgcctgagcgtggctgcccaggaggccgcaagactcagacagttggccgaggaggacctggcgcaacagcgggcactcgctgagaagatgctgaaagagaagatgcaagccgtgcaggaggcaacacgcttaaaggcagaggctgagcttcttcagcagcagaaggaactggcccaggagcaggccagacgacttcaggaagataaagagcagatggcgcagcagctagccgaagagacacagggattccagcgcacgctggaggcagaaaggcagcgccagctggaaatgtctgccgaggcagagcgcctgaagctgcgggtcgcagaaatgtcccgagcacaggctcgagccgaagaggatgcccaacgattcagaaagcaggcggaagagatcggtgaaaaactccatagaacagagctggccactcaagaaaaagttacactcgtgcagaccttggagatccagagacaacagtccgatcatgacgccgaacgcttgagggaagccatcgccgagctcgaacgagagaaagaaaagctccagcaagaggcaaagcttctgcaactcaaaagtgaagaaatgcagactgtccagcaggagcagttactccaggaaacccaggctctgcaacaaagtttcctttctgagaaggattctcttttacaaagagaaagatttatcgaacaggaaaaggccaagctggagcaactcttccaggatgaggttgccaaagctcagcagctaagggaggagcagcagcgccagcagcagcaaatggaacaggagcgtcagcgcctagtcgcaagcatggaggaggccagacgacggcagcacgaggcggaagagggtgtgaggcggaagcaggaagagctacagcaactggagcagcagaggaggcagcaagaggaacttctggctgaggagaaccagagactcagagaacaattgcaattgcttgaggagcagcacagggctgcgctcgcgcatagcgaggaggttactgcctcccaggttgctgctaccaaaacactgcctaacggaagagacgcactggatgggccagccgctgaagccgagccggaacattcctttgacggcctgcgccgaaaagtatctgcccagcggctgcaggaagcagggatcctgagtgccgaagaactgcagaggctcgcccaaggtcacaccactgttgacgagctcgcacggcgagaagatgtgcgccattacctacaggggaggtctagcattgccggactgcttctaaaggccaccaacgagaaattgtccgtttacgccgcactgcagcgtcagctgctgtccccaggaactgcacttattctcctagaagctcaggcagcatcgggatttttgcttgaccctgtgagaaatcgtcgcctgacagtgaacgaggccgtgaaagaaggcgtggtcggaccagagctccaccacaaactgcttagtgccgaaagagctgtgaccggatataaggatccttacacgggtcagcagataagcctgtttcaagctatgcagaaggggttaatagtgcgagagcacggaatcaggttgctggaagctcagattgccaccgggggagtgatcgatccggtgcattcacacagagtccccgttgacgtggcataccgaagaggttattttgacgaggagatgaatcgcgtgctggctgacccctccgatgatacaaaaggcttttttgaccctaacacccacgaaaatctaacatacctccaactgctggagagatgtgtcgaggaccccgaaaccggactctgcttgctaccgttgaccgacaaggctgcaaaaggcggtgagcttgtctataccgatagcgaggctagagacgtctttgagaaagccactgtgagtgccccattcgggaagttccagggtaagaccgtgacaatctgggagattataaactccgagtacttcaccgccgagcaacgaagagacttgttgcgacaattccggacaggccgaataaccgtggaaaaaattattaagataattatcacagtggtcgaagaacaggaacagaaaggacgcctgtgtttcgaaggccttaggagcctggttcccgctgctgagctcttagaaagcagggtgattgaccgtgaattatatcagcagctgcagcggggtgagaggagcgtaagggacgtagctgaagtagacactgtccggagagctctgagaggagccaacgtgattgccggagtgtggctggaagaagctggacaaaaactctctatctataacgccctaaagaaagacctcctaccatccgacatggcagtcgcacttctcgaggcccaagcaggcactggccacatcattgatcctgccacttccgctagactgaccgtggacgaggcggtgagagccggtctggtgggacctgaatttcacgagaagctcctcagcgccgaaaaagccgttaccgggtacagggatccatacactggacaaagtgtctccctgtttcaggcactgaaaaaagggctgatacccagggaacagggcctgaggctgctggatgcccaactctccactggagggattgtcgatccctccaaatcccatagggtgccactcgacgtagcttgtgctcgtgggtgtctggacgaagagaccagtcgcgcattgtccgccccacgggctgacgcaaaagcctactccgacccaagtaccggggaaccggcaacctacggggagctgcagcaacgctgtcgtcccgatcagctcacaggcttaagcctccttccgttaagtgagaaggccgctcgggcacggcaggaagagttgtattcagagttgcaggctcgggaaaccttcgagaagacccctgtcgaggtccccgtcggcggtttcaaaggcaggactgttacagtgtgggaactgatcagcagtgagtattttaccgccgaacagaggcaagaactgctgcgccagtttcggacagggaaggtgacagtggagaaggtgattaagattctcattacgatcgtggaggaagtggaaaccctccggcaggagcgtttgtccttctccggccttagagcgccagtgcccgcttcggagttgttggcaagcggagtcctcagccgcgctcagttcgaacaactcaaggacggcaaaactaccgtaaaggatctttccgagctgggttccgtcaggacgctgttacaaggcagcggctgccttgcaggtatctacctggaggacaccaaggagaaagtctccatctatgaggcgatgcgtagggggctcctgcgtgccaccactgctgctctcttgctcgaggcccaagccgctacaggatttctggtcgaccccgttagaaatcaaaggctgtacgtccatgaggccgtgaaagctggggtggttgggccagaactgcacgaacagctcctgagtgcggagaaggccgtgactggctaccgcgatccttactccgggagcactatttctctctttcaggcaatgcagaagggactggtcctgaggcagcacgggatcaggctgcttgaggcccagatcgcaaccggtggtattatagatccggtccattcacatagggtgcctgttgacgtggcctaccagcggggatatttttctgaagagatgaatcgagttctggccgacccatctgacgatactaaaggcttctttgatccaaatacccatgaaaacctgacctatagacagcttcttgaacgctgcgtagaggaccctgagacgggactgaggttacttccattaaagggagcagaaaaagcagaagtcgttgagaccacccaggtctatacagaggaagagacccgacgcgcttttgaggaaacacagattgacatacccggaggaggctcccacgggggttcaacaatgtctctgtgggaagtaatgcaaagtgatctgataccggaggaacagcgggctcagttgatggctgactttcaagctggtcgcgtaactaaggagcgcatgattattatcattatcgaaatcatcgagaagaccgagattatccggcagcagggactggcatcctacgattatgtccggagaagactcacagctgaagacctgttcgaggccaggatcatatctctggaaacctataatctgctgagagagggcaccaggtctctcagggaggcacttgaggccgaatccgcctggtgctatttatacggcaccggatcagtggccggtgtatacctgcctggctctagacagacactgtccatctatcaggcgttaaagaaaggcttgctcagtgccgaggtagccagactgctactcgaggcccaggcggcaacaggatttctgcttgaccctgttaaaggggagcgattaacggttgatgaagcggtgcgcaaaggcctggtcgggccagaactgcacgacaggctgctgagcgctgagcgagccgtcactgggtaccgtgatccctacacagagcagactattagtctcttccaagccatgaagaaagagctgattccaaccgaagaggctctgcgcctgttggacgctcagctagcaaccggcggaatcgtcgaccctcgtcttggcttccatttgcccttggaagtggcctaccagcgcggatacctgaacaaagacacacatgaccaattgtctgaacctagcgaggtgaggagttacgtggatccaagtactgatgaaagactttcatatactcagctcctgagaagatgcaggagggacgacggcacagggcagctgctgcttcccctgagcgacgcccgtaagctgacatttagaggattacgcaaacaaatcacaatggaggaactcgtgaggtcacaagtgatggacgaggctactgcactccagctcagagaaggattgacctctatagaagaggtgaccaagaatcttcaaaagttcctggaaggaacaagctgcatcgccggagtgttcgtcgatgccacaaaggaacgcctctccgtgtatcaggccatgaagaaggggatcatccgaccaggcacagcctttgaactcttggaggcccaggcagcgacaggatatgttattgatcctatcaagggcttgaagttgactgtggaggaggccgtccgaatgggaattgtcggcccagagttcaaagacaaactgctgtcggcggagagagctgtaacgggttacaaggacccttacagcgggaagctgattagtctgttccaggccatgaaaaaagggcttattctcaaagaccatgggattcgtctgttagaagcacagatagctaccggtgggattattgacccagaagaatcacaccgtctcccggtggaggtggcatataagcgaggattgttcgacgaggaaatgaacgaaatcctcaccgatcctagtgatgacaccaaaggtttctttgaccccaatactgaggagaatcttacatatctgcagctcatggagcggtgtattactgacccccagactggcctgtgcctcctgccactgaaggagaagaagcgggagcgcaagacctcctccaagagcagtgttagaaagcgtagagtcgtgattgtggatcccgagacgggtaaggagatgtccgtttatgaggcatatagaaaaggtctgattgaccaccagacatacctcgagctcagcgagcaggaatgtgagtgggaggagattacgatatcctcatccgacggggtggtaaaaagcatgataattgatcgaagaagcggtaggcagtacgacattgacgacgcgattgccaagaatttgatcgatcgttccgctctcgaccagtacagggccggaaccctgagcataacagaattcgccgacatgttgtctggcaatgccggaggatttaggtcccggtccagctccgtcggatcgtctagttcatacccaatctcacccgctgtgtcccgcacacagctcgcgtcttggagtgatcccactgaggagacagggccagtggcaggcatcctggacactgagaccctggaaaaggtcagcattactgaagccatgcaccgcaacttggtggacaatatcacagggcagcgtttgttggaagcccaagcctgcacggggggaattatcgacccctcaaccggagagcggttccctgtgaccgacgcagtgaataaaggcctggtcgacaagattatggtcgatcgcatcaacctggctcagaaggccttctgcggcttcgaagatcctcgcactaagaccaaaatgtcggctgctcaggctcttaaaaaaggatggctgtattacgaagcgggacaaaggtttttggaagtgcagtacctcactggtggcttgattgagccagatacaccaggtcgtgtacccctggacgaggcactacaacgcggaacagtggatgctaggactgcccagaagctgcgagacgtgggcgcatactctaagtatctaacatgtcccaagacaaagttgaaaatcagctacaaggatgccctggatagaagcatggtggaggaggggaccggccttcggctactcgaagcggctgcccagtcaactaaaggttattacagcccatacagcgtgagcggatctggcagcactgctgggtcacggaccgggtcccggaccggctcaagggctggttcaagaaggggcagtttcgatgcaaccgggagcggtttttctatgacattcagctcctcgtcatattcttcgtctggatatggtagacggtatgcatctggtagtagtgccagtctgggcggtcctgagagcgccgtcgcctaa

SEQ ID NO: 262185 - DNA, 13725 bp, Artificial Sequence
  derived and/or modified sequence
atgtccggtgaggacgccgaggtgagggctgtctccgaagacgtatctaatggcagctcaggctccccctcccccggagatacactcccatggaatctaggcaaaactcaaaggagccggagatcgggcggaggagccggaagcaatggctctgtgctcgacccagcggagagagccgtgattcgaattgccgatgaacgtgatagagtgcaaaaaaaaacattcacaaaatgggtaaataaacacctgatcaaggcacagcgccacatctcagatttgtatgaggatctgagagacggacacaatttaatcagcttactcgaggtgctgagtggcgattctctgccacgggagaagggcaggatgcggtttcataaattgcaaaacgtgcagattgcgctggactatctgagacaccggcaggtgaagctggtgaacattcgcaatgatgacattgctgacgggaatccaaaactgactctagggttaatatggactattattcttcatttccaaattagtgatatccaggtctctgggcagagtgaggatatgacagctaaagaaaaactgctcctctggtcacagagaatggttgaggggtatcaaggcctcaggtgcgacaatttcacttccagctggagggatggtcgcctctttaacgccatcatacaccgccacaagcctctactgattgacatgaacaaggtgtataggcaaaccaatttggaaaacctagatcaggcgttcagtgtggccgaacgggaccttggagttactcgccttttagaccccgaggacgtggacgttcctcaacccgatgaaaagagtattattacttacgtctcttcactttacgacgctatgcccagggtccccgatgtgcaggacggagtgagggctaatgagctgcagctgcggtggcaggagtaccgcgaactggtcctgttgctcttgcagtggatgagacaccacacggcagcttttgaggaacggcgtttcccgtcttccttcgaagagatagaaattctgtggagtcagtttctcaagttcaaggaaatggaactgcccgctaaagaagctgataaaaaccgtagcaagggcatttatcagtccctcgagggtgccgtccaggctggccagctgaaggtgccccctgggtaccaccccctggatgtggaaaaggagtggggtaagttacatgtcgcgattttggagcgcgaaaagcagctgagaagtgaattcgaacgtctcgagtgtctgcagagaattgtgacaaaactgcagatggaggctggattgtgtgaggagcagctaaatcaggccgatgctttacttcaatcggacgtgagactccttgcagccggaaaagtgccgcagagagctggggaggtagagcgggatttggataaggctgattcaatgataagactgctcttcaacgacgtgcagactctgaaggacgggaggcaccctcagggtgaacaaatgtatcggagagtctacagattacatgagcggctcgttgcaatcagaacagaatacaatctcagactgaaagcaggggtcgccgctcccgctactcaggtcgctcaggtgactctccagtctgttcagcggaggcctgaactcgaagactcgactctacgatacctccaggatttgctggcttgggtcgaggagaaccagcaccgggtcgatggcgctgaatggggcgtagacttgccttcagtggaagcccagctgggcagtcatcgtgggctgcaccagagtatcgaagagttccgcgctaagattgaaagggctcgaagcgacgagggacagctctctcctgcaacacgaggggcttatcgggactgcctagggagattagatctgcagtacgccaagctgctgaattcaagtaaggcccgtctccggagccttgaaagtcttcattctttcgtggctgcggctacgaaggaacttatgtggttaaacgaaaaggaggaagaggaggttggcttcgactggagcgatagaaacaccaatatgacggcaaaaaaggaatcctactcggccctgatgcgcgaattagagcttaaggagaaaaaaatcaaggaacttcagaacgcaggcgatcggctcttgagagaagatcacccagcaagaccaacggtggagtcttttcaagccgctctccagacccagtggtcatggatgctccaactctgctgttgcattgaagcacacctgaaagaaaatgctgcctattttcagttcttcagcgacgtgcgggaagcagaagggcagctgcagaagctgcaggaggcgctccgcaggaaatactcatgcgacaggagcgcgaccgttactcggttggaagacttactccaagatgctcaggatgagaaggagcagttaaatgaatataaggggcacctatccggcctcgcaaagcgcgctaaggctgtagtccaattgaagcccagacaccccgctcaccccatgcggggtcgattgcctctcttggccgtttgtgattataagcaggtcgaagtgaccgttcacaaaggcgatgagtgtcagctcgttgggcctgcacagccttcccactggaaagtacttagcagtagcgggagtgaagctgcagttccgtctgtgtgctttctcgtgccaccacctaaccaggaggcacaggaggccgtcacaaggttagaagctcagcaccaggccctcgtgaccctctggcaccagctgcacgttgacatgaaatccctgttggcctggcagtccctccgtagagatgtgcagctcatcaggtcttggtcgcttgctactttccggacattgaagccagaggaacagagacaggccctacactccctggagttgcactatcaggccttcctcagagacagtcaagatgcagggggatttggccctgaggatcggcttatggcggaacgcgaatacggcagctgctctcaccattatcagcaactattgcagtcacttgagcaaggggctcaggaggagtcgcggtgccaaagatgcattagcgagcttaaagacattaggctgcagctagaggcttgtgaaactcgcacagtgcaccgcttacgtctgccattagataaggaacccgcaagggaatgtgcacagaggatagctgagcaacaaaaggcccaggccgaggtcgaggggctgggcaaaggtgtggccaggctatctgcagaggcagaaaaggtgctggctttgcctgaaccgtcgccagccgcaccgacactgcgatccgaactcgagttgaccctcggcaaactcgagcaggtgcgaagcctttctgctatttacctggaaaagctgaaaacaatctcacttgtgatccgcggtacacaaggagcagaggaagtcttacgcgctcacgaggaacaactgaaggaagctcaggcagtcccagccaccttgccggagctggaggcgacaaaggcctccctcaagaagttgagagcccaggcggaagcccagcagcctactttcgacgctttaagggatgaattgcgcggagctcaggaggtgggcgagagactccagcaaagacatggcgagcgggatgtcgaggttgaaaggtggcgcgagcgcgtggcccaactcctggaacggtggcaggctgtgctggctcagacagatgtacgacagcgggagcttgagcaactgggccgtcagcttcggtattaccgcgagtctgctgaccctttaggagcatggctccaggacgctcggaggaggcaggaacagatccaagcaatgccactggcagattcgcaggcagtgagggagcaacttaggcaggagcaggctctactggaggaaatagaaaggcacggagaaaaggtggaggagtgccagaggttcgccaaacagtatattaacgctatcaaggactatgagttgcaactagtgacgtacaaagcccagctggaaccagtcgcatctcctgctaagaagccgaaggtgcaaagtggctctgagtccgtgatccaggaatatgttgatcttaggacccactattcagagcttacaactttgacgagccaatacataaaattcataagcgagaccctgagacgcatggaggaggaggagcgtctggccgagcaacaacgcgcagaggaacgggagaggctggctgaggttgaagctgccctcgagaagcagagacagctggcggaggcccacgcacaagccaaggcccaggcggaacgcgaagccaaagaactgcaacaaagaatgcaggaagaggtcgtgagacgggaggaggccgcagtggatgcacaacagcagaaacggtctattcaggaggaactgcaacagctgagacagtccagcgaggccgagattcaggctaaggctcggcaggccgaggcagctgaaaggtctcgcctgagaattgaagaggaaattcgggtcgttaggctgcagcttgaggcaaccgaacgacagcgcggaggcgcagagggcgaactgcaggctctgcgggctagggctgaggaggccgaagcccaaaagcggcaggctcaggaagaggcggagcggttgagaaggcaggtgcaggacgagtcacagcggaagcgacaggccgaggtggagttggcttctagggtgaaagccgaagcagaggccgcacgggagaagcagcgcgcattacaggccttagaagagctgagactgcaggctgaagaagccgagaggagattacgccaagccgaggtcgaacgcgcacgccaggtccaggttgcgctcgaaaccgcacagcgctctgccgaagctgagctacagagcaagcgagcttcttttgccgaaaaaactgcacagctcgagaggtctctccaggaggaacatgtggcagtcgcacagttgcgggaagaggccgagagacgcgcacagcagcaagcggaggctgagcgcgctcgtgaggaagctgagcgcgaactggagagatggcagttaaaagcgaacgaggcgctcagattgcgtctccaagccgaggaggttgcgcagcagaaatctcttgcacaagcagaggcagaaaaacagaaagaagaggcagagcgtgaggccagaaggcgaggaaaagcagaggagcaggccgttcgtcagcgcgaactcgctgagcaagaactcgagaaacagcggcagctcgctgaaggcaccgcccagcaacggctggctgccgaacaggagctcatccgcttgagagctgaaaccgaacagggagaacagcaaaggcagttgctggaggaagagctcgcgcgactccaacgtgaagccgcagcagcaacacagaaacggcaggaactggaagcagagctggccaaggtgagggcggaaatggaagtgctactggcttcaaaggcacgcgctgaagaagaaagccgatctacctccgaaaaatcaaaacaacgactcgaggccgaggccggacgcttcagagaactggcggaagaggcagcacgactgagagccctggccgaagaagctaaacgccagcgccaattagcagaggaggacgcggctcgccagcgagccgaggccgaacgagttcttgctgaaaaactggcagctattggagaggctaccagactcaaaacagaggctgagatcgctctcaaggaaaaagaggcagaaaatgagcgactgcggagattagcagaggacgaggcctttcagcggcgtcggcttgaggagcaagccgctcagcataaggccgatatcgaggaacgcctggcccaacttaggaaggccagcgattccgagttagagaggcaaaagggcttggtagaggatacactgaggcagagacgccaagtggaagaagagatattggccctgaaggcgagtttcgagaaagctgcggcaggtaaggcagagttggaactagagcttgggaggattcgctctaatgccgaggataccctcaggagtaaagaacaagcagagctggaggccgcaagacagcgccagctggctgcagaggaggagagacgccgacgtgaagccgaggagcgggtccagaagagcctagcagcagaagaagaagcggcacggcagcgcaaggctgccctggaggaagtcgagcggctgaaggcgaaggttgaggaggcccgtcgcttgcgcgaaagggcagagcaggaatcagccaggcagttgcagctggctcaggaagccgcacagaagcgtcttcaagcggaggagaaagcccatgcctttgcagtgcaacagaaggaacaggagctgcagcagactctgcaacaagaacagtccgtgttagatcagctgcggggagaggctgaggccgctaggcgggctgcagaagaagccgaagaggcccgtgtgcaggctgagcgtgaagctgcacaaagcagacgccaggtagaagaagctgaacgactgaaacagagtgcagaagaacaggcccaggcccgagcacaggcccaggcggctgccgaaaaattgaggaaggaagccgaacaggaggcagccaggcgcgcacaggccgagcaggctgctttgcgacagaagcaggccgcagatgcagagatggagaaacacaagaaattcgcggaacagactttgcggcagaaggcacaggtggagcaggagttgacgacactgaggctgcaactggaggagacagaccatcagaaaaacctgctggacgaggaactccaaaggttgaaggctgaggcaaccgaagctgcaagacagaggtctcaagtggaagaggagctattctccgtgagagtgcaaatggaggagctaagtaaactgaaagccaggattgaggctgaaaacagggcattaatccttagagacaaagacaacacacagcgttttctgcaggaggaggcggaaaagatgaagcaggttgctgaagaagccgcaaggttgagcgtcgcagcccaagaggcagcaaggttaagacaattggccgaggaggacctcgcacagcaacgcgcactggctgaaaagatgttgaaggagaaaatgcaggcagtgcaggaagcgactagactgaaggcagaagccgaacttctccagcagcagaaagagttggcgcaggaacaggcccgtcggctgcaggaggataaagaacaaatggctcagcagttggcggaggaaactcagggtttccagcgaactctcgaggcggagaggcaaaggcagctcgagatgtctgctgaggcagaacggcttaagttgcgagtagccgaaatgtcacgagcacaggctcgggctgaagaggacgctcagcgcttccgcaaacaggccgaagagataggtgaaaagctgcatcggaccgagctcgcgacgcaggagaaagtgacactggtccaaaccctcgagattcaacgacaacaaagtgaccacgacgccgaaagactgagggaggcgattgcagagctggagagggagaaggagaaactccagcaggaggccaagctgcttcagctgaaaagtgaagaaatgcagactgtgcagcaggagcagctactccaggaaactcaggctttacagcaatcattcctgtcagaaaaggatagcttgcttcagagggagaggttcatcgaacaggaaaaggccaagctggaacagttgttccaggatgaggtggctaaggcccagcagctcagggaagaacagcagaggcagcagcagcagatggaacaggagcggcagcggttggtagctagtatggaggaagcgcgacgaaggcaacatgaggccgaagagggggtgcgcagaaagcaggaagagctccagcagctcgaacagcagcggcgacagcaggaagaacttctagccgaggagaaccagaggctgagagaacagctccagctactggaagagcaacacagagctgccctggcccactcagaggaggtgaccgctagccaagtcgctgcaacgaagacactgcctaacggaagggacgctcttgatgggcctgctgccgaggctgagcctgaacattcatttgatggcctgcgcagaaaggtcagcgctcagcgactccaggaggccggtattctaagtgccgaagagttacagcgtctggcccaggggcatactactgttgatgagctggccaggagagaggatgtgcgacactacctgcagggaaggagttcgatcgcgggtttactgcttaaggcgaccaacgagaagttgtctgtttacgccgctctgcagagacagctgctgagcccgggaacagcgctaatcctgttggaggcgcaggccgcttcaggattcctccttgatcccgtgagaaataggaggctgaccgtgaacgaagccgtaaaggagggagtcgttgggcctgagttgcatcataagctgctatcagcagaaagagccgtgactgggtacaaggatccctacacagggcaacaaataagcctctttcaagcaatgcagaagggattaatcgtgagggaacacggaatacggctcctggaagcccagattgccaccggaggggtgatcgaccccgtccacagccaccgagtaccggtcgacgtggcttatcggagaggctactttgatgaagagatgaaccgggtcctcgccgaccccagcgatgacactaaggggttttttgaccctaacacacacgaaaatttaacctacctgcagctgcttgaaagatgcgttgaagaccccgaaactggcctgtgcctccttcccctgactgacaaagctgctaagggtggcgaactggtgtatacagattcagaagcacgcgacgtgttcgaaaaggctacagtctcggccccatttggcaaattccagggaaaaacagtcacaatctgggagattatcaacagtgaatatttcactgctgaacagcggcgagatttactgcgtcagttcaggaccggcagaatcactgtcgagaagatcataaagatcatcatcacagtggtagaggagcaagaacaaaaagggcgtttgtgtttcgagggcctgcggagcttagtgcctgcagcagaactgctggagtcaagggtcatcgatcgggagctctaccaacagctgcagagaggcgagagaagcgtgcgcgacgtggcggaggttgacactgtgagacgtgccctgaggggagccaatgtgatagctggcgtctggctggaagaagccggtcaaaaactgagcatttacaatgccctcaagaaggacctgctgccgtctgacatggccgtcgccctgctggaggcacaagcgggaactggacatattatcgaccctgcaacttccgcaagactcactgtagatgaagccgtgcgcgcaggcctggtgggaccagagtttcacgaaaagctgctcagtgctgaaaaagccgtgaccgggtatcgcgatccatacacagggcagtctgtgtcactgttccaggcactcaagaaaggactgatcccacgtgagcaggggctaagactgctggacgcccagttatcaactggtgggatcgtggaccccagcaagtcacatagagtaccactggatgtggcctgcgccagaggatgcctcgatgaggagacctctcgggcactgagtgcccctcgtgccgacgctaaggcttattctgatccctccaccggagagccggctacttacggagagctgcagcagagatgtagacccgatcagctcacagggctttcacttttgcccctgtctgaaaaagccgctcgggcacgacaagaggaactctactcggaactgcaggcccgagaaacctttgagaaaacaccagtggaggtccccgtcggtggattcaagggtcgcaccgtcactgtctgggagctgatttcatctgagtactttactgccgagcagaggcaggagttactaaggcaattccggaccggaaaggtaaccgtagagaaagtgattaagattctgattactatcgtggaagaggtcgaaacattgcgccaggaaagactttcattctcagggttacgggctccagtgccggcatccgaattactcgcttcaggcgtgctgtctagagctcagttcgaacagctgaaagatggcaagaccacagtcaaggatttgtccgagttgggctctgtgagaacattgcttcagggctccgggtgtctggctggaatctatttagaggatacaaaagaaaaggtctctatctacgaagccatgcgtagggggctgctgcgggctactaccgctgccctcctgctcgaggcacaagcagctaccggatttcttgttgatccagtgcggaatcagcgcctatacgtacacgaggccgtcaaagcaggagtggtgggtcccgagctgcatgagcagctgctctctgctgagaaggcagtcactggatatcgggacccgtactcagggtctacaatcagcttgtttcaagccatgcagaagggacttgtcctccgccagcatggcatccgacttttggaggctcaaatcgccaccggtggtatcatcgaccccgtgcactcccacagggtgccagtcgatgtggcataccagcggggttacttctctgaagagatgaaccgggtccttgccgaccccagtgacgacacaaagggattcttcgacccaaacacccatgaaaaccttacgtacaggcagctgctcgagaggtgcgtcgaagatccggagactggattgaggctcttaccactaaagggggctgagaaggctgaagtggtggagactactcaggtctatacggaagaggaaacccggcgtgcctttgaggagacacagatcgacatcccgggaggtgggagtcacggcggatctaccatgtcgctatgggaagtgatgcagagcgacctgattcctgaggagcagcgggctcagcttatggcagattttcaggctggtcgggttaccaaggagcggatgatcatcattattatagaaatcatcgaaaaaactgaaattatccgacaacaaggccttgcaagctacgattacgtcagacggcgattgactgctgaggacctgtttgaggctaggatcatttccctggagacatacaacctgctgcgggaggggacacggtcgttgagggaggcattagaagcggagtccgcctggtgttacctttatggcacaggatctgtggctggagtttacctccccggaagtcgccagactctaagtatctatcaggccctgaagaagggtctgctaagcgccgaagtggccagactgctgttggaagctcaagctgcaaccggattcctgctcgatccagtcaagggcgagagattgaccgttgacgaggccgtacggaagggacttgtgggcccagaactacacgatcgcttattaagcgccgaaagagcggtgaccgggtatagggatccatacaccgagcagaccatctccttattccaagctatgaaaaaggaactcatcccgacggaggaagcattgaggctcctggatgcccagttggctaccgggggaattgtcgacccccgactcggctttcatctacctttagaggtagcctaccaacgcggttatcttaataaggacacccatgaccaactctcagagccgtccgaggtccggagttacgtcgacccatctactgatgaaaggctgagttacactcagctgctgagacgatgcaggcgagacgacgggaccgggcagctgctgttacccctatctgacgcccgaaagttgactttccggggtctccgcaagcagatcactatggaggaattggtacgctcgcaggtcatggacgaggcaactgcactgcagttaagagaaggcctcaccagtatcgaggaggtgaccaagaaccttcaaaaattcctcgaaggaacctcctgcattgccggtgtgtttgttgatgctaccaaggaacgactcagtgtctaccaggctatgaaaaagggcatcatcagacccggaacggccttcgaactgttggaggcgcaggccgcaaccggctatgtgattgatcccatcaaaggcttaaaactaaccgtggaggaggcagtaagaatgggtatcgtggggcctgaatttaaggataagcttctgagcgctgagagagcagtaacgggttataaagacccgtacagcggaaaactcatttctctgttccaagctatgaagaagggcttaattttgaaagaccacggcatccggctgttggaggcgcaaatcgccacagggggaataattgaccctgaggagtcacatcgacttcccgtcgaggtggcctataagagaggcctttttgacgaggagatgaatgaaatcttgactgatccaagcgacgatacaaagggtttctttgatccgaacaccgaagagaacctgacctatctgcagctgatggaacgctgtatcacggatcctcagaccgggctttgcttgttacccctgaaagagaaaaaaagggaacgcaaaacttctagcaagtccagcgtccgaaaacgcagagtggtgatcgtggaccccgaaaccgggaaggagatgtctgtatatgaagcttaccgtaagggtctaatcgaccatcagacttatctggagctctccgagcaggaatgcgagtgggaggaaattactataagctcttccgacggagtggtgaagagcatgatcatcgatcgccgttctggtcgacaatatgacattgacgacgcaatagccaagaacctgattgatagaagtgctcttgatcagtacagggccggtaccctcagtattacagaattcgcggacatgcttagcggaaacgctggtggctttcgatccaggtctagttccgtgggatcatcttcctcctacccaatcagcccagccgtcagtaggactcagctagcgagctggtcggaccccacagaggagactggtccagtggccggaatcctggatactgaaactctcgagaaggtgtcaattaccgaagctatgcataggaacctggtcgacaatattaccggccagcgactgctcgaggcacaagcgtgcacaggaggtatcatcgacccctctaccggtgagaggtttcccgtcactgatgctgtgaacaaaggactggtggataagattatggttgatcgtatcaacttagctcagaaagcattctgcggttttgaagatcctaggaccaagactaagatgtcagccgcacaggccctaaagaaagggtggctgtattatgaggcaggccaacggttcttggaggtacaatacctgactgggggtctcattgagccggacactcccggaagggtgcccctggacgaagcactccagaggggtaccgtggatgctcggaccgcacagaagctgcgggacgtcggagcctatagcaagtatcttacctgtccaaaaactaaattgaagataagttacaaggatgcacttgatcgcagtatggtggaggaaggcaccggcctgagactcttggaggctgctgctcaatctaccaaggggtattactccccatactcagtatccggttctggctctactgccggtagccgaaccggaagtcgtactgggtctcgggcaggcagcaggaggggatccttcgacgccaccggatctggtttctctatgactttctcgagcagtagctacagcagttccggctacgggcgacgctacgcatccgggagctccgcaagtctagggggacccgaatctgccgtcgcctag

SEQ ID NO: 262186 - DNA, 13713 bp, Artificial Sequence
  derived and/or modified sequence
atgtccggggaggacgcggaggtacgagcagtgtccgaggatgtgagcaacgggagctccggctcgccatctcccggtgacacgctgccctggaacctcggcaagactcagcggtcccgcagaagcggaggaggtgccggatccaatggaagtgtgctggatcctgctgagagggcggtcattcggatagccgacgagcgagaccgagtacagaaaaagactttcaccaagtgggtgaataagcacctgatcaaagcacagcgccacatcagtgacttatacgaagacctccgggatggccataatcttattagtctcttagaagtgctcagcggggacagcctccctagagagaaaggacggatgaggtttcataagctccagaatgtgcagattgctctggactatttaagacatcgccaggtaaaactcgtcaacataaggaacgacgacattgcagacggaaaccctaagctgacactgggtttgatctggaccatcatcctccacttccagatttcagatatccaggtgtccggtcagagcgaagatatgaccgcgaaagagaagctgttgctttggagccagcgtatggtggaagggtaccaagggttgcgctgcgacaacttcaccagctcatggcgtgacggcagacttttcaatgccattatccaccggcacaagccactgctgatagacatgaacaaggtatatcgacagaccaacttagagaacctggaccaggcttttagtgtggctgaaagagatttgggcgtcacacgactcttggatcccgaggacgtcgacgtaccacagcccgacgagaaaagtattatcacatacgtctcatctctttacgacgccatgcccagggtgccagacgttcaggacggcgagctgcagctgagatggcaggagtatagagaactcgtcctcttactgttacagtggatgaggcatcacaccgctgctttcgaggagaggaggttcccaagctctttcgaagagattgagattctatggtctcagtttctgaagttcaaggagatggagctgccagcaaaagaagccgacaagaaccgcagcaagggcatctatcagtctttggagggagcggtccaggccggtcagttgaaggttccacccggttaccatccacttgacgtggaaaaggagtggggaaagttgcacgtggccattctcgagcgagagaagcaactccgttctgagtttgagagattggaatgtcttcagcgaatagttacaaagctccagatggaggcaggtctgtgtgaggagcagctgaaccaggcagatgcactactacagagtgatgtcagactactggccgctgggaaagtgccgcagcgggctggggaagtagagagagatctggacaaggccgactcgatgattcggctcctgttcaacgatgtgcaaacactgaaagatggccgacatccccagggcgaacaaatgtaccgtcgggtttacagactgcacgagagactggtcgccattaggaccgagtacaatttaagactcaaagcgggtgtcgctgcccctgctacgcaggtggcgcaggtgactttgcagtccgtccagaggagaccagaactggaagatagcacattacgatacctgcaggatttactcgcatgggtcgaggaaaatcaacaccgtgtcgacggcgctgaatggggcgtggatttgccatctgtagaggctcagctgggttcccatcggggtctgcaccagtcgattgaagaatttagagcgaaaatcgagcgtgcacggtctgatgagggacagctatcaccagccacaaggggagcctatagagactgtctggggaggcttgacctccaatatgccaagctcctgaattcgtcaaaagccagactgcggtctctggagtcgctgcactcattcgtagcagcggctacaaaggaactcatgtggttaaatgaaaaagaggaagaagaagtggggtttgactggagcgatcgcaataccaacatgactgctaagaaagagagctactccgcactcatgagggagctcgagctaaaagaaaaaaaaattaaagaactccaaaacgctggtgacagattgctgcgagaggatcaccctgcaaggccaaccgtggaaagttttcaagctgcgctccagactcaatggtcttggatgctgcagctctgctgctgtatcgaggctcatctgaaggagaacgcagcctacttccagttttttagcgatgtacgggaggcagaaggccaactgcaaaagctccaggaagccctgaggagaaagtattcttgtgatcgaagtgctactgtgaccagactggaggatctgcttcaggatgcccaggacgaaaaggaacagctcaacgagtacaaaggtcatctgtccggactcgctaagcgggctaaggcagtcgtgcagttgaaacccaggcatcccgcacaccctatgcggggtaggttacccctgttggcagtgtgcgattacaagcaggttgaggtcactgtgcacaaaggagatgagtgtcaactggtcggccctgcccagccaagccactggaaagtgttgtcttcgtccggctccgaagcagccgtgccgagcgtgtgcttcctggtgccaccacccaatcaggaggcgcaagaggccgtgactcgcctagaagcacagcaccaagcactggtgacattgtggcaccagctgcatgtcgatatgaagagcttgctggcttggcagagcttaaggcgcgatgtgcagctgataagatcctggtcactggctaccttcaggaccctcaagccggaagaacaacgtcaggccctgcatagcctggaactgcactaccaggcattcttgcgggattcccaggacgcagggggatttggtcccgaagataggctgatggccgaaagagagtacggttcctgctcacatcactaccagcagctgttacagagcctggagcaaggggctcaggaggaaagccgctgtcaacgctgtattagcgagctaaaagacatccgtctccagctggaggcttgtgagactcgaaccgttcacagacttcgtctgccactggacaaggagccggcacgtgagtgcgcgcagcggattgccgagcagcagaaggctcaagcagaggtcgagggtcttgggaaaggagtggcacgcttaagcgctgaagcagagaaagtcctggccttgccagagccttcacctgctgctcctacactgagatctgagttggaactaaccctcggcaagctggaacaggttcgatctctgagcgcaatctacctggaaaaactcaaaaccatcagcctcgtaattcggggaacacagggagccgaggaggtgttaagggcccacgaagaacagctcaaggaagctcaagccgtgcccgcaacgctgcccgaactggaggccactaaagctagccttaagaagttaagagcgcaggcagaggcacaacagcctacctttgacgcactccgggatgagctgcgaggtgctcaagaggttggcgaaagactccagcaacggcacggggagagagacgttgaagtcgagagatggcgagagcgcgtggcacagttacttgaacggtggcaggccgtgctggcccagacagacgtgcgtcagcgggagcttgaacagcttgggagacagctccgctattatcgcgaatccgccgatcctctgggggcttggcttcaggacgcccgtaggaggcaagagcagatccaagccatgcctctggctgatagtcaggccgtgcgcgagcagctaaggcaggagcaggctctacttgaggagatcgaacggcacggtgaaaaggtcgaggagtgtcagcggttcgctaagcaatatataaacgccatcaaggattacgaactgcagctggttacctacaaggcacaactcgaacctgtggcgtcaccagccaagaagcctaaggtgcagtctggatccgagagcgtgatccaagagtatgtcgacctcagaacacattacagcgaactcaccacgctgaccagccagtacattaaattcatttccgaaacattaagaagaatggaggaggaggaaagactggccgagcagcagagagccgaggaaagagaacgtctggccgaggtagaggccgctcttgagaaacaacgacagctcgctgaagctcatgcgcaggcgaaagcacaggccgaaagagaggccaaggagctgcagcagaggatgcaagaggaggttgttcggagagaggaggctgctgtggacgcccagcagcagaagaggtccatccaagaggagttgcagcaactgagacaaagtagcgaggccgaaatccaggctaaagcaaggcaggccgaagctgccgagcggagcagactgcgtatcgaagaagaaatcagggtggtccgcctgcagttggaagcgacagagcggcagcgcggaggagctgagggagaactgcaagcattgagggccagggccgaggaggcagaggcccaaaaacgacaggctcaggaagaggctgaaagacttagacgccaggtgcaggatgaaagccagcggaagaggcaggccgaagtggagctggcaagccgggtgaaagccgaggcggaggcagcgcgagagaagcaaagagcactgcaagctctggaagagctccggctgcaagctgaggaagccgaaaggaggctgcgacaggcggaggtggaacgtgctcggcaagtccaggttgcattagagacagcccaacgaagcgcagaagccgaacttcagtcgaagcgggcatctttcgccgaaaagactgcccagctcgaacggagcctgcaggaagagcacgttgctgtggctcagctgcgagaggaagccgagcggagggcacagcaacaggctgaggccgagagggccagggaggaggctgagcgtgaattggaacgttggcagttaaaggctaatgaggccctgaggctcaggttacaggctgaggaggtggcccagcagaaaagtttggctcaggctgaggctgaaaaacagaaggaagaagccgagcgagaggcacggaggcgtgggaaagctgaggagcaagccgtgaggcagagggaactggctgagcaagagctagaaaaacagcgccagctcgctgagggcaccgcccagcagcggctggcggctgaacaggagctgattcgcctccgcgcagagacagagcagggcgagcaacagcggcagctcctggaggaagagctggccagattgcagcgggaggccgctgctgcaacacagaagcgccaggagctggaggcggagttggccaaagtgcgtgctgagatggaggtcttgctggcgtcaaaggccagagccgaagaagaatcacggtcaacttctgagaagtctaagcagcgcctagaagccgaggcaggtcggtttagggaactcgcggaggaggccgcacggctacgcgcactcgccgaggaggccaagagacagaggcaactcgctgaagaagacgccgcaaggcagagggctgaggctgagcgtgtcttggccgagaaactcgcagcgatcggcgaggccactcgtctgaagaccgaagccgagatagccctgaaagagaaggaagccgagaatgagaggctgagacgccttgccgaggacgaggctttccaaaggcgacgtcttgaagaacaagctgcacaacacaaggccgacatagaagaaagactcgcgcagttgcgcaaggcaagcgattccgaattagaacggcaaaagggtcttgtcgaagatacactacgacagcgccgtcaggtcgaggaagagatcctggcattgaaagcgtccttcgaaaaagctgctgccggtaaggctgaactggagctggagctcggcagaatccgctctaacgccgaagacactctgcgcagcaaggaacaggctgaactggaggccgctcgtcagaggcagctggctgccgaagaggaaaggagaagaagggaggcagaggaacgtgtacagaaatcactagccgcagaagaggaggctgcgaggcagcggaaagccgcattggaagaggtcgagcgcctgaaagcgaaagttgaggaagccagaaggctccgagagagagcagaacaggaaagcgcacgccagctgcaactggcacaggaggcagcccagaagcgattgcaagctgaggagaaggctcacgcgttcgctgtgcagcagaaagaacaagagctgcagcagaccctccaacaggaacagtcagtgttggatcagctgcgcggagaagccgaggccgcaagacgggcagcagaggaagccgaagaagcaagagtgcaggctgagcgggaagcagcgcagtccagacgccaggtggaagaggcagaacgtctgaaacagtcggcagaagagcaggctcaggctcgagcccaggctcaggctgcagccgagaaactccggaaggaggccgaacaagaggctgccaggcgcgcacaggccgaacaagccgctctcaggcagaagcaggccgctgacgccgagatggaaaaacataaaaaatttgccgagcagactctgcggcagaaagcccaggttgaacaggagctcactacacttcgccttcagttagaggagactgaccaccaaaagaacctgcttgacgaggaactgcagcggctcaaggctgaagctacggaggctgctcggcaacgctcgcaggtcgaggaagaacttttttccgttagggtgcagatggaggagctgagcaagctgaaagcccgaattgaagctgaaaaccgagctctcatcctgagggacaaagataatacccagcgctttctacaggaggaggccgagaagatgaagcaagtcgcagaggaggcagctcgcctgtcagtggccgctcaggaggccgcaagactacgtcagttggccgaagaagacttggcccagcagcgggctctcgccgagaagatgttaaaagagaagatgcaggctgtccaggaggcaacccgccttaaagccgaagcagagcttctccagcagcaaaaggagctggcgcaggaacaagccaggcgactgcaggaggacaaagagcagatggctcaacaactcgccgaggaaacacaggggttccaaagaactcttgaagccgaacgtcaacgtcaactggaaatgtccgctgaggctgagcgcctcaagctgagggtcgcagagatgtcccgcgcacaggcaagggctgaggaggacgcacagcgttttagaaagcaggccgaggaaatcggagagaagctgcacagaactgagctggcgacccaggaaaaggttaccctcgtccaaacccttgagatacagcgtcaacagtctgaccacgatgctgagcgtctgcgagaagccatagctgagcttgagcgggagaaggagaagctgcagcaagaggccaaattactccagcttaaaagtgaggagatgcagacggtccagcaggaacagctgctgcaggaaacacaggccctgcagcagagctttttgtcagagaaggactctttgttgcagagggaaaggtttattgaacaagaaaaggccaagctcgagcaacttttccaggatgaggtcgccaaggctcagcagctgagggaagagcaacagcggcagcagcaacagatggagcaggaacggcagcggctcgtggcctcaatggaagaggccaggagacgacagcatgaagccgaggaaggggtgcgaagaaagcaagaagagcttcagcagcttgagcagcagcggaggcagcaggaggaactacttgccgaggagaaccagcgtctcagggaacaactgcagttattagaggagcagcacagggcagcgctcgctcactccgaggaggtgactgcgagccaggttgccgctactaagacactccctaatggacgtgatgccttggacggtcccgcagctgaggcagaacccgaacattcatttgacggcctcagacggaaggtctctgctcagagactgcaggaggctgggatactctctgctgaggaactgcaacgcctcgcacaggggcacactactgtagacgagctggccagaagggaagatgtgcggcattaccttcaaggacggagctctatcgccggtttgctcttgaaggccactaacgagaaactgtctgtgtacgccgctttgcaacgccagctgctgtcaccgggaactgcactgatcttgctcgaggcccaggccgcaagcggatttctgttagatccggtgaggaataggcgactcacggtaaatgaggccgtgaaggagggggtggtgggcccagaactccaccacaaacttctctcggctgagagagctgtaaccggttacaaagacccgtatacagggcagcagatatctctgtttcaagctatgcaaaagggccttattgtgcgcgagcatgggattagattgctggaagcgcagattgccaccgggggagtaatagatccggtgcattcccatcgggtgcctgtggatgtagcttatcgtcggggatactttgacgaggagatgaacagagtgcttgcggacccaagtgacgacaccaaaggcttttttgaccccaatacccatgaaaacctgacttatttacagctgctggagagatgcgtagaggatccagagaccggtctgtgcctcctgccgttaacagacaaagctgctaaggggggagagctcgtatatacggatagcgaggctagggatgtgtttgaaaaagcaaccgtctccgccccttttggcaaattccagggtaagaccgtgactatatgggagatcatcaatagcgaatactttactgcagaacagaggcgcgatctgctacgacaatttcgaactgggaggattacagtcgagaagatcatcaagattatcatcacggtggtcgaggagcaggagcaaaaagggagactttgcttcgaaggcttacggagtcttgtacccgctgcagagctcctggagtcacgggttatagatagagagttgtaccagcaacttcaaagaggagagaggtcagttcgcgatgtggccgaggtcgatactgttagaagagcccttagaggggctaatgtcatcgcaggcgtgtggctggaggaggctggccagaaactcagcatctataacgcactcaagaaagacttactccccagtgacatggccgtagccttacttgaggcacaggccggtactgggcacataattgaccccgcaacaagcgccaggttgacggtcgatgaggcagtcagagccggactcgtggggcctgaatttcacgagaagctgctgtccgccgaaaaagctgttactgggtatcgcgatccttacacaggccagtctgtcagtctattccaggctctgaagaaaggcctcatcccacgcgagcagggtttgaggctcctggatgcccagctctcaaccgggggaatcgtggatccatcaaagagtcatcgcgtccccctggatgtcgcgtgtgcacgcggatgtctcgacgaggagacatcccgggctctaagcgcccctcgcgctgatgccaaagcctattctgacccgtccaccggagagcctgcaacctacggagagctgcagcagagatgccgaccagatcagttgactggattgagcctattacccctgtcggagaaagcggcaagagcccgtcaggaggaattgtacagcgagctacaggccagggagaccttcgagaaaactccggtggaggtacccgttggcggtttcaaggggagaaccgtgaccgtctgggagctgatctccagcgaatacttcacggcagagcagagacaggagcttcttcgtcaattcagaacaggcaaagtgactgtcgagaaagtgatcaaaatccttatcaccatcgtggaggaggtggaaaccctccgacaagaacgactgtcattctccggcttgagagcgccagtgcctgcttccgaattgctcgcatctggggttctctcccgtgcacagttcgagcagcttaaggatggaaagacaactgttaaggatctgagcgagctcggcagtgtaagaaccctgttacagggatctggatgccttgctggcatatatctagaggacacaaaggaaaaggtttctatttatgaggcgatgaggagagggctcctgcgtgctaccactgcggctctgcttctggaggcccaagccgcaactggctttctggttgatcctgttagaaatcagagactgtacgtacatgaggcagtgaaggcaggagtcgtgggtccagagctccacgaacaactactgagtgccgagaaagccgttaccggatatcgggacccctatagcgggagtactatctccctttttcaggccatgcagaaaggactggtcctgcgccaacacggtattaggctgcttgaggcgcagatcgccaccggaggcataattgacccggtccactcccaccgcgtccccgtcgatgtggcctaccaaaggggctatttttcagaggagatgaaccgggtcttagctgacccctctgacgacactaaagggttcttcgatcccaatactcatgaaaacctcacttaccgacagttactcgaaagatgcgttgaggacccagagacaggactgaggctactgccactgaaaggagctgaaaaggccgaggttgtagaaactactcaggtgtacactgaggaagagacccgcagagcctttgaagaaacacagatcgatattcctgggggagggagccatggaggatcaaccatgtctctctgggaggtcatgcagagcgacctgattcctgaagagcaaagagcgcagttgatggcagatttccaagccggacgcgtcactaaagaaagaatgataatcatcataatcgaaatcattgagaaaactgagatcatccgacaacagggcctagcttcttacgattatgttcgacggcgtctgaccgccgaggatttgttcgaagcgagaattatctctttggaaacctataacttgctcagagagggcacgaggtcactgcgggaggctctcgaggcagagtcagcttggtgctatctgtacggaaccggaagcgtggctggcgtgtatctcccgggatcacggcaaaccctctctatttatcaggcccttaaaaaggggttgctttccgctgaggtcgctcgactgctattggaggcccaggctgctacagggtttctgctggaccccgtcaagggtgagcggttgaccgttgatgaagctgtcagaaagggattggttggccctgaactccacgatcgtctattgtctgcagagagagccgtaacggggtatagggacccttacaccgagcagacaatcagcctctttcaagctatgaagaaggagctcataccaaccgaagaggcattgcggctgctggatgcccagcttgctacaggaggcatcgtggacccacggcttggattccatttacccttggaagtagcctatcagcggggatatttgaataaagacacacacgaccagctgagcgagccttccgaggtgcggagttatgttgatcctagcacagatgagcgactgtcctatacacaactgttaagacgctgccgaagagatgacggcactgggcaattgctgctccctctatctgacgcacgcaagctgacctttagagggcttcgcaaacagattactatggaagaactagtgaggtctcaggtaatggatgaggcaacagccctgcagcttagagaggggctgacatcaattgaggaggtcacgaagaatttgcagaagttccttgaaggtacctcatgtatcgcgggagtgtttgtggacgccacaaaagaacggctgagcgtgtaccaagccatgaaaaaggggatcatcagaccaggcacagcctttgagctcttggaagcacaagctgccacagggtatgtcatcgatcccattaagggactcaagctaacagtggaagaagcagtgagaatgggaattgtgggccctgaatttaaagacaaactgctgtccgcagagcgcgctgtgacggggtacaaagacccctacagcggcaagctgatcagccttttccaggcaatgaagaagggactgatcctgaaggatcacggtatccgcttgttggaggcccagatcgccaccggcggaatcatcgaccccgaggagtcacatcgattaccggttgaagtggcctacaaaagaggattgttcgacgaagagatgaacgagattctgacagacccctccgatgataccaaaggatttttcgaccctaatactgaagagaatctcacttatttacagctgatggaacgctgcattacagacccccagaccggtctgtgtctccttcccctaaaggaaaagaaacgggagcgtaaaacatcatccaaatcttctgtcagaaagcggagggtggtcatagtggacccagagacgggaaaggagatgtctgtgtacgaggcttaccgaaagggtctcatcgaccatcagacctatttggagttgtctgaacaagagtgcgagtgggaagagataacaattagttcttctgatggcgtggtgaagtctatgattatcgaccgccgtagcggtagacaatacgatatcgacgacgcgattgcaaaaaatctaatcgacagaagcgccctggatcagtacagagcaggcactctgtcaatcacggagtttgcagatatgctatccgggaatgccggaggattcaggtctagatcctcctccgtgggtagctcaagcagctatccgataagtcctgctgtttctcggactcaactcgccagttggtccgaccccaccgaagaaactggtccggtcgctggcattcttgatactgaaaccctagagaaggttagtatcacggaggctatgcacaggaatctggtcgacaacatcacagggcagcggctgttggaagcacaagcctgcacaggcggaatcatagatccctctactggcgagagattccctgttacagatgcagtcaataagggcctggtcgacaagataatggtcgaccggatcaacttggctcaaaaggccttctgtgggttcgaagacccacgcacaaaaacgaaaatgagtgctgcgcaagctctgaaaaaaggttggctttactatgaagccggtcagagattcctggaagtgcagtatttgaccggaggcctgatcgagccagacacccctggtagagtgccactcgacgaagcactgcaacgcggaactgtggatgcacgaaccgcgcagaagttacgggatgtgggagcctacagtaagtatctcacttgtccaaaaacgaaactgaagatttcctacaaggatgcactcgaccgatccatggtggaggagggaactggattgcggctgctcgaagccgcagcgcagtctaccaaaggctattatagcccttactccgtcagtggttccgggtcgaccgccggatctaggaccggcagtcgaaccgggagtcgcgcaggctcacgcagggggtcttttgacgcaacaggaagtgggtttagcatgacattcagctctagcagctactccagcagtggctatggcaggaggtacgcctccggcagtagtgcttcgctgggaggccctgagtcagccgtcgcctaa

SEQ ID NO: 262187 - DNA, 14055 bp, Artificial Sequence
  derived and/or modified sequence
atggtggccggcatgctgatgcccagagaccagctgagagccatctacgaggtgctgttcagagagggcgtgatggtggccaagaaggacagaagacccagaagcctgcacccccacgtgcccggcgtgaccaacctgcaggtgatgagagccatggccagcctgagagccagaggcctggtgagagagaccttcgcctggtgccacttctactggtacctgaccaacgagggcatcgcccacctgagacagtacctgcacctgccccccgagatcgtgcccgccagcctgcagagagtgagaagacccgtggccatggtgatgcccgccagaagaaccccccacgtgcaggccgtgcagggccccctgggcagcccccccaagagaggccccctgcccaccgaggagcagagagtgtacagaagaaaggagctggaggaggtgagccccgagacccccgtggtgcccgccaccacccagagaaccctggccagacccggccccgagcccgcccccgccaccgacgagagagacagagtgcagaagaagaccttcaccaagtgggtgaacaagcacctgatcaaggcccagagacacatcagcgacctgtacgaggacctgagagacggccacaacctgatcagcctgctggaggtgctgagcggcgacagcctgcccagagagaagggcagaatgagattccacaagctgcagaacgtgcagatcgccctggactacctgagacacagacaggtgaagctggtgaacatcagaaacgacgacatcgccgacggcaaccccaagctgaccctgggcctgatctggaccatcatcctgcacttccagatcagcgacatccaggtgagcggccagagcgaggacatgaccgccaaggagaagctgctgctgtggagccagagaatggtggagggctaccagggcctgagatgcgacaacttcaccagcagctggagagacggcagactgttcaacgccatcatccacagacacaagcccctgctgatcgacatgaacaaggtgtacagacagaccaacctggagaacctggaccaggccttcagcgtggccgagagagacctgggcgtgaccagactgctggaccccgaggacgtggacgtgccccagcccgacgagaagagcatcatcacctacgtgagcagcctgtacgacgccatgcccagagtgcccgacgtgcaggacggcgtgagagccaacgagctgcagctgagatggcaggagtacagagagctggtgctgctgctgctgcagtggatgagacaccacaccgccgccttcgaggagagaagattccccagcagcttcgaggagatcgagatcctgtggagccagttcctgaagttcaaggagatggagctgcccgccaaggaggccgacaagaacagaagcaagggcatctaccagagcctggagggcgccgtgcaggccggccagctgaaggtgccccccggctaccaccccctggacgtggagaaggagtggggcaagctgcacgtggccatcctggagagagagaagcagctgagaagcgagttcgagagactggagtgcctgcagagaatcgtgaccaagctgcagatggaggccggcctgtgcgaggagcagctgaaccaggccgacgccctgctgcagagcgacgtgagactgctggccgccggcaaggtgccccagagagccggcgaggtggagagagacctggacaaggccgacagcatgatcagactgctgttcaacgacgtgcagaccctgaaggacggcagacacccccagggcgagcagatgtacagaagagtgtacagactgcacgagagactggtggccatcagaaccgagtacaacctgagactgaaggccggcgtggccgcccccgccacccaggtggcccaggtgaccctgcagagcgtgcagagaagacccgagctggaggacagcaccctgagatacctgcaggacctgctggcctgggtggaggagaaccagcacagagtggacggcgccgagtggggcgtggacctgcccagcgtggaggcccagctgggcagccacagaggcctgcaccagagcatcgaggagttcagagccaagatcgagagagccagaagcgacgagggccagctgagccccgccaccagaggcgcctacagagactgcctgggcagactggacctgcagtacgccaagctgctgaacagcagcaaggccagactgagaagcctggagagcctgcacagcttcgtggccgccgccaccaaggagctgatgtggctgaacgagaaggaggaggaggaggtgggcttcgactggagcgacagaaacaccaacatgaccgccaagaaggagagctacagcgccctgatgagagagctggagctgaaggagaagaagatcaaggagctgcagaacgccggcgacagactgctgagagaggaccaccccgccagacccaccgtggagagcttccaggccgccctgcagacccagtggagctggatgctgcagctgtgctgctgcatcgaggcccacctgaaggagaacgccgcctacttccagttcttcagcgacgtgagagaggccgagggccagctgcagaagctgcaggaggccctgagaagaaagtacagctgcgacagaagcgccaccgtgaccagactggaggacctgctgcaggacgcccaggacgagaaggagcagctgaacgagtacaagggccacctgagcggcctggccaagagagccaaggccgtggtgcagctgaagcccagacaccccgcccaccccatgagaggcagactgcccctgctggccgtgtgcgactacaagcaggtggaggtgaccgtgcacaagggcgacgagtgccagctggtgggccccgcccagcccagccactggaaggtgctgagcagcagcggcagcgaggccgccgtgcccagcgtgtgcttcctggtgcccccccccaaccaggaggcccaggaggccgtgaccagactggaggcccagcaccaggccctggtgaccctgtggcaccagctgcacgtggacatgaagagcctgctggcctggcagagcctgagaagagacgtgcagctgatcagaagctggagcctggccaccttcagaaccctgaagcccgaggagcagagacaggccctgcacagcctggagctgcactaccaggccttcctgagagacagccaggacgccggcggcttcggccccgaggacagactgatggccgagagagagtacggcagctgcagccaccactaccagcagctgctgcagagcctggagcagggcgcccaggaggagagcagatgccagagatgcatcagcgagctgaaggacatcagactgcagctggaggcctgcgagaccagaaccgtgcacagactgagactgcccctggacaaggagcccgccagagagtgcgcccagagaatcgccgagcagcagaaggcccaggccgaggtggagggcctgggcaagggcgtggccagactgagcgccgaggccgagaaggtgctggccctgcccgagcccagccccgccgcccccaccctgagaagcgagctggagctgaccctgggcaagctggagcaggtgagaagcctgagcgccatctacctggagaagctgaagaccatcagcctggtgatcagaggcacccagggcgccgaggaggtgctgagagcccacgaggagcagctgaaggaggcccaggccgtgcccgccaccctgcccgagctggaggccaccaaggccagcctgaagaagctgagagcccaggccgaggcccagcagcccaccttcgacgccctgagagacgagctgagaggcgcccaggaggtgggcgagagactgcagcagagacacggcgagagagacgtggaggtggagagatggagagagagagtggcccagctgctggagagatggcaggccgtgctggcccagaccgacgtgagacagagagagctggagcagctgggcagacagctgagatactacagagagagcgccgaccccctgggcgcctggctgcaggacgccagaagaagacaggagcagatccaggccatgcccctggccgacagccaggccgtgagagagcagctgagacaggagcaggccctgctggaggagatcgagagacacggcgagaaggtggaggagtgccagagattcgccaagcagtacatcaacgccatcaaggactacgagctgcagctggtgacctacaaggcccagctggagcccgtggccagccccgccaagaagcccaaggtgcagagcggcagcgagagcgtgatccaggagtacgtggacctgagaacccactacagcgagctgaccaccctgaccagccagtacatcaagttcatcagcgagaccctgagaagaatggaggaggaggagagactggccgagcagcagagagccgaggagagagagagactggccgaggtggaggccgccctggagaagcagagacagctggccgaggcccacgcccaggccaaggcccaggccgagagagaggccaaggagctgcagcagagaatgcaggaggaggtggtgagaagagaggaggccgccgtggacgcccagcagcagaagagaagcatccaggaggagctgcagcagctgagacagagcagcgaggccgagatccaggccaaggccagacaggccgaggccgccgagagaagcagactgagaatcgaggaggagatcagagtggtgagactgcagctggaggccaccgagagacagagaggcggcgccgagggcgagctgcaggccctgagagccagagccgaggaggccgaggcccagaagagacaggcccaggaggaggccgagagactgagaagacaggtgcaggacgagagccagagaaagagacaggccgaggtggagctggccagcagagtgaaggccgaggccgaggccgccagagagaagcagagagccctgcaggccctggaggagctgagactgcaggccgaggaggccgagagaagactgagacaggccgaggtggagagagccagacaggtgcaggtggccctggagaccgcccagagaagcgccgaggccgagctgcagagcaagagagccagcttcgccgagaagaccgcccagctggagagaagcctgcaggaggagcacgtggccgtggcccagctgagagaggaggccgagagaagagcccagcagcaggccgaggccgagagagccagagaggaggccgagagagagctggagagatggcagctgaaggccaacgaggccctgagactgagactgcaggccgaggaggtggcccagcagaagagcctggcccaggccgaggccgagaagcagaaggaggaggccgagagagaggccagaagaagaggcaaggccgaggagcaggccgtgagacagagagagctggccgagcaggagctggagaagcagagacagctggccgagggcaccgcccagcagagactggccgccgagcaggagctgatcagactgagagccgagaccgagcagggcgagcagcagagacagctgctggaggaggagctggccagactgcagagagaggccgccgccgccacccagaagagacaggagctggaggccgagctggccaaggtgagagccgagatggaggtgctgctggccagcaaggccagagccgaggaggagagcagaagcaccagcgagaagagcaagcagagactggaggccgaggccggcagattcagagagctggccgaggaggccgccagactgagagccctggccgaggaggccaagagacagagacagctggccgaggaggacgccgccagacagagagccgaggccgagagagtgctggccgagaagctggccgccatcggcgaggccaccagactgaagaccgaggccgagatcgccctgaaggagaaggaggccgagaacgagagactgagaagactggccgaggacgaggccttccagagaagaagactggaggagcaggccgcccagcacaaggccgacatcgaggagagactggcccagctgagaaaggccagcgacagcgagctggagagacagaagggcctggtggaggacaccctgagacagagaagacaggtggaggaggagatcctggccctgaaggccagcttcgagaaggccgccgccggcaaggccgagctggagctggagctgggcagaatcagaagcaacgccgaggacaccctgagaagcaaggagcaggccgagctggaggccgccagacagagacagctggccgccgaggaggagagaagaagaagagaggccgaggagagagtgcagaagagcctggccgccgaggaggaggccgccagacagagaaaggccgccctggaggaggtggagagactgaaggccaaggtggaggaggccagaagactgagagagagagccgagcaggagagcgccagacagctgcagctggcccaggaggccgcccagaagagactgcaggccgaggagaaggcccacgccttcgccgtgcagcagaaggagcaggagctgcagcagaccctgcagcaggagcagagcgtgctggaccagctgagaggcgaggccgaggccgccagaagagccgccgaggaggccgaggaggccagagtgcaggccgagagagaggccgcccagagcagaagacaggtggaggaggccgagagactgaagcagagcgccgaggagcaggcccaggccagagcccaggcccaggccgccgccgagaagctgagaaaggaggccgagcaggaggccgccagaagagcccaggccgagcaggccgccctgagacagaagcaggccgccgacgccgagatggagaagcacaagaagttcgccgagcagaccctgagacagaaggcccaggtggagcaggagctgaccaccctgagactgcagctggaggagaccgaccaccagaagaacctgctggacgaggagctgcagagactgaaggccgaggccaccgaggccgccagacagagaagccaggtggaggaggagctgttcagcgtgagagtgcagatggaggagctgagcaagctgaaggccagaatcgaggccgagaacagagccctgatcctgagagacaaggacaacacccagagattcctgcaggaggaggccgagaagatgaagcaggtggccgaggaggccgccagactgagcgtggccgcccaggaggccgccagactgagacagctggccgaggaggacctggcccagcagagagccctggccgagaagatgctgaaggagaagatgcaggccgtgcaggaggccaccagactgaaggccgaggccgagctgctgcagcagcagaaggagctggcccaggagcaggccagaagactgcaggaggacaaggagcagatggcccagcagctggccgaggagacccagggcttccagagaaccctggaggccgagagacagagacagctggagatgagcgccgaggccgagagactgaagctgagagtggccgagatgagcagagcccaggccagagccgaggaggacgcccagagattcagaaagcaggccgaggagatcggcgagaagctgcacagaaccgagctggccacccaggagaaggtgaccctggtgcagaccctggagatccagagacagcagagcgaccacgacgccgagagactgagagaggccatcgccgagctggagagagagaaggagaagctgcagcaggaggccaagctgctgcagctgaagagcgaggagatgcagaccgtgcagcaggagcagctgctgcaggagacccaggccctgcagcagagcttcctgagcgagaaggacagcctgctgcagagagagagattcatcgagcaggagaaggccaagctggagcagctgttccaggacgaggtggccaaggcccagcagctgagagaggagcagcagagacagcagcagcagatggagcaggagagacagagactggtggccagcatggaggaggccagaagaagacagcacgaggccgaggagggcgtgagaagaaagcaggaggagctgcagcagctggagcagcagagaagacagcaggaggagctgctggccgaggagaaccagagactgagagagcagctgcagctgctggaggagcagcacagagccgccctggcccacagcgaggaggtgaccgccagccaggtggccgccaccaagaccctgcccaacggcagagacgccctggacggccccgccgccgaggccgagcccgagcacagcttcgacggcctgagaagaaaggtgagcgcccagagactgcaggaggccggcatcctgagcgccgaggagctgcagagactggcccagggccacaccaccgtggacgagctggccagaagagaggacgtgagacactacctgcagggcagaagcagcatcgccggcctgctgctgaaggccaccaacgagaagctgagcgtgtacgccgccctgcagagacagctgctgagccccggcaccgccctgatcctgctggaggcccaggccgccagcggcttcctgctggaccccgtgagaaacagaagactgaccgtgaacgaggccgtgaaggagggcgtggtgggccccgagctgcaccacaagctgctgagcgccgagagagccgtgaccggctacaaggacccctacaccggccagcagatcagcctgttccaggccatgcagaagggcctgatcgtgagagagcacggcatcagactgctggaggcccagatcgccaccggcggcgtgatcgaccccgtgcacagccacagagtgcccgtggacgtggcctacagaagaggctacttcgacgaggagatgaacagagtgctggccgaccccagcgacgacaccaagggcttcttcgaccccaacacccacgagaacctgacctacctgcagctgctggagagatgcgtggaggaccccgagaccggcctgtgcctgctgcccctgaccgacaaggccgccaagggcggcgagctggtgtacaccgacagcgaggccagagacgtgttcgagaaggccaccgtgagcgcccccttcggcaagttccagggcaagaccgtgaccatctgggagatcatcaacagcgagtacttcaccgccgagcagagaagagacctgctgagacagttcagaaccggcagaatcaccgtggagaagatcatcaagatcatcatcaccgtggtggaggagcaggagcagaagggcagactgtgcttcgagggcctgagaagcctggtgcccgccgccgagctgctggagagcagagtgatcgacagagagctgtaccagcagctgcagagaggcgagagaagcgtgagagacgtggccgaggtggacaccgtgagaagagccctgagaggcgccaacgtgatcgccggcgtgtggctggaggaggccggccagaagctgagcatctacaacgccctgaagaaggacctgctgcccagcgacatggccgtggccctgctggaggcccaggccggcaccggccacatcatcgaccccgccaccagcgccagactgaccgtggacgaggccgtgagagccggcctggtgggccccgagttccacgagaagctgctgagcgccgagaaggccgtgaccggctacagagacccctacaccggccagagcgtgagcctgttccaggccctgaagaagggcctgatccccagagagcagggcctgagactgctggacgcccagctgagcaccggcggcatcgtggaccccagcaagagccacagagtgcccctggacgtggcctgcgccagaggctgcctggacgaggagaccagcagagccctgagcgcccccagagccgacgccaaggcctacagcgaccccagcaccggcgagcccgccacctacggcgagctgcagcagagatgcagacccgaccagctgaccggcctgagcctgctgcccctgagcgagaaggccgccagagccagacaggaggagctgtacagcgagctgcaggccagagagaccttcgagaagacccccgtggaggtgcccgtgggcggcttcaagggcagaaccgtgaccgtgtgggagctgatcagcagcgagtacttcaccgccgagcagagacaggagctgctgagacagttcagaaccggcaaggtgaccgtggagaaggtgatcaagatcctgatcaccatcgtggaggaggtggagaccctgagacaggagagactgagcttcagcggcctgagagcccccgtgcccgccagcgagctgctggccagcggcgtgctgagcagagcccagttcgagcagctgaaggacggcaagaccaccgtgaaggacctgagcgagctgggcagcgtgagaaccctgctgcagggcagcggctgcctggccggcatctacctggaggacaccaaggagaaggtgagcatctacgaggccatgagaagaggcctgctgagagccaccaccgccgccctgctgctggaggcccaggccgccaccggcttcctggtggaccccgtgagaaaccagagactgtacgtgcacgaggccgtgaaggccggcgtggtgggccccgagctgcacgagcagctgctgagcgccgagaaggccgtgaccggctacagagacccctacagcggcagcaccatcagcctgttccaggccatgcagaagggcctggtgctgagacagcacggcatcagactgctggaggcccagatcgccaccggcggcatcatcgaccccgtgcacagccacagagtgcccgtggacgtggcctaccagagaggctacttcagcgaggagatgaacagagtgctggccgaccccagcgacgacaccaagggcttcttcgaccccaacacccacgagaacctgacctacagacagctgctggagagatgcgtggaggaccccgagaccggcctgagactgctgcccctgaagggcgccgagaaggccgaggtggtggagaccacccaggtgtacaccgaggaggagaccagaagagccttcgaggagacccagatcgacatccccggcggcggcagccacggcggcagcaccatgagcctgtgggaggtgatgcagagcgacctgatccccgaggagcagagagcccagctgatggccgacttccaggccggcagagtgaccaaggagagaatgatcatcatcatcatcgagatcatcgagaagaccgagatcatcagacagcagggcctggccagctacgactacgtgagaagaagactgaccgccgaggacctgttcgaggccagaatcatcagcctggagacctacaacctgctgagagagggcaccagaagcctgagagaggccctggaggccgagagcgcctggtgctacctgtacggcaccggcagcgtggccggcgtgtacctgcccggcagcagacagaccctgagcatctaccaggccctgaagaagggcctgctgagcgccgaggtggccagactgctgctggaggcccaggccgccaccggcttcctgctggaccccgtgaagggcgagagactgaccgtggacgaggccgtgagaaagggcctggtgggccccgagctgcacgacagactgctgagcgccgagagagccgtgaccggctacagagacccctacaccgagcagaccatcagcctgttccaggccatgaagaaggagctgatccccaccgaggaggccctgagactgctggacgcccagctggccaccggcggcatcgtggaccccagactgggcttccacctgcccctggaggtggcctaccagagaggctacctgaacaaggacacccacgaccagctgagcgagcccagcgaggtgagaagctacgtggaccccagcaccgacgagagactgagctacacccagctgctgagaagatgcagaagagacgacggcaccggccagctgctgctgcccctgagcgacgccagaaagctgaccttcagaggcctgagaaagcagatcaccatggaggagctggtgagaagccaggtgatggacgaggccaccgccctgcagctgagagagggcctgaccagcatcgaggaggtgaccaagaacctgcagaagttcctggagggcaccagctgcatcgccggcgtgttcgtggacgccaccaaggagagactgagcgtgtaccaggccatgaagaagggcatcatcagacccggcaccgccttcgagctgctggaggcccaggccgccaccggctacgtgatcgaccccatcaagggcctgaagctgaccgtggaggaggccgtgagaatgggcatcgtgggccccgagttcaaggacaagctgctgagcgccgagagagccgtgaccggctacaaggacccctacagcggcaagctgatcagcctgttccaggccatgaagaagggcctgatcctgaaggaccacggcatcagactgctggaggcccagatcgccaccggcggcatcatcgaccccgaggagagccacagactgcccgtggaggtggcctacaagagaggcctgttcgacgaggagatgaacgagatcctgaccgaccccagcgacgacaccaagggcttcttcgaccccaacaccgaggagaacctgacctacctgcagctgatggagagatgcatcaccgacccccagaccggcctgtgcctgctgcccctgaaggagaagaagagagagagaaagaccagcagcaagagcagcgtgagaaagagaagagtggtgatcgtggaccccgagaccggcaaggagatgagcgtgtacgaggcctacagaaagggcctgatcgaccaccagacctacctggagctgagcgagcaggagtgcgagtgggaggagatcaccatcagcagcagcgacggcgtggtgaagagcatgatcatcgacagaagaagcggcagacagtacgacatcgacgacgccatcgccaagaacctgatcgacagaagcgccctggaccagtacagagccggcaccctgagcatcaccgagttcgccgacatgctgagcggcaacgccggcggcttcagaagcagaagcagcagcgtgggcagcagcagcagctaccccatcagccccgccgtgagcagaacccagctggccagctggagcgaccccaccgaggagaccggccccgtggccggcatcctggacaccgagaccctggagaaggtgagcatcaccgaggccatgcacagaaacctggtggacaacatcaccggccagagactgctggaggcccaggcctgcaccggcggcatcatcgaccccagcaccggcgagagattccccgtgaccgacgccgtgaacaagggcctggtggacaagatcatggtggacagaatcaacctggcccagaaggccttctgcggcttcgaggaccccagaaccaagaccaagatgagcgccgcccaggccctgaagaagggctggctgtactacgaggccggccagagattcctggaggtgcagtacctgaccggcggcctgatcgagcccgacacccccggcagagtgcccctggacgaggccctgcagagaggcaccgtggacgccagaaccgcccagaagctgagagacgtgggcgcctacagcaagtacctgacctgccccaagaccaagctgaagatcagctacaaggacgccctggacagaagcatggtggaggagggcaccggcctgagactgctggaggccgccgcccagagcaccaagggctactacagcccctacagcgtgagcggcagcggcagcaccgccggcagcagaaccggcagcagaaccggcagcagagccggcagcagaagaggcagcttcgacgccaccggcagcggcttcagcatgaccttcagcagcagcagctacagcagcagcggctacggcagaagatacgccagcggcagcagcgccagcctgggcggccccgagagcgccgtggcctag

SEQ ID NO: 262188 - DNA, 13644 bp, Artificial Sequence
  derived and/or modified sequence
atgagccagcaccagctgagagtgccccagcccgagggcctgggcagaaagagaaccagcagcgaggacaacctgtacctggccgtgctgagagccagcgagggcaagaaggacgagagagacagagtgcagaagaagaccttcaccaagtgggtgaacaagcacctgatcaaggcccagagacacatcagcgacctgtacgaggacctgagagacggccacaacctgatcagcctgctggaggtgctgagcggcgacagcctgcccagagagaagggcagaatgagattccacaagctgcagaacgtgcagatcgccctggactacctgagacacagacaggtgaagctggtgaacatcagaaacgacgacatcgccgacggcaaccccaagctgaccctgggcctgatctggaccatcatcctgcacttccagatcagcgacatccaggtgagcggccagagcgaggacatgaccgccaaggagaagctgctgctgtggagccagagaatggtggagggctaccagggcctgagatgcgacaacttcaccagcagctggagagacggcagactgttcaacgccatcatccacagacacaagcccctgctgatcgacatgaacaaggtgtacagacagaccaacctggagaacctggaccaggccttcagcgtggccgagagagacctgggcgtgaccagactgctggaccccgaggacgtggacgtgccccagcccgacgagaagagcatcatcacctacgtgagcagcctgtacgacgccatgcccagagtgcccgacgtgcaggacggcgtgagagccaacgagctgcagctgagatggcaggagtacagagagctggtgctgctgctgctgcagtggatgagacaccacaccgccgccttcgaggagagaagattccccagcagcttcgaggagatcgagatcctgtggagccagttcctgaagttcaaggagatggagctgcccgccaaggaggccgacaagaacagaagcaagggcatctaccagagcctggagggcgccgtgcaggccggccagctgaaggtgccccccggctaccaccccctggacgtggagaaggagtggggcaagctgcacgtggccatcctggagagagagaagcagctgagaagcgagttcgagagactggagtgcctgcagagaatcgtgaccaagctgcagatggaggccggcctgtgcgaggagcagctgaaccaggccgacgccctgctgcagagcgacgtgagactgctggccgccggcaaggtgccccagagagccggcgaggtggagagagacctggacaaggccgacagcatgatcagactgctgttcaacgacgtgcagaccctgaaggacggcagacacccccagggcgagcagatgtacagaagagtgtacagactgcacgagagactggtggccatcagaaccgagtacaacctgagactgaaggccggcgtggccgcccccgccacccaggtggcccaggtgaccctgcagagcgtgcagagaagacccgagctggaggacagcaccctgagatacctgcaggacctgctggcctgggtggaggagaaccagcacagagtggacggcgccgagtggggcgtggacctgcccagcgtggaggcccagctgggcagccacagaggcctgcaccagagcatcgaggagttcagagccaagatcgagagagccagaagcgacgagggccagctgagccccgccaccagaggcgcctacagagactgcctgggcagactggacctgcagtacgccaagctgctgaacagcagcaaggccagactgagaagcctggagagcctgcacagcttcgtggccgccgccaccaaggagctgatgtggctgaacgagaaggaggaggaggaggtgggcttcgactggagcgacagaaacaccaacatgaccgccaagaaggagagctacagcgccctgatgagagagctggagctgaaggagaagaagatcaaggagctgcagaacgccggcgacagactgctgagagaggaccaccccgccagacccaccgtggagagcttccaggccgccctgcagacccagtggagctggatgctgcagctgtgctgctgcatcgaggcccacctgaaggagaacgccgcctacttccagttcttcagcgacgtgagagaggccgagggccagctgcagaagctgcaggaggccctgagaagaaagtacagctgcgacagaagcgccaccgtgaccagactggaggacctgctgcaggacgcccaggacgagaaggagcagctgaacgagtacaagggccacctgagcggcctggccaagagagccaaggccgtggtgcagctgaagcccagacaccccgcccaccccatgagaggcagactgcccctgctggccgtgtgcgactacaagcaggtggaggtgaccgtgcacaagggcgacgagtgccagctggtgggccccgcccagcccagccactggaaggtgctgagcagcagcggcagcgaggccgccgtgcccagcgtgtgcttcctggtgcccccccccaaccaggaggcccaggaggccgtgaccagactggaggcccagcaccaggccctggtgaccctgtggcaccagctgcacgtggacatgaagagcctgctggcctggcagagcctgagaagagacgtgcagctgatcagaagctggagcctggccaccttcagaaccctgaagcccgaggagcagagacaggccctgcacagcctggagctgcactaccaggccttcctgagagacagccaggacgccggcggcttcggccccgaggacagactgatggccgagagagagtacggcagctgcagccaccactaccagcagctgctgcagagcctggagcagggcgcccaggaggagagcagatgccagagatgcatcagcgagctgaaggacatcagactgcagctggaggcctgcgagaccagaaccgtgcacagactgagactgcccctggacaaggagcccgccagagagtgcgcccagagaatcgccgagcagcagaaggcccaggccgaggtggagggcctgggcaagggcgtggccagactgagcgccgaggccgagaaggtgctggccctgcccgagcccagccccgccgcccccaccctgagaagcgagctggagctgaccctgggcaagctggagcaggtgagaagcctgagcgccatctacctggagaagctgaagaccatcagcctggtgatcagaggcacccagggcgccgaggaggtgctgagagcccacgaggagcagctgaaggaggcccaggccgtgcccgccaccctgcccgagctggaggccaccaaggccagcctgaagaagctgagagcccaggccgaggcccagcagcccaccttcgacgccctgagagacgagctgagaggcgcccaggaggtgggcgagagactgcagcagagacacggcgagagagacgtggaggtggagagatggagagagagagtggcccagctgctggagagatggcaggccgtgctggcccagaccgacgtgagacagagagagctggagcagctgggcagacagctgagatactacagagagagcgccgaccccctgggcgcctggctgcaggacgccagaagaagacaggagcagatccaggccatgcccctggccgacagccaggccgtgagagagcagctgagacaggagcaggccctgctggaggagatcgagagacacggcgagaaggtggaggagtgccagagattcgccaagcagtacatcaacgccatcaaggactacgagctgcagctggtgacctacaaggcccagctggagcccgtggccagccccgccaagaagcccaaggtgcagagcggcagcgagagcgtgatccaggagtacgtggacctgagaacccactacagcgagctgaccaccctgaccagccagtacatcaagttcatcagcgagaccctgagaagaatggaggaggaggagagactggccgagcagcagagagccgaggagagagagagactggccgaggtggaggccgccctggagaagcagagacagctggccgaggcccacgcccaggccaaggcccaggccgagagagaggccaaggagctgcagcagagaatgcaggaggaggtggtgagaagagaggaggccgccgtggacgcccagcagcagaagagaagcatccaggaggagctgcagcagctgagacagagcagcgaggccgagatccaggccaaggccagacaggccgaggccgccgagagaagcagactgagaatcgaggaggagatcagagtggtgagactgcagctggaggccaccgagagacagagaggcggcgccgagggcgagctgcaggccctgagagccagagccgaggaggccgaggcccagaagagacaggcccaggaggaggccgagagactgagaagacaggtgcaggacgagagccagagaaagagacaggccgaggtggagctggccagcagagtgaaggccgaggccgaggccgccagagagaagcagagagccctgcaggccctggaggagctgagactgcaggccgaggaggccgagagaagactgagacaggccgaggtggagagagccagacaggtgcaggtggccctggagaccgcccagagaagcgccgaggccgagctgcagagcaagagagccagcttcgccgagaagaccgcccagctggagagaagcctgcaggaggagcacgtggccgtggcccagctgagagaggaggccgagagaagagcccagcagcaggccgaggccgagagagccagagaggaggccgagagagagctggagagatggcagctgaaggccaacgaggccctgagactgagactgcaggccgaggaggtggcccagcagaagagcctggcccaggccgaggccgagaagcagaaggaggaggccgagagagaggccagaagaagaggcaaggccgaggagcaggccgtgagacagagagagctggccgagcaggagctggagaagcagagacagctggccgagggcaccgcccagcagagactggccgccgagcaggagctgatcagactgagagccgagaccgagcagggcgagcagcagagacagctgctggaggaggagctggccagactgcagagagaggccgccgccgccacccagaagagacaggagctggaggccgagctggccaaggtgagagccgagatggaggtgctgctggccagcaaggccagagccgaggaggagagcagaagcaccagcgagaagagcaagcagagactggaggccgaggccggcagattcagagagctggccgaggaggccgccagactgagagccctggccgaggaggccaagagacagagacagctggccgaggaggacgccgccagacagagagccgaggccgagagagtgctggccgagaagctggccgccatcggcgaggccaccagactgaagaccgaggccgagatcgccctgaaggagaaggaggccgagaacgagagactgagaagactggccgaggacgaggccttccagagaagaagactggaggagcaggccgcccagcacaaggccgacatcgaggagagactggcccagctgagaaaggccagcgacagcgagctggagagacagaagggcctggtggaggacaccctgagacagagaagacaggtggaggaggagatcctggccctgaaggccagcttcgagaaggccgccgccggcaaggccgagctggagctggagctgggcagaatcagaagcaacgccgaggacaccctgagaagcaaggagcaggccgagctggaggccgccagacagagacagctggccgccgaggaggagagaagaagaagagaggccgaggagagagtgcagaagagcctggccgccgaggaggaggccgccagacagagaaaggccgccctggaggaggtggagagactgaaggccaaggtggaggaggccagaagactgagagagagagccgagcaggagagcgccagacagctgcagctggcccaggaggccgcccagaagagactgcaggccgaggagaaggcccacgccttcgccgtgcagcagaaggagcaggagctgcagcagaccctgcagcaggagcagagcgtgctggaccagctgagaggcgaggccgaggccgccagaagagccgccgaggaggccgaggaggccagagtgcaggccgagagagaggccgcccagagcagaagacaggtggaggaggccgagagactgaagcagagcgccgaggagcaggcccaggccagagcccaggcccaggccgccgccgagaagctgagaaaggaggccgagcaggaggccgccagaagagcccaggccgagcaggccgccctgagacagaagcaggccgccgacgccgagatggagaagcacaagaagttcgccgagcagaccctgagacagaaggcccaggtggagcaggagctgaccaccctgagactgcagctggaggagaccgaccaccagaagaacctgctggacgaggagctgcagagactgaaggccgaggccaccgaggccgccagacagagaagccaggtggaggaggagctgttcagcgtgagagtgcagatggaggagctgagcaagctgaaggccagaatcgaggccgagaacagagccctgatcctgagagacaaggacaacacccagagattcctgcaggaggaggccgagaagatgaagcaggtggccgaggaggccgccagactgagcgtggccgcccaggaggccgccagactgagacagctggccgaggaggacctggcccagcagagagccctggccgagaagatgctgaaggagaagatgcaggccgtgcaggaggccaccagactgaaggccgaggccgagctgctgcagcagcagaaggagctggcccaggagcaggccagaagactgcaggaggacaaggagcagatggcccagcagctggccgaggagacccagggcttccagagaaccctggaggccgagagacagagacagctggagatgagcgccgaggccgagagactgaagctgagagtggccgagatgagcagagcccaggccagagccgaggaggacgcccagagattcagaaagcaggccgaggagatcggcgagaagctgcacagaaccgagctggccacccaggagaaggtgaccctggtgcagaccctggagatccagagacagcagagcgaccacgacgccgagagactgagagaggccatcgccgagctggagagagagaaggagaagctgcagcaggaggccaagctgctgcagctgaagagcgaggagatgcagaccgtgcagcaggagcagctgctgcaggagacccaggccctgcagcagagcttcctgagcgagaaggacagcctgctgcagagagagagattcatcgagcaggagaaggccaagctggagcagctgttccaggacgaggtggccaaggcccagcagctgagagaggagcagcagagacagcagcagcagatggagcaggagagacagagactggtggccagcatggaggaggccagaagaagacagcacgaggccgaggagggcgtgagaagaaagcaggaggagctgcagcagctggagcagcagagaagacagcaggaggagctgctggccgaggagaaccagagactgagagagcagctgcagctgctggaggagcagcacagagccgccctggcccacagcgaggaggtgaccgccagccaggtggccgccaccaagaccctgcccaacggcagagacgccctggacggccccgccgccgaggccgagcccgagcacagcttcgacggcctgagaagaaaggtgagcgcccagagactgcaggaggccggcatcctgagcgccgaggagctgcagagactggcccagggccacaccaccgtggacgagctggccagaagagaggacgtgagacactacctgcagggcagaagcagcatcgccggcctgctgctgaaggccaccaacgagaagctgagcgtgtacgccgccctgcagagacagctgctgagccccggcaccgccctgatcctgctggaggcccaggccgccagcggcttcctgctggaccccgtgagaaacagaagactgaccgtgaacgaggccgtgaaggagggcgtggtgggccccgagctgcaccacaagctgctgagcgccgagagagccgtgaccggctacaaggacccctacaccggccagcagatcagcctgttccaggccatgcagaagggcctgatcgtgagagagcacggcatcagactgctggaggcccagatcgccaccggcggcgtgatcgaccccgtgcacagccacagagtgcccgtggacgtggcctacagaagaggctacttcgacgaggagatgaacagagtgctggccgaccccagcgacgacaccaagggcttcttcgaccccaacacccacgagaacctgacctacctgcagctgctggagagatgcgtggaggaccccgagaccggcctgtgcctgctgcccctgaccgacaaggccgccaagggcggcgagctggtgtacaccgacagcgaggccagagacgtgttcgagaaggccaccgtgagcgcccccttcggcaagttccagggcaagaccgtgaccatctgggagatcatcaacagcgagtacttcaccgccgagcagagaagagacctgctgagacagttcagaaccggcagaatcaccgtggagaagatcatcaagatcatcatcaccgtggtggaggagcaggagcagaagggcagactgtgcttcgagggcctgagaagcctggtgcccgccgccgagctgctggagagcagagtgatcgacagagagctgtaccagcagctgcagagaggcgagagaagcgtgagagacgtggccgaggtggacaccgtgagaagagccctgagaggcgccaacgtgatcgccggcgtgtggctggaggaggccggccagaagctgagcatctacaacgccctgaagaaggacctgctgcccagcgacatggccgtggccctgctggaggcccaggccggcaccggccacatcatcgaccccgccaccagcgccagactgaccgtggacgaggccgtgagagccggcctggtgggccccgagttccacgagaagctgctgagcgccgagaaggccgtgaccggctacagagacccctacaccggccagagcgtgagcctgttccaggccctgaagaagggcctgatccccagagagcagggcctgagactgctggacgcccagctgagcaccggcggcatcgtggaccccagcaagagccacagagtgcccctggacgtggcctgcgccagaggctgcctggacgaggagaccagcagagccctgagcgcccccagagccgacgccaaggcctacagcgaccccagcaccggcgagcccgccacctacggcgagctgcagcagagatgcagacccgaccagctgaccggcctgagcctgctgcccctgagcgagaaggccgccagagccagacaggaggagctgtacagcgagctgcaggccagagagaccttcgagaagacccccgtggaggtgcccgtgggcggcttcaagggcagaaccgtgaccgtgtgggagctgatcagcagcgagtacttcaccgccgagcagagacaggagctgctgagacagttcagaaccggcaaggtgaccgtggagaaggtgatcaagatcctgatcaccatcgtggaggaggtggagaccctgagacaggagagactgagcttcagcggcctgagagcccccgtgcccgccagcgagctgctggccagcggcgtgctgagcagagcccagttcgagcagctgaaggacggcaagaccaccgtgaaggacctgagcgagctgggcagcgtgagaaccctgctgcagggcagcggctgcctggccggcatctacctggaggacaccaaggagaaggtgagcatctacgaggccatgagaagaggcctgctgagagccaccaccgccgccctgctgctggaggcccaggccgccaccggcttcctggtggaccccgtgagaaaccagagactgtacgtgcacgaggccgtgaaggccggcgtggtgggccccgagctgcacgagcagctgctgagcgccgagaaggccgtgaccggctacagagacccctacagcggcagcaccatcagcctgttccaggccatgcagaagggcctggtgctgagacagcacggcatcagactgctggaggcccagatcgccaccggcggcatcatcgaccccgtgcacagccacagagtgcccgtggacgtggcctaccagagaggctacttcagcgaggagatgaacagagtgctggccgaccccagcgacgacaccaagggcttcttcgaccccaacacccacgagaacctgacctacagacagctgctggagagatgcgtggaggaccccgagaccggcctgagactgctgcccctgaagggcgccgagaaggccgaggtggtggagaccacccaggtgtacaccgaggaggagaccagaagagccttcgaggagacccagatcgacatccccggcggcggcagccacggcggcagcaccatgagcctgtgggaggtgatgcagagcgacctgatccccgaggagcagagagcccagctgatggccgacttccaggccggcagagtgaccaaggagagaatgatcatcatcatcatcgagatcatcgagaagaccgagatcatcagacagcagggcctggccagctacgactacgtgagaagaagactgaccgccgaggacctgttcgaggccagaatcatcagcctggagacctacaacctgctgagagagggcaccagaagcctgagagaggccctggaggccgagagcgcctggtgctacctgtacggcaccggcagcgtggccggcgtgtacctgcccggcagcagacagaccctgagcatctaccaggccctgaagaagggcctgctgagcgccgaggtggccagactgctgctggaggcccaggccgccaccggcttcctgctggaccccgtgaagggcgagagactgaccgtggacgaggccgtgagaaagggcctggtgggccccgagctgcacgacagactgctgagcgccgagagagccgtgaccggctacagagacccctacaccgagcagaccatcagcctgttccaggccatgaagaaggagctgatccccaccgaggaggccctgagactgctggacgcccagctggccaccggcggcatcgtggaccccagactgggcttccacctgcccctggaggtggcctaccagagaggctacctgaacaaggacacccacgaccagctgagcgagcccagcgaggtgagaagctacgtggaccccagcaccgacgagagactgagctacacccagctgctgagaagatgcagaagagacgacggcaccggccagctgctgctgcccctgagcgacgccagaaagctgaccttcagaggcctgagaaagcagatcaccatggaggagctggtgagaagccaggtgatggacgaggccaccgccctgcagctgagagagggcctgaccagcatcgaggaggtgaccaagaacctgcagaagttcctggagggcaccagctgcatcgccggcgtgttcgtggacgccaccaaggagagactgagcgtgtaccaggccatgaagaagggcatcatcagacccggcaccgccttcgagctgctggaggcccaggccgccaccggctacgtgatcgaccccatcaagggcctgaagctgaccgtggaggaggccgtgagaatgggcatcgtgggccccgagttcaaggacaagctgctgagcgccgagagagccgtgaccggctacaaggacccctacagcggcaagctgatcagcctgttccaggccatgaagaagggcctgatcctgaaggaccacggcatcagactgctggaggcccagatcgccaccggcggcatcatcgaccccgaggagagccacagactgcccgtggaggtggcctacaagagaggcctgttcgacgaggagatgaacgagatcctgaccgaccccagcgacgacaccaagggcttcttcgaccccaacaccgaggagaacctgacctacctgcagctgatggagagatgcatcaccgacccccagaccggcctgtgcctgctgcccctgaaggagaagaagagagagagaaagaccagcagcaagagcagcgtgagaaagagaagagtggtgatcgtggaccccgagaccggcaaggagatgagcgtgtacgaggcctacagaaagggcctgatcgaccaccagacctacctggagctgagcgagcaggagtgcgagtgggaggagatcaccatcagcagcagcgacggcgtggtgaagagcatgatcatcgacagaagaagcggcagacagtacgacatcgacgacgccatcgccaagaacctgatcgacagaagcgccctggaccagtacagagccggcaccctgagcatcaccgagttcgccgacatgctgagcggcaacgccggcggcttcagaagcagaagcagcagcgtgggcagcagcagcagctaccccatcagccccgccgtgagcagaacccagctggccagctggagcgaccccaccgaggagaccggccccgtggccggcatcctggacaccgagaccctggagaaggtgagcatcaccgaggccatgcacagaaacctggtggacaacatcaccggccagagactgctggaggcccaggcctgcaccggcggcatcatcgaccccagcaccggcgagagattccccgtgaccgacgccgtgaacaagggcctggtggacaagatcatggtggacagaatcaacctggcccagaaggccttctgcggcttcgaggaccccagaaccaagaccaagatgagcgccgcccaggccctgaagaagggctggctgtactacgaggccggccagagattcctggaggtgcagtacctgaccggcggcctgatcgagcccgacacccccggcagagtgcccctggacgaggccctgcagagaggcaccgtggacgccagaaccgcccagaagctgagagacgtgggcgcctacagcaagtacctgacctgccccaagaccaagctgaagatcagctacaaggacgccctggacagaagcatggtggaggagggcaccggcctgagactgctggaggccgccgcccagagcaccaagggctactacagcccctacagcgtgagcggcagcggcagcaccgccggcagcagaaccggcagcagaaccggcagcagagccggcagcagaagaggcagcttcgacgccaccggcagcggcttcagcatgaccttcagcagcagcagctacagcagcagcggctacggcagaagatacgccagcggcagcagcgccagcctgggcggccccgagagcgccgtggcctag

SEQ ID NO: 262189 - DNA, 13644 bp, Artificial Sequence
  derived and/or modified sequence
atggagcccagcggcagcctgttccccagcctggtggtggtgggccacgtggtgaccctggccgccgtgtggcactggagaagaggcagaagatgggcccaggacgagcaggacgagagagacagagtgcagaagaagaccttcaccaagtgggtgaacaagcacctgatcaaggcccagagacacatcagcgacctgtacgaggacctgagagacggccacaacctgatcagcctgctggaggtgctgagcggcgacagcctgcccagagagaagggcagaatgagattccacaagctgcagaacgtgcagatcgccctggactacctgagacacagacaggtgaagctggtgaacatcagaaacgacgacatcgccgacggcaaccccaagctgaccctgggcctgatctggaccatcatcctgcacttccagatcagcgacatccaggtgagcggccagagcgaggacatgaccgccaaggagaagctgctgctgtggagccagagaatggtggagggctaccagggcctgagatgcgacaacttcaccagcagctggagagacggcagactgttcaacgccatcatccacagacacaagcccctgctgatcgacatgaacaaggtgtacagacagaccaacctggagaacctggaccaggccttcagcgtggccgagagagacctgggcgtgaccagactgctggaccccgaggacgtggacgtgccccagcccgacgagaagagcatcatcacctacgtgagcagcctgtacgacgccatgcccagagtgcccgacgtgcaggacggcgtgagagccaacgagctgcagctgagatggcaggagtacagagagctggtgctgctgctgctgcagtggatgagacaccacaccgccgccttcgaggagagaagattccccagcagcttcgaggagatcgagatcctgtggagccagttcctgaagttcaaggagatggagctgcccgccaaggaggccgacaagaacagaagcaagggcatctaccagagcctggagggcgccgtgcaggccggccagctgaaggtgccccccggctaccaccccctggacgtggagaaggagtggggcaagctgcacgtggccatcctggagagagagaagcagctgagaagcgagttcgagagactggagtgcctgcagagaatcgtgaccaagctgcagatggaggccggcctgtgcgaggagcagctgaaccaggccgacgccctgctgcagagcgacgtgagactgctggccgccggcaaggtgccccagagagccggcgaggtggagagagacctggacaaggccgacagcatgatcagactgctgttcaacgacgtgcagaccctgaaggacggcagacacccccagggcgagcagatgtacagaagagtgtacagactgcacgagagactggtggccatcagaaccgagtacaacctgagactgaaggccggcgtggccgcccccgccacccaggtggcccaggtgaccctgcagagcgtgcagagaagacccgagctggaggacagcaccctgagatacctgcaggacctgctggcctgggtggaggagaaccagcacagagtggacggcgccgagtggggcgtggacctgcccagcgtggaggcccagctgggcagccacagaggcctgcaccagagcatcgaggagttcagagccaagatcgagagagccagaagcgacgagggccagctgagccccgccaccagaggcgcctacagagactgcctgggcagactggacctgcagtacgccaagctgctgaacagcagcaaggccagactgagaagcctggagagcctgcacagcttcgtggccgccgccaccaaggagctgatgtggctgaacgagaaggaggaggaggaggtgggcttcgactggagcgacagaaacaccaacatgaccgccaagaaggagagctacagcgccctgatgagagagctggagctgaaggagaagaagatcaaggagctgcagaacgccggcgacagactgctgagagaggaccaccccgccagacccaccgtggagagcttccaggccgccctgcagacccagtggagctggatgctgcagctgtgctgctgcatcgaggcccacctgaaggagaacgccgcctacttccagttcttcagcgacgtgagagaggccgagggccagctgcagaagctgcaggaggccctgagaagaaagtacagctgcgacagaagcgccaccgtgaccagactggaggacctgctgcaggacgcccaggacgagaaggagcagctgaacgagtacaagggccacctgagcggcctggccaagagagccaaggccgtggtgcagctgaagcccagacaccccgcccaccccatgagaggcagactgcccctgctggccgtgtgcgactacaagcaggtggaggtgaccgtgcacaagggcgacgagtgccagctggtgggccccgcccagcccagccactggaaggtgctgagcagcagcggcagcgaggccgccgtgcccagcgtgtgcttcctggtgcccccccccaaccaggaggcccaggaggccgtgaccagactggaggcccagcaccaggccctggtgaccctgtggcaccagctgcacgtggacatgaagagcctgctggcctggcagagcctgagaagagacgtgcagctgatcagaagctggagcctggccaccttcagaaccctgaagcccgaggagcagagacaggccctgcacagcctggagctgcactaccaggccttcctgagagacagccaggacgccggcggcttcggccccgaggacagactgatggccgagagagagtacggcagctgcagccaccactaccagcagctgctgcagagcctggagcagggcgcccaggaggagagcagatgccagagatgcatcagcgagctgaaggacatcagactgcagctggaggcctgcgagaccagaaccgtgcacagactgagactgcccctggacaaggagcccgccagagagtgcgcccagagaatcgccgagcagcagaaggcccaggccgaggtggagggcctgggcaagggcgtggccagactgagcgccgaggccgagaaggtgctggccctgcccgagcccagccccgccgcccccaccctgagaagcgagctggagctgaccctgggcaagctggagcaggtgagaagcctgagcgccatctacctggagaagctgaagaccatcagcctggtgatcagaggcacccagggcgccgaggaggtgctgagagcccacgaggagcagctgaaggaggcccaggccgtgcccgccaccctgcccgagctggaggccaccaaggccagcctgaagaagctgagagcccaggccgaggcccagcagcccaccttcgacgccctgagagacgagctgagaggcgcccaggaggtgggcgagagactgcagcagagacacggcgagagagacgtggaggtggagagatggagagagagagtggcccagctgctggagagatggcaggccgtgctggcccagaccgacgtgagacagagagagctggagcagctgggcagacagctgagatactacagagagagcgccgaccccctgggcgcctggctgcaggacgccagaagaagacaggagcagatccaggccatgcccctggccgacagccaggccgtgagagagcagctgagacaggagcaggccctgctggaggagatcgagagacacggcgagaaggtggaggagtgccagagattcgccaagcagtacatcaacgccatcaaggactacgagctgcagctggtgacctacaaggcccagctggagcccgtggccagccccgccaagaagcccaaggtgcagagcggcagcgagagcgtgatccaggagtacgtggacctgagaacccactacagcgagctgaccaccctgaccagccagtacatcaagttcatcagcgagaccctgagaagaatggaggaggaggagagactggccgagcagcagagagccgaggagagagagagactggccgaggtggaggccgccctggagaagcagagacagctggccgaggcccacgcccaggccaaggcccaggccgagagagaggccaaggagctgcagcagagaatgcaggaggaggtggtgagaagagaggaggccgccgtggacgcccagcagcagaagagaagcatccaggaggagctgcagcagctgagacagagcagcgaggccgagatccaggccaaggccagacaggccgaggccgccgagagaagcagactgagaatcgaggaggagatcagagtggtgagactgcagctggaggccaccgagagacagagaggcggcgccgagggcgagctgcaggccctgagagccagagccgaggaggccgaggcccagaagagacaggcccaggaggaggccgagagactgagaagacaggtgcaggacgagagccagagaaagagacaggccgaggtggagctggccagcagagtgaaggccgaggccgaggccgccagagagaagcagagagccctgcaggccctggaggagctgagactgcaggccgaggaggccgagagaagactgagacaggccgaggtggagagagccagacaggtgcaggtggccctggagaccgcccagagaagcgccgaggccgagctgcagagcaagagagccagcttcgccgagaagaccgcccagctggagagaagcctgcaggaggagcacgtggccgtggcccagctgagagaggaggccgagagaagagcccagcagcaggccgaggccgagagagccagagaggaggccgagagagagctggagagatggcagctgaaggccaacgaggccctgagactgagactgcaggccgaggaggtggcccagcagaagagcctggcccaggccgaggccgagaagcagaaggaggaggccgagagagaggccagaagaagaggcaaggccgaggagcaggccgtgagacagagagagctggccgagcaggagctggagaagcagagacagctggccgagggcaccgcccagcagagactggccgccgagcaggagctgatcagactgagagccgagaccgagcagggcgagcagcagagacagctgctggaggaggagctggccagactgcagagagaggccgccgccgccacccagaagagacaggagctggaggccgagctggccaaggtgagagccgagatggaggtgctgctggccagcaaggccagagccgaggaggagagcagaagcaccagcgagaagagcaagcagagactggaggccgaggccggcagattcagagagctggccgaggaggccgccagactgagagccctggccgaggaggccaagagacagagacagctggccgaggaggacgccgccagacagagagccgaggccgagagagtgctggccgagaagctggccgccatcggcgaggccaccagactgaagaccgaggccgagatcgccctgaaggagaaggaggccgagaacgagagactgagaagactggccgaggacgaggccttccagagaagaagactggaggagcaggccgcccagcacaaggccgacatcgaggagagactggcccagctgagaaaggccagcgacagcgagctggagagacagaagggcctggtggaggacaccctgagacagagaagacaggtggaggaggagatcctggccctgaaggccagcttcgagaaggccgccgccggcaaggccgagctggagctggagctgggcagaatcagaagcaacgccgaggacaccctgagaagcaaggagcaggccgagctggaggccgccagacagagacagctggccgccgaggaggagagaagaagaagagaggccgaggagagagtgcagaagagcctggccgccgaggaggaggccgccagacagagaaaggccgccctggaggaggtggagagactgaaggccaaggtggaggaggccagaagactgagagagagagccgagcaggagagcgccagacagctgcagctggcccaggaggccgcccagaagagactgcaggccgaggagaaggcccacgccttcgccgtgcagcagaaggagcaggagctgcagcagaccctgcagcaggagcagagcgtgctggaccagctgagaggcgaggccgaggccgccagaagagccgccgaggaggccgaggaggccagagtgcaggccgagagagaggccgcccagagcagaagacaggtggaggaggccgagagactgaagcagagcgccgaggagcaggcccaggccagagcccaggcccaggccgccgccgagaagctgagaaaggaggccgagcaggaggccgccagaagagcccaggccgagcaggccgccctgagacagaagcaggccgccgacgccgagatggagaagcacaagaagttcgccgagcagaccctgagacagaaggcccaggtggagcaggagctgaccaccctgagactgcagctggaggagaccgaccaccagaagaacctgctggacgaggagctgcagagactgaaggccgaggccaccgaggccgccagacagagaagccaggtggaggaggagctgttcagcgtgagagtgcagatggaggagctgagcaagctgaaggccagaatcgaggccgagaacagagccctgatcctgagagacaaggacaacacccagagattcctgcaggaggaggccgagaagatgaagcaggtggccgaggaggccgccagactgagcgtggccgcccaggaggccgccagactgagacagctggccgaggaggacctggcccagcagagagccctggccgagaagatgctgaaggagaagatgcaggccgtgcaggaggccaccagactgaaggccgaggccgagctgctgcagcagcagaaggagctggcccaggagcaggccagaagactgcaggaggacaaggagcagatggcccagcagctggccgaggagacccagggcttccagagaaccctggaggccgagagacagagacagctggagatgagcgccgaggccgagagactgaagctgagagtggccgagatgagcagagcccaggccagagccgaggaggacgcccagagattcagaaagcaggccgaggagatcggcgagaagctgcacagaaccgagctggccacccaggagaaggtgaccctggtgcagaccctggagatccagagacagcagagcgaccacgacgccgagagactgagagaggccatcgccgagctggagagagagaaggagaagctgcagcaggaggccaagctgctgcagctgaagagcgaggagatgcagaccgtgcagcaggagcagctgctgcaggagacccaggccctgcagcagagcttcctgagcgagaaggacagcctgctgcagagagagagattcatcgagcaggagaaggccaagctggagcagctgttccaggacgaggtggccaaggcccagcagctgagagaggagcagcagagacagcagcagcagatggagcaggagagacagagactggtggccagcatggaggaggccagaagaagacagcacgaggccgaggagggcgtgagaagaaagcaggaggagctgcagcagctggagcagcagagaagacagcaggaggagctgctggccgaggagaaccagagactgagagagcagctgcagctgctggaggagcagcacagagccgccctggcccacagcgaggaggtgaccgccagccaggtggccgccaccaagaccctgcccaacggcagagacgccctggacggccccgccgccgaggccgagcccgagcacagcttcgacggcctgagaagaaaggtgagcgcccagagactgcaggaggccggcatcctgagcgccgaggagctgcagagactggcccagggccacaccaccgtggacgagctggccagaagagaggacgtgagacactacctgcagggcagaagcagcatcgccggcctgctgctgaaggccaccaacgagaagctgagcgtgtacgccgccctgcagagacagctgctgagccccggcaccgccctgatcctgctggaggcccaggccgccagcggcttcctgctggaccccgtgagaaacagaagactgaccgtgaacgaggccgtgaaggagggcgtggtgggccccgagctgcaccacaagctgctgagcgccgagagagccgtgaccggctacaaggacccctacaccggccagcagatcagcctgttccaggccatgcagaagggcctgatcgtgagagagcacggcatcagactgctggaggcccagatcgccaccggcggcgtgatcgaccccgtgcacagccacagagtgcccgtggacgtggcctacagaagaggctacttcgacgaggagatgaacagagtgctggccgaccccagcgacgacaccaagggcttcttcgaccccaacacccacgagaacctgacctacctgcagctgctggagagatgcgtggaggaccccgagaccggcctgtgcctgctgcccctgaccgacaaggccgccaagggcggcgagctggtgtacaccgacagcgaggccagagacgtgttcgagaaggccaccgtgagcgcccccttcggcaagttccagggcaagaccgtgaccatctgggagatcatcaacagcgagtacttcaccgccgagcagagaagagacctgctgagacagttcagaaccggcagaatcaccgtggagaagatcatcaagatcatcatcaccgtggtggaggagcaggagcagaagggcagactgtgcttcgagggcctgagaagcctggtgcccgccgccgagctgctggagagcagagtgatcgacagagagctgtaccagcagctgcagagaggcgagagaagcgtgagagacgtggccgaggtggacaccgtgagaagagccctgagaggcgccaacgtgatcgccggcgtgtggctggaggaggccggccagaagctgagcatctacaacgccctgaagaaggacctgctgcccagcgacatggccgtggccctgctggaggcccaggccggcaccggccacatcatcgaccccgccaccagcgccagactgaccgtggacgaggccgtgagagccggcctggtgggccccgagttccacgagaagctgctgagcgccgagaaggccgtgaccggctacagagacccctacaccggccagagcgtgagcctgttccaggccctgaagaagggcctgatccccagagagcagggcctgagactgctggacgcccagctgagcaccggcggcatcgtggaccccagcaagagccacagagtgcccctggacgtggcctgcgccagaggctgcctggacgaggagaccagcagagccctgagcgcccccagagccgacgccaaggcctacagcgaccccagcaccggcgagcccgccacctacggcgagctgcagcagagatgcagacccgaccagctgaccggcctgagcctgctgcccctgagcgagaaggccgccagagccagacaggaggagctgtacagcgagctgcaggccagagagaccttcgagaagacccccgtggaggtgcccgtgggcggcttcaagggcagaaccgtgaccgtgtgggagctgatcagcagcgagtacttcaccgccgagcagagacaggagctgctgagacagttcagaaccggcaaggtgaccgtggagaaggtgatcaagatcctgatcaccatcgtggaggaggtggagaccctgagacaggagagactgagcttcagcggcctgagagcccccgtgcccgccagcgagctgctggccagcggcgtgctgagcagagcccagttcgagcagctgaaggacggcaagaccaccgtgaaggacctgagcgagctgggcagcgtgagaaccctgctgcagggcagcggctgcctggccggcatctacctggaggacaccaaggagaaggtgagcatctacgaggccatgagaagaggcctgctgagagccaccaccgccgccctgctgctggaggcccaggccgccaccggcttcctggtggaccccgtgagaaaccagagactgtacgtgcacgaggccgtgaaggccggcgtggtgggccccgagctgcacgagcagctgctgagcgccgagaaggccgtgaccggctacagagacccctacagcggcagcaccatcagcctgttccaggccatgcagaagggcctggtgctgagacagcacggcatcagactgctggaggcccagatcgccaccggcggcatcatcgaccccgtgcacagccacagagtgcccgtggacgtggcctaccagagaggctacttcagcgaggagatgaacagagtgctggccgaccccagcgacgacaccaagggcttcttcgaccccaacacccacgagaacctgacctacagacagctgctggagagatgcgtggaggaccccgagaccggcctgagactgctgcccctgaagggcgccgagaaggccgaggtggtggagaccacccaggtgtacaccgaggaggagaccagaagagccttcgaggagacccagatcgacatccccggcggcggcagccacggcggcagcaccatgagcctgtgggaggtgatgcagagcgacctgatccccgaggagcagagagcccagctgatggccgacttccaggccggcagagtgaccaaggagagaatgatcatcatcatcatcgagatcatcgagaagaccgagatcatcagacagcagggcctggccagctacgactacgtgagaagaagactgaccgccgaggacctgttcgaggccagaatcatcagcctggagacctacaacctgctgagagagggcaccagaagcctgagagaggccctggaggccgagagcgcctggtgctacctgtacggcaccggcagcgtggccggcgtgtacctgcccggcagcagacagaccctgagcatctaccaggccctgaagaagggcctgctgagcgccgaggtggccagactgctgctggaggcccaggccgccaccggcttcctgctggaccccgtgaagggcgagagactgaccgtggacgaggccgtgagaaagggcctggtgggccccgagctgcacgacagactgctgagcgccgagagagccgtgaccggctacagagacccctacaccgagcagaccatcagcctgttccaggccatgaagaaggagctgatccccaccgaggaggccctgagactgctggacgcccagctggccaccggcggcatcgtggaccccagactgggcttccacctgcccctggaggtggcctaccagagaggctacctgaacaaggacacccacgaccagctgagcgagcccagcgaggtgagaagctacgtggaccccagcaccgacgagagactgagctacacccagctgctgagaagatgcagaagagacgacggcaccggccagctgctgctgcccctgagcgacgccagaaagctgaccttcagaggcctgagaaagcagatcaccatggaggagctggtgagaagccaggtgatggacgaggccaccgccctgcagctgagagagggcctgaccagcatcgaggaggtgaccaagaacctgcagaagttcctggagggcaccagctgcatcgccggcgtgttcgtggacgccaccaaggagagactgagcgtgtaccaggccatgaagaagggcatcatcagacccggcaccgccttcgagctgctggaggcccaggccgccaccggctacgtgatcgaccccatcaagggcctgaagctgaccgtggaggaggccgtgagaatgggcatcgtgggccccgagttcaaggacaagctgctgagcgccgagagagccgtgaccggctacaaggacccctacagcggcaagctgatcagcctgttccaggccatgaagaagggcctgatcctgaaggaccacggcatcagactgctggaggcccagatcgccaccggcggcatcatcgaccccgaggagagccacagactgcccgtggaggtggcctacaagagaggcctgttcgacgaggagatgaacgagatcctgaccgaccccagcgacgacaccaagggcttcttcgaccccaacaccgaggagaacctgacctacctgcagctgatggagagatgcatcaccgacccccagaccggcctgtgcctgctgcccctgaaggagaagaagagagagagaaagaccagcagcaagagcagcgtgagaaagagaagagtggtgatcgtggaccccgagaccggcaaggagatgagcgtgtacgaggcctacagaaagggcctgatcgaccaccagacctacctggagctgagcgagcaggagtgcgagtgggaggagatcaccatcagcagcagcgacggcgtggtgaagagcatgatcatcgacagaagaagcggcagacagtacgacatcgacgacgccatcgccaagaacctgatcgacagaagcgccctggaccagtacagagccggcaccctgagcatcaccgagttcgccgacatgctgagcggcaacgccggcggcttcagaagcagaagcagcagcgtgggcagcagcagcagctaccccatcagccccgccgtgagcagaacccagctggccagctggagcgaccccaccgaggagaccggccccgtggccggcatcctggacaccgagaccctggagaaggtgagcatcaccgaggccatgcacagaaacctggtggacaacatcaccggccagagactgctggaggcccaggcctgcaccggcggcatcatcgaccccagcaccggcgagagattccccgtgaccgacgccgtgaacaagggcctggtggacaagatcatggtggacagaatcaacctggcccagaaggccttctgcggcttcgaggaccccagaaccaagaccaagatgagcgccgcccaggccctgaagaagggctggctgtactacgaggccggccagagattcctggaggtgcagtacctgaccggcggcctgatcgagcccgacacccccggcagagtgcccctggacgaggccctgcagagaggcaccgtggacgccagaaccgcccagaagctgagagacgtgggcgcctacagcaagtacctgacctgccccaagaccaagctgaagatcagctacaaggacgccctggacagaagcatggtggaggagggcaccggcctgagactgctggaggccgccgcccagagcaccaagggctactacagcccctacagcgtgagcggcagcggcagcaccgccggcagcagaaccggcagcagaaccggcagcagagccggcagcagaagaggcagcttcgacgccaccggcagcggcttcagcatgaccttcagcagcagcagctacagcagcagcggctacggcagaagatacgccagcggcagcagcgccagcctgggcggccccgagagcgccgtggcctag

SEQ ID NO: 262190 - DNA, 13578 bp, Artificial Sequence
  derived and/or modified sequence
atggaccccagcagagccatccagaacgagatcagcagcctgaaggacgagagagacagagtgcagaagaagaccttcaccaagtgggtgaacaagcacctgatcaaggcccagagacacatcagcgacctgtacgaggacctgagagacggccacaacctgatcagcctgctggaggtgctgagcggcgacagcctgcccagagagaagggcagaatgagattccacaagctgcagaacgtgcagatcgccctggactacctgagacacagacaggtgaagctggtgaacatcagaaacgacgacatcgccgacggcaaccccaagctgaccctgggcctgatctggaccatcatcctgcacttccagatcagcgacatccaggtgagcggccagagcgaggacatgaccgccaaggagaagctgctgctgtggagccagagaatggtggagggctaccagggcctgagatgcgacaacttcaccagcagctggagagacggcagactgttcaacgccatcatccacagacacaagcccctgctgatcgacatgaacaaggtgtacagacagaccaacctggagaacctggaccaggccttcagcgtggccgagagagacctgggcgtgaccagactgctggaccccgaggacgtggacgtgccccagcccgacgagaagagcatcatcacctacgtgagcagcctgtacgacgccatgcccagagtgcccgacgtgcaggacggcgtgagagccaacgagctgcagctgagatggcaggagtacagagagctggtgctgctgctgctgcagtggatgagacaccacaccgccgccttcgaggagagaagattccccagcagcttcgaggagatcgagatcctgtggagccagttcctgaagttcaaggagatggagctgcccgccaaggaggccgacaagaacagaagcaagggcatctaccagagcctggagggcgccgtgcaggccggccagctgaaggtgccccccggctaccaccccctggacgtggagaaggagtggggcaagctgcacgtggccatcctggagagagagaagcagctgagaagcgagttcgagagactggagtgcctgcagagaatcgtgaccaagctgcagatggaggccggcctgtgcgaggagcagctgaaccaggccgacgccctgctgcagagcgacgtgagactgctggccgccggcaaggtgccccagagagccggcgaggtggagagagacctggacaaggccgacagcatgatcagactgctgttcaacgacgtgcagaccctgaaggacggcagacacccccagggcgagcagatgtacagaagagtgtacagactgcacgagagactggtggccatcagaaccgagtacaacctgagactgaaggccggcgtggccgcccccgccacccaggtggcccaggtgaccctgcagagcgtgcagagaagacccgagctggaggacagcaccctgagatacctgcaggacctgctggcctgggtggaggagaaccagcacagagtggacggcgccgagtggggcgtggacctgcccagcgtggaggcccagctgggcagccacagaggcctgcaccagagcatcgaggagttcagagccaagatcgagagagccagaagcgacgagggccagctgagccccgccaccagaggcgcctacagagactgcctgggcagactggacctgcagtacgccaagctgctgaacagcagcaaggccagactgagaagcctggagagcctgcacagcttcgtggccgccgccaccaaggagctgatgtggctgaacgagaaggaggaggaggaggtgggcttcgactggagcgacagaaacaccaacatgaccgccaagaaggagagctacagcgccctgatgagagagctggagctgaaggagaagaagatcaaggagctgcagaacgccggcgacagactgctgagagaggaccaccccgccagacccaccgtggagagcttccaggccgccctgcagacccagtggagctggatgctgcagctgtgctgctgcatcgaggcccacctgaaggagaacgccgcctacttccagttcttcagcgacgtgagagaggccgagggccagctgcagaagctgcaggaggccctgagaagaaagtacagctgcgacagaagcgccaccgtgaccagactggaggacctgctgcaggacgcccaggacgagaaggagcagctgaacgagtacaagggccacctgagcggcctggccaagagagccaaggccgtggtgcagctgaagcccagacaccccgcccaccccatgagaggcagactgcccctgctggccgtgtgcgactacaagcaggtggaggtgaccgtgcacaagggcgacgagtgccagctggtgggccccgcccagcccagccactggaaggtgctgagcagcagcggcagcgaggccgccgtgcccagcgtgtgcttcctggtgcccccccccaaccaggaggcccaggaggccgtgaccagactggaggcccagcaccaggccctggtgaccctgtggcaccagctgcacgtggacatgaagagcctgctggcctggcagagcctgagaagagacgtgcagctgatcagaagctggagcctggccaccttcagaaccctgaagcccgaggagcagagacaggccctgcacagcctggagctgcactaccaggccttcctgagagacagccaggacgccggcggcttcggccccgaggacagactgatggccgagagagagtacggcagctgcagccaccactaccagcagctgctgcagagcctggagcagggcgcccaggaggagagcagatgccagagatgcatcagcgagctgaaggacatcagactgcagctggaggcctgcgagaccagaaccgtgcacagactgagactgcccctggacaaggagcccgccagagagtgcgcccagagaatcgccgagcagcagaaggcccaggccgaggtggagggcctgggcaagggcgtggccagactgagcgccgaggccgagaaggtgctggccctgcccgagcccagccccgccgcccccaccctgagaagcgagctggagctgaccctgggcaagctggagcaggtgagaagcctgagcgccatctacctggagaagctgaagaccatcagcctggtgatcagaggcacccagggcgccgaggaggtgctgagagcccacgaggagcagctgaaggaggcccaggccgtgcccgccaccctgcccgagctggaggccaccaaggccagcctgaagaagctgagagcccaggccgaggcccagcagcccaccttcgacgccctgagagacgagctgagaggcgcccaggaggtgggcgagagactgcagcagagacacggcgagagagacgtggaggtggagagatggagagagagagtggcccagctgctggagagatggcaggccgtgctggcccagaccgacgtgagacagagagagctggagcagctgggcagacagctgagatactacagagagagcgccgaccccctgggcgcctggctgcaggacgccagaagaagacaggagcagatccaggccatgcccctggccgacagccaggccgtgagagagcagctgagacaggagcaggccctgctggaggagatcgagagacacggcgagaaggtggaggagtgccagagattcgccaagcagtacatcaacgccatcaaggactacgagctgcagctggtgacctacaaggcccagctggagcccgtggccagccccgccaagaagcccaaggtgcagagcggcagcgagagcgtgatccaggagtacgtggacctgagaacccactacagcgagctgaccaccctgaccagccagtacatcaagttcatcagcgagaccctgagaagaatggaggaggaggagagactggccgagcagcagagagccgaggagagagagagactggccgaggtggaggccgccctggagaagcagagacagctggccgaggcccacgcccaggccaaggcccaggccgagagagaggccaaggagctgcagcagagaatgcaggaggaggtggtgagaagagaggaggccgccgtggacgcccagcagcagaagagaagcatccaggaggagctgcagcagctgagacagagcagcgaggccgagatccaggccaaggccagacaggccgaggccgccgagagaagcagactgagaatcgaggaggagatcagagtggtgagactgcagctggaggccaccgagagacagagaggcggcgccgagggcgagctgcaggccctgagagccagagccgaggaggccgaggcccagaagagacaggcccaggaggaggccgagagactgagaagacaggtgcaggacgagagccagagaaagagacaggccgaggtggagctggccagcagagtgaaggccgaggccgaggccgccagagagaagcagagagccctgcaggccctggaggagctgagactgcaggccgaggaggccgagagaagactgagacaggccgaggtggagagagccagacaggtgcaggtggccctggagaccgcccagagaagcgccgaggccgagctgcagagcaagagagccagcttcgccgagaagaccgcccagctggagagaagcctgcaggaggagcacgtggccgtggcccagctgagagaggaggccgagagaagagcccagcagcaggccgaggccgagagagccagagaggaggccgagagagagctggagagatggcagctgaaggccaacgaggccctgagactgagactgcaggccgaggaggtggcccagcagaagagcctggcccaggccgaggccgagaagcagaaggaggaggccgagagagaggccagaagaagaggcaaggccgaggagcaggccgtgagacagagagagctggccgagcaggagctggagaagcagagacagctggccgagggcaccgcccagcagagactggccgccgagcaggagctgatcagactgagagccgagaccgagcagggcgagcagcagagacagctgctggaggaggagctggccagactgcagagagaggccgccgccgccacccagaagagacaggagctggaggccgagctggccaaggtgagagccgagatggaggtgctgctggccagcaaggccagagccgaggaggagagcagaagcaccagcgagaagagcaagcagagactggaggccgaggccggcagattcagagagctggccgaggaggccgccagactgagagccctggccgaggaggccaagagacagagacagctggccgaggaggacgccgccagacagagagccgaggccgagagagtgctggccgagaagctggccgccatcggcgaggccaccagactgaagaccgaggccgagatcgccctgaaggagaaggaggccgagaacgagagactgagaagactggccgaggacgaggccttccagagaagaagactggaggagcaggccgcccagcacaaggccgacatcgaggagagactggcccagctgagaaaggccagcgacagcgagctggagagacagaagggcctggtggaggacaccctgagacagagaagacaggtggaggaggagatcctggccctgaaggccagcttcgagaaggccgccgccggcaaggccgagctggagctggagctgggcagaatcagaagcaacgccgaggacaccctgagaagcaaggagcaggccgagctggaggccgccagacagagacagctggccgccgaggaggagagaagaagaagagaggccgaggagagagtgcagaagagcctggccgccgaggaggaggccgccagacagagaaaggccgccctggaggaggtggagagactgaaggccaaggtggaggaggccagaagactgagagagagagccgagcaggagagcgccagacagctgcagctggcccaggaggccgcccagaagagactgcaggccgaggagaaggcccacgccttcgccgtgcagcagaaggagcaggagctgcagcagaccctgcagcaggagcagagcgtgctggaccagctgagaggcgaggccgaggccgccagaagagccgccgaggaggccgaggaggccagagtgcaggccgagagagaggccgcccagagcagaagacaggtggaggaggccgagagactgaagcagagcgccgaggagcaggcccaggccagagcccaggcccaggccgccgccgagaagctgagaaaggaggccgagcaggaggccgccagaagagcccaggccgagcaggccgccctgagacagaagcaggccgccgacgccgagatggagaagcacaagaagttcgccgagcagaccctgagacagaaggcccaggtggagcaggagctgaccaccctgagactgcagctggaggagaccgaccaccagaagaacctgctggacgaggagctgcagagactgaaggccgaggccaccgaggccgccagacagagaagccaggtggaggaggagctgttcagcgtgagagtgcagatggaggagctgagcaagctgaaggccagaatcgaggccgagaacagagccctgatcctgagagacaaggacaacacccagagattcctgcaggaggaggccgagaagatgaagcaggtggccgaggaggccgccagactgagcgtggccgcccaggaggccgccagactgagacagctggccgaggaggacctggcccagcagagagccctggccgagaagatgctgaaggagaagatgcaggccgtgcaggaggccaccagactgaaggccgaggccgagctgctgcagcagcagaaggagctggcccaggagcaggccagaagactgcaggaggacaaggagcagatggcccagcagctggccgaggagacccagggcttccagagaaccctggaggccgagagacagagacagctggagatgagcgccgaggccgagagactgaagctgagagtggccgagatgagcagagcccaggccagagccgaggaggacgcccagagattcagaaagcaggccgaggagatcggcgagaagctgcacagaaccgagctggccacccaggagaaggtgaccctggtgcagaccctggagatccagagacagcagagcgaccacgacgccgagagactgagagaggccatcgccgagctggagagagagaaggagaagctgcagcaggaggccaagctgctgcagctgaagagcgaggagatgcagaccgtgcagcaggagcagctgctgcaggagacccaggccctgcagcagagcttcctgagcgagaaggacagcctgctgcagagagagagattcatcgagcaggagaaggccaagctggagcagctgttccaggacgaggtggccaaggcccagcagctgagagaggagcagcagagacagcagcagcagatggagcaggagagacagagactggtggccagcatggaggaggccagaagaagacagcacgaggccgaggagggcgtgagaagaaagcaggaggagctgcagcagctggagcagcagagaagacagcaggaggagctgctggccgaggagaaccagagactgagagagcagctgcagctgctggaggagcagcacagagccgccctggcccacagcgaggaggtgaccgccagccaggtggccgccaccaagaccctgcccaacggcagagacgccctggacggccccgccgccgaggccgagcccgagcacagcttcgacggcctgagaagaaaggtgagcgcccagagactgcaggaggccggcatcctgagcgccgaggagctgcagagactggcccagggccacaccaccgtggacgagctggccagaagagaggacgtgagacactacctgcagggcagaagcagcatcgccggcctgctgctgaaggccaccaacgagaagctgagcgtgtacgccgccctgcagagacagctgctgagccccggcaccgccctgatcctgctggaggcccaggccgccagcggcttcctgctggaccccgtgagaaacagaagactgaccgtgaacgaggccgtgaaggagggcgtggtgggccccgagctgcaccacaagctgctgagcgccgagagagccgtgaccggctacaaggacccctacaccggccagcagatcagcctgttccaggccatgcagaagggcctgatcgtgagagagcacggcatcagactgctggaggcccagatcgccaccggcggcgtgatcgaccccgtgcacagccacagagtgcccgtggacgtggcctacagaagaggctacttcgacgaggagatgaacagagtgctggccgaccccagcgacgacaccaagggcttcttcgaccccaacacccacgagaacctgacctacctgcagctgctggagagatgcgtggaggaccccgagaccggcctgtgcctgctgcccctgaccgacaaggccgccaagggcggcgagctggtgtacaccgacagcgaggccagagacgtgttcgagaaggccaccgtgagcgcccccttcggcaagttccagggcaagaccgtgaccatctgggagatcatcaacagcgagtacttcaccgccgagcagagaagagacctgctgagacagttcagaaccggcagaatcaccgtggagaagatcatcaagatcatcatcaccgtggtggaggagcaggagcagaagggcagactgtgcttcgagggcctgagaagcctggtgcccgccgccgagctgctggagagcagagtgatcgacagagagctgtaccagcagctgcagagaggcgagagaagcgtgagagacgtggccgaggtggacaccgtgagaagagccctgagaggcgccaacgtgatcgccggcgtgtggctggaggaggccggccagaagctgagcatctacaacgccctgaagaaggacctgctgcccagcgacatggccgtggccctgctggaggcccaggccggcaccggccacatcatcgaccccgccaccagcgccagactgaccgtggacgaggccgtgagagccggcctggtgggccccgagttccacgagaagctgctgagcgccgagaaggccgtgaccggctacagagacccctacaccggccagagcgtgagcctgttccaggccctgaagaagggcctgatccccagagagcagggcctgagactgctggacgcccagctgagcaccggcggcatcgtggaccccagcaagagccacagagtgcccctggacgtggcctgcgccagaggctgcctggacgaggagaccagcagagccctgagcgcccccagagccgacgccaaggcctacagcgaccccagcaccggcgagcccgccacctacggcgagctgcagcagagatgcagacccgaccagctgaccggcctgagcctgctgcccctgagcgagaaggccgccagagccagacaggaggagctgtacagcgagctgcaggccagagagaccttcgagaagacccccgtggaggtgcccgtgggcggcttcaagggcagaaccgtgaccgtgtgggagctgatcagcagcgagtacttcaccgccgagcagagacaggagctgctgagacagttcagaaccggcaaggtgaccgtggagaaggtgatcaagatcctgatcaccatcgtggaggaggtggagaccctgagacaggagagactgagcttcagcggcctgagagcccccgtgcccgccagcgagctgctggccagcggcgtgctgagcagagcccagttcgagcagctgaaggacggcaagaccaccgtgaaggacctgagcgagctgggcagcgtgagaaccctgctgcagggcagcggctgcctggccggcatctacctggaggacaccaaggagaaggtgagcatctacgaggccatgagaagaggcctgctgagagccaccaccgccgccctgctgctggaggcccaggccgccaccggcttcctggtggaccccgtgagaaaccagagactgtacgtgcacgaggccgtgaaggccggcgtggtgggccccgagctgcacgagcagctgctgagcgccgagaaggccgtgaccggctacagagacccctacagcggcagcaccatcagcctgttccaggccatgcagaagggcctggtgctgagacagcacggcatcagactgctggaggcccagatcgccaccggcggcatcatcgaccccgtgcacagccacagagtgcccgtggacgtggcctaccagagaggctacttcagcgaggagatgaacagagtgctggccgaccccagcgacgacaccaagggcttcttcgaccccaacacccacgagaacctgacctacagacagctgctggagagatgcgtggaggaccccgagaccggcctgagactgctgcccctgaagggcgccgagaaggccgaggtggtggagaccacccaggtgtacaccgaggaggagaccagaagagccttcgaggagacccagatcgacatccccggcggcggcagccacggcggcagcaccatgagcctgtgggaggtgatgcagagcgacctgatccccgaggagcagagagcccagctgatggccgacttccaggccggcagagtgaccaaggagagaatgatcatcatcatcatcgagatcatcgagaagaccgagatcatcagacagcagggcctggccagctacgactacgtgagaagaagactgaccgccgaggacctgttcgaggccagaatcatcagcctggagacctacaacctgctgagagagggcaccagaagcctgagagaggccctggaggccgagagcgcctggtgctacctgtacggcaccggcagcgtggccggcgtgtacctgcccggcagcagacagaccctgagcatctaccaggccctgaagaagggcctgctgagcgccgaggtggccagactgctgctggaggcccaggccgccaccggcttcctgctggaccccgtgaagggcgagagactgaccgtggacgaggccgtgagaaagggcctggtgggccccgagctgcacgacagactgctgagcgccgagagagccgtgaccggctacagagacccctacaccgagcagaccatcagcctgttccaggccatgaagaaggagctgatccccaccgaggaggccctgagactgctggacgcccagctggccaccggcggcatcgtggaccccagactgggcttccacctgcccctggaggtggcctaccagagaggctacctgaacaaggacacccacgaccagctgagcgagcccagcgaggtgagaagctacgtggaccccagcaccgacgagagactgagctacacccagctgctgagaagatgcagaagagacgacggcaccggccagctgctgctgcccctgagcgacgccagaaagctgaccttcagaggcctgagaaagcagatcaccatggaggagctggtgagaagccaggtgatggacgaggccaccgccctgcagctgagagagggcctgaccagcatcgaggaggtgaccaagaacctgcagaagttcctggagggcaccagctgcatcgccggcgtgttcgtggacgccaccaaggagagactgagcgtgtaccaggccatgaagaagggcatcatcagacccggcaccgccttcgagctgctggaggcccaggccgccaccggctacgtgatcgaccccatcaagggcctgaagctgaccgtggaggaggccgtgagaatgggcatcgtgggccccgagttcaaggacaagctgctgagcgccgagagagccgtgaccggctacaaggacccctacagcggcaagctgatcagcctgttccaggccatgaagaagggcctgatcctgaaggaccacggcatcagactgctggaggcccagatcgccaccggcggcatcatcgaccccgaggagagccacagactgcccgtggaggtggcctacaagagaggcctgttcgacgaggagatgaacgagatcctgaccgaccccagcgacgacaccaagggcttcttcgaccccaacaccgaggagaacctgacctacctgcagctgatggagagatgcatcaccgacccccagaccggcctgtgcctgctgcccctgaaggagaagaagagagagagaaagaccagcagcaagagcagcgtgagaaagagaagagtggtgatcgtggaccccgagaccggcaaggagatgagcgtgtacgaggcctacagaaagggcctgatcgaccaccagacctacctggagctgagcgagcaggagtgcgagtgggaggagatcaccatcagcagcagcgacggcgtggtgaagagcatgatcatcgacagaagaagcggcagacagtacgacatcgacgacgccatcgccaagaacctgatcgacagaagcgccctggaccagtacagagccggcaccctgagcatcaccgagttcgccgacatgctgagcggcaacgccggcggcttcagaagcagaagcagcagcgtgggcagcagcagcagctaccccatcagccccgccgtgagcagaacccagctggccagctggagcgaccccaccgaggagaccggccccgtggccggcatcctggacaccgagaccctggagaaggtgagcatcaccgaggccatgcacagaaacctggtggacaacatcaccggccagagactgctggaggcccaggcctgcaccggcggcatcatcgaccccagcaccggcgagagattccccgtgaccgacgccgtgaacaagggcctggtggacaagatcatggtggacagaatcaacctggcccagaaggccttctgcggcttcgaggaccccagaaccaagaccaagatgagcgccgcccaggccctgaagaagggctggctgtactacgaggccggccagagattcctggaggtgcagtacctgaccggcggcctgatcgagcccgacacccccggcagagtgcccctggacgaggccctgcagagaggcaccgtggacgccagaaccgcccagaagctgagagacgtgggcgcctacagcaagtacctgacctgccccaagaccaagctgaagatcagctacaaggacgccctggacagaagcatggtggaggagggcaccggcctgagactgctggaggccgccgcccagagcaccaagggctactacagcccctacagcgtgagcggcagcggcagcaccgccggcagcagaaccggcagcagaaccggcagcagagccggcagcagaagaggcagcttcgacgccaccggcagcggcttcagcatgaccttcagcagcagcagctacagcagcagcggctacggcagaagatacgccagcggcagcagcgccagcctgggcggccccgagagcgccgtggcctag

SEQ ID NO: 262191 - DNA, 13602 bp, Artificial Sequence
  derived and/or modified sequence
atggccggccccctgcccgacgagcaggacttcatccaggcctacgaggaggtgagagagaagtacaaggacgagagagacagagtgcagaagaagaccttcaccaagtgggtgaacaagcacctgatcaaggcccagagacacatcagcgacctgtacgaggacctgagagacggccacaacctgatcagcctgctggaggtgctgagcggcgacagcctgcccagagagaagggcagaatgagattccacaagctgcagaacgtgcagatcgccctggactacctgagacacagacaggtgaagctggtgaacatcagaaacgacgacatcgccgacggcaaccccaagctgaccctgggcctgatctggaccatcatcctgcacttccagatcagcgacatccaggtgagcggccagagcgaggacatgaccgccaaggagaagctgctgctgtggagccagagaatggtggagggctaccagggcctgagatgcgacaacttcaccagcagctggagagacggcagactgttcaacgccatcatccacagacacaagcccctgctgatcgacatgaacaaggtgtacagacagaccaacctggagaacctggaccaggccttcagcgtggccgagagagacctgggcgtgaccagactgctggaccccgaggacgtggacgtgccccagcccgacgagaagagcatcatcacctacgtgagcagcctgtacgacgccatgcccagagtgcccgacgtgcaggacggcgtgagagccaacgagctgcagctgagatggcaggagtacagagagctggtgctgctgctgctgcagtggatgagacaccacaccgccgccttcgaggagagaagattccccagcagcttcgaggagatcgagatcctgtggagccagttcctgaagttcaaggagatggagctgcccgccaaggaggccgacaagaacagaagcaagggcatctaccagagcctggagggcgccgtgcaggccggccagctgaaggtgccccccggctaccaccccctggacgtggagaaggagtggggcaagctgcacgtggccatcctggagagagagaagcagctgagaagcgagttcgagagactggagtgcctgcagagaatcgtgaccaagctgcagatggaggccggcctgtgcgaggagcagctgaaccaggccgacgccctgctgcagagcgacgtgagactgctggccgccggcaaggtgccccagagagccggcgaggtggagagagacctggacaaggccgacagcatgatcagactgctgttcaacgacgtgcagaccctgaaggacggcagacacccccagggcgagcagatgtacagaagagtgtacagactgcacgagagactggtggccatcagaaccgagtacaacctgagactgaaggccggcgtggccgcccccgccacccaggtggcccaggtgaccctgcagagcgtgcagagaagacccgagctggaggacagcaccctgagatacctgcaggacctgctggcctgggtggaggagaaccagcacagagtggacggcgccgagtggggcgtggacctgcccagcgtggaggcccagctgggcagccacagaggcctgcaccagagcatcgaggagttcagagccaagatcgagagagccagaagcgacgagggccagctgagccccgccaccagaggcgcctacagagactgcctgggcagactggacctgcagtacgccaagctgctgaacagcagcaaggccagactgagaagcctggagagcctgcacagcttcgtggccgccgccaccaaggagctgatgtggctgaacgagaaggaggaggaggaggtgggcttcgactggagcgacagaaacaccaacatgaccgccaagaaggagagctacagcgccctgatgagagagctggagctgaaggagaagaagatcaaggagctgcagaacgccggcgacagactgctgagagaggaccaccccgccagacccaccgtggagagcttccaggccgccctgcagacccagtggagctggatgctgcagctgtgctgctgcatcgaggcccacctgaaggagaacgccgcctacttccagttcttcagcgacgtgagagaggccgagggccagctgcagaagctgcaggaggccctgagaagaaagtacagctgcgacagaagcgccaccgtgaccagactggaggacctgctgcaggacgcccaggacgagaaggagcagctgaacgagtacaagggccacctgagcggcctggccaagagagccaaggccgtggtgcagctgaagcccagacaccccgcccaccccatgagaggcagactgcccctgctggccgtgtgcgactacaagcaggtggaggtgaccgtgcacaagggcgacgagtgccagctggtgggccccgcccagcccagccactggaaggtgctgagcagcagcggcagcgaggccgccgtgcccagcgtgtgcttcctggtgcccccccccaaccaggaggcccaggaggccgtgaccagactggaggcccagcaccaggccctggtgaccctgtggcaccagctgcacgtggacatgaagagcctgctggcctggcagagcctgagaagagacgtgcagctgatcagaagctggagcctggccaccttcagaaccctgaagcccgaggagcagagacaggccctgcacagcctggagctgcactaccaggccttcctgagagacagccaggacgccggcggcttcggccccgaggacagactgatggccgagagagagtacggcagctgcagccaccactaccagcagctgctgcagagcctggagcagggcgcccaggaggagagcagatgccagagatgcatcagcgagctgaaggacatcagactgcagctggaggcctgcgagaccagaaccgtgcacagactgagactgcccctggacaaggagcccgccagagagtgcgcccagagaatcgccgagcagcagaaggcccaggccgaggtggagggcctgggcaagggcgtggccagactgagcgccgaggccgagaaggtgctggccctgcccgagcccagccccgccgcccccaccctgagaagcgagctggagctgaccctgggcaagctggagcaggtgagaagcctgagcgccatctacctggagaagctgaagaccatcagcctggtgatcagaggcacccagggcgccgaggaggtgctgagagcccacgaggagcagctgaaggaggcccaggccgtgcccgccaccctgcccgagctggaggccaccaaggccagcctgaagaagctgagagcccaggccgaggcccagcagcccaccttcgacgccctgagagacgagctgagaggcgcccaggaggtgggcgagagactgcagcagagacacggcgagagagacgtggaggtggagagatggagagagagagtggcccagctgctggagagatggcaggccgtgctggcccagaccgacgtgagacagagagagctggagcagctgggcagacagctgagatactacagagagagcgccgaccccctgggcgcctggctgcaggacgccagaagaagacaggagcagatccaggccatgcccctggccgacagccaggccgtgagagagcagctgagacaggagcaggccctgctggaggagatcgagagacacggcgagaaggtggaggagtgccagagattcgccaagcagtacatcaacgccatcaaggactacgagctgcagctggtgacctacaaggcccagctggagcccgtggccagccccgccaagaagcccaaggtgcagagcggcagcgagagcgtgatccaggagtacgtggacctgagaacccactacagcgagctgaccaccctgaccagccagtacatcaagttcatcagcgagaccctgagaagaatggaggaggaggagagactggccgagcagcagagagccgaggagagagagagactggccgaggtggaggccgccctggagaagcagagacagctggccgaggcccacgcccaggccaaggcccaggccgagagagaggccaaggagctgcagcagagaatgcaggaggaggtggtgagaagagaggaggccgccgtggacgcccagcagcagaagagaagcatccaggaggagctgcagcagctgagacagagcagcgaggccgagatccaggccaaggccagacaggccgaggccgccgagagaagcagactgagaatcgaggaggagatcagagtggtgagactgcagctggaggccaccgagagacagagaggcggcgccgagggcgagctgcaggccctgagagccagagccgaggaggccgaggcccagaagagacaggcccaggaggaggccgagagactgagaagacaggtgcaggacgagagccagagaaagagacaggccgaggtggagctggccagcagagtgaaggccgaggccgaggccgccagagagaagcagagagccctgcaggccctggaggagctgagactgcaggccgaggaggccgagagaagactgagacaggccgaggtggagagagccagacaggtgcaggtggccctggagaccgcccagagaagcgccgaggccgagctgcagagcaagagagccagcttcgccgagaagaccgcccagctggagagaagcctgcaggaggagcacgtggccgtggcccagctgagagaggaggccgagagaagagcccagcagcaggccgaggccgagagagccagagaggaggccgagagagagctggagagatggcagctgaaggccaacgaggccctgagactgagactgcaggccgaggaggtggcccagcagaagagcctggcccaggccgaggccgagaagcagaaggaggaggccgagagagaggccagaagaagaggcaaggccgaggagcaggccgtgagacagagagagctggccgagcaggagctggagaagcagagacagctggccgagggcaccgcccagcagagactggccgccgagcaggagctgatcagactgagagccgagaccgagcagggcgagcagcagagacagctgctggaggaggagctggccagactgcagagagaggccgccgccgccacccagaagagacaggagctggaggccgagctggccaaggtgagagccgagatggaggtgctgctggccagcaaggccagagccgaggaggagagcagaagcaccagcgagaagagcaagcagagactggaggccgaggccggcagattcagagagctggccgaggaggccgccagactgagagccctggccgaggaggccaagagacagagacagctggccgaggaggacgccgccagacagagagccgaggccgagagagtgctggccgagaagctggccgccatcggcgaggccaccagactgaagaccgaggccgagatcgccctgaaggagaaggaggccgagaacgagagactgagaagactggccgaggacgaggccttccagagaagaagactggaggagcaggccgcccagcacaaggccgacatcgaggagagactggcccagctgagaaaggccagcgacagcgagctggagagacagaagggcctggtggaggacaccctgagacagagaagacaggtggaggaggagatcctggccctgaaggccagcttcgagaaggccgccgccggcaaggccgagctggagctggagctgggcagaatcagaagcaacgccgaggacaccctgagaagcaaggagcaggccgagctggaggccgccagacagagacagctggccgccgaggaggagagaagaagaagagaggccgaggagagagtgcagaagagcctggccgccgaggaggaggccgccagacagagaaaggccgccctggaggaggtggagagactgaaggccaaggtggaggaggccagaagactgagagagagagccgagcaggagagcgccagacagctgcagctggcccaggaggccgcccagaagagactgcaggccgaggagaaggcccacgccttcgccgtgcagcagaaggagcaggagctgcagcagaccctgcagcaggagcagagcgtgctggaccagctgagaggcgaggccgaggccgccagaagagccgccgaggaggccgaggaggccagagtgcaggccgagagagaggccgcccagagcagaagacaggtggaggaggccgagagactgaagcagagcgccgaggagcaggcccaggccagagcccaggcccaggccgccgccgagaagctgagaaaggaggccgagcaggaggccgccagaagagcccaggccgagcaggccgccctgagacagaagcaggccgccgacgccgagatggagaagcacaagaagttcgccgagcagaccctgagacagaaggcccaggtggagcaggagctgaccaccctgagactgcagctggaggagaccgaccaccagaagaacctgctggacgaggagctgcagagactgaaggccgaggccaccgaggccgccagacagagaagccaggtggaggaggagctgttcagcgtgagagtgcagatggaggagctgagcaagctgaaggccagaatcgaggccgagaacagagccctgatcctgagagacaaggacaacacccagagattcctgcaggaggaggccgagaagatgaagcaggtggccgaggaggccgccagactgagcgtggccgcccaggaggccgccagactgagacagctggccgaggaggacctggcccagcagagagccctggccgagaagatgctgaaggagaagatgcaggccgtgcaggaggccaccagactgaaggccgaggccgagctgctgcagcagcagaaggagctggcccaggagcaggccagaagactgcaggaggacaaggagcagatggcccagcagctggccgaggagacccagggcttccagagaaccctggaggccgagagacagagacagctggagatgagcgccgaggccgagagactgaagctgagagtggccgagatgagcagagcccaggccagagccgaggaggacgcccagagattcagaaagcaggccgaggagatcggcgagaagctgcacagaaccgagctggccacccaggagaaggtgaccctggtgcagaccctggagatccagagacagcagagcgaccacgacgccgagagactgagagaggccatcgccgagctggagagagagaaggagaagctgcagcaggaggccaagctgctgcagctgaagagcgaggagatgcagaccgtgcagcaggagcagctgctgcaggagacccaggccctgcagcagagcttcctgagcgagaaggacagcctgctgcagagagagagattcatcgagcaggagaaggccaagctggagcagctgttccaggacgaggtggccaaggcccagcagctgagagaggagcagcagagacagcagcagcagatggagcaggagagacagagactggtggccagcatggaggaggccagaagaagacagcacgaggccgaggagggcgtgagaagaaagcaggaggagctgcagcagctggagcagcagagaagacagcaggaggagctgctggccgaggagaaccagagactgagagagcagctgcagctgctggaggagcagcacagagccgccctggcccacagcgaggaggtgaccgccagccaggtggccgccaccaagaccctgcccaacggcagagacgccctggacggccccgccgccgaggccgagcccgagcacagcttcgacggcctgagaagaaaggtgagcgcccagagactgcaggaggccggcatcctgagcgccgaggagctgcagagactggcccagggccacaccaccgtggacgagctggccagaagagaggacgtgagacactacctgcagggcagaagcagcatcgccggcctgctgctgaaggccaccaacgagaagctgagcgtgtacgccgccctgcagagacagctgctgagccccggcaccgccctgatcctgctggaggcccaggccgccagcggcttcctgctggaccccgtgagaaacagaagactgaccgtgaacgaggccgtgaaggagggcgtggtgggccccgagctgcaccacaagctgctgagcgccgagagagccgtgaccggctacaaggacccctacaccggccagcagatcagcctgttccaggccatgcagaagggcctgatcgtgagagagcacggcatcagactgctggaggcccagatcgccaccggcggcgtgatcgaccccgtgcacagccacagagtgcccgtggacgtggcctacagaagaggctacttcgacgaggagatgaacagagtgctggccgaccccagcgacgacaccaagggcttcttcgaccccaacacccacgagaacctgacctacctgcagctgctggagagatgcgtggaggaccccgagaccggcctgtgcctgctgcccctgaccgacaaggccgccaagggcggcgagctggtgtacaccgacagcgaggccagagacgtgttcgagaaggccaccgtgagcgcccccttcggcaagttccagggcaagaccgtgaccatctgggagatcatcaacagcgagtacttcaccgccgagcagagaagagacctgctgagacagttcagaaccggcagaatcaccgtggagaagatcatcaagatcatcatcaccgtggtggaggagcaggagcagaagggcagactgtgcttcgagggcctgagaagcctggtgcccgccgccgagctgctggagagcagagtgatcgacagagagctgtaccagcagctgcagagaggcgagagaagcgtgagagacgtggccgaggtggacaccgtgagaagagccctgagaggcgccaacgtgatcgccggcgtgtggctggaggaggccggccagaagctgagcatctacaacgccctgaagaaggacctgctgcccagcgacatggccgtggccctgctggaggcccaggccggcaccggccacatcatcgaccccgccaccagcgccagactgaccgtggacgaggccgtgagagccggcctggtgggccccgagttccacgagaagctgctgagcgccgagaaggccgtgaccggctacagagacccctacaccggccagagcgtgagcctgttccaggccctgaagaagggcctgatccccagagagcagggcctgagactgctggacgcccagctgagcaccggcggcatcgtggaccccagcaagagccacagagtgcccctggacgtggcctgcgccagaggctgcctggacgaggagaccagcagagccctgagcgcccccagagccgacgccaaggcctacagcgaccccagcaccggcgagcccgccacctacggcgagctgcagcagagatgcagacccgaccagctgaccggcctgagcctgctgcccctgagcgagaaggccgccagagccagacaggaggagctgtacagcgagctgcaggccagagagaccttcgagaagacccccgtggaggtgcccgtgggcggcttcaagggcagaaccgtgaccgtgtgggagctgatcagcagcgagtacttcaccgccgagcagagacaggagctgctgagacagttcagaaccggcaaggtgaccgtggagaaggtgatcaagatcctgatcaccatcgtggaggaggtggagaccctgagacaggagagactgagcttcagcggcctgagagcccccgtgcccgccagcgagctgctggccagcggcgtgctgagcagagcccagttcgagcagctgaaggacggcaagaccaccgtgaaggacctgagcgagctgggcagcgtgagaaccctgctgcagggcagcggctgcctggccggcatctacctggaggacaccaaggagaaggtgagcatctacgaggccatgagaagaggcctgctgagagccaccaccgccgccctgctgctggaggcccaggccgccaccggcttcctggtggaccccgtgagaaaccagagactgtacgtgcacgaggccgtgaaggccggcgtggtgggccccgagctgcacgagcagctgctgagcgccgagaaggccgtgaccggctacagagacccctacagcggcagcaccatcagcctgttccaggccatgcagaagggcctggtgctgagacagcacggcatcagactgctggaggcccagatcgccaccggcggcatcatcgaccccgtgcacagccacagagtgcccgtggacgtggcctaccagagaggctacttcagcgaggagatgaacagagtgctggccgaccccagcgacgacaccaagggcttcttcgaccccaacacccacgagaacctgacctacagacagctgctggagagatgcgtggaggaccccgagaccggcctgagactgctgcccctgaagggcgccgagaaggccgaggtggtggagaccacccaggtgtacaccgaggaggagaccagaagagccttcgaggagacccagatcgacatccccggcggcggcagccacggcggcagcaccatgagcctgtgggaggtgatgcagagcgacctgatccccgaggagcagagagcccagctgatggccgacttccaggccggcagagtgaccaaggagagaatgatcatcatcatcatcgagatcatcgagaagaccgagatcatcagacagcagggcctggccagctacgactacgtgagaagaagactgaccgccgaggacctgttcgaggccagaatcatcagcctggagacctacaacctgctgagagagggcaccagaagcctgagagaggccctggaggccgagagcgcctggtgctacctgtacggcaccggcagcgtggccggcgtgtacctgcccggcagcagacagaccctgagcatctaccaggccctgaagaagggcctgctgagcgccgaggtggccagactgctgctggaggcccaggccgccaccggcttcctgctggaccccgtgaagggcgagagactgaccgtggacgaggccgtgagaaagggcctggtgggccccgagctgcacgacagactgctgagcgccgagagagccgtgaccggctacagagacccctacaccgagcagaccatcagcctgttccaggccatgaagaaggagctgatccccaccgaggaggccctgagactgctggacgcccagctggccaccggcggcatcgtggaccccagactgggcttccacctgcccctggaggtggcctaccagagaggctacctgaacaaggacacccacgaccagctgagcgagcccagcgaggtgagaagctacgtggaccccagcaccgacgagagactgagctacacccagctgctgagaagatgcagaagagacgacggcaccggccagctgctgctgcccctgagcgacgccagaaagctgaccttcagaggcctgagaaagcagatcaccatggaggagctggtgagaagccaggtgatggacgaggccaccgccctgcagctgagagagggcctgaccagcatcgaggaggtgaccaagaacctgcagaagttcctggagggcaccagctgcatcgccggcgtgttcgtggacgccaccaaggagagactgagcgtgtaccaggccatgaagaagggcatcatcagacccggcaccgccttcgagctgctggaggcccaggccgccaccggctacgtgatcgaccccatcaagggcctgaagctgaccgtggaggaggccgtgagaatgggcatcgtgggccccgagttcaaggacaagctgctgagcgccgagagagccgtgaccggctacaaggacccctacagcggcaagctgatcagcctgttccaggccatgaagaagggcctgatcctgaaggaccacggcatcagactgctggaggcccagatcgccaccggcggcatcatcgaccccgaggagagccacagactgcccgtggaggtggcctacaagagaggcctgttcgacgaggagatgaacgagatcctgaccgaccccagcgacgacaccaagggcttcttcgaccccaacaccgaggagaacctgacctacctgcagctgatggagagatgcatcaccgacccccagaccggcctgtgcctgctgcccctgaaggagaagaagagagagagaaagaccagcagcaagagcagcgtgagaaagagaagagtggtgatcgtggaccccgagaccggcaaggagatgagcgtgtacgaggcctacagaaagggcctgatcgaccaccagacctacctggagctgagcgagcaggagtgcgagtgggaggagatcaccatcagcagcagcgacggcgtggtgaagagcatgatcatcgacagaagaagcggcagacagtacgacatcgacgacgccatcgccaagaacctgatcgacagaagcgccctggaccagtacagagccggcaccctgagcatcaccgagttcgccgacatgctgagcggcaacgccggcggcttcagaagcagaagcagcagcgtgggcagcagcagcagctaccccatcagccccgccgtgagcagaacccagctggccagctggagcgaccccaccgaggagaccggccccgtggccggcatcctggacaccgagaccctggagaaggtgagcatcaccgaggccatgcacagaaacctggtggacaacatcaccggccagagactgctggaggcccaggcctgcaccggcggcatcatcgaccccagcaccggcgagagattccccgtgaccgacgccgtgaacaagggcctggtggacaagatcatggtggacagaatcaacctggcccagaaggccttctgcggcttcgaggaccccagaaccaagaccaagatgagcgccgcccaggccctgaagaagggctggctgtactacgaggccggccagagattcctggaggtgcagtacctgaccggcggcctgatcgagcccgacacccccggcagagtgcccctggacgaggccctgcagagaggcaccgtggacgccagaaccgcccagaagctgagagacgtgggcgcctacagcaagtacctgacctgccccaagaccaagctgaagatcagctacaaggacgccctggacagaagcatggtggaggagggcaccggcctgagactgctggaggccgccgcccagagcaccaagggctactacagcccctacagcgtgagcggcagcggcagcaccgccggcagcagaaccggcagcagaaccggcagcagagccggcagcagaagaggcagcttcgacgccaccggcagcggcttcagcatgaccttcagcagcagcagctacagcagcagcggctacggcagaagatacgccagcggcagcagcgccagcctgggcggccccgagagcgccgtggcctag

SEQ ID NO: 262192 - DNA, 13656 bp, Artificial Sequence
  derived and/or modified sequence
atgagcggcgccggcggcgccttcgccagccccagagaggtgctgctggagagaccctgctggctggacggcggctgcgagcccgccagaagaggctacctgtaccagcagctgtgctgcgtggacgagagagacagagtgcagaagaagaccttcaccaagtgggtgaacaagcacctgatcaaggcccagagacacatcagcgacctgtacgaggacctgagagacggccacaacctgatcagcctgctggaggtgctgagcggcgacagcctgcccagagagaagggcagaatgagattccacaagctgcagaacgtgcagatcgccctggactacctgagacacagacaggtgaagctggtgaacatcagaaacgacgacatcgccgacggcaaccccaagctgaccctgggcctgatctggaccatcatcctgcacttccagatcagcgacatccaggtgagcggccagagcgaggacatgaccgccaaggagaagctgctgctgtggagccagagaatggtggagggctaccagggcctgagatgcgacaacttcaccagcagctggagagacggcagactgttcaacgccatcatccacagacacaagcccctgctgatcgacatgaacaaggtgtacagacagaccaacctggagaacctggaccaggccttcagcgtggccgagagagacctgggcgtgaccagactgctggaccccgaggacgtggacgtgccccagcccgacgagaagagcatcatcacctacgtgagcagcctgtacgacgccatgcccagagtgcccgacgtgcaggacggcgtgagagccaacgagctgcagctgagatggcaggagtacagagagctggtgctgctgctgctgcagtggatgagacaccacaccgccgccttcgaggagagaagattccccagcagcttcgaggagatcgagatcctgtggagccagttcctgaagttcaaggagatggagctgcccgccaaggaggccgacaagaacagaagcaagggcatctaccagagcctggagggcgccgtgcaggccggccagctgaaggtgccccccggctaccaccccctggacgtggagaaggagtggggcaagctgcacgtggccatcctggagagagagaagcagctgagaagcgagttcgagagactggagtgcctgcagagaatcgtgaccaagctgcagatggaggccggcctgtgcgaggagcagctgaaccaggccgacgccctgctgcagagcgacgtgagactgctggccgccggcaaggtgccccagagagccggcgaggtggagagagacctggacaaggccgacagcatgatcagactgctgttcaacgacgtgcagaccctgaaggacggcagacacccccagggcgagcagatgtacagaagagtgtacagactgcacgagagactggtggccatcagaaccgagtacaacctgagactgaaggccggcgtggccgcccccgccacccaggtggcccaggtgaccctgcagagcgtgcagagaagacccgagctggaggacagcaccctgagatacctgcaggacctgctggcctgggtggaggagaaccagcacagagtggacggcgccgagtggggcgtggacctgcccagcgtggaggcccagctgggcagccacagaggcctgcaccagagcatcgaggagttcagagccaagatcgagagagccagaagcgacgagggccagctgagccccgccaccagaggcgcctacagagactgcctgggcagactggacctgcagtacgccaagctgctgaacagcagcaaggccagactgagaagcctggagagcctgcacagcttcgtggccgccgccaccaaggagctgatgtggctgaacgagaaggaggaggaggaggtgggcttcgactggagcgacagaaacaccaacatgaccgccaagaaggagagctacagcgccctgatgagagagctggagctgaaggagaagaagatcaaggagctgcagaacgccggcgacagactgctgagagaggaccaccccgccagacccaccgtggagagcttccaggccgccctgcagacccagtggagctggatgctgcagctgtgctgctgcatcgaggcccacctgaaggagaacgccgcctacttccagttcttcagcgacgtgagagaggccgagggccagctgcagaagctgcaggaggccctgagaagaaagtacagctgcgacagaagcgccaccgtgaccagactggaggacctgctgcaggacgcccaggacgagaaggagcagctgaacgagtacaagggccacctgagcggcctggccaagagagccaaggccgtggtgcagctgaagcccagacaccccgcccaccccatgagaggcagactgcccctgctggccgtgtgcgactacaagcaggtggaggtgaccgtgcacaagggcgacgagtgccagctggtgggccccgcccagcccagccactggaaggtgctgagcagcagcggcagcgaggccgccgtgcccagcgtgtgcttcctggtgcccccccccaaccaggaggcccaggaggccgtgaccagactggaggcccagcaccaggccctggtgaccctgtggcaccagctgcacgtggacatgaagagcctgctggcctggcagagcctgagaagagacgtgcagctgatcagaagctggagcctggccaccttcagaaccctgaagcccgaggagcagagacaggccctgcacagcctggagctgcactaccaggccttcctgagagacagccaggacgccggcggcttcggccccgaggacagactgatggccgagagagagtacggcagctgcagccaccactaccagcagctgctgcagagcctggagcagggcgcccaggaggagagcagatgccagagatgcatcagcgagctgaaggacatcagactgcagctggaggcctgcgagaccagaaccgtgcacagactgagactgcccctggacaaggagcccgccagagagtgcgcccagagaatcgccgagcagcagaaggcccaggccgaggtggagggcctgggcaagggcgtggccagactgagcgccgaggccgagaaggtgctggccctgcccgagcccagccccgccgcccccaccctgagaagcgagctggagctgaccctgggcaagctggagcaggtgagaagcctgagcgccatctacctggagaagctgaagaccatcagcctggtgatcagaggcacccagggcgccgaggaggtgctgagagcccacgaggagcagctgaaggaggcccaggccgtgcccgccaccctgcccgagctggaggccaccaaggccagcctgaagaagctgagagcccaggccgaggcccagcagcccaccttcgacgccctgagagacgagctgagaggcgcccaggaggtgggcgagagactgcagcagagacacggcgagagagacgtggaggtggagagatggagagagagagtggcccagctgctggagagatggcaggccgtgctggcccagaccgacgtgagacagagagagctggagcagctgggcagacagctgagatactacagagagagcgccgaccccctgggcgcctggctgcaggacgccagaagaagacaggagcagatccaggccatgcccctggccgacagccaggccgtgagagagcagctgagacaggagcaggccctgctggaggagatcgagagacacggcgagaaggtggaggagtgccagagattcgccaagcagtacatcaacgccatcaaggactacgagctgcagctggtgacctacaaggcccagctggagcccgtggccagccccgccaagaagcccaaggtgcagagcggcagcgagagcgtgatccaggagtacgtggacctgagaacccactacagcgagctgaccaccctgaccagccagtacatcaagttcatcagcgagaccctgagaagaatggaggaggaggagagactggccgagcagcagagagccgaggagagagagagactggccgaggtggaggccgccctggagaagcagagacagctggccgaggcccacgcccaggccaaggcccaggccgagagagaggccaaggagctgcagcagagaatgcaggaggaggtggtgagaagagaggaggccgccgtggacgcccagcagcagaagagaagcatccaggaggagctgcagcagctgagacagagcagcgaggccgagatccaggccaaggccagacaggccgaggccgccgagagaagcagactgagaatcgaggaggagatcagagtggtgagactgcagctggaggccaccgagagacagagaggcggcgccgagggcgagctgcaggccctgagagccagagccgaggaggccgaggcccagaagagacaggcccaggaggaggccgagagactgagaagacaggtgcaggacgagagccagagaaagagacaggccgaggtggagctggccagcagagtgaaggccgaggccgaggccgccagagagaagcagagagccctgcaggccctggaggagctgagactgcaggccgaggaggccgagagaagactgagacaggccgaggtggagagagccagacaggtgcaggtggccctggagaccgcccagagaagcgccgaggccgagctgcagagcaagagagccagcttcgccgagaagaccgcccagctggagagaagcctgcaggaggagcacgtggccgtggcccagctgagagaggaggccgagagaagagcccagcagcaggccgaggccgagagagccagagaggaggccgagagagagctggagagatggcagctgaaggccaacgaggccctgagactgagactgcaggccgaggaggtggcccagcagaagagcctggcccaggccgaggccgagaagcagaaggaggaggccgagagagaggccagaagaagaggcaaggccgaggagcaggccgtgagacagagagagctggccgagcaggagctggagaagcagagacagctggccgagggcaccgcccagcagagactggccgccgagcaggagctgatcagactgagagccgagaccgagcagggcgagcagcagagacagctgctggaggaggagctggccagactgcagagagaggccgccgccgccacccagaagagacaggagctggaggccgagctggccaaggtgagagccgagatggaggtgctgctggccagcaaggccagagccgaggaggagagcagaagcaccagcgagaagagcaagcagagactggaggccgaggccggcagattcagagagctggccgaggaggccgccagactgagagccctggccgaggaggccaagagacagagacagctggccgaggaggacgccgccagacagagagccgaggccgagagagtgctggccgagaagctggccgccatcggcgaggccaccagactgaagaccgaggccgagatcgccctgaaggagaaggaggccgagaacgagagactgagaagactggccgaggacgaggccttccagagaagaagactggaggagcaggccgcccagcacaaggccgacatcgaggagagactggcccagctgagaaaggccagcgacagcgagctggagagacagaagggcctggtggaggacaccctgagacagagaagacaggtggaggaggagatcctggccctgaaggccagcttcgagaaggccgccgccggcaaggccgagctggagctggagctgggcagaatcagaagcaacgccgaggacaccctgagaagcaaggagcaggccgagctggaggccgccagacagagacagctggccgccgaggaggagagaagaagaagagaggccgaggagagagtgcagaagagcctggccgccgaggaggaggccgccagacagagaaaggccgccctggaggaggtggagagactgaaggccaaggtggaggaggccagaagactgagagagagagccgagcaggagagcgccagacagctgcagctggcccaggaggccgcccagaagagactgcaggccgaggagaaggcccacgccttcgccgtgcagcagaaggagcaggagctgcagcagaccctgcagcaggagcagagcgtgctggaccagctgagaggcgaggccgaggccgccagaagagccgccgaggaggccgaggaggccagagtgcaggccgagagagaggccgcccagagcagaagacaggtggaggaggccgagagactgaagcagagcgccgaggagcaggcccaggccagagcccaggcccaggccgccgccgagaagctgagaaaggaggccgagcaggaggccgccagaagagcccaggccgagcaggccgccctgagacagaagcaggccgccgacgccgagatggagaagcacaagaagttcgccgagcagaccctgagacagaaggcccaggtggagcaggagctgaccaccctgagactgcagctggaggagaccgaccaccagaagaacctgctggacgaggagctgcagagactgaaggccgaggccaccgaggccgccagacagagaagccaggtggaggaggagctgttcagcgtgagagtgcagatggaggagctgagcaagctgaaggccagaatcgaggccgagaacagagccctgatcctgagagacaaggacaacacccagagattcctgcaggaggaggccgagaagatgaagcaggtggccgaggaggccgccagactgagcgtggccgcccaggaggccgccagactgagacagctggccgaggaggacctggcccagcagagagccctggccgagaagatgctgaaggagaagatgcaggccgtgcaggaggccaccagactgaaggccgaggccgagctgctgcagcagcagaaggagctggcccaggagcaggccagaagactgcaggaggacaaggagcagatggcccagcagctggccgaggagacccagggcttccagagaaccctggaggccgagagacagagacagctggagatgagcgccgaggccgagagactgaagctgagagtggccgagatgagcagagcccaggccagagccgaggaggacgcccagagattcagaaagcaggccgaggagatcggcgagaagctgcacagaaccgagctggccacccaggagaaggtgaccctggtgcagaccctggagatccagagacagcagagcgaccacgacgccgagagactgagagaggccatcgccgagctggagagagagaaggagaagctgcagcaggaggccaagctgctgcagctgaagagcgaggagatgcagaccgtgcagcaggagcagctgctgcaggagacccaggccctgcagcagagcttcctgagcgagaaggacagcctgctgcagagagagagattcatcgagcaggagaaggccaagctggagcagctgttccaggacgaggtggccaaggcccagcagctgagagaggagcagcagagacagcagcagcagatggagcaggagagacagagactggtggccagcatggaggaggccagaagaagacagcacgaggccgaggagggcgtgagaagaaagcaggaggagctgcagcagctggagcagcagagaagacagcaggaggagctgctggccgaggagaaccagagactgagagagcagctgcagctgctggaggagcagcacagagccgccctggcccacagcgaggaggtgaccgccagccaggtggccgccaccaagaccctgcccaacggcagagacgccctggacggccccgccgccgaggccgagcccgagcacagcttcgacggcctgagaagaaaggtgagcgcccagagactgcaggaggccggcatcctgagcgccgaggagctgcagagactggcccagggccacaccaccgtggacgagctggccagaagagaggacgtgagacactacctgcagggcagaagcagcatcgccggcctgctgctgaaggccaccaacgagaagctgagcgtgtacgccgccctgcagagacagctgctgagccccggcaccgccctgatcctgctggaggcccaggccgccagcggcttcctgctggaccccgtgagaaacagaagactgaccgtgaacgaggccgtgaaggagggcgtggtgggccccgagctgcaccacaagctgctgagcgccgagagagccgtgaccggctacaaggacccctacaccggccagcagatcagcctgttccaggccatgcagaagggcctgatcgtgagagagcacggcatcagactgctggaggcccagatcgccaccggcggcgtgatcgaccccgtgcacagccacagagtgcccgtggacgtggcctacagaagaggctacttcgacgaggagatgaacagagtgctggccgaccccagcgacgacaccaagggcttcttcgaccccaacacccacgagaacctgacctacctgcagctgctggagagatgcgtggaggaccccgagaccggcctgtgcctgctgcccctgaccgacaaggccgccaagggcggcgagctggtgtacaccgacagcgaggccagagacgtgttcgagaaggccaccgtgagcgcccccttcggcaagttccagggcaagaccgtgaccatctgggagatcatcaacagcgagtacttcaccgccgagcagagaagagacctgctgagacagttcagaaccggcagaatcaccgtggagaagatcatcaagatcatcatcaccgtggtggaggagcaggagcagaagggcagactgtgcttcgagggcctgagaagcctggtgcccgccgccgagctgctggagagcagagtgatcgacagagagctgtaccagcagctgcagagaggcgagagaagcgtgagagacgtggccgaggtggacaccgtgagaagagccctgagaggcgccaacgtgatcgccggcgtgtggctggaggaggccggccagaagctgagcatctacaacgccctgaagaaggacctgctgcccagcgacatggccgtggccctgctggaggcccaggccggcaccggccacatcatcgaccccgccaccagcgccagactgaccgtggacgaggccgtgagagccggcctggtgggccccgagttccacgagaagctgctgagcgccgagaaggccgtgaccggctacagagacccctacaccggccagagcgtgagcctgttccaggccctgaagaagggcctgatccccagagagcagggcctgagactgctggacgcccagctgagcaccggcggcatcgtggaccccagcaagagccacagagtgcccctggacgtggcctgcgccagaggctgcctggacgaggagaccagcagagccctgagcgcccccagagccgacgccaaggcctacagcgaccccagcaccggcgagcccgccacctacggcgagctgcagcagagatgcagacccgaccagctgaccggcctgagcctgctgcccctgagcgagaaggccgccagagccagacaggaggagctgtacagcgagctgcaggccagagagaccttcgagaagacccccgtggaggtgcccgtgggcggcttcaagggcagaaccgtgaccgtgtgggagctgatcagcagcgagtacttcaccgccgagcagagacaggagctgctgagacagttcagaaccggcaaggtgaccgtggagaaggtgatcaagatcctgatcaccatcgtggaggaggtggagaccctgagacaggagagactgagcttcagcggcctgagagcccccgtgcccgccagcgagctgctggccagcggcgtgctgagcagagcccagttcgagcagctgaaggacggcaagaccaccgtgaaggacctgagcgagctgggcagcgtgagaaccctgctgcagggcagcggctgcctggccggcatctacctggaggacaccaaggagaaggtgagcatctacgaggccatgagaagaggcctgctgagagccaccaccgccgccctgctgctggaggcccaggccgccaccggcttcctggtggaccccgtgagaaaccagagactgtacgtgcacgaggccgtgaaggccggcgtggtgggccccgagctgcacgagcagctgctgagcgccgagaaggccgtgaccggctacagagacccctacagcggcagcaccatcagcctgttccaggccatgcagaagggcctggtgctgagacagcacggcatcagactgctggaggcccagatcgccaccggcggcatcatcgaccccgtgcacagccacagagtgcccgtggacgtggcctaccagagaggctacttcagcgaggagatgaacagagtgctggccgaccccagcgacgacaccaagggcttcttcgaccccaacacccacgagaacctgacctacagacagctgctggagagatgcgtggaggaccccgagaccggcctgagactgctgcccctgaagggcgccgagaaggccgaggtggtggagaccacccaggtgtacaccgaggaggagaccagaagagccttcgaggagacccagatcgacatccccggcggcggcagccacggcggcagcaccatgagcctgtgggaggtgatgcagagcgacctgatccccgaggagcagagagcccagctgatggccgacttccaggccggcagagtgaccaaggagagaatgatcatcatcatcatcgagatcatcgagaagaccgagatcatcagacagcagggcctggccagctacgactacgtgagaagaagactgaccgccgaggacctgttcgaggccagaatcatcagcctggagacctacaacctgctgagagagggcaccagaagcctgagagaggccctggaggccgagagcgcctggtgctacctgtacggcaccggcagcgtggccggcgtgtacctgcccggcagcagacagaccctgagcatctaccaggccctgaagaagggcctgctgagcgccgaggtggccagactgctgctggaggcccaggccgccaccggcttcctgctggaccccgtgaagggcgagagactgaccgtggacgaggccgtgagaaagggcctggtgggccccgagctgcacgacagactgctgagcgccgagagagccgtgaccggctacagagacccctacaccgagcagaccatcagcctgttccaggccatgaagaaggagctgatccccaccgaggaggccctgagactgctggacgcccagctggccaccggcggcatcgtggaccccagactgggcttccacctgcccctggaggtggcctaccagagaggctacctgaacaaggacacccacgaccagctgagcgagcccagcgaggtgagaagctacgtggaccccagcaccgacgagagactgagctacacccagctgctgagaagatgcagaagagacgacggcaccggccagctgctgctgcccctgagcgacgccagaaagctgaccttcagaggcctgagaaagcagatcaccatggaggagctggtgagaagccaggtgatggacgaggccaccgccctgcagctgagagagggcctgaccagcatcgaggaggtgaccaagaacctgcagaagttcctggagggcaccagctgcatcgccggcgtgttcgtggacgccaccaaggagagactgagcgtgtaccaggccatgaagaagggcatcatcagacccggcaccgccttcgagctgctggaggcccaggccgccaccggctacgtgatcgaccccatcaagggcctgaagctgaccgtggaggaggccgtgagaatgggcatcgtgggccccgagttcaaggacaagctgctgagcgccgagagagccgtgaccggctacaaggacccctacagcggcaagctgatcagcctgttccaggccatgaagaagggcctgatcctgaaggaccacggcatcagactgctggaggcccagatcgccaccggcggcatcatcgaccccgaggagagccacagactgcccgtggaggtggcctacaagagaggcctgttcgacgaggagatgaacgagatcctgaccgaccccagcgacgacaccaagggcttcttcgaccccaacaccgaggagaacctgacctacctgcagctgatggagagatgcatcaccgacccccagaccggcctgtgcctgctgcccctgaaggagaagaagagagagagaaagaccagcagcaagagcagcgtgagaaagagaagagtggtgatcgtggaccccgagaccggcaaggagatgagcgtgtacgaggcctacagaaagggcctgatcgaccaccagacctacctggagctgagcgagcaggagtgcgagtgggaggagatcaccatcagcagcagcgacggcgtggtgaagagcatgatcatcgacagaagaagcggcagacagtacgacatcgacgacgccatcgccaagaacctgatcgacagaagcgccctggaccagtacagagccggcaccctgagcatcaccgagttcgccgacatgctgagcggcaacgccggcggcttcagaagcagaagcagcagcgtgggcagcagcagcagctaccccatcagccccgccgtgagcagaacccagctggccagctggagcgaccccaccgaggagaccggccccgtggccggcatcctggacaccgagaccctggagaaggtgagcatcaccgaggccatgcacagaaacctggtggacaacatcaccggccagagactgctggaggcccaggcctgcaccggcggcatcatcgaccccagcaccggcgagagattccccgtgaccgacgccgtgaacaagggcctggtggacaagatcatggtggacagaatcaacctggcccagaaggccttctgcggcttcgaggaccccagaaccaagaccaagatgagcgccgcccaggccctgaagaagggctggctgtactacgaggccggccagagattcctggaggtgcagtacctgaccggcggcctgatcgagcccgacacccccggcagagtgcccctggacgaggccctgcagagaggcaccgtggacgccagaaccgcccagaagctgagagacgtgggcgcctacagcaagtacctgacctgccccaagaccaagctgaagatcagctacaaggacgccctggacagaagcatggtggaggagggcaccggcctgagactgctggaggccgccgcccagagcaccaagggctactacagcccctacagcgtgagcggcagcggcagcaccgccggcagcagaaccggcagcagaaccggcagcagagccggcagcagaagaggcagcttcgacgccaccggcagcggcttcagcatgaccttcagcagcagcagctacagcagcagcggctacggcagaagatacgccagcggcagcagcgccagcctgggcggccccgagagcgccgtggcctag

SEQ ID NO: 262193 - DNA, 13548 bp, Artificial Sequence
  derived and/or modified sequence
atgaagatcgtgcccgacgagagagacagagtgcagaagaagaccttcaccaagtgggtgaacaagcacctgatcaaggcccagagacacatcagcgacctgtacgaggacctgagagacggccacaacctgatcagcctgctggaggtgctgagcggcgacagcctgcccagagagaagggcagaatgagattccacaagctgcagaacgtgcagatcgccctggactacctgagacacagacaggtgaagctggtgaacatcagaaacgacgacatcgccgacggcaaccccaagctgaccctgggcctgatctggaccatcatcctgcacttccagatcagcgacatccaggtgagcggccagagcgaggacatgaccgccaaggagaagctgctgctgtggagccagagaatggtggagggctaccagggcctgagatgcgacaacttcaccagcagctggagagacggcagactgttcaacgccatcatccacagacacaagcccctgctgatcgacatgaacaaggtgtacagacagaccaacctggagaacctggaccaggccttcagcgtggccgagagagacctgggcgtgaccagactgctggaccccgaggacgtggacgtgccccagcccgacgagaagagcatcatcacctacgtgagcagcctgtacgacgccatgcccagagtgcccgacgtgcaggacggcgtgagagccaacgagctgcagctgagatggcaggagtacagagagctggtgctgctgctgctgcagtggatgagacaccacaccgccgccttcgaggagagaagattccccagcagcttcgaggagatcgagatcctgtggagccagttcctgaagttcaaggagatggagctgcccgccaaggaggccgacaagaacagaagcaagggcatctaccagagcctggagggcgccgtgcaggccggccagctgaaggtgccccccggctaccaccccctggacgtggagaaggagtggggcaagctgcacgtggccatcctggagagagagaagcagctgagaagcgagttcgagagactggagtgcctgcagagaatcgtgaccaagctgcagatggaggccggcctgtgcgaggagcagctgaaccaggccgacgccctgctgcagagcgacgtgagactgctggccgccggcaaggtgccccagagagccggcgaggtggagagagacctggacaaggccgacagcatgatcagactgctgttcaacgacgtgcagaccctgaaggacggcagacacccccagggcgagcagatgtacagaagagtgtacagactgcacgagagactggtggccatcagaaccgagtacaacctgagactgaaggccggcgtggccgcccccgccacccaggtggcccaggtgaccctgcagagcgtgcagagaagacccgagctggaggacagcaccctgagatacctgcaggacctgctggcctgggtggaggagaaccagcacagagtggacggcgccgagtggggcgtggacctgcccagcgtggaggcccagctgggcagccacagaggcctgcaccagagcatcgaggagttcagagccaagatcgagagagccagaagcgacgagggccagctgagccccgccaccagaggcgcctacagagactgcctgggcagactggacctgcagtacgccaagctgctgaacagcagcaaggccagactgagaagcctggagagcctgcacagcttcgtggccgccgccaccaaggagctgatgtggctgaacgagaaggaggaggaggaggtgggcttcgactggagcgacagaaacaccaacatgaccgccaagaaggagagctacagcgccctgatgagagagctggagctgaaggagaagaagatcaaggagctgcagaacgccggcgacagactgctgagagaggaccaccccgccagacccaccgtggagagcttccaggccgccctgcagacccagtggagctggatgctgcagctgtgctgctgcatcgaggcccacctgaaggagaacgccgcctacttccagttcttcagcgacgtgagagaggccgagggccagctgcagaagctgcaggaggccctgagaagaaagtacagctgcgacagaagcgccaccgtgaccagactggaggacctgctgcaggacgcccaggacgagaaggagcagctgaacgagtacaagggccacctgagcggcctggccaagagagccaaggccgtggtgcagctgaagcccagacaccccgcccaccccatgagaggcagactgcccctgctggccgtgtgcgactacaagcaggtggaggtgaccgtgcacaagggcgacgagtgccagctggtgggccccgcccagcccagccactggaaggtgctgagcagcagcggcagcgaggccgccgtgcccagcgtgtgcttcctggtgcccccccccaaccaggaggcccaggaggccgtgaccagactggaggcccagcaccaggccctggtgaccctgtggcaccagctgcacgtggacatgaagagcctgctggcctggcagagcctgagaagagacgtgcagctgatcagaagctggagcctggccaccttcagaaccctgaagcccgaggagcagagacaggccctgcacagcctggagctgcactaccaggccttcctgagagacagccaggacgccggcggcttcggccccgaggacagactgatggccgagagagagtacggcagctgcagccaccactaccagcagctgctgcagagcctggagcagggcgcccaggaggagagcagatgccagagatgcatcagcgagctgaaggacatcagactgcagctggaggcctgcgagaccagaaccgtgcacagactgagactgcccctggacaaggagcccgccagagagtgcgcccagagaatcgccgagcagcagaaggcccaggccgaggtggagggcctgggcaagggcgtggccagactgagcgccgaggccgagaaggtgctggccctgcccgagcccagccccgccgcccccaccctgagaagcgagctggagctgaccctgggcaagctggagcaggtgagaagcctgagcgccatctacctggagaagctgaagaccatcagcctggtgatcagaggcacccagggcgccgaggaggtgctgagagcccacgaggagcagctgaaggaggcccaggccgtgcccgccaccctgcccgagctggaggccaccaaggccagcctgaagaagctgagagcccaggccgaggcccagcagcccaccttcgacgccctgagagacgagctgagaggcgcccaggaggtgggcgagagactgcagcagagacacggcgagagagacgtggaggtggagagatggagagagagagtggcccagctgctggagagatggcaggccgtgctggcccagaccgacgtgagacagagagagctggagcagctgggcagacagctgagatactacagagagagcgccgaccccctgggcgcctggctgcaggacgccagaagaagacaggagcagatccaggccatgcccctggccgacagccaggccgtgagagagcagctgagacaggagcaggccctgctggaggagatcgagagacacggcgagaaggtggaggagtgccagagattcgccaagcagtacatcaacgccatcaaggactacgagctgcagctggtgacctacaaggcccagctggagcccgtggccagccccgccaagaagcccaaggtgcagagcggcagcgagagcgtgatccaggagtacgtggacctgagaacccactacagcgagctgaccaccctgaccagccagtacatcaagttcatcagcgagaccctgagaagaatggaggaggaggagagactggccgagcagcagagagccgaggagagagagagactggccgaggtggaggccgccctggagaagcagagacagctggccgaggcccacgcccaggccaaggcccaggccgagagagaggccaaggagctgcagcagagaatgcaggaggaggtggtgagaagagaggaggccgccgtggacgcccagcagcagaagagaagcatccaggaggagctgcagcagctgagacagagcagcgaggccgagatccaggccaaggccagacaggccgaggccgccgagagaagcagactgagaatcgaggaggagatcagagtggtgagactgcagctggaggccaccgagagacagagaggcggcgccgagggcgagctgcaggccctgagagccagagccgaggaggccgaggcccagaagagacaggcccaggaggaggccgagagactgagaagacaggtgcaggacgagagccagagaaagagacaggccgaggtggagctggccagcagagtgaaggccgaggccgaggccgccagagagaagcagagagccctgcaggccctggaggagctgagactgcaggccgaggaggccgagagaagactgagacaggccgaggtggagagagccagacaggtgcaggtggccctggagaccgcccagagaagcgccgaggccgagctgcagagcaagagagccagcttcgccgagaagaccgcccagctggagagaagcctgcaggaggagcacgtggccgtggcccagctgagagaggaggccgagagaagagcccagcagcaggccgaggccgagagagccagagaggaggccgagagagagctggagagatggcagctgaaggccaacgaggccctgagactgagactgcaggccgaggaggtggcccagcagaagagcctggcccaggccgaggccgagaagcagaaggaggaggccgagagagaggccagaagaagaggcaaggccgaggagcaggccgtgagacagagagagctggccgagcaggagctggagaagcagagacagctggccgagggcaccgcccagcagagactggccgccgagcaggagctgatcagactgagagccgagaccgagcagggcgagcagcagagacagctgctggaggaggagctggccagactgcagagagaggccgccgccgccacccagaagagacaggagctggaggccgagctggccaaggtgagagccgagatggaggtgctgctggccagcaaggccagagccgaggaggagagcagaagcaccagcgagaagagcaagcagagactggaggccgaggccggcagattcagagagctggccgaggaggccgccagactgagagccctggccgaggaggccaagagacagagacagctggccgaggaggacgccgccagacagagagccgaggccgagagagtgctggccgagaagctggccgccatcggcgaggccaccagactgaagaccgaggccgagatcgccctgaaggagaaggaggccgagaacgagagactgagaagactggccgaggacgaggccttccagagaagaagactggaggagcaggccgcccagcacaaggccgacatcgaggagagactggcccagctgagaaaggccagcgacagcgagctggagagacagaagggcctggtggaggacaccctgagacagagaagacaggtggaggaggagatcctggccctgaaggccagcttcgagaaggccgccgccggcaaggccgagctggagctggagctgggcagaatcagaagcaacgccgaggacaccctgagaagcaaggagcaggccgagctggaggccgccagacagagacagctggccgccgaggaggagagaagaagaagagaggccgaggagagagtgcagaagagcctggccgccgaggaggaggccgccagacagagaaaggccgccctggaggaggtggagagactgaaggccaaggtggaggaggccagaagactgagagagagagccgagcaggagagcgccagacagctgcagctggcccaggaggccgcccagaagagactgcaggccgaggagaaggcccacgccttcgccgtgcagcagaaggagcaggagctgcagcagaccctgcagcaggagcagagcgtgctggaccagctgagaggcgaggccgaggccgccagaagagccgccgaggaggccgaggaggccagagtgcaggccgagagagaggccgcccagagcagaagacaggtggaggaggccgagagactgaagcagagcgccgaggagcaggcccaggccagagcccaggcccaggccgccgccgagaagctgagaaaggaggccgagcaggaggccgccagaagagcccaggccgagcaggccgccctgagacagaagcaggccgccgacgccgagatggagaagcacaagaagttcgccgagcagaccctgagacagaaggcccaggtggagcaggagctgaccaccctgagactgcagctggaggagaccgaccaccagaagaacctgctggacgaggagctgcagagactgaaggccgaggccaccgaggccgccagacagagaagccaggtggaggaggagctgttcagcgtgagagtgcagatggaggagctgagcaagctgaaggccagaatcgaggccgagaacagagccctgatcctgagagacaaggacaacacccagagattcctgcaggaggaggccgagaagatgaagcaggtggccgaggaggccgccagactgagcgtggccgcccaggaggccgccagactgagacagctggccgaggaggacctggcccagcagagagccctggccgagaagatgctgaaggagaagatgcaggccgtgcaggaggccaccagactgaaggccgaggccgagctgctgcagcagcagaaggagctggcccaggagcaggccagaagactgcaggaggacaaggagcagatggcccagcagctggccgaggagacccagggcttccagagaaccctggaggccgagagacagagacagctggagatgagcgccgaggccgagagactgaagctgagagtggccgagatgagcagagcccaggccagagccgaggaggacgcccagagattcagaaagcaggccgaggagatcggcgagaagctgcacagaaccgagctggccacccaggagaaggtgaccctggtgcagaccctggagatccagagacagcagagcgaccacgacgccgagagactgagagaggccatcgccgagctggagagagagaaggagaagctgcagcaggaggccaagctgctgcagctgaagagcgaggagatgcagaccgtgcagcaggagcagctgctgcaggagacccaggccctgcagcagagcttcctgagcgagaaggacagcctgctgcagagagagagattcatcgagcaggagaaggccaagctggagcagctgttccaggacgaggtggccaaggcccagcagctgagagaggagcagcagagacagcagcagcagatggagcaggagagacagagactggtggccagcatggaggaggccagaagaagacagcacgaggccgaggagggcgtgagaagaaagcaggaggagctgcagcagctggagcagcagagaagacagcaggaggagctgctggccgaggagaaccagagactgagagagcagctgcagctgctggaggagcagcacagagccgccctggcccacagcgaggaggtgaccgccagccaggtggccgccaccaagaccctgcccaacggcagagacgccctggacggccccgccgccgaggccgagcccgagcacagcttcgacggcctgagaagaaaggtgagcgcccagagactgcaggaggccggcatcctgagcgccgaggagctgcagagactggcccagggccacaccaccgtggacgagctggccagaagagaggacgtgagacactacctgcagggcagaagcagcatcgccggcctgctgctgaaggccaccaacgagaagctgagcgtgtacgccgccctgcagagacagctgctgagccccggcaccgccctgatcctgctggaggcccaggccgccagcggcttcctgctggaccccgtgagaaacagaagactgaccgtgaacgaggccgtgaaggagggcgtggtgggccccgagctgcaccacaagctgctgagcgccgagagagccgtgaccggctacaaggacccctacaccggccagcagatcagcctgttccaggccatgcagaagggcctgatcgtgagagagcacggcatcagactgctggaggcccagatcgccaccggcggcgtgatcgaccccgtgcacagccacagagtgcccgtggacgtggcctacagaagaggctacttcgacgaggagatgaacagagtgctggccgaccccagcgacgacaccaagggcttcttcgaccccaacacccacgagaacctgacctacctgcagctgctggagagatgcgtggaggaccccgagaccggcctgtgcctgctgcccctgaccgacaaggccgccaagggcggcgagctggtgtacaccgacagcgaggccagagacgtgttcgagaaggccaccgtgagcgcccccttcggcaagttccagggcaagaccgtgaccatctgggagatcatcaacagcgagtacttcaccgccgagcagagaagagacctgctgagacagttcagaaccggcagaatcaccgtggagaagatcatcaagatcatcatcaccgtggtggaggagcaggagcagaagggcagactgtgcttcgagggcctgagaagcctggtgcccgccgccgagctgctggagagcagagtgatcgacagagagctgtaccagcagctgcagagaggcgagagaagcgtgagagacgtggccgaggtggacaccgtgagaagagccctgagaggcgccaacgtgatcgccggcgtgtggctggaggaggccggccagaagctgagcatctacaacgccctgaagaaggacctgctgcccagcgacatggccgtggccctgctggaggcccaggccggcaccggccacatcatcgaccccgccaccagcgccagactgaccgtggacgaggccgtgagagccggcctggtgggccccgagttccacgagaagctgctgagcgccgagaaggccgtgaccggctacagagacccctacaccggccagagcgtgagcctgttccaggccctgaagaagggcctgatccccagagagcagggcctgagactgctggacgcccagctgagcaccggcggcatcgtggaccccagcaagagccacagagtgcccctggacgtggcctgcgccagaggctgcctggacgaggagaccagcagagccctgagcgcccccagagccgacgccaaggcctacagcgaccccagcaccggcgagcccgccacctacggcgagctgcagcagagatgcagacccgaccagctgaccggcctgagcctgctgcccctgagcgagaaggccgccagagccagacaggaggagctgtacagcgagctgcaggccagagagaccttcgagaagacccccgtggaggtgcccgtgggcggcttcaagggcagaaccgtgaccgtgtgggagctgatcagcagcgagtacttcaccgccgagcagagacaggagctgctgagacagttcagaaccggcaaggtgaccgtggagaaggtgatcaagatcctgatcaccatcgtggaggaggtggagaccctgagacaggagagactgagcttcagcggcctgagagcccccgtgcccgccagcgagctgctggccagcggcgtgctgagcagagcccagttcgagcagctgaaggacggcaagaccaccgtgaaggacctgagcgagctgggcagcgtgagaaccctgctgcagggcagcggctgcctggccggcatctacctggaggacaccaaggagaaggtgagcatctacgaggccatgagaagaggcctgctgagagccaccaccgccgccctgctgctggaggcccaggccgccaccggcttcctggtggaccccgtgagaaaccagagactgtacgtgcacgaggccgtgaaggccggcgtggtgggccccgagctgcacgagcagctgctgagcgccgagaaggccgtgaccggctacagagacccctacagcggcagcaccatcagcctgttccaggccatgcagaagggcctggtgctgagacagcacggcatcagactgctggaggcccagatcgccaccggcggcatcatcgaccccgtgcacagccacagagtgcccgtggacgtggcctaccagagaggctacttcagcgaggagatgaacagagtgctggccgaccccagcgacgacaccaagggcttcttcgaccccaacacccacgagaacctgacctacagacagctgctggagagatgcgtggaggaccccgagaccggcctgagactgctgcccctgaagggcgccgagaaggccgaggtggtggagaccacccaggtgtacaccgaggaggagaccagaagagccttcgaggagacccagatcgacatccccggcggcggcagccacggcggcagcaccatgagcctgtgggaggtgatgcagagcgacctgatccccgaggagcagagagcccagctgatggccgacttccaggccggcagagtgaccaaggagagaatgatcatcatcatcatcgagatcatcgagaagaccgagatcatcagacagcagggcctggccagctacgactacgtgagaagaagactgaccgccgaggacctgttcgaggccagaatcatcagcctggagacctacaacctgctgagagagggcaccagaagcctgagagaggccctggaggccgagagcgcctggtgctacctgtacggcaccggcagcgtggccggcgtgtacctgcccggcagcagacagaccctgagcatctaccaggccctgaagaagggcctgctgagcgccgaggtggccagactgctgctggaggcccaggccgccaccggcttcctgctggaccccgtgaagggcgagagactgaccgtggacgaggccgtgagaaagggcctggtgggccccgagctgcacgacagactgctgagcgccgagagagccgtgaccggctacagagacccctacaccgagcagaccatcagcctgttccaggccatgaagaaggagctgatccccaccgaggaggccctgagactgctggacgcccagctggccaccggcggcatcgtggaccccagactgggcttccacctgcccctggaggtggcctaccagagaggctacctgaacaaggacacccacgaccagctgagcgagcccagcgaggtgagaagctacgtggaccccagcaccgacgagagactgagctacacccagctgctgagaagatgcagaagagacgacggcaccggccagctgctgctgcccctgagcgacgccagaaagctgaccttcagaggcctgagaaagcagatcaccatggaggagctggtgagaagccaggtgatggacgaggccaccgccctgcagctgagagagggcctgaccagcatcgaggaggtgaccaagaacctgcagaagttcctggagggcaccagctgcatcgccggcgtgttcgtggacgccaccaaggagagactgagcgtgtaccaggccatgaagaagggcatcatcagacccggcaccgccttcgagctgctggaggcccaggccgccaccggctacgtgatcgaccccatcaagggcctgaagctgaccgtggaggaggccgtgagaatgggcatcgtgggccccgagttcaaggacaagctgctgagcgccgagagagccgtgaccggctacaaggacccctacagcggcaagctgatcagcctgttccaggccatgaagaagggcctgatcctgaaggaccacggcatcagactgctggaggcccagatcgccaccggcggcatcatcgaccccgaggagagccacagactgcccgtggaggtggcctacaagagaggcctgttcgacgaggagatgaacgagatcctgaccgaccccagcgacgacaccaagggcttcttcgaccccaacaccgaggagaacctgacctacctgcagctgatggagagatgcatcaccgacccccagaccggcctgtgcctgctgcccctgaaggagaagaagagagagagaaagaccagcagcaagagcagcgtgagaaagagaagagtggtgatcgtggaccccgagaccggcaaggagatgagcgtgtacgaggcctacagaaagggcctgatcgaccaccagacctacctggagctgagcgagcaggagtgcgagtgggaggagatcaccatcagcagcagcgacggcgtggtgaagagcatgatcatcgacagaagaagcggcagacagtacgacatcgacgacgccatcgccaagaacctgatcgacagaagcgccctggaccagtacagagccggcaccctgagcatcaccgagttcgccgacatgctgagcggcaacgccggcggcttcagaagcagaagcagcagcgtgggcagcagcagcagctaccccatcagccccgccgtgagcagaacccagctggccagctggagcgaccccaccgaggagaccggccccgtggccggcatcctggacaccgagaccctggagaaggtgagcatcaccgaggccatgcacagaaacctggtggacaacatcaccggccagagactgctggaggcccaggcctgcaccggcggcatcatcgaccccagcaccggcgagagattccccgtgaccgacgccgtgaacaagggcctggtggacaagatcatggtggacagaatcaacctggcccagaaggccttctgcggcttcgaggaccccagaaccaagaccaagatgagcgccgcccaggccctgaagaagggctggctgtactacgaggccggccagagattcctggaggtgcagtacctgaccggcggcctgatcgagcccgacacccccggcagagtgcccctggacgaggccctgcagagaggcaccgtggacgccagaaccgcccagaagctgagagacgtgggcgcctacagcaagtacctgacctgccccaagaccaagctgaagatcagctacaaggacgccctggacagaagcatggtggaggagggcaccggcctgagactgctggaggccgccgcccagagcaccaagggctactacagcccctacagcgtgagcggcagcggcagcaccgccggcagcagaaccggcagcagaaccggcagcagagccggcagcagaagaggcagcttcgacgccaccggcagcggcttcagcatgaccttcagcagcagcagctacagcagcagcggctacggcagaagatacgccagcggcagcagcgccagcctgggcggccccgagagcgccgtggcctag

SEQ ID NO: 262194 - DNA, 13725 bp, Artificial Sequence
  derived and/or modified sequence
atgagcggcgaggacgccgaggtgagagccgtgagcgaggacgtgagcaacggcagcagcggcagccccagccccggcgacaccctgccctggaacctgggcaagacccagagaagcagaagaagcggcggcggcgccggcagcaacggcagcgtgctggaccccgccgagagagccgtgatcagaatcgccgacgagagagacagagtgcagaagaagaccttcaccaagtgggtgaacaagcacctgatcaaggcccagagacacatcagcgacctgtacgaggacctgagagacggccacaacctgatcagcctgctggaggtgctgagcggcgacagcctgcccagagagaagggcagaatgagattccacaagctgcagaacgtgcagatcgccctggactacctgagacacagacaggtgaagctggtgaacatcagaaacgacgacatcgccgacggcaaccccaagctgaccctgggcctgatctggaccatcatcctgcacttccagatcagcgacatccaggtgagcggccagagcgaggacatgaccgccaaggagaagctgctgctgtggagccagagaatggtggagggctaccagggcctgagatgcgacaacttcaccagcagctggagagacggcagactgttcaacgccatcatccacagacacaagcccctgctgatcgacatgaacaaggtgtacagacagaccaacctggagaacctggaccaggccttcagcgtggccgagagagacctgggcgtgaccagactgctggaccccgaggacgtggacgtgccccagcccgacgagaagagcatcatcacctacgtgagcagcctgtacgacgccatgcccagagtgcccgacgtgcaggacggcgtgagagccaacgagctgcagctgagatggcaggagtacagagagctggtgctgctgctgctgcagtggatgagacaccacaccgccgccttcgaggagagaagattccccagcagcttcgaggagatcgagatcctgtggagccagttcctgaagttcaaggagatggagctgcccgccaaggaggccgacaagaacagaagcaagggcatctaccagagcctggagggcgccgtgcaggccggccagctgaaggtgccccccggctaccaccccctggacgtggagaaggagtggggcaagctgcacgtggccatcctggagagagagaagcagctgagaagcgagttcgagagactggagtgcctgcagagaatcgtgaccaagctgcagatggaggccggcctgtgcgaggagcagctgaaccaggccgacgccctgctgcagagcgacgtgagactgctggccgccggcaaggtgccccagagagccggcgaggtggagagagacctggacaaggccgacagcatgatcagactgctgttcaacgacgtgcagaccctgaaggacggcagacacccccagggcgagcagatgtacagaagagtgtacagactgcacgagagactggtggccatcagaaccgagtacaacctgagactgaaggccggcgtggccgcccccgccacccaggtggcccaggtgaccctgcagagcgtgcagagaagacccgagctggaggacagcaccctgagatacctgcaggacctgctggcctgggtggaggagaaccagcacagagtggacggcgccgagtggggcgtggacctgcccagcgtggaggcccagctgggcagccacagaggcctgcaccagagcatcgaggagttcagagccaagatcgagagagccagaagcgacgagggccagctgagccccgccaccagaggcgcctacagagactgcctgggcagactggacctgcagtacgccaagctgctgaacagcagcaaggccagactgagaagcctggagagcctgcacagcttcgtggccgccgccaccaaggagctgatgtggctgaacgagaaggaggaggaggaggtgggcttcgactggagcgacagaaacaccaacatgaccgccaagaaggagagctacagcgccctgatgagagagctggagctgaaggagaagaagatcaaggagctgcagaacgccggcgacagactgctgagagaggaccaccccgccagacccaccgtggagagcttccaggccgccctgcagacccagtggagctggatgctgcagctgtgctgctgcatcgaggcccacctgaaggagaacgccgcctacttccagttcttcagcgacgtgagagaggccgagggccagctgcagaagctgcaggaggccctgagaagaaagtacagctgcgacagaagcgccaccgtgaccagactggaggacctgctgcaggacgcccaggacgagaaggagcagctgaacgagtacaagggccacctgagcggcctggccaagagagccaaggccgtggtgcagctgaagcccagacaccccgcccaccccatgagaggcagactgcccctgctggccgtgtgcgactacaagcaggtggaggtgaccgtgcacaagggcgacgagtgccagctggtgggccccgcccagcccagccactggaaggtgctgagcagcagcggcagcgaggccgccgtgcccagcgtgtgcttcctggtgcccccccccaaccaggaggcccaggaggccgtgaccagactggaggcccagcaccaggccctggtgaccctgtggcaccagctgcacgtggacatgaagagcctgctggcctggcagagcctgagaagagacgtgcagctgatcagaagctggagcctggccaccttcagaaccctgaagcccgaggagcagagacaggccctgcacagcctggagctgcactaccaggccttcctgagagacagccaggacgccggcggcttcggccccgaggacagactgatggccgagagagagtacggcagctgcagccaccactaccagcagctgctgcagagcctggagcagggcgcccaggaggagagcagatgccagagatgcatcagcgagctgaaggacatcagactgcagctggaggcctgcgagaccagaaccgtgcacagactgagactgcccctggacaaggagcccgccagagagtgcgcccagagaatcgccgagcagcagaaggcccaggccgaggtggagggcctgggcaagggcgtggccagactgagcgccgaggccgagaaggtgctggccctgcccgagcccagccccgccgcccccaccctgagaagcgagctggagctgaccctgggcaagctggagcaggtgagaagcctgagcgccatctacctggagaagctgaagaccatcagcctggtgatcagaggcacccagggcgccgaggaggtgctgagagcccacgaggagcagctgaaggaggcccaggccgtgcccgccaccctgcccgagctggaggccaccaaggccagcctgaagaagctgagagcccaggccgaggcccagcagcccaccttcgacgccctgagagacgagctgagaggcgcccaggaggtgggcgagagactgcagcagagacacggcgagagagacgtggaggtggagagatggagagagagagtggcccagctgctggagagatggcaggccgtgctggcccagaccgacgtgagacagagagagctggagcagctgggcagacagctgagatactacagagagagcgccgaccccctgggcgcctggctgcaggacgccagaagaagacaggagcagatccaggccatgcccctggccgacagccaggccgtgagagagcagctgagacaggagcaggccctgctggaggagatcgagagacacggcgagaaggtggaggagtgccagagattcgccaagcagtacatcaacgccatcaaggactacgagctgcagctggtgacctacaaggcccagctggagcccgtggccagccccgccaagaagcccaaggtgcagagcggcagcgagagcgtgatccaggagtacgtggacctgagaacccactacagcgagctgaccaccctgaccagccagtacatcaagttcatcagcgagaccctgagaagaatggaggaggaggagagactggccgagcagcagagagccgaggagagagagagactggccgaggtggaggccgccctggagaagcagagacagctggccgaggcccacgcccaggccaaggcccaggccgagagagaggccaaggagctgcagcagagaatgcaggaggaggtggtgagaagagaggaggccgccgtggacgcccagcagcagaagagaagcatccaggaggagctgcagcagctgagacagagcagcgaggccgagatccaggccaaggccagacaggccgaggccgccgagagaagcagactgagaatcgaggaggagatcagagtggtgagactgcagctggaggccaccgagagacagagaggcggcgccgagggcgagctgcaggccctgagagccagagccgaggaggccgaggcccagaagagacaggcccaggaggaggccgagagactgagaagacaggtgcaggacgagagccagagaaagagacaggccgaggtggagctggccagcagagtgaaggccgaggccgaggccgccagagagaagcagagagccctgcaggccctggaggagctgagactgcaggccgaggaggccgagagaagactgagacaggccgaggtggagagagccagacaggtgcaggtggccctggagaccgcccagagaagcgccgaggccgagctgcagagcaagagagccagcttcgccgagaagaccgcccagctggagagaagcctgcaggaggagcacgtggccgtggcccagctgagagaggaggccgagagaagagcccagcagcaggccgaggccgagagagccagagaggaggccgagagagagctggagagatggcagctgaaggccaacgaggccctgagactgagactgcaggccgaggaggtggcccagcagaagagcctggcccaggccgaggccgagaagcagaaggaggaggccgagagagaggccagaagaagaggcaaggccgaggagcaggccgtgagacagagagagctggccgagcaggagctggagaagcagagacagctggccgagggcaccgcccagcagagactggccgccgagcaggagctgatcagactgagagccgagaccgagcagggcgagcagcagagacagctgctggaggaggagctggccagactgcagagagaggccgccgccgccacccagaagagacaggagctggaggccgagctggccaaggtgagagccgagatggaggtgctgctggccagcaaggccagagccgaggaggagagcagaagcaccagcgagaagagcaagcagagactggaggccgaggccggcagattcagagagctggccgaggaggccgccagactgagagccctggccgaggaggccaagagacagagacagctggccgaggaggacgccgccagacagagagccgaggccgagagagtgctggccgagaagctggccgccatcggcgaggccaccagactgaagaccgaggccgagatcgccctgaaggagaaggaggccgagaacgagagactgagaagactggccgaggacgaggccttccagagaagaagactggaggagcaggccgcccagcacaaggccgacatcgaggagagactggcccagctgagaaaggccagcgacagcgagctggagagacagaagggcctggtggaggacaccctgagacagagaagacaggtggaggaggagatcctggccctgaaggccagcttcgagaaggccgccgccggcaaggccgagctggagctggagctgggcagaatcagaagcaacgccgaggacaccctgagaagcaaggagcaggccgagctggaggccgccagacagagacagctggccgccgaggaggagagaagaagaagagaggccgaggagagagtgcagaagagcctggccgccgaggaggaggccgccagacagagaaaggccgccctggaggaggtggagagactgaaggccaaggtggaggaggccagaagactgagagagagagccgagcaggagagcgccagacagctgcagctggcccaggaggccgcccagaagagactgcaggccgaggagaaggcccacgccttcgccgtgcagcagaaggagcaggagctgcagcagaccctgcagcaggagcagagcgtgctggaccagctgagaggcgaggccgaggccgccagaagagccgccgaggaggccgaggaggccagagtgcaggccgagagagaggccgcccagagcagaagacaggtggaggaggccgagagactgaagcagagcgccgaggagcaggcccaggccagagcccaggcccaggccgccgccgagaagctgagaaaggaggccgagcaggaggccgccagaagagcccaggccgagcaggccgccctgagacagaagcaggccgccgacgccgagatggagaagcacaagaagttcgccgagcagaccctgagacagaaggcccaggtggagcaggagctgaccaccctgagactgcagctggaggagaccgaccaccagaagaacctgctggacgaggagctgcagagactgaaggccgaggccaccgaggccgccagacagagaagccaggtggaggaggagctgttcagcgtgagagtgcagatggaggagctgagcaagctgaaggccagaatcgaggccgagaacagagccctgatcctgagagacaaggacaacacccagagattcctgcaggaggaggccgagaagatgaagcaggtggccgaggaggccgccagactgagcgtggccgcccaggaggccgccagactgagacagctggccgaggaggacctggcccagcagagagccctggccgagaagatgctgaaggagaagatgcaggccgtgcaggaggccaccagactgaaggccgaggccgagctgctgcagcagcagaaggagctggcccaggagcaggccagaagactgcaggaggacaaggagcagatggcccagcagctggccgaggagacccagggcttccagagaaccctggaggccgagagacagagacagctggagatgagcgccgaggccgagagactgaagctgagagtggccgagatgagcagagcccaggccagagccgaggaggacgcccagagattcagaaagcaggccgaggagatcggcgagaagctgcacagaaccgagctggccacccaggagaaggtgaccctggtgcagaccctggagatccagagacagcagagcgaccacgacgccgagagactgagagaggccatcgccgagctggagagagagaaggagaagctgcagcaggaggccaagctgctgcagctgaagagcgaggagatgcagaccgtgcagcaggagcagctgctgcaggagacccaggccctgcagcagagcttcctgagcgagaaggacagcctgctgcagagagagagattcatcgagcaggagaaggccaagctggagcagctgttccaggacgaggtggccaaggcccagcagctgagagaggagcagcagagacagcagcagcagatggagcaggagagacagagactggtggccagcatggaggaggccagaagaagacagcacgaggccgaggagggcgtgagaagaaagcaggaggagctgcagcagctggagcagcagagaagacagcaggaggagctgctggccgaggagaaccagagactgagagagcagctgcagctgctggaggagcagcacagagccgccctggcccacagcgaggaggtgaccgccagccaggtggccgccaccaagaccctgcccaacggcagagacgccctggacggccccgccgccgaggccgagcccgagcacagcttcgacggcctgagaagaaaggtgagcgcccagagactgcaggaggccggcatcctgagcgccgaggagctgcagagactggcccagggccacaccaccgtggacgagctggccagaagagaggacgtgagacactacctgcagggcagaagcagcatcgccggcctgctgctgaaggccaccaacgagaagctgagcgtgtacgccgccctgcagagacagctgctgagccccggcaccgccctgatcctgctggaggcccaggccgccagcggcttcctgctggaccccgtgagaaacagaagactgaccgtgaacgaggccgtgaaggagggcgtggtgggccccgagctgcaccacaagctgctgagcgccgagagagccgtgaccggctacaaggacccctacaccggccagcagatcagcctgttccaggccatgcagaagggcctgatcgtgagagagcacggcatcagactgctggaggcccagatcgccaccggcggcgtgatcgaccccgtgcacagccacagagtgcccgtggacgtggcctacagaagaggctacttcgacgaggagatgaacagagtgctggccgaccccagcgacgacaccaagggcttcttcgaccccaacacccacgagaacctgacctacctgcagctgctggagagatgcgtggaggaccccgagaccggcctgtgcctgctgcccctgaccgacaaggccgccaagggcggcgagctggtgtacaccgacagcgaggccagagacgtgttcgagaaggccaccgtgagcgcccccttcggcaagttccagggcaagaccgtgaccatctgggagatcatcaacagcgagtacttcaccgccgagcagagaagagacctgctgagacagttcagaaccggcagaatcaccgtggagaagatcatcaagatcatcatcaccgtggtggaggagcaggagcagaagggcagactgtgcttcgagggcctgagaagcctggtgcccgccgccgagctgctggagagcagagtgatcgacagagagctgtaccagcagctgcagagaggcgagagaagcgtgagagacgtggccgaggtggacaccgtgagaagagccctgagaggcgccaacgtgatcgccggcgtgtggctggaggaggccggccagaagctgagcatctacaacgccctgaagaaggacctgctgcccagcgacatggccgtggccctgctggaggcccaggccggcaccggccacatcatcgaccccgccaccagcgccagactgaccgtggacgaggccgtgagagccggcctggtgggccccgagttccacgagaagctgctgagcgccgagaaggccgtgaccggctacagagacccctacaccggccagagcgtgagcctgttccaggccctgaagaagggcctgatccccagagagcagggcctgagactgctggacgcccagctgagcaccggcggcatcgtggaccccagcaagagccacagagtgcccctggacgtggcctgcgccagaggctgcctggacgaggagaccagcagagccctgagcgcccccagagccgacgccaaggcctacagcgaccccagcaccggcgagcccgccacctacggcgagctgcagcagagatgcagacccgaccagctgaccggcctgagcctgctgcccctgagcgagaaggccgccagagccagacaggaggagctgtacagcgagctgcaggccagagagaccttcgagaagacccccgtggaggtgcccgtgggcggcttcaagggcagaaccgtgaccgtgtgggagctgatcagcagcgagtacttcaccgccgagcagagacaggagctgctgagacagttcagaaccggcaaggtgaccgtggagaaggtgatcaagatcctgatcaccatcgtggaggaggtggagaccctgagacaggagagactgagcttcagcggcctgagagcccccgtgcccgccagcgagctgctggccagcggcgtgctgagcagagcccagttcgagcagctgaaggacggcaagaccaccgtgaaggacctgagcgagctgggcagcgtgagaaccctgctgcagggcagcggctgcctggccggcatctacctggaggacaccaaggagaaggtgagcatctacgaggccatgagaagaggcctgctgagagccaccaccgccgccctgctgctggaggcccaggccgccaccggcttcctggtggaccccgtgagaaaccagagactgtacgtgcacgaggccgtgaaggccggcgtggtgggccccgagctgcacgagcagctgctgagcgccgagaaggccgtgaccggctacagagacccctacagcggcagcaccatcagcctgttccaggccatgcagaagggcctggtgctgagacagcacggcatcagactgctggaggcccagatcgccaccggcggcatcatcgaccccgtgcacagccacagagtgcccgtggacgtggcctaccagagaggctacttcagcgaggagatgaacagagtgctggccgaccccagcgacgacaccaagggcttcttcgaccccaacacccacgagaacctgacctacagacagctgctggagagatgcgtggaggaccccgagaccggcctgagactgctgcccctgaagggcgccgagaaggccgaggtggtggagaccacccaggtgtacaccgaggaggagaccagaagagccttcgaggagacccagatcgacatccccggcggcggcagccacggcggcagcaccatgagcctgtgggaggtgatgcagagcgacctgatccccgaggagcagagagcccagctgatggccgacttccaggccggcagagtgaccaaggagagaatgatcatcatcatcatcgagatcatcgagaagaccgagatcatcagacagcagggcctggccagctacgactacgtgagaagaagactgaccgccgaggacctgttcgaggccagaatcatcagcctggagacctacaacctgctgagagagggcaccagaagcctgagagaggccctggaggccgagagcgcctggtgctacctgtacggcaccggcagcgtggccggcgtgtacctgcccggcagcagacagaccctgagcatctaccaggccctgaagaagggcctgctgagcgccgaggtggccagactgctgctggaggcccaggccgccaccggcttcctgctggaccccgtgaagggcgagagactgaccgtggacgaggccgtgagaaagggcctggtgggccccgagctgcacgacagactgctgagcgccgagagagccgtgaccggctacagagacccctacaccgagcagaccatcagcctgttccaggccatgaagaaggagctgatccccaccgaggaggccctgagactgctggacgcccagctggccaccggcggcatcgtggaccccagactgggcttccacctgcccctggaggtggcctaccagagaggctacctgaacaaggacacccacgaccagctgagcgagcccagcgaggtgagaagctacgtggaccccagcaccgacgagagactgagctacacccagctgctgagaagatgcagaagagacgacggcaccggccagctgctgctgcccctgagcgacgccagaaagctgaccttcagaggcctgagaaagcagatcaccatggaggagctggtgagaagccaggtgatggacgaggccaccgccctgcagctgagagagggcctgaccagcatcgaggaggtgaccaagaacctgcagaagttcctggagggcaccagctgcatcgccggcgtgttcgtggacgccaccaaggagagactgagcgtgtaccaggccatgaagaagggcatcatcagacccggcaccgccttcgagctgctggaggcccaggccgccaccggctacgtgatcgaccccatcaagggcctgaagctgaccgtggaggaggccgtgagaatgggcatcgtgggccccgagttcaaggacaagctgctgagcgccgagagagccgtgaccggctacaaggacccctacagcggcaagctgatcagcctgttccaggccatgaagaagggcctgatcctgaaggaccacggcatcagactgctggaggcccagatcgccaccggcggcatcatcgaccccgaggagagccacagactgcccgtggaggtggcctacaagagaggcctgttcgacgaggagatgaacgagatcctgaccgaccccagcgacgacaccaagggcttcttcgaccccaacaccgaggagaacctgacctacctgcagctgatggagagatgcatcaccgacccccagaccggcctgtgcctgctgcccctgaaggagaagaagagagagagaaagaccagcagcaagagcagcgtgagaaagagaagagtggtgatcgtggaccccgagaccggcaaggagatgagcgtgtacgaggcctacagaaagggcctgatcgaccaccagacctacctggagctgagcgagcaggagtgcgagtgggaggagatcaccatcagcagcagcgacggcgtggtgaagagcatgatcatcgacagaagaagcggcagacagtacgacatcgacgacgccatcgccaagaacctgatcgacagaagcgccctggaccagtacagagccggcaccctgagcatcaccgagttcgccgacatgctgagcggcaacgccggcggcttcagaagcagaagcagcagcgtgggcagcagcagcagctaccccatcagccccgccgtgagcagaacccagctggccagctggagcgaccccaccgaggagaccggccccgtggccggcatcctggacaccgagaccctggagaaggtgagcatcaccgaggccatgcacagaaacctggtggacaacatcaccggccagagactgctggaggcccaggcctgcaccggcggcatcatcgaccccagcaccggcgagagattccccgtgaccgacgccgtgaacaagggcctggtggacaagatcatggtggacagaatcaacctggcccagaaggccttctgcggcttcgaggaccccagaaccaagaccaagatgagcgccgcccaggccctgaagaagggctggctgtactacgaggccggccagagattcctggaggtgcagtacctgaccggcggcctgatcgagcccgacacccccggcagagtgcccctggacgaggccctgcagagaggcaccgtggacgccagaaccgcccagaagctgagagacgtgggcgcctacagcaagtacctgacctgccccaagaccaagctgaagatcagctacaaggacgccctggacagaagcatggtggaggagggcaccggcctgagactgctggaggccgccgcccagagcaccaagggctactacagcccctacagcgtgagcggcagcggcagcaccgccggcagcagaaccggcagcagaaccggcagcagagccggcagcagaagaggcagcttcgacgccaccggcagcggcttcagcatgaccttcagcagcagcagctacagcagcagcggctacggcagaagatacgccagcggcagcagcgccagcctgggcggccccgagagcgccgtggcctag

SEQ ID NO: 262195 - DNA, 13713 bp, Artificial Sequence
  derived and/or modified sequence
atgagcggcgaggacgccgaggtgagagccgtgagcgaggacgtgagcaacggcagcagcggcagccccagccccggcgacaccctgccctggaacctgggcaagacccagagaagcagaagaagcggcggcggcgccggcagcaacggcagcgtgctggaccccgccgagagagccgtgatcagaatcgccgacgagagagacagagtgcagaagaagaccttcaccaagtgggtgaacaagcacctgatcaaggcccagagacacatcagcgacctgtacgaggacctgagagacggccacaacctgatcagcctgctggaggtgctgagcggcgacagcctgcccagagagaagggcagaatgagattccacaagctgcagaacgtgcagatcgccctggactacctgagacacagacaggtgaagctggtgaacatcagaaacgacgacatcgccgacggcaaccccaagctgaccctgggcctgatctggaccatcatcctgcacttccagatcagcgacatccaggtgagcggccagagcgaggacatgaccgccaaggagaagctgctgctgtggagccagagaatggtggagggctaccagggcctgagatgcgacaacttcaccagcagctggagagacggcagactgttcaacgccatcatccacagacacaagcccctgctgatcgacatgaacaaggtgtacagacagaccaacctggagaacctggaccaggccttcagcgtggccgagagagacctgggcgtgaccagactgctggaccccgaggacgtggacgtgccccagcccgacgagaagagcatcatcacctacgtgagcagcctgtacgacgccatgcccagagtgcccgacgtgcaggacggcgagctgcagctgagatggcaggagtacagagagctggtgctgctgctgctgcagtggatgagacaccacaccgccgccttcgaggagagaagattccccagcagcttcgaggagatcgagatcctgtggagccagttcctgaagttcaaggagatggagctgcccgccaaggaggccgacaagaacagaagcaagggcatctaccagagcctggagggcgccgtgcaggccggccagctgaaggtgccccccggctaccaccccctggacgtggagaaggagtggggcaagctgcacgtggccatcctggagagagagaagcagctgagaagcgagttcgagagactggagtgcctgcagagaatcgtgaccaagctgcagatggaggccggcctgtgcgaggagcagctgaaccaggccgacgccctgctgcagagcgacgtgagactgctggccgccggcaaggtgccccagagagccggcgaggtggagagagacctggacaaggccgacagcatgatcagactgctgttcaacgacgtgcagaccctgaaggacggcagacacccccagggcgagcagatgtacagaagagtgtacagactgcacgagagactggtggccatcagaaccgagtacaacctgagactgaaggccggcgtggccgcccccgccacccaggtggcccaggtgaccctgcagagcgtgcagagaagacccgagctggaggacagcaccctgagatacctgcaggacctgctggcctgggtggaggagaaccagcacagagtggacggcgccgagtggggcgtggacctgcccagcgtggaggcccagctgggcagccacagaggcctgcaccagagcatcgaggagttcagagccaagatcgagagagccagaagcgacgagggccagctgagccccgccaccagaggcgcctacagagactgcctgggcagactggacctgcagtacgccaagctgctgaacagcagcaaggccagactgagaagcctggagagcctgcacagcttcgtggccgccgccaccaaggagctgatgtggctgaacgagaaggaggaggaggaggtgggcttcgactggagcgacagaaacaccaacatgaccgccaagaaggagagctacagcgccctgatgagagagctggagctgaaggagaagaagatcaaggagctgcagaacgccggcgacagactgctgagagaggaccaccccgccagacccaccgtggagagcttccaggccgccctgcagacccagtggagctggatgctgcagctgtgctgctgcatcgaggcccacctgaaggagaacgccgcctacttccagttcttcagcgacgtgagagaggccgagggccagctgcagaagctgcaggaggccctgagaagaaagtacagctgcgacagaagcgccaccgtgaccagactggaggacctgctgcaggacgcccaggacgagaaggagcagctgaacgagtacaagggccacctgagcggcctggccaagagagccaaggccgtggtgcagctgaagcccagacaccccgcccaccccatgagaggcagactgcccctgctggccgtgtgcgactacaagcaggtggaggtgaccgtgcacaagggcgacgagtgccagctggtgggccccgcccagcccagccactggaaggtgctgagcagcagcggcagcgaggccgccgtgcccagcgtgtgcttcctggtgcccccccccaaccaggaggcccaggaggccgtgaccagactggaggcccagcaccaggccctggtgaccctgtggcaccagctgcacgtggacatgaagagcctgctggcctggcagagcctgagaagagacgtgcagctgatcagaagctggagcctggccaccttcagaaccctgaagcccgaggagcagagacaggccctgcacagcctggagctgcactaccaggccttcctgagagacagccaggacgccggcggcttcggccccgaggacagactgatggccgagagagagtacggcagctgcagccaccactaccagcagctgctgcagagcctggagcagggcgcccaggaggagagcagatgccagagatgcatcagcgagctgaaggacatcagactgcagctggaggcctgcgagaccagaaccgtgcacagactgagactgcccctggacaaggagcccgccagagagtgcgcccagagaatcgccgagcagcagaaggcccaggccgaggtggagggcctgggcaagggcgtggccagactgagcgccgaggccgagaaggtgctggccctgcccgagcccagccccgccgcccccaccctgagaagcgagctggagctgaccctgggcaagctggagcaggtgagaagcctgagcgccatctacctggagaagctgaagaccatcagcctggtgatcagaggcacccagggcgccgaggaggtgctgagagcccacgaggagcagctgaaggaggcccaggccgtgcccgccaccctgcccgagctggaggccaccaaggccagcctgaagaagctgagagcccaggccgaggcccagcagcccaccttcgacgccctgagagacgagctgagaggcgcccaggaggtgggcgagagactgcagcagagacacggcgagagagacgtggaggtggagagatggagagagagagtggcccagctgctggagagatggcaggccgtgctggcccagaccgacgtgagacagagagagctggagcagctgggcagacagctgagatactacagagagagcgccgaccccctgggcgcctggctgcaggacgccagaagaagacaggagcagatccaggccatgcccctggccgacagccaggccgtgagagagcagctgagacaggagcaggccctgctggaggagatcgagagacacggcgagaaggtggaggagtgccagagattcgccaagcagtacatcaacgccatcaaggactacgagctgcagctggtgacctacaaggcccagctggagcccgtggccagccccgccaagaagcccaaggtgcagagcggcagcgagagcgtgatccaggagtacgtggacctgagaacccactacagcgagctgaccaccctgaccagccagtacatcaagttcatcagcgagaccctgagaagaatggaggaggaggagagactggccgagcagcagagagccgaggagagagagagactggccgaggtggaggccgccctggagaagcagagacagctggccgaggcccacgcccaggccaaggcccaggccgagagagaggccaaggagctgcagcagagaatgcaggaggaggtggtgagaagagaggaggccgccgtggacgcccagcagcagaagagaagcatccaggaggagctgcagcagctgagacagagcagcgaggccgagatccaggccaaggccagacaggccgaggccgccgagagaagcagactgagaatcgaggaggagatcagagtggtgagactgcagctggaggccaccgagagacagagaggcggcgccgagggcgagctgcaggccctgagagccagagccgaggaggccgaggcccagaagagacaggcccaggaggaggccgagagactgagaagacaggtgcaggacgagagccagagaaagagacaggccgaggtggagctggccagcagagtgaaggccgaggccgaggccgccagagagaagcagagagccctgcaggccctggaggagctgagactgcaggccgaggaggccgagagaagactgagacaggccgaggtggagagagccagacaggtgcaggtggccctggagaccgcccagagaagcgccgaggccgagctgcagagcaagagagccagcttcgccgagaagaccgcccagctggagagaagcctgcaggaggagcacgtggccgtggcccagctgagagaggaggccgagagaagagcccagcagcaggccgaggccgagagagccagagaggaggccgagagagagctggagagatggcagctgaaggccaacgaggccctgagactgagactgcaggccgaggaggtggcccagcagaagagcctggcccaggccgaggccgagaagcagaaggaggaggccgagagagaggccagaagaagaggcaaggccgaggagcaggccgtgagacagagagagctggccgagcaggagctggagaagcagagacagctggccgagggcaccgcccagcagagactggccgccgagcaggagctgatcagactgagagccgagaccgagcagggcgagcagcagagacagctgctggaggaggagctggccagactgcagagagaggccgccgccgccacccagaagagacaggagctggaggccgagctggccaaggtgagagccgagatggaggtgctgctggccagcaaggccagagccgaggaggagagcagaagcaccagcgagaagagcaagcagagactggaggccgaggccggcagattcagagagctggccgaggaggccgccagactgagagccctggccgaggaggccaagagacagagacagctggccgaggaggacgccgccagacagagagccgaggccgagagagtgctggccgagaagctggccgccatcggcgaggccaccagactgaagaccgaggccgagatcgccctgaaggagaaggaggccgagaacgagagactgagaagactggccgaggacgaggccttccagagaagaagactggaggagcaggccgcccagcacaaggccgacatcgaggagagactggcccagctgagaaaggccagcgacagcgagctggagagacagaagggcctggtggaggacaccctgagacagagaagacaggtggaggaggagatcctggccctgaaggccagcttcgagaaggccgccgccggcaaggccgagctggagctggagctgggcagaatcagaagcaacgccgaggacaccctgagaagcaaggagcaggccgagctggaggccgccagacagagacagctggccgccgaggaggagagaagaagaagagaggccgaggagagagtgcagaagagcctggccgccgaggaggaggccgccagacagagaaaggccgccctggaggaggtggagagactgaaggccaaggtggaggaggccagaagactgagagagagagccgagcaggagagcgccagacagctgcagctggcccaggaggccgcccagaagagactgcaggccgaggagaaggcccacgccttcgccgtgcagcagaaggagcaggagctgcagcagaccctgcagcaggagcagagcgtgctggaccagctgagaggcgaggccgaggccgccagaagagccgccgaggaggccgaggaggccagagtgcaggccgagagagaggccgcccagagcagaagacaggtggaggaggccgagagactgaagcagagcgccgaggagcaggcccaggccagagcccaggcccaggccgccgccgagaagctgagaaaggaggccgagcaggaggccgccagaagagcccaggccgagcaggccgccctgagacagaagcaggccgccgacgccgagatggagaagcacaagaagttcgccgagcagaccctgagacagaaggcccaggtggagcaggagctgaccaccctgagactgcagctggaggagaccgaccaccagaagaacctgctggacgaggagctgcagagactgaaggccgaggccaccgaggccgccagacagagaagccaggtggaggaggagctgttcagcgtgagagtgcagatggaggagctgagcaagctgaaggccagaatcgaggccgagaacagagccctgatcctgagagacaaggacaacacccagagattcctgcaggaggaggccgagaagatgaagcaggtggccgaggaggccgccagactgagcgtggccgcccaggaggccgccagactgagacagctggccgaggaggacctggcccagcagagagccctggccgagaagatgctgaaggagaagatgcaggccgtgcaggaggccaccagactgaaggccgaggccgagctgctgcagcagcagaaggagctggcccaggagcaggccagaagactgcaggaggacaaggagcagatggcccagcagctggccgaggagacccagggcttccagagaaccctggaggccgagagacagagacagctggagatgagcgccgaggccgagagactgaagctgagagtggccgagatgagcagagcccaggccagagccgaggaggacgcccagagattcagaaagcaggccgaggagatcggcgagaagctgcacagaaccgagctggccacccaggagaaggtgaccctggtgcagaccctggagatccagagacagcagagcgaccacgacgccgagagactgagagaggccatcgccgagctggagagagagaaggagaagctgcagcaggaggccaagctgctgcagctgaagagcgaggagatgcagaccgtgcagcaggagcagctgctgcaggagacccaggccctgcagcagagcttcctgagcgagaaggacagcctgctgcagagagagagattcatcgagcaggagaaggccaagctggagcagctgttccaggacgaggtggccaaggcccagcagctgagagaggagcagcagagacagcagcagcagatggagcaggagagacagagactggtggccagcatggaggaggccagaagaagacagcacgaggccgaggagggcgtgagaagaaagcaggaggagctgcagcagctggagcagcagagaagacagcaggaggagctgctggccgaggagaaccagagactgagagagcagctgcagctgctggaggagcagcacagagccgccctggcccacagcgaggaggtgaccgccagccaggtggccgccaccaagaccctgcccaacggcagagacgccctggacggccccgccgccgaggccgagcccgagcacagcttcgacggcctgagaagaaaggtgagcgcccagagactgcaggaggccggcatcctgagcgccgaggagctgcagagactggcccagggccacaccaccgtggacgagctggccagaagagaggacgtgagacactacctgcagggcagaagcagcatcgccggcctgctgctgaaggccaccaacgagaagctgagcgtgtacgccgccctgcagagacagctgctgagccccggcaccgccctgatcctgctggaggcccaggccgccagcggcttcctgctggaccccgtgagaaacagaagactgaccgtgaacgaggccgtgaaggagggcgtggtgggccccgagctgcaccacaagctgctgagcgccgagagagccgtgaccggctacaaggacccctacaccggccagcagatcagcctgttccaggccatgcagaagggcctgatcgtgagagagcacggcatcagactgctggaggcccagatcgccaccggcggcgtgatcgaccccgtgcacagccacagagtgcccgtggacgtggcctacagaagaggctacttcgacgaggagatgaacagagtgctggccgaccccagcgacgacaccaagggcttcttcgaccccaacacccacgagaacctgacctacctgcagctgctggagagatgcgtggaggaccccgagaccggcctgtgcctgctgcccctgaccgacaaggccgccaagggcggcgagctggtgtacaccgacagcgaggccagagacgtgttcgagaaggccaccgtgagcgcccccttcggcaagttccagggcaagaccgtgaccatctgggagatcatcaacagcgagtacttcaccgccgagcagagaagagacctgctgagacagttcagaaccggcagaatcaccgtggagaagatcatcaagatcatcatcaccgtggtggaggagcaggagcagaagggcagactgtgcttcgagggcctgagaagcctggtgcccgccgccgagctgctggagagcagagtgatcgacagagagctgtaccagcagctgcagagaggcgagagaagcgtgagagacgtggccgaggtggacaccgtgagaagagccctgagaggcgccaacgtgatcgccggcgtgtggctggaggaggccggccagaagctgagcatctacaacgccctgaagaaggacctgctgcccagcgacatggccgtggccctgctggaggcccaggccggcaccggccacatcatcgaccccgccaccagcgccagactgaccgtggacgaggccgtgagagccggcctggtgggccccgagttccacgagaagctgctgagcgccgagaaggccgtgaccggctacagagacccctacaccggccagagcgtgagcctgttccaggccctgaagaagggcctgatccccagagagcagggcctgagactgctggacgcccagctgagcaccggcggcatcgtggaccccagcaagagccacagagtgcccctggacgtggcctgcgccagaggctgcctggacgaggagaccagcagagccctgagcgcccccagagccgacgccaaggcctacagcgaccccagcaccggcgagcccgccacctacggcgagctgcagcagagatgcagacccgaccagctgaccggcctgagcctgctgcccctgagcgagaaggccgccagagccagacaggaggagctgtacagcgagctgcaggccagagagaccttcgagaagacccccgtggaggtgcccgtgggcggcttcaagggcagaaccgtgaccgtgtgggagctgatcagcagcgagtacttcaccgccgagcagagacaggagctgctgagacagttcagaaccggcaaggtgaccgtggagaaggtgatcaagatcctgatcaccatcgtggaggaggtggagaccctgagacaggagagactgagcttcagcggcctgagagcccccgtgcccgccagcgagctgctggccagcggcgtgctgagcagagcccagttcgagcagctgaaggacggcaagaccaccgtgaaggacctgagcgagctgggcagcgtgagaaccctgctgcagggcagcggctgcctggccggcatctacctggaggacaccaaggagaaggtgagcatctacgaggccatgagaagaggcctgctgagagccaccaccgccgccctgctgctggaggcccaggccgccaccggcttcctggtggaccccgtgagaaaccagagactgtacgtgcacgaggccgtgaaggccggcgtggtgggccccgagctgcacgagcagctgctgagcgccgagaaggccgtgaccggctacagagacccctacagcggcagcaccatcagcctgttccaggccatgcagaagggcctggtgctgagacagcacggcatcagactgctggaggcccagatcgccaccggcggcatcatcgaccccgtgcacagccacagagtgcccgtggacgtggcctaccagagaggctacttcagcgaggagatgaacagagtgctggccgaccccagcgacgacaccaagggcttcttcgaccccaacacccacgagaacctgacctacagacagctgctggagagatgcgtggaggaccccgagaccggcctgagactgctgcccctgaagggcgccgagaaggccgaggtggtggagaccacccaggtgtacaccgaggaggagaccagaagagccttcgaggagacccagatcgacatccccggcggcggcagccacggcggcagcaccatgagcctgtgggaggtgatgcagagcgacctgatccccgaggagcagagagcccagctgatggccgacttccaggccggcagagtgaccaaggagagaatgatcatcatcatcatcgagatcatcgagaagaccgagatcatcagacagcagggcctggccagctacgactacgtgagaagaagactgaccgccgaggacctgttcgaggccagaatcatcagcctggagacctacaacctgctgagagagggcaccagaagcctgagagaggccctggaggccgagagcgcctggtgctacctgtacggcaccggcagcgtggccggcgtgtacctgcccggcagcagacagaccctgagcatctaccaggccctgaagaagggcctgctgagcgccgaggtggccagactgctgctggaggcccaggccgccaccggcttcctgctggaccccgtgaagggcgagagactgaccgtggacgaggccgtgagaaagggcctggtgggccccgagctgcacgacagactgctgagcgccgagagagccgtgaccggctacagagacccctacaccgagcagaccatcagcctgttccaggccatgaagaaggagctgatccccaccgaggaggccctgagactgctggacgcccagctggccaccggcggcatcgtggaccccagactgggcttccacctgcccctggaggtggcctaccagagaggctacctgaacaaggacacccacgaccagctgagcgagcccagcgaggtgagaagctacgtggaccccagcaccgacgagagactgagctacacccagctgctgagaagatgcagaagagacgacggcaccggccagctgctgctgcccctgagcgacgccagaaagctgaccttcagaggcctgagaaagcagatcaccatggaggagctggtgagaagccaggtgatggacgaggccaccgccctgcagctgagagagggcctgaccagcatcgaggaggtgaccaagaacctgcagaagttcctggagggcaccagctgcatcgccggcgtgttcgtggacgccaccaaggagagactgagcgtgtaccaggccatgaagaagggcatcatcagacccggcaccgccttcgagctgctggaggcccaggccgccaccggctacgtgatcgaccccatcaagggcctgaagctgaccgtggaggaggccgtgagaatgggcatcgtgggccccgagttcaaggacaagctgctgagcgccgagagagccgtgaccggctacaaggacccctacagcggcaagctgatcagcctgttccaggccatgaagaagggcctgatcctgaaggaccacggcatcagactgctggaggcccagatcgccaccggcggcatcatcgaccccgaggagagccacagactgcccgtggaggtggcctacaagagaggcctgttcgacgaggagatgaacgagatcctgaccgaccccagcgacgacaccaagggcttcttcgaccccaacaccgaggagaacctgacctacctgcagctgatggagagatgcatcaccgacccccagaccggcctgtgcctgctgcccctgaaggagaagaagagagagagaaagaccagcagcaagagcagcgtgagaaagagaagagtggtgatcgtggaccccgagaccggcaaggagatgagcgtgtacgaggcctacagaaagggcctgatcgaccaccagacctacctggagctgagcgagcaggagtgcgagtgggaggagatcaccatcagcagcagcgacggcgtggtgaagagcatgatcatcgacagaagaagcggcagacagtacgacatcgacgacgccatcgccaagaacctgatcgacagaagcgccctggaccagtacagagccggcaccctgagcatcaccgagttcgccgacatgctgagcggcaacgccggcggcttcagaagcagaagcagcagcgtgggcagcagcagcagctaccccatcagccccgccgtgagcagaacccagctggccagctggagcgaccccaccgaggagaccggccccgtggccggcatcctggacaccgagaccctggagaaggtgagcatcaccgaggccatgcacagaaacctggtggacaacatcaccggccagagactgctggaggcccaggcctgcaccggcggcatcatcgaccccagcaccggcgagagattccccgtgaccgacgccgtgaacaagggcctggtggacaagatcatggtggacagaatcaacctggcccagaaggccttctgcggcttcgaggaccccagaaccaagaccaagatgagcgccgcccaggccctgaagaagggctggctgtactacgaggccggccagagattcctggaggtgcagtacctgaccggcggcctgatcgagcccgacacccccggcagagtgcccctggacgaggccctgcagagaggcaccgtggacgccagaaccgcccagaagctgagagacgtgggcgcctacagcaagtacctgacctgccccaagaccaagctgaagatcagctacaaggacgccctggacagaagcatggtggaggagggcaccggcctgagactgctggaggccgccgcccagagcaccaagggctactacagcccctacagcgtgagcggcagcggcagcaccgccggcagcagaaccggcagcagaaccggcagcagagccggcagcagaagaggcagcttcgacgccaccggcagcggcttcagcatgaccttcagcagcagcagctacagcagcagcggctacggcagaagatacgccagcggcagcagcgccagcctgggcggccccgagagcgccgtggcctag

SEQ ID NO: 262196 - protein, 4547 aa, Artificial Sequence
  derived and/or modified sequence
MEPSGSLFPSLVVVGHVVTLAAVWHWRRGRRWAQDEQDERDRVQKKTFTKWVNKHLIKAQRHISDLYEDLRDGHNLISLLEVLSGDSLPREKGRMRFHKLQNVQIALDYLRHRQVKLVNIRNDDIADGNPKLTLGLIWTIILHFQISDIQVSGQSEDMTAKEKLLLWSQRMVEGYQGLRCDNFTSSWRDGRLFNAIIHRHKPLLIDMNKVYRQTNLENLDQAFSVAERDLGVTRLLDPEDVDVPQPDEKSIITYVSSLYDAMPRVPDVQDGVRANELQLRWQEYRELVLLLLQWMRHHTAAFEERRFPSSFEEIEILWSQFLKFKEMELPAKEADKNRSKGIYQSLEGAVQAGQLKVPPGYHPLDVEKEWGKLHVAILEREKQLRSEFERLECLQRIVTKLQMEAGLCEEQLNQADALLQSDVRLLAAGKVPQRAGEVERDLDKADSMIRLLFNDVQTLKDGRHPQGEQMYRRVYRLHERLVAIRTEYNLRLKAGVAAPATQVAQVTLQSVQRRPELEDSTLRYLQDLLAWVEENQHRVDGAEWGVDLPSVEAQLGSHRGLHQSIEEFRAKIERARSDEGQLSPATRGAYRDCLGRLDLQYAKLLNSSKARLRSLESLHSFVAAATKELMWLNEKEEEEVGFDWSDRNTNMTAKKESYSALMRELELKEKKIKELQNAGDRLLREDHPARPTVESFQAALQTQWSWMLQLCCCIEAHLKENAAYFQFFSDVREAEGQLQKLQEALRRKYSCDRSATVTRLEDLLQDAQDEKEQLNEYKGHLSGLAKRAKAVVQLKPRHPAHPMRGRLPLLAVCDYKQVEVTVHKGDECQLVGPAQPSHWKVLSSSGSEAAVPSVCFLVPPPNQEAQEAVTRLEAQHQALVTLWHQLHVDMKSLLAWQSLRRDVQLIRSWSLATFRTLKPEEQRQALHSLELHYQAFLRDSQDAGGFGPEDRLMAEREYGSCSHHYQQLLQSLEQGAQEESRCQRCISELKDIRLQLEACETRTVHRLRLPLDKEPARECAQRIAEQQKAQAEVEGLGKGVARLSAEAEKVLALPEPSPAAPTLRSELELTLGKLEQVRSLSAIYLEKLKTISLVIRGTQGAEEVLRAHEEQLKEAQAVPATLPELEATKASLKKLRAQAEAQQPTFDALRDELRGAQEVGERLQQRHGERDVEVERWRERVAQLLERWQAVLAQTDVRQRELEQLGRQLRYYRESADPLGAWLQDARRRQEQIQAMPLADSQAVREQLRQEQALLEEIERHGEKVEECQRFAKQYINAIKDYELQLVTYKAQLEPVASPAKKPKVQSGSESVIQEYVDLRTHYSELTTLTSQYIKFISETLRRMEEEERLAEQQRAEERERLAEVEAALEKQRQLAEAHAQAKAQAEREAKELQQRMQEEVVRREEAAVDAQQQKRSIQEELQQLRQSSEAEIQAKARQAEAAERSRLRIEEEIRVVRLQLEATERQRGGAEGELQALRARAEEAEAQKRQAQEEAERLRRQVQDESQRKRQAEVELASRVKAEAEAAREKQRALQALEELRLQAEEAERRLRQAEVERARQVQVALETAQRSAEAELQSKRASFAEKTAQLERSLQEEHVAVAQLREEAERRAQQQAEAERAREEAERELERWQLKANEALRLRLQAEEVAQQKSLAQAEAEKQKEEAEREARRRGKAEEQAVRQRELAEQELEKQRQLAEGTAQQRLAAEQELIRLRAETEQGEQQRQLLEEELARLQREAAAATQKRQELEAELAKVRAEMEVLLASKARAEEESRSTSEKSKQRLEAEAGRFRELAEEAARLRALAEEAKRQRQLAEEDAARQRAEAERVLAEKLAAIGEATRLKTEAEIALKEKEAENERLRRLAEDEAFQRRRLEEQAAQHKADIEERLAQLRKASDSELERQKGLVEDTLRQRRQVEEEILALKASFEKAAAGKAELELELGRIRSNAEDTLRSKEQAELEAARQRQLAAEEERRRREAEERVQKSLAAEEEAARQRKAALEEVERLKAKVEEARRLRERAEQESARQLQLAQEAAQKRLQAEEKAHAFAVQQKEQELQQTLQQEQSVLDQLRGEAEAARRAAEEAEEARVQAEREAAQSRRQVEEAERLKQSAEEQAQARAQAQAAAEKLRKEAEQEAARRAQAEQAALRQKQAADAEMEKHKKFAEQTLRQKAQVEQELTTLRLQLEETDHQKNLLDEELQRLKAEATEAARQRSQVEEELFSVRVQMEELSKLKARIEAENRALILRDKDNTQRFLQEEAEKMKQVAEEAARLSVAAQEAARLRQLAEEDLAQQRALAEKMLKEKMQAVQEATRLKAEAELLQQQKELAQEQARRLQEDKEQMAQQLAEETQGFQRTLEAERQRQLEMSAEAERLKLRVAEMSRAQARAEEDAQRFRKQAEEIGEKLHRTELATQEKVTLVQTLEIQRQQSDHDAERLREAIAELEREKEKLQQEAKLLQLKSEEMQTVQQEQLLQETQALQQSFLSEKDSLLQRERFIEQEKAKLEQLFQDEVAKAQQLREEQQRQQQQMEQERQRLVASMEEARRRQHEAEEGVRRKQEELQQLEQQRRQQEELLAEENQRLREQLQLLEEQHRAALAHSEEVTASQVAATKTLPNGRDALDGPAAEAEPEHSFDGLRRKVSAQRLQEAGILSAEELQRLAQGHTTVDELARREDVRHYLQGRSSIAGLLLKATNEKLSVYAALQRQLLSPGTALILLEAQAASGFLLDPVRNRRLTVNEAVKEGVVGPELHHKLLSAERAVTGYKDPYTGQQISLFQAMQKGLIVREHGIRLLEAQIATGGVIDPVHSHRVPVDVAYRRGYFDEEMNRVLADPSDDTKGFFDPNTHENLTYLQLLERCVEDPETGLCLLPLTDKAAKGGELVYTDSEARDVFEKATVSAPFGKFQGKTVTIWEIINSEYFTAEQRRDLLRQFRTGRITVEKIIKIIITVVEEQEQKGRLCFEGLRSLVPAAELLESRVIDRELYQQLQRGERSVRDVAEVDTVRRALRGANVIAGVWLEEAGQKLSIYNALKKDLLPSDMAVALLEAQAGTGHIIDPATSARLTVDEAVRAGLVGPEFHEKLLSAEKAVTGYRDPYTGQSVSLFQALKKGLIPREQGLRLLDAQLSTGGIVDPSKSHRVPLDVACARGCLDEETSRALSAPRADAKAYSDPSTGEPATYGELQQRCRPDQLTGLSLLPLSEKAARARQEELYSELQARETFEKTPVEVPVGGFKGRTVTVWELISSEYFTAEQRQELLRQFRTGKVTVEKVIKILITIVEEVETLRQERLSFSGLRAPVPASELLASGVLSRAQFEQLKDGKTTVKDLSELGSVRTLLQGSGCLAGIYLEDTKEKVSIYEAMRRGLLRATTAALLLEAQAATGFLVDPVRNQRLYVHEAVKAGVVGPELHEQLLSAEKAVTGYRDPYSGSTISLFQAMQKGLVLRQHGIRLLEAQIATGGIIDPVHSHRVPVDVAYQRGYFSEEMNRVLADPSDDTKGFFDPNTHENLTYRQLLERCVEDPETGLRLLPLKGAEKAEVVETTQVYTEEETRRAFEETQIDIPGGGSHGGSTMSLWEVMQSDLIPEEQRAQLMADFQAGRVTKERMIIIIIEIIEKTEIIRQQGLASYDYVRRRLTAEDLFEARIISLETYNLLREGTRSLREALEAESAWCYLYGTGSVAGVYLPGSRQTLSIYQALKKGLLSAEVARLLLEAQAATGFLLDPVKGERLTVDEAVRKGLVGPELHDRLLSAERAVTGYRDPYTEQTISLFQAMKKELIPTEEALRLLDAQLATGGIVDPRLGFHLPLEVAYQRGYLNKDTHDQLSEPSEVRSYVDPSTDERLSYTQLLRRCRRDDGTGQLLLPLSDARKLTFRGLRKQITMEELVRSQVMDEATALQLREGLTSIEEVTKNLQKFLEGTSCIAGVFVDATKERLSVYQAMKKGIIRPGTAFELLEAQAATGYVIDPIKGLKLTVEEAVRMGIVGPEFKDKLLSAERAVTGYKDPYSGKLISLFQAMKKGLILKDHGIRLLEAQIATGGIIDPEESHRLPVEVAYKRGLFDEEMNEILTDPSDDTKGFFDPNTEENLTYLQLMERCITDPQTGLCLLPLKEKKRERKTSSKSSVRKRRVVIVDPETGKEMSVYEAYRKGLIDHQTYLELSEQECEWEEITISSSDGVVKSMIIDRRSGRQYDIDDAIAKNLIDRSALDQYRAGTLSITEFADMLSGNAGGFRSRSSSVGSSSSYPISPAVSRTQLASWSDPTEETGPVAGILDTETLEKVSITEAMHRNLVDNITGQRLLEAQACTGGIIDPSTGERFPVTDAVNKGLVDKIMVDRINLAQKAFCGFEDPRTKTKMSAAQALKKGWLYYEAGQRFLEVQYLTGGLIEPDTPGRVPLDEALQRGTVDARTAQKLRDVGAYSKYLTCPKTKLKISYKDALDRSMVEEGTGLRLLEAAAQSTKGYYSPYSVSGSGSTAGSRTGSRTGSRAGSRRGSFDATGSGFSMTFSSSSYSSSGYGRRYASGSSASLGGPESAVA

SEQ ID NO: 262197 - protein, 4551 aa, Artificial Sequence
  derived and/or modified sequence
MSGAGGAFASPREVLLERPCWLDGGCEPARRGYLYQQLCCVDERDRVQKKTFTKWVNKHLIKAQRHISDLYEDLRDGHNLISLLEVLSGDSLPREKGRMRFHKLQNVQIALDYLRHRQVKLVNIRNDDIADGNPKLTLGLIWTIILHFQISDIQVSGQSEDMTAKEKLLLWSQRMVEGYQGLRCDNFTSSWRDGRLFNAIIHRHKPLLIDMNKVYRQTNLENLDQAFSVAERDLGVTRLLDPEDVDVPQPDEKSIITYVSSLYDAMPRVPDVQDGVRANELQLRWQEYRELVLLLLQWMRHHTAAFEERRFPSSFEEIEILWSQFLKFKEMELPAKEADKNRSKGIYQSLEGAVQAGQLKVPPGYHPLDVEKEWGKLHVAILEREKQLRSEFERLECLQRIVTKLQMEAGLCEEQLNQADALLQSDVRLLAAGKVPQRAGEVERDLDKADSMIRLLFNDVQTLKDGRHPQGEQMYRRVYRLHERLVAIRTEYNLRLKAGVAAPATQVAQVTLQSVQRRPELEDSTLRYLQDLLAWVEENQHRVDGAEWGVDLPSVEAQLGSHRGLHQSIEEFRAKIERARSDEGQLSPATRGAYRDCLGRLDLQYAKLLNSSKARLRSLESLHSFVAAATKELMWLNEKEEEEVGFDWSDRNTNMTAKKESYSALMRELELKEKKIKELQNAGDRLLREDHPARPTVESFQAALQTQWSWMLQLCCCIEAHLKENAAYFQFFSDVREAEGQLQKLQEALRRKYSCDRSATVTRLEDLLQDAQDEKEQLNEYKGHLSGLAKRAKAVVQLKPRHPAHPMRGRLPLLAVCDYKQVEVTVHKGDECQLVGPAQPSHWKVLSSSGSEAAVPSVCFLVPPPNQEAQEAVTRLEAQHQALVTLWHQLHVDMKSLLAWQSLRRDVQLIRSWSLATFRTLKPEEQRQALHSLELHYQAFLRDSQDAGGFGPEDRLMAEREYGSCSHHYQQLLQSLEQGAQEESRCQRCISELKDIRLQLEACETRTVHRLRLPLDKEPARECAQRIAEQQKAQAEVEGLGKGVARLSAEAEKVLALPEPSPAAPTLRSELELTLGKLEQVRSLSAIYLEKLKTISLVIRGTQGAEEVLRAHEEQLKEAQAVPATLPELEATKASLKKLRAQAEAQQPTFDALRDELRGAQEVGERLQQRHGERDVEVERWRERVAQLLERWQAVLAQTDVRQRELEQLGRQLRYYRESADPLGAWLQDARRRQEQIQAMPLADSQAVREQLRQEQALLEEIERHGEKVEECQRFAKQYINAIKDYELQLVTYKAQLEPVASPAKKPKVQSGSESVIQEYVDLRTHYSELTTLTSQYIKFISETLRRMEEEERLAEQQRAEERERLAEVEAALEKQRQLAEAHAQAKAQAEREAKELQQRMQEEVVRREEAAVDAQQQKRSIQEELQQLRQSSEAEIQAKARQAEAAERSRLRIEEEIRVVRLQLEATERQRGGAEGELQALRARAEEAEAQKRQAQEEAERLRRQVQDESQRKRQAEVELASRVKAEAEAAREKQRALQALEELRLQAEEAERRLRQAEVERARQVQVALETAQRSAEAELQSKRASFAEKTAQLERSLQEEHVAVAQLREEAERRAQQQAEAERAREEAERELERWQLKANEALRLRLQAEEVAQQKSLAQAEAEKQKEEAEREARRRGKAEEQAVRQRELAEQELEKQRQLAEGTAQQRLAAEQELIRLRAETEQGEQQRQLLEEELARLQREAAAATQKRQELEAELAKVRAEMEVLLASKARAEEESRSTSEKSKQRLEAEAGRFRELAEEAARLRALAEEAKRQRQLAEEDAARQRAEAERVLAEKLAAIGEATRLKTEAEIALKEKEAENERLRRLAEDEAFQRRRLEEQAAQHKADIEERLAQLRKASDSELERQKGLVEDTLRQRRQVEEEILALKASFEKAAAGKAELELELGRIRSNAEDTLRSKEQAELEAARQRQLAAEEERRRREAEERVQKSLAAEEEAARQRKAALEEVERLKAKVEEARRLRERAEQESARQLQLAQEAAQKRLQAEEKAHAFAVQQKEQELQQTLQQEQSVLDQLRGEAEAARRAAEEAEEARVQAEREAAQSRRQVEEAERLKQSAEEQAQARAQAQAAAEKLRKEAEQEAARRAQAEQAALRQKQAADAEMEKHKKFAEQTLRQKAQVEQELTTLRLQLEETDHQKNLLDEELQRLKAEATEAARQRSQVEEELFSVRVQMEELSKLKARIEAENRALILRDKDNTQRFLQEEAEKMKQVAEEAARLSVAAQEAARLRQLAEEDLAQQRALAEKMLKEKMQAVQEATRLKAEAELLQQQKELAQEQARRLQEDKEQMAQQLAEETQGFQRTLEAERQRQLEMSAEAERLKLRVAEMSRAQARAEEDAQRFRKQAEEIGEKLHRTELATQEKVTLVQTLEIQRQQSDHDAERLREAIAELEREKEKLQQEAKLLQLKSEEMQTVQQEQLLQETQALQQSFLSEKDSLLQRERFIEQEKAKLEQLFQDEVAKAQQLREEQQRQQQQMEQERQRLVASMEEARRRQHEAEEGVRRKQEELQQLEQQRRQQEELLAEENQRLREQLQLLEEQHRAALAHSEEVTASQVAATKTLPNGRDALDGPAAEAEPEHSFDGLRRKVSAQRLQEAGILSAEELQRLAQGHTTVDELARREDVRHYLQGRSSIAGLLLKATNEKLSVYAALQRQLLSPGTALILLEAQAASGFLLDPVRNRRLTVNEAVKEGVVGPELHHKLLSAERAVTGYKDPYTGQQISLFQAMQKGLIVREHGIRLLEAQIATGGVIDPVHSHRVPVDVAYRRGYFDEEMNRVLADPSDDTKGFFDPNTHENLTYLQLLERCVEDPETGLCLLPLTDKAAKGGELVYTDSEARDVFEKATVSAPFGKFQGKTVTIWEIINSEYFTAEQRRDLLRQFRTGRITVEKIIKIIITVVEEQEQKGRLCFEGLRSLVPAAELLESRVIDRELYQQLQRGERSVRDVAEVDTVRRALRGANVIAGVWLEEAGQKLSIYNALKKDLLPSDMAVALLEAQAGTGHIIDPATSARLTVDEAVRAGLVGPEFHEKLLSAEKAVTGYRDPYTGQSVSLFQALKKGLIPREQGLRLLDAQLSTGGIVDPSKSHRVPLDVACARGCLDEETSRALSAPRADAKAYSDPSTGEPATYGELQQRCRPDQLTGLSLLPLSEKAARARQEELYSELQARETFEKTPVEVPVGGFKGRTVTVWELISSEYFTAEQRQELLRQFRTGKVTVEKVIKILITIVEEVETLRQERLSFSGLRAPVPASELLASGVLSRAQFEQLKDGKTTVKDLSELGSVRTLLQGSGCLAGIYLEDTKEKVSIYEAMRRGLLRATTAALLLEAQAATGFLVDPVRNQRLYVHEAVKAGVVGPELHEQLLSAEKAVTGYRDPYSGSTISLFQAMQKGLVLRQHGIRLLEAQIATGGIIDPVHSHRVPVDVAYQRGYFSEEMNRVLADPSDDTKGFFDPNTHENLTYRQLLERCVEDPETGLRLLPLKGAEKAEVVETTQVYTEEETRRAFEETQIDIPGGGSHGGSTMSLWEVMQSDLIPEEQRAQLMADFQAGRVTKERMIIIIIEIIEKTEIIRQQGLASYDYVRRRLTAEDLFEARIISLETYNLLREGTRSLREALEAESAWCYLYGTGSVAGVYLPGSRQTLSIYQALKKGLLSAEVARLLLEAQAATGFLLDPVKGERLTVDEAVRKGLVGPELHDRLLSAERAVTGYRDPYTEQTISLFQAMKKELIPTEEALRLLDAQLATGGIVDPRLGFHLPLEVAYQRGYLNKDTHDQLSEPSEVRSYVDPSTDERLSYTQLLRRCRRDDGTGQLLLPLSDARKLTFRGLRKQITMEELVRSQVMDEATALQLREGLTSIEEVTKNLQKFLEGTSCIAGVFVDATKERLSVYQAMKKGIIRPGTAFELLEAQAATGYVIDPIKGLKLTVEEAVRMGIVGPEFKDKLLSAERAVTGYKDPYSGKLISLFQAMKKGLILKDHGIRLLEAQIATGGIIDPEESHRLPVEVAYKRGLFDEEMNEILTDPSDDTKGFFDPNTEENLTYLQLMERCITDPQTGLCLLPLKEKKRERKTSSKSSVRKRRVVIVDPETGKEMSVYEAYRKGLIDHQTYLELSEQECEWEEITISSSDGVVKSMIIDRRSGRQYDIDDAIAKNLIDRSALDQYRAGTLSITEFADMLSGNAGGFRSRSSSVGSSSSYPISPAVSRTQLASWSDPTEETGPVAGILDTETLEKVSITEAMHRNLVDNITGQRLLEAQACTGGIIDPSTGERFPVTDAVNKGLVDKIMVDRINLAQKAFCGFEDPRTKTKMSAAQALKKGWLYYEAGQRFLEVQYLTGGLIEPDTPGRVPLDEALQRGTVDARTAQKLRDVGAYSKYLTCPKTKLKISYKDALDRSMVEEGTGLRLLEAAAQSTKGYYSPYSVSGSGSTAGSRTGSRTGSRAGSRRGSFDATGSGFSMTFSSSSYSSSGYGRRYASGSSASLGGPESAVA

SEQ ID NO: 262198 - protein, 4547 aa, Artificial Sequence
  derived and/or modified sequence
MSQHQLRVPQPEGLGRKRTSSEDNLYLAVLRASEGKKDERDRVQKKTFTKWVNKHLIKAQRHISDLYEDLRDGHNLISLLEVLSGDSLPREKGRMRFHKLQNVQIALDYLRHRQVKLVNIRNDDIADGNPKLTLGLIWTIILHFQISDIQVSGQSEDMTAKEKLLLWSQRMVEGYQGLRCDNFTSSWRDGRLFNAIIHRHKPLLIDMNKVYRQTNLENLDQAFSVAERDLGVTRLLDPEDVDVPQPDEKSIITYVSSLYDAMPRVPDVQDGVRANELQLRWQEYRELVLLLLQWMRHHTAAFEERRFPSSFEEIEILWSQFLKFKEMELPAKEADKNRSKGIYQSLEGAVQAGQLKVPPGYHPLDVEKEWGKLHVAILEREKQLRSEFERLECLQRIVTKLQMEAGLCEEQLNQADALLQSDVRLLAAGKVPQRAGEVERDLDKADSMIRLLFNDVQTLKDGRHPQGEQMYRRVYRLHERLVAIRTEYNLRLKAGVAAPATQVAQVTLQSVQRRPELEDSTLRYLQDLLAWVEENQHRVDGAEWGVDLPSVEAQLGSHRGLHQSIEEFRAKIERARSDEGQLSPATRGAYRDCLGRLDLQYAKLLNSSKARLRSLESLHSFVAAATKELMWLNEKEEEEVGFDWSDRNTNMTAKKESYSALMRELELKEKKIKELQNAGDRLLREDHPARPTVESFQAALQTQWSWMLQLCCCIEAHLKENAAYFQFFSDVREAEGQLQKLQEALRRKYSCDRSATVTRLEDLLQDAQDEKEQLNEYKGHLSGLAKRAKAVVQLKPRHPAHPMRGRLPLLAVCDYKQVEVTVHKGDECQLVGPAQPSHWKVLSSSGSEAAVPSVCFLVPPPNQEAQEAVTRLEAQHQALVTLWHQLHVDMKSLLAWQSLRRDVQLIRSWSLATFRTLKPEEQRQALHSLELHYQAFLRDSQDAGGFGPEDRLMAEREYGSCSHHYQQLLQSLEQGAQEESRCQRCISELKDIRLQLEACETRTVHRLRLPLDKEPARECAQRIAEQQKAQAEVEGLGKGVARLSAEAEKVLALPEPSPAAPTLRSELELTLGKLEQVRSLSAIYLEKLKTISLVIRGTQGAEEVLRAHEEQLKEAQAVPATLPELEATKASLKKLRAQAEAQQPTFDALRDELRGAQEVGERLQQRHGERDVEVERWRERVAQLLERWQAVLAQTDVRQRELEQLGRQLRYYRESADPLGAWLQDARRRQEQIQAMPLADSQAVREQLRQEQALLEEIERHGEKVEECQRFAKQYINAIKDYELQLVTYKAQLEPVASPAKKPKVQSGSESVIQEYVDLRTHYSELTTLTSQYIKFISETLRRMEEEERLAEQQRAEERERLAEVEAALEKQRQLAEAHAQAKAQAEREAKELQQRMQEEVVRREEAAVDAQQQKRSIQEELQQLRQSSEAEIQAKARQAEAAERSRLRIEEEIRVVRLQLEATERQRGGAEGELQALRARAEEAEAQKRQAQEEAERLRRQVQDESQRKRQAEVELASRVKAEAEAAREKQRALQALEELRLQAEEAERRLRQAEVERARQVQVALETAQRSAEAELQSKRASFAEKTAQLERSLQEEHVAVAQLREEAERRAQQQAEAERAREEAERELERWQLKANEALRLRLQAEEVAQQKSLAQAEAEKQKEEAEREARRRGKAEEQAVRQRELAEQELEKQRQLAEGTAQQRLAAEQELIRLRAETEQGEQQRQLLEEELARLQREAAAATQKRQELEAELAKVRAEMEVLLASKARAEEESRSTSEKSKQRLEAEAGRFRELAEEAARLRALAEEAKRQRQLAEEDAARQRAEAERVLAEKLAAIGEATRLKTEAEIALKEKEAENERLRRLAEDEAFQRRRLEEQAAQHKADIEERLAQLRKASDSELERQKGLVEDTLRQRRQVEEEILALKASFEKAAAGKAELELELGRIRSNAEDTLRSKEQAELEAARQRQLAAEEERRRREAEERVQKSLAAEEEAARQRKAALEEVERLKAKVEEARRLRERAEQESARQLQLAQEAAQKRLQAEEKAHAFAVQQKEQELQQTLQQEQSVLDQLRGEAEAARRAAEEAEEARVQAEREAAQSRRQVEEAERLKQSAEEQAQARAQAQAAAEKLRKEAEQEAARRAQAEQAALRQKQAADAEMEKHKKFAEQTLRQKAQVEQELTTLRLQLEETDHQKNLLDEELQRLKAEATEAARQRSQVEEELFSVRVQMEELSKLKARIEAENRALILRDKDNTQRFLQEEAEKMKQVAEEAARLSVAAQEAARLRQLAEEDLAQQRALAEKMLKEKMQAVQEATRLKAEAELLQQQKELAQEQARRLQEDKEQMAQQLAEETQGFQRTLEAERQRQLEMSAEAERLKLRVAEMSRAQARAEEDAQRFRKQAEEIGEKLHRTELATQEKVTLVQTLEIQRQQSDHDAERLREAIAELEREKEKLQQEAKLLQLKSEEMQTVQQEQLLQETQALQQSFLSEKDSLLQRERFIEQEKAKLEQLFQDEVAKAQQLREEQQRQQQQMEQERQRLVASMEEARRRQHEAEEGVRRKQEELQQLEQQRRQQEELLAEENQRLREQLQLLEEQHRAALAHSEEVTASQVAATKTLPNGRDALDGPAAEAEPEHSFDGLRRKVSAQRLQEAGILSAEELQRLAQGHTTVDELARREDVRHYLQGRSSIAGLLLKATNEKLSVYAALQRQLLSPGTALILLEAQAASGFLLDPVRNRRLTVNEAVKEGVVGPELHHKLLSAERAVTGYKDPYTGQQISLFQAMQKGLIVREHGIRLLEAQIATGGVIDPVHSHRVPVDVAYRRGYFDEEMNRVLADPSDDTKGFFDPNTHENLTYLQLLERCVEDPETGLCLLPLTDKAAKGGELVYTDSEARDVFEKATVSAPFGKFQGKTVTIWEIINSEYFTAEQRRDLLRQFRTGRITVEKIIKIIITVVEEQEQKGRLCFEGLRSLVPAAELLESRVIDRELYQQLQRGERSVRDVAEVDTVRRALRGANVIAGVWLEEAGQKLSIYNALKKDLLPSDMAVALLEAQAGTGHIIDPATSARLTVDEAVRAGLVGPEFHEKLLSAEKAVTGYRDPYTGQSVSLFQALKKGLIPREQGLRLLDAQLSTGGIVDPSKSHRVPLDVACARGCLDEETSRALSAPRADAKAYSDPSTGEPATYGELQQRCRPDQLTGLSLLPLSEKAARARQEELYSELQARETFEKTPVEVPVGGFKGRTVTVWELISSEYFTAEQRQELLRQFRTGKVTVEKVIKILITIVEEVETLRQERLSFSGLRAPVPASELLASGVLSRAQFEQLKDGKTTVKDLSELGSVRTLLQGSGCLAGIYLEDTKEKVSIYEAMRRGLLRATTAALLLEAQAATGFLVDPVRNQRLYVHEAVKAGVVGPELHEQLLSAEKAVTGYRDPYSGSTISLFQAMQKGLVLRQHGIRLLEAQIATGGIIDPVHSHRVPVDVAYQRGYFSEEMNRVLADPSDDTKGFFDPNTHENLTYRQLLERCVEDPETGLRLLPLKGAEKAEVVETTQVYTEEETRRAFEETQIDIPGGGSHGGSTMSLWEVMQSDLIPEEQRAQLMADFQAGRVTKERMIIIIIEIIEKTEIIRQQGLASYDYVRRRLTAEDLFEARIISLETYNLLREGTRSLREALEAESAWCYLYGTGSVAGVYLPGSRQTLSIYQALKKGLLSAEVARLLLEAQAATGFLLDPVKGERLTVDEAVRKGLVGPELHDRLLSAERAVTGYRDPYTEQTISLFQAMKKELIPTEEALRLLDAQLATGGIVDPRLGFHLPLEVAYQRGYLNKDTHDQLSEPSEVRSYVDPSTDERLSYTQLLRRCRRDDGTGQLLLPLSDARKLTFRGLRKQITMEELVRSQVMDEATALQLREGLTSIEEVTKNLQKFLEGTSCIAGVFVDATKERLSVYQAMKKGIIRPGTAFELLEAQAATGYVIDPIKGLKLTVEEAVRMGIVGPEFKDKLLSAERAVTGYKDPYSGKLISLFQAMKKGLILKDHGIRLLEAQIATGGIIDPEESHRLPVEVAYKRGLFDEEMNEILTDPSDDTKGFFDPNTEENLTYLQLMERCITDPQTGLCLLPLKEKKRERKTSSKSSVRKRRVVIVDPETGKEMSVYEAYRKGLIDHQTYLELSEQECEWEEITISSSDGVVKSMIIDRRSGRQYDIDDAIAKNLIDRSALDQYRAGTLSITEFADMLSGNAGGFRSRSSSVGSSSSYPISPAVSRTQLASWSDPTEETGPVAGILDTETLEKVSITEAMHRNLVDNITGQRLLEAQACTGGIIDPSTGERFPVTDAVNKGLVDKIMVDRINLAQKAFCGFEDPRTKTKMSAAQALKKGWLYYEAGQRFLEVQYLTGGLIEPDTPGRVPLDEALQRGTVDARTAQKLRDVGAYSKYLTCPKTKLKISYKDALDRSMVEEGTGLRLLEAAAQSTKGYYSPYSVSGSGSTAGSRTGSRTGSRAGSRRGSFDATGSGFSMTFSSSSYSSSGYGRRYASGSSASLGGPESAVA

SEQ ID NO: 262199 - protein, 98 aa, Artificial Sequence
  derived and/or modified sequence
MCAARLAAAAAAAQSVYAFSARPLAGGEPVSLGSLRGKVLLIENVASLCGTTVRDYTQMNELQRRLGPRGLVVLGFPCNQFGHQVRRAERGGAGADVQ

SEQ ID NO: 262200 - DNA, 297 bp, Artificial Sequence
  derived and/or modified sequence
atgtgcgcggctcgtctagctgcagctgcagcagcagcacagagcgtttatgcattttccgcgagacctctggccggtggcgagcccgtgtcccttgggagcttacgaggtaaagtgcttttaatcgaaaacgttgcctcactgtgaggtacgacggtgcgggattacactcagatgaatgaattgcaacgcagacttggtccaaggggactggtggtgctgggttttccttgtaaccaattcggccatcaggtccgcagggccgagagaggaggcgctggagcagacgtacagtag

SEQ ID NO: 262201 - DNA, 291 bp, Artificial Sequence
  derived and/or modified sequence
atgtgtgccgcccggctggccgctgctgctgctgctgcccagagcgtgtatgccttcagcgcccggcccctggccggcggggagcctgtgtccctgggcagcctgcggggcaaggtgctgctgattgaaaatgtggccagcctgaccaccgtgcgggactacacccagatgaatgagctgcagaggcggctgggcccccggggcctggtggtgctgggcttcccctgcaaccagtttggccaccaggtgcggcgggcagagcggggcggggccggggctgatgtgcagtag

SEQ ID NO: 262202 - DNA, 297 bp, Artificial Sequence
  derived and/or modified sequence
atgtgcgccgcccggctggccgccgccgccgccgccgcccagagcgtgtatgcattttccgcccgtcctcttgccggtggggagcccgtgtctctggggtcattgcgtggaaaggttttacttattgagaacgtcgcgtcactgtgaggaaccacagtgcgagattacactcagatgaatgaactgcagcggaggctaggtcccagggggctggtcgtgctcgggttcccttgtaatcaatttgggcaccaggttagacgagccgaacgcgggggagcaggggctgacgtccagtag

SEQ ID NO: 262203 - DNA, 297 bp, Artificial Sequence
  derived and/or modified sequence
atgtgcgccgcacgcttggccgctgctgccgcagcagctcagagtgtgtatgctttctccgcccgtccgctggcgggaggtgagcctgtgtctctaggatctctgagagggaaggtgctcctgatagaaaatgttgcgagcctttgaggaactacagtaagggactatacacaaatgaatgagttacagcgccgactcggcccacggggtttggtggtgctgggatttccttgcaaccagttcggacaccaggtaaggcgcgctgagagaggcggtgctggggctgatgtgcagtag

SEQ ID NO: 262204 - DNA, 297 bp, Artificial Sequence
  derived and/or modified sequence
atgtgcgccgccagactggccgccgccgccgccgccgcccagagcgtgtacgccttcagcgccagacccctggccggcggcgagcccgtgagcctgggcagcctgagaggcaaggtgctgctgatcgagaacgtggccagcctgtgaggcaccaccgtgagagactacacccagatgaacgagctgcagagaagactgggccccagaggcctggtggtgctgggcttcccctgcaaccagttcggccaccaggtgagaagagccgagagaggcggcgccggcgccgacgtgcagtag

SEQ ID NO: 262205 - protein, 490 aa, Artificial Sequence
  derived and/or modified sequence
MTSRASELSPGRSVTAGIIIVGDEILKGHTQDTNTFFLCRTLRSLGVQVCRVSVVPDEVATIAAEVTSFSNRFTHVLTAGGIGPTHDDVTFEAVAQAFGDELKPHPKLEAATKALGGEGWEKLSLVPSSARLHYGTDPCTGQPFRFPLVSVRNVYLFPGIPELLRRVLEGMKGLFQNPAVQFHSKELYVAADEASIAPILAEAQAHFGRRLGLGSYPDWGSNYYQVKLTLDSEEEGPLEECLAYLTARLPQGSLVPYMPNAVEQASEAVYKLAESGSSLGKKVAGALQTIETSLAQYSLTQLCVGFNGGKDCTALLHLFHAAVQRKLPDVPNPLQILYIRSISPFPELEQFLQDTIKRYNLQMLEAEGSMKQALGELQARHPQLEAVLMGTRRTDPYSCSLCPFSPTDPGWPAFMRINPLLDWTYRDIWDFLRQLFVPYCILYDRGYTSLGSRENTVRNPALKCLSPGGHPTYRPAYLLENEEEERNSRT

SEQ ID NO: 262206 - protein, 128 aa, Artificial Sequence
  derived and/or modified sequence
MLEAEGSMKQALGELQARHPQLEAVLMGTRRTDPYSCSLCPFSPTDPGWPAFMRINPLLDWTYRDIWDFLRQLFVPYCILYDRGYTSLGSRENTVRNPALKCLSPGGHPTYRPAYLLENEEEERNSRT

SEQ ID NO: 262207 - protein, 446 aa, Artificial Sequence
  derived and/or modified sequence
MTSRASELSPGRSVTAGIIIVGDEILKGHTQDTNTFFLCRTLRSLGVQVCRVSVVPDEVATIAAEVTSFSNRFTHVLTAGGIGPTHDDVTFEAVAQAFGDELKPHPKLEAATKALGGEGWEKLSLVPSSARLHYGTDPCTGQPFRFPLVSVRNVYLFPGIPELLRRVLEGMKGLFQNPAVQFHSKELYVAADEASIAPILAEAQAHFGRRLGLGSYPDWGSNYYQVKLTLDSEEEGPLEECLAYLTARLPQGSLVPYMPNAVEQASEAVYKLAESGSSLGKKVAGALQTIETSLAQYSLTQLCVGFNGGKDCTALLHLFHAAVQRKLPDVPNPLQILYIRSISPFPELEQFLQDTIKRYNLQMLEAEGSMKQALGELQARHPQLEAVLMGTRRTDPYSCSLCPFSPTDPGWPAFMRINPLLDWTYRDIWDFLRQLFVPYCILYDRG

SEQ ID NO: 262208 - protein, 530 aa, Artificial Sequence
  derived and/or modified sequence
MEDDSLYLGGEWQFNHFSKLTSSRPDAAFAEIQRTSLPEKSPLSSEARVDLCDDLAPVARQLAPRKKLPLSSRRPAAVGAGLQNMGNTCYENASLQCLTYTPPLANYMLSREHSQTCQRPKCCMLCTMQAHITWALHSPGHVIQPSQALAAGFHRGKQEDAHEFLMFTVDAMKKACLPGHKQVDHHSKDTTLIHQIFGGCWRSQIKCLHCHGISDTFDPYLDIALDIQAAQSVKQALEQLVKPEELNGENAYHCGLCLQRAPASKTLTLHTSAKVLILVLKRFSDVTGNKLAKNVQYPECLDMQPYMSQQNTGPLVYVLYAVLVHAGWSCHDGHYFSYVKAQEGQWYKMDDAKVTACSITSVLSQQAYVLFYIQKSEWERHSESVSRGREPRALGAEDTDRRATQGELKRDHPCLQAPELDERLVERATQESTLDHWKFPQEQNKTKPEFNVRKVEGTLPPNVLVIHQSKYKCGMKNHHPEQQSSLLNLSSTTRTDQESVNTGTLASLQGRTRRSKGKNKHSKRALLVCQ

SEQ ID NO: 262209 - DNA, 1593 bp, Artificial Sequence
  derived and/or modified sequence
atggaggacgattccctctacctgggcggcgagtggcagttcaatcactttagcaaactgacctccagcagacccgatgccgccttcgctgagattcagcgcacctctctacctgaaaagtcgccgttaagctcggaggcacgcgtggacctgtgtgatgatctagcacccgttgccagacagctggcaccccgcaaaaagctgcctctctcaagcagaagacccgcggctgtcggtgcgggacttcagaatatggggaatacatgttatgaaaacgcatcgctgcagtgtttaacgtatacccctcctctagcgaactacatgttgtcacgagaacattctcagacatgtcagcgccctaagtgctgtatgctgtgtaccatgcaggcacatattacgtgggcattgcactctcctgggcatgttattcaacctagccaggctctcgcagccgggttccatagggggaagcaagaggacgctcatgagttcctcatgtttacggtcgacgctatgaaaaaggcctgtctccccggacacaaacaggtcgaccaccacagtaaggatactaccctgatacatcagatatttgggggctgctggcggtcccagattaaatgcttacactgtcacggcatctccgacacgttcgacccatacctggacatagcccttgatattcaggctgctcagtctgtcaagcaggccctggagcaactggtgaagccagaagaactgaatggcgagaatgcttatcactgtggcctgtgtctgcagagggctccagcgagcaaaacactgaccttgcatacgtctgccaaagttctcatcctggttttgaaacgattctcagacgtcactggaaataaattagccaagaacgtgcaataccccgagtgcctggatatgcagccgtacatgtcccaacagaacaccggcccgctcgtgtacgtcctgtacgcagtcctagtgcacgccgggtggtcctgccacgacgggcactacttctcttatgtgaaagcccaggaaggacaatggtataagatggatgacgctaaggtcaccgcctgcagcatcaccagtgtgctctcccagcaagcctatgtactcttttatatccagaaatcagagtgggagcgccattccgagtcagtcagcagggggcgagagccacgggcccttggagctgaggatacagaccgccgcgccacgcagggggaactgaagcgggatcacccttgcctgcaggctcccgaactggatgagagactcgttgaacgagcgactcaggaatctacattggaccattggaaattcccccaggaacaaaataagacaaaacccgaattcaatgtgcgcaaggtagagggaacattgcctccaaatgtcttagttattcaccagtcaaaatataagtgcggtatgaagaaccaccaccctgaacagcagtctagcctcctgaacctttctagcaccacaaggacagaccaagaatcagttaacaccggaaccttggcgtctctccaaggtcgaacaagacgctccaaaggtaaaaataagcactccaaacgcgctctgctagtttgccagtag

SEQ ID NO: 262210 - DNA, 1593 bp, Artificial Sequence
  derived and/or modified sequence
atggaggatgacagcctgtacctgggcggggagtggcagttcaaccacttcagcaagctgaccagcagcaggccagatgctgcctttgctgagatccagaggaccagcctgcctgagaagagccccctgagcagcgaggcccgggtggacctgtgtgatgacctggcccctgtggcccggcagctggcccccaggaagaagctgcccctgagcagcagaagacctgctgctgtgggcgccggcctgcagaacatgggcaacacctgctatgaaaatgccagcctgcagtgcctgacctacaccccacccctggccaactacatgctgagccgggagcacagccagacctgccagaggcccaagtgctgcatgctgtgcaccatgcaggcccacatcacctgggccctgcacagccctggccacgtgatccagcccagccaggccctggccgccggcttccaccggggcaagcaggaggatgcccacgagttcctgatgttcaccgtggatgccatgaagaaggcctgcctgcccggccacaagcaggtggaccaccacagcaaggacaccaccctcatccaccagatctttggaggctgctggaggagccagatcaagtgcctgcactgccacggcatcagtgacacctttgacccctacctggacatcgccctggacatccaggccgcccagagcgtgaagcaggccctggagcagctggtgaagccagaggagctgaatggagaaaatgcctaccactgcggcctgtgcctgcagagggccccagccagcaagaccctgaccctgcacaccagcgccaaggtgctgatcctggtgctgaagcgcttcagtgatgtgactggaaacaagctggccaagaatgtgcagtacccagaatgtctggacatgcagccctacatgagccagcagaacacaggccccctggtgtatgtgctgtatgctgtgctggtgcacgccggctggagctgccatgatggccactacttctcctatgtgaaggcccaggagggccagtggtacaagatggatgatgccaaggtgacagcctgcagcatcacctctgtgctgagccagcaggcctacgtgctcttctacatccagaagtctgagtgggagcggcacagcgagagcgtgtcccggggccgggagccccgggccctgggcgctgaggacacagacagaagagccacccagggcgagctgaagagggaccacccctgcctgcaggcccctgagctggatgagcggctggtggagcgggccacccaggagagcaccctggaccactggaagttcccccaggagcagaacaagaccaagccagagttcaacgtgaggaaggtggagggcaccctgccccccaacgtgctggtgatccaccagagcaagtacaagtgtggcatgaagaaccaccaccctgagcagcagagcagcctgctgaacctgagcagcaccaccaggacagaccaggagagcgtgaacacaggcaccctggccagcctgcagggccgcaccaggaggagcaagggcaagaacaagcacagcaagagggccctgctggtgtgccagtag

SEQ ID NO: 262211 - DNA, 1593 bp, Artificial Sequence
  derived and/or modified sequence
atggaggacgacagcctgtacctgggcggcgagtggcagttcaaccacttcagcaaactcacctctagcaggcccgatgccgccttcgccgaaatacagcgtactagcctccccgagaagagtccgctctcgtcagaggccagagtcgacctctgtgatgacctggccccagttgccagacagctcgctcctcgcaagaagctccccttaagctcaaggcgacccgctgctgttggagcaggtttacaaaacatggggaatacatgttacgaaaatgccagcctacaatgtcttacctatactcctcctctagccaactacatgttaagcagggagcactctcaaacttgccaaagacctaagtgttgtatgttgtgcaccatgcaggcccacattacatgggcactccactcgccggggcacgtcattcaaccaagccaggccctcgccgcaggctttcacaggggtaaacaagaagacgcccacgagtttctgatgtttacagttgatgcaatgaaaaaggcctgcttaccagggcataagcaagtcgatcatcattcaaaggatactacactcatacatcagatcttcggcggatgttggcggtcacaaattaaatgtttacactgtcacggaatcagtgatactttcgatccatacctcgatatcgcacttgacatccaggctgcccagagcgtaaagcaggcactcgagcaactggtgaagcctgaagagttaaacggagagaacgcctatcactgcggcctatgcttacagagggccccagcttcaaagactctgacactgcacacaagtgccaaggttctcattctggtcctgaaacgcttttcagatgtcactggaaacaaactggccaagaacgtgcagtatcctgaatgtctggacatgcaaccttacatgtcacagcagaacacgggacctctggtctatgtgctttatgccgttttggtgcatgcgggatggtcatgtcatgatggacattatttctcctatgtgaaggcccaggagggacagtggtacaaaatggacgatgcaaaagtcacagcctgctcaattacctccgtcttaagccagcaagcctatgttttattttacattcagaaaagcgaatgggagcgacactccgagagtgtgtcgagaggacgcgaacctagagcacttggagctgaagacactgacagacgagccactcagggcgagcttaagcgcgatcatccctgccttcaggctccagaactagatgaacgactggtggagagagccacacaagagtctaccctggatcactggaagtttccccaggaacaaaataagacaaaacctgagttcaatgtacgcaaagtcgaagggactttgccaccaaacgtgctggttattcaccagtccaaatacaagtgcggcatgaagaaccaccaccccgaacaacagtcctcccttctcaatcttagctccaccacgagaacagaccaggagtccgttaacactggaaccctggcttcgcttcagggtagaactaggcgctcaaagggtaaaaataagcattccaagagggctctgttggtttgccagtag

SEQ ID NO: 262212 - DNA, 1593 bp, Artificial Sequence
  derived and/or modified sequence
atggaagacgattcactgtatctgggtggagagtggcagttcaaccatttttctaaacttaccagctcacgccctgatgccgcatttgctgagatccagcgtaccagcctgccggagaagtctcccctgtcctccgaggcgagggtggacctctgcgatgacctggcacctgtggcacgccagctggcccctcgcaagaaactgccactatcctcaagacgcccagcagccgtgggagccggtctgcagaatatgggaaatacctgttacgagaatgcgagcctgcagtgcttgacatatactcctccactcgctaactacatgctcagcagggaacactcccagacctgtcaaagacctaagtgctgcatgctctgtaccatgcaggctcatatcacttgggcactccactcacctggccacgtgatccagccttcacaggctctagctgcaggattccatagaggaaaacaagaagacgcccatgaattcctgatgttcaccgtggacgcaatgaaaaaggcatgtctccccggtcataagcaagttgatcatcactctaaggacacaactttgatccatcagatcttcgggggatgctggcggtcacaaataaagtgtctgcactgtcatggcatcagcgacaccttcgacccttatttggatatcgccctcgatattcaggccgcacagagtgtgaagcaagctctcgagcagcttgtaaaacctgaagaactgaacggggagaacgcttatcattgtggcctgtgtctacaaagggctccagctagcaaaacgcttacgctgcacacaagcgcaaaggtgctgatccttgtgttaaaacgcttcagcgatgtgaccggtaacaaactggccaaaaatgtacagtatcccgaatgtttagacatgcagccctacatgtcccaacagaacactgggcctttagtctacgtgctgtacgctgttttggtccatgcgggttggtcctgccacgatggccattacttttcatacgtgaaagctcaggaggggcagtggtacaaaatggatgatgccaaggttacagcatgtagtatcacaagtgtattgagtcagcaggcctacgtcctcttctatatacaaaagagcgagtgggagcgacattctgaatccgtgagtcgcggacgagagcctcgcgcattgggagcagaagatacggaccgacgcgcaacacagggggagctgaagcgggaccacccatgcttacaggccccagagctagacgaaaggctcgtggagcgagcaactcaggagagcacacttgaccactggaaatttccacaagagcagaacaaaactaaaccagaatttaatgttcggaaagttgaaggtaccctcccacccaatgttttggtaatccaccagtcaaagtacaagtgtgggatgaaaaatcaccatcccgaacagcagagcagcttactcaatttatcgtcaaccacgcggactgaccaggagtctgtcaataccggaaccttggctagtctacagggaagaacacggaggagcaagggaaagaataaacactcgaaaagagcgctcctggtatgccagtag

SEQ ID NO: 262213 - DNA, 1910 bp, Artificial Sequence
  derived and/or modified sequence
tattatatgtgcctatcaccctgaggagtaatttgattcaggtgttctagaagtcatgatgtgggctgtgtctgttgaattcccagcgatgcaaggggacacaccctgtgactcattccttaattgagtgctgatatttgattggtttatcgcacacctgatgggtgggtggggtgttcgcggttggtgggggtgagttatataagggctgatgcggccagagagctcgtcatttgaagactctcttggaagagatagcgtcttgctgcaacctgcagtcccagcagaaaaaccttgtgatccttgttgcgggcgacatggaggacgactcactctacttgggaggtgagtggcagttcaaccacttttcaaaactcacatcttctcggccagatgcagcttttgctgaaatccagcggacttctctccctgagaagtcaccactctcatctgaggcccgtgtcgacctctgtgatgatttggctcctgtggcaagacagcttgctcccaggaagaagcttcctctgagtagcaggagacctgctgcggtgggggctgggctccagaatatgggaaatacctgctacgagaacgcttccctgcagtgcctgacatacacaccgccccttgccaactacatgctgtcccgggagcactctcaaacatgtcagcgtcccaagtgctgcatgctctgtactatgcaagctcacatcacatgggccctccacagtcctggtcatgtcatccagccctcacaggcattggctgctggcttccatagaggcaagcaggaagatgcccatgaatttctcatgttcactgtggatgccatgaaaaaggcatgccttcccggccacaagcaggtagatcatcactctaaggacaccaccctcatccaccaaatatttggaggctgctggagatctcaaatcaagtgtctccactgccacgggatttcagacacttttgacccttacctggacatcgccctggatatccaggcagctcagagtgtcaagcaagctttggaacagttggtgaagcccgaagaactcaatggagagaatgcctatcattgcggtctttgtctccagagggcgccggcctccaagacgttaactttacacacttctgccaaggtcctcatccttgtcttgaagagattctccgatgtcacaggcaacaaacttgccaagaatgtgcaatatcctgagtgccttgacatgcagccatacatgtctcagcagaacacaggacctcttgtctatgtcctctatgctgtgctggtccacgctgggtggagttgtcacgacggacattacttctcttatgtcaaagctcaagaaggccagtggtataaaatggatgatgccaaggtcactgcctgtagcatcacttctgtcctgagtcaacaggcctatgtcctcttttacatccagaagagtgaatgggaaagacacagtgagagtgtgtcaagaggcagggaaccaagagccctcggcgctgaagacacagacaggcgagcaacgcaaggagagctcaagagagaccacccctgcctccaggcacccgagttggacgagcgcttggtggaaagagccactcaggaaagcaccttagaccactggaaattcccccaagagcaaaacaaaacgaagcctgagttcaacgtcagaaaagtcgaaggtaccctgcctcccaacgtacttgtgattcatcaatcgaaatacaagtgtgggatgaaaaaccatcatcctgaacagcaaagctccctgctaaacctctcttcgacgacccggacagatcaggagtccgtgaacactggcaccctcgcttctctgcaagggaggaccaggagatccaaagggaagaacaaacacagcaagagggctctgcttgtgtgccagtga

SEQ ID NO: 262214 - DNA, 1593 bp, Artificial Sequence
  derived and/or modified sequence
atggaggacgacagcctgtacctgggcggcgagtggcagttcaaccacttcagcaagctgaccagcagcagacccgacgccgccttcgccgagatccagagaaccagcctgcccgagaagagccccctgagcagcgaggccagagtggacctgtgcgacgacctggcccccgtggccagacagctggcccccagaaagaagctgcccctgagcagcagaagacccgccgccgtgggcgccggcctgcagaacatgggcaacacctgctacgagaacgccagcctgcagtgcctgacctacaccccccccctggccaactacatgctgagcagagagcacagccagacctgccagagacccaagtgctgcatgctgtgcaccatgcaggcccacatcacctgggccctgcacagccccggccacgtgatccagcccagccaggccctggccgccggcttccacagaggcaagcaggaggacgcccacgagttcctgatgttcaccgtggacgccatgaagaaggcctgcctgcccggccacaagcaggtggaccaccacagcaaggacaccaccctgatccaccagatcttcggcggctgctggagaagccagatcaagtgcctgcactgccacggcatcagcgacaccttcgacccctacctggacatcgccctggacatccaggccgcccagagcgtgaagcaggccctggagcagctggtgaagcccgaggagctgaacggcgagaacgcctaccactgcggcctgtgcctgcagagagcccccgccagcaagaccctgaccctgcacaccagcgccaaggtgctgatcctggtgctgaagagattcagcgacgtgaccggcaacaagctggccaagaacgtgcagtaccccgagtgcctggacatgcagccctacatgagccagcagaacaccggccccctggtgtacgtgctgtacgccgtgctggtgcacgccggctggagctgccacgacggccactacttcagctacgtgaaggcccaggagggccagtggtacaagatggacgacgccaaggtgaccgcctgcagcatcaccagcgtgctgagccagcaggcctacgtgctgttctacatccagaagagcgagtgggagagacacagcgagagcgtgagcagaggcagagagcccagagccctgggcgccgaggacaccgacagaagagccacccagggcgagctgaagagagaccacccctgcctgcaggcccccgagctggacgagagactggtggagagagccacccaggagagcaccctggaccactggaagttcccccaggagcagaacaagaccaagcccgagttcaacgtgagaaaggtggagggcaccctgccccccaacgtgctggtgatccaccagagcaagtacaagtgcggcatgaagaaccaccaccccgagcagcagagcagcctgctgaacctgagcagcaccaccagaaccgaccaggagagcgtgaacaccggcaccctggccagcctgcagggcagaaccagaagaagcaagggcaagaacaagcacagcaagagagccctgctggtgtgccagtag

SEQ ID NO: 262215 - protein, 371 aa, Artificial Sequence
  derived and/or modified sequence
MSAQAQMRALLDQLMGTARDGDETRQRVKFTDDRVCKSHLLDCCPHDILAGTRMDLGECTKIHDLALRADYEIASKERDLFFELDAMDHLESFIAECDRRTELAKKRLAETQEEISAEVSAKAEKVHELNEEIGKLLAKAEQLGAEGNVDESQKILMEVEKVRAKKKEAEEEYRNSMPASSFQQQKLRVCEVCSAYLGLHDNDRRLADHFGGKLHLGFIQIREKLDQLRKTVAEKQEKRNQDRLRRREEREREERLSRRSGSRTRDRRRSRSRDRRRRRSRSTSRERRKLSRSRSRDRHRRHRSRSRSHSRGHRRASRDRSAKYKFSRERASREESWESGRSERGPPDWRLESSNGKMASRRSEEKEAGEI

SEQ ID NO: 262216 - protein, 325 aa, Artificial Sequence
  derived and/or modified sequence
MSAQAQMRALLDQLMGTARDGDETRQRVKFTDDRVCKSHLLDCCPHDILAGTRMDLGECTKIHDLALRADYEIASKERDLFFELDAMDHLESFIAECDRRTELAKKRLAETQEEISAEVSAKAEKVHELNEEIGKLLAKAEQLGAEGNVDESQKILMEVEKVRAKKKEAEEEYRNSMPASSFQQQKLRVCEVCSAYLGLHDNDRRLADHFGGKLHLGFIQIREKLDQLRKTVAEKQEKRNQDRLRRREEREREERLSRRSGSRTRDRRRSRSRDRRRRRSRSTSRERRKLSRSRSRDRHRRHRSRSRSHSRGHRRASRDRSAKYK

SEQ ID NO: 262217 - DNA, 833 bp, Artificial Sequence
  derived and/or modified sequence
tttgcagtctcattgccacatgtatatgtggagccaatggccttttggtgctcagctgtttacgtctgactccttgacttctttggtacagtgatggagtcagatctcattaagtgtgattctccatgatataactagcctcaaaaaaatgtgtattccactccagttgtaaatatctttagatcagcttttcattgcatttgatggggagaacacagaaatgatagtctgcaaatcatccaggtgaattgttatactagttattttttggtggttaatgtgataatattgtcttatttaaaaccacaaatgaatttcaggagacgaaaccagacagagggtcaagtttacagatgaccgtgtctgcaagagtcaccttctggactgctgcccccatgacatcctggctgggacgcgcatggatttaggagaatgtaccaaaatccacgacttggccctccgagcagattatgagattgcaagtaaagaaagagacctgttttttgaattagatgtgaaaggggggaccctaccctcagaacatgagggaataatatttacgtggctcacaaagaccagcaatggatcacttggagtcctttattgctgaatgtgatcggagaactgagctcgccaagaagcggctggcagaaacacaggaggaaatcagtgcggaagtttctgcaaaggcagaaaaagtacatgagttaaatgaagaaataggaaaactccttgctaaagccgaacagctaggggctgaaggtaatgtggatgaatcccagaagattcttatggaagtggaaaaagttcgtgcgaagaaaaaagaagctgag

SEQ ID NO: 262218 - protein, 751 aa, Artificial Sequence
  derived and/or modified sequence
MLPGLALLLLAAWTARALEVPTDGNAGLLAEPQIAMFCGRLNMHMNVQNGKWDSDPSGTKTCIDTKEGILQYCQEVYPELQITNVVEANQPVTIQNWCKRGRKQCKTHPHFVIPYRCLVGEFVSDALLVPDKCKFLHQERMDVCETHLHWHTVAKETCSEKSTNLHDYGMLLPCGIDKFRGVEFVCCPLAEESDNVDSADAEEDDSDVWWGGADTDYADGSEDKVVEVAEEEEVAEVEEEEADDDEDDEDGDEVEEEAEEPYEEATERTTSIATTTTTTTESVEEVVREVCSEQAETGPCRAMISRWYFDVTEGKCAPFFYGGCGGNRNNFDTEEYCMAVCGSAIPTTAASTPDAVDKYLETPGDENEHAHFQKAKERLEAKHRERMSQVMREWEEAERQAKNLPKADKKAVIQHFQEKVESLEQEAANERQQLVETHMARVEAMLNDRRRLALENYITALQAVPPRPRHVFNMLKKYVRAEQKDRQHTLKHFEHVRMVDPKKAAQIRSQVMTHLRVIYERMNQSLSLLYNVPAVAEEIQDEVDELLQKEQNYSDDVLANMISEPRISYGNDALMPSLTETKTTVELLPVNGEFSLDDLQPWHSFGADSVPANTENEVEPVDARPAADRGLTTRPGSGLTNIKTEEISEVKMDAEFRHDSGYEVHHQKLVFFAEDVGSNKGAIIGLMVGGVVIATVIVITLVMLKKKQYTSIHHGVVEVDAAVTPEERHLSKMQQNGYENPTYKFFEQMQN

SEQ ID NO: 262219 - protein, 695 aa, Artificial Sequence
  derived and/or modified sequence
MLPGLALLLLAAWTARALEVPTDGNAGLLAEPQIAMFCGRLNMHMNVQNGKWDSDPSGTKTCIDTKEGILQYCQEVYPELQITNVVEANQPVTIQNWCKRGRKQCKTHPHFVIPYRCLVGEFVSDALLVPDKCKFLHQERMDVCETHLHWHTVAKETCSEKSTNLHDYGMLLPCGIDKFRGVEFVCCPLAEESDNVDSADAEEDDSDVWWGGADTDYADGSEDKVVEVAEEEEVAEVEEEEADDDEDDEDGDEVEEEAEEPYEEATERTTSIATTTTTTTESVEEVVRVPTTAASTPDAVDKYLETPGDENEHAHFQKAKERLEAKHRERMSQVMREWEEAERQAKNLPKADKKAVIQHFQEKVESLEQEAANERQQLVETHMARVEAMLNDRRRLALENYITALQAVPPRPRHVFNMLKKYVRAEQKDRQHTLKHFEHVRMVDPKKAAQIRSQVMTHLRVIYERMNQSLSLLYNVPAVAEEIQDEVDELLQKEQNYSDDVLANMISEPRISYGNDALMPSLTETKTTVELLPVNGEFSLDDLQPWHSFGADSVPANTENEVEPVDARPAADRGLTTRPGSGLTNIKTEEISEVKMDAEFRHDSGYEVHHQKLVFFAEDVGSNKGAIIGLMVGGVVIATVIVITLVMLKKKQYTSIHHGVVEVDAAVTPEERHLSKMQQNGYENPTYKFFEQMQN

SEQ ID NO: 262220 - protein, 1013 aa, Artificial Sequence
  derived and/or modified sequence
MAEPSAATQSHSISSSSFGAEPSAPGGGGSPGACPALGTKSCSSSCAEGLSSLCSDEPSSEIMTSSFLSSSEIHNTGLTILHGEKSHVLGSQPILAKEGKDHLDLLDMKKMEKPQGTSNNVSDSSVSLAAGVHCDRPSIPASFPEHPAFLSKKIGQVEEQIDKETKNPNGVSSREAKTALDADDRFTLLTAQKPPTEYSKVEGIYTYSLSPSKVSGDDVIEKDSPESPFEVIIDKAAFDKEFKDSYKESTDDFGSWSVHTDKESSEDISETNDKLFPLRNKEAGRYPMSALLSRQFSHTNAALEEVSRCVNDMHNFTNEILTWDLVPQVKQQTDKSSDCITKTTGLDMSEYNSEIPVVNLKTSTHQKTPVCSIDGSTPITKSTGDWAEASLQQENAITGKPVPDSLNSTKEFSIKGVQGNMQKQDDTLAELPGSPPEKCDSLGSGVATVKVVLPDDHLKDEMDWQSSALGEITEADSSGESDDTVIEDITADTSFENNKIQAEKPVSIPSAVVKTGEREIKEIPSCEREEKTSKNFEELVSDSELHQDQPDILGRSPASEAACSKVPDTNVSLEDVSEVAPEKPITTENPKLPSTVSPNVFNETEFSLNVTTSAYLESLHGKNVKHIDDSSPEDLIAAFTETRDKGIVDSERNAFKAISEKMTDFKTTPPVEVLHENESGGSEIKDIGSKYSEQSKETNGSEPLGVFPTQGTPVASLDLEQEQLTIKALKELGERQVEKSTSAQRDAELPSEEVLKQTFTFAPESWPQRSYDILERNVKNGSDLGISQKPITIRETTRVDAVSSLSKTELVKKHVLARLLTDFSVHDLIFWRDVKKTGFVFGTTLIMLLSLAAFSVISVVSYLILALLSVTISFRIYKSVIQAVQKSEEGHPFKAYLDVDITLSSEAFHNYMNAAMVHINRALKLIIRLFLVEDLVDSLKLAVFMWLMTYVGAVFNGITLLILAELLIFSVPIVYEKYKTQIDHYVGIARDQTKSIVEKIQAKLPGIAKKKAE

SEQ ID NO: 262221 - protein, 255 aa, Artificial Sequence
  derived and/or modified sequence
MAEPSAATQSHSISSSSFGAEPSAPGGGGSPGACPALGTKSCSSSCADSFVSSSSSQPVSLFSTSQVHDLIFWRDVKKTGFVFGTTLIMLLSLAAFSVISVVSYLILALLSVTISFRIYKSVIQAVQKSEEGHPFKAYLDVDITLSSEAFHNYMNAAMVHINRALKLIIRLFLVEDLVDSLKLAVFMWLMTYVGAVFNGITLLILAELLIFSVPIVYEKYKTQIDHYVGIARDQTKSIVEKIQAKLPGIAKKKAE

SEQ ID NO: 262222 - protein, 241 aa, Artificial Sequence
  derived and/or modified sequence
MAEPSAATQSHSISSSSFGAEPSAPGGGGSPGACPALGTKSCSSSCAVHDLIFWRDVKKTGFVFGTTLIMLLSLAAFSVISVVSYLILALLSVTISFRIYKSVIQAVQKSEEGHPFKAYLDVDITLSSEAFHNYMNAAMVHINRALKLIIRLFLVEDLVDSLKLAVFMWLMTYVGAVFNGITLLILAELLIFSVPIVYEKYKDPSKTPWNRQKKGRISTWKPEMQQLLKHHLIVITSLLVL

SEQ ID NO: 262223 - DNA, 726 bp, Artificial Sequence
  derived and/or modified sequence
atggcagaaccatctgctgctacccagtcacactctattagcagcagctctttcggggctgagccatcagctcccggcggaggaggctcccctggtgcatgcccagctcttgggaccaagagttgtagcagctcctgtgctgtgcatgacctgattttctggagagatgtaaagaagactgggttcgttttcggcaccacactaatcatgctgctgtcactggctgctttctctgtgatctcagtggtgtcttatttgatcctggctctgctgagcgttacgatcagtttccggatttataagtccgtgatccaggccgtacagaagtcggaagaaggccacccctttaaggcctacttggatgtcgatattacactgagttctgaggccttccacaactatatgaatgccgccatggttcatataaatcgggctctgaagcttattataagactattcttggtagaggacttggtagattccctcaaattagccgtcttcatgtggttaatgacttatgtaggtgcagtctttaatggaattacactgctgattctcgctgaactgctgatattttccgtgcctattgtgtacgagaagtataaggaccccagcaaaaccccttggaacaggcaaaaaaaaggccgcatatccacctggaaacccgaaatgcagcagctgcttaagcaccatctcattgtcatcactagtctcctggttctgtag

SEQ ID NO: 262224 - DNA, 726 bp, Artificial Sequence
  derived and/or modified sequence
atggccgagcccagcgctgccacccagagccacagcatcagcagcagcagctttggagctgagcccagcgcccctgggggcggcggcagccctggggcctgcccagccctgggcaccaagagctgcagcagcagctgtgctgtgcatgacctgatcttctggagagatgtgaagaagacaggctttgtgtttggcaccaccctcatcatgctgctgagcctggccgccttcagcgtcatctctgtggtgtcctacctgatcctggccctgctgtctgtgaccatctccttccgcatctacaagagcgtcatccaggccgtgcagaagtctgaggagggccaccccttcaaggcctacctggatgtggacatcaccctgagcagcgaggccttccacaactacatgaatgctgccatggtgcacatcaacagagccctgaagctgatcatccgcctcttcctggtggaggacctggtggacagcctgaagctggccgtgttcatgtggctgatgacctacgtgggcgctgtgttcaacggcatcaccctgctgatcctggccgagctgctgatcttctctgtgcccatcgtgtatgagaagtacaaggaccccagcaagaccccctggaaccggcagaagaagggccgcatcagcacctggaagccagagatgcagcagctgctgaagcaccacctgattgtcatcaccagcctgctggtgctgtag

SEQ ID NO: 262225 - DNA, 726 bp, Artificial Sequence
  derived and/or modified sequence
atggccgagcccagcgccgccacccagagccacagcatcagcagctctagctttggagcagagccatcggctccaggcggcgggggtagtcctggagcatgcccagcactgggaaccaaaagctgcagctcctcctgcgcagtacatgacctaattttttggcgggacgttaagaaaacaggattcgttttcggaacaacactgatcatgctgctcagcctggccgcttttagcgtcatcagcgttgtttcctacctaatcttggcgctgctgagcgtgactatatcttttcgcatatacaagagtgtaattcaggctgtgcaaaaaagcgaggagggacatccattcaaggcctatctagatgtggatatcactctcagctctgaagcattccataactacatgaacgccgccatggttcatatcaatcgcgccctgaaattgatcatccggctcttcctcgttgaggatctcgtcgactcactgaagctagcagttttcatgtggctcatgacttacgtaggagcagtttttaacggcatcaccctcttgatcctcgccgagttgctgatctttagcgttcctattgtctacgagaaatacaaggacccttccaaaaccccctggaaccggcaaaagaagggccgaatatctacgtggaagccagagatgcagcagttattgaagcatcatttgatcgtcatcacaagccttctagtcctgtag

SEQ ID NO: 262226 - DNA, 726 bp, Artificial Sequence
  derived and/or modified sequence
atggccgaaccctcagctgccactcaatcacactcaatcagtagttcaagcttcggcgctgaaccctctgcccctggtggtgggggatctccaggtgcttgcccggctcttggcacaaaatcttgttccagctcctgtgctgtgcatgacctgattttttggagagatgttaagaaaactggattcgtattcggcaccacacttattatgctcctcagcctggccgcatttagtgtgatttccgttgtaagttatctgatccttgctcttctctccgtgaccatatcctttcggatttacaagtccgtcattcaggccgtacagaaatccgaggagggacatcccttcaaggcgtacctggatgtcgatattaccctgtctagcgaggccttccataattatatgaatgccgcaatggtgcacataaacagagccttgaagttgatcatcaggttgtttctagttgaggaccttgtggactctctgaagttggctgtctttatgtggctgatgacctacgtcggagccgtcttcaatgggattaccctgctcattctggcagaactgctgatctttagtgttccaatcgtttatgagaaatataaggacccttccaagactccctggaaccgtcagaagaagggcaggatctctacctggaagcctgaaatgcaacagcttttgaaacaccacctgatcgtgattacctctctattggtgctgtag

SEQ ID NO: 262227 - DNA, 2524 bp, Artificial Sequence
  derived and/or modified sequence
gtgcgcatgcgcgctcgcgctcccgccctctagctgcgctcggctgagtcagtcagtctgtcggagtctgtcctcggagcaggcggagtaaagggacttgagcgagccagttgccggattattctatttcccctccctctctcccgccccgtatctcttttcacccttctcccaccctcgctcgcgtagccatggcggagccgtcggcggccactcagtcccattccatctcctcgtcgtccttcggagccgagccgtccgcgcccggcggcggcgggagcccaggagcctgccccgccctggggacgaagagctgcagctcctcctgtgcggtgcacgatctgattttctggagagatgtgaagaagactgggtttgtctttggcaccacgctgatcatgctgctttccctggcagctttcagtgtcatcagtgtggtttcttacctcatcctggctcttctctctgtcaccatcagcttcaggatctacaagtccgtcatccaagctgtacagaagtcagaagaaggccatccattcaaagcctacctggacgtagacattactctgtcctcagaagctttccataattacatgaatgctgccatggtgcacatcaacagggccctgaaactcattattcgtctctttctggtagaagatctggttgactccttgaagctggctgtcttcatgtggctgatgacctatgttggtgctgtttttaacggaatcacccttctaattcttgctgaactgctcattttcagtgtcccgattgtctatgagaagtacaaggatccaagcaaaactccctggaatcgccaaaaaaaaggcagaataagtacatggaaaccagaaatgcaacagttactaaaacaccatttaatagttataacgtcgttacttgtactatgaaggaaaatactcagtgtcagcttgagcctgcattccaagctttttttttaatttggtgttttctcccatcctttccctttaaccctcagtatcaagcacaaaaattgatggactgataaaagaactatcttagaactcagaagaagaaagaatcaaattcataggataagtcaataccttaatggtggtagagcctttacctgtagcttgaaaggggaaagattggaggtaagagagaaaatgaaagaacacctctgggtccttctgtccagttttcagcactagtcttactcagctatccattatagttttgcccttaagaagtcatgattaacttatgaaaaaattatttggggacaggagtgtgataccttccttggtttttttttgcagccctcaaatcctatcttcctgccccacaatgtgagcagctacccctgatactccttttctttaatgatttaactatcaacttgataaataacttataggtgatagtgataattcctgattccaagaatgccatctgataaaaaagaatagaaatggaaagtgggactgagagggagtcagcaggcatgctgcggtggcggtcactccctctgccactatccccagggaaggaaaggctccgccatttgggaaagtggtttctacgtcactggacaccggttctgagcattagtttgagaactcgttcccgaatgtgctttcctccctctcccctgcccacctcaagtttaataaataaggttgtacttttcttactataaaataaatgtctgtaactgctgtgcactgctgtaaacttgttagagaaaaaaataacctgcatgtgggctcctcagttattgagtttttgtgatcctatctcagtctgggggggaacattctcaagaggtgaaatacagaaagcctttttttcttgatcttttcccgagattcaaatctccgattcccatttgggggcaagtttttttcttcaccttcaatatgagaattcagcgaacttgaaagaaaaatcatctgtgagttccttcaggttctcactcatagtcatgatccttcagagggaatatgcactggcgagtttaaagtaagggctatgatatttgatggtcccaaagtacggcagctgcaaaaagtagtggaaggaaattgtctacgtgtcttggaaaaattagttaggaatttggatgggtaaaaggtacccttgccttactccatcttattttcttagccccctttgagtgttttaactggtttcatgtcctagtaggaagtgcattctccatcctcatcctctgccctcccaggaagtcagtgattgtctttttgggcttcccctccaaaggaccttctgcagtggaagtgccacatccagttcttttcttttgttgctgctgtgtttagataattgaagagatctttgtgccacacaggatttttttttttttttaagaaaaacctatagatgaaaaattactaatgaaactgtgtgtacgtgtctgtgcgtgcaacataaaaatacagtagcacctaaggagcttgaatcttggttcctgtaaaatttcaaattgatgtggtattaataaaaaaaaaaaaaa

SEQ ID NO: 262228 - DNA, 726 bp, Artificial Sequence
  derived and/or modified sequence
atggccgagcccagcgccgccacccagagccacagcatcagcagcagcagcttcggcgccgagcccagcgcccccggcggcggcggcagccccggcgcctgccccgccctgggcaccaagagctgcagcagcagctgcgccgtgcacgacctgatcttctggagagacgtgaagaagaccggcttcgtgttcggcaccaccctgatcatgctgctgagcctggccgccttcagcgtgatcagcgtggtgagctacctgatcctggccctgctgagcgtgaccatcagcttcagaatctacaagagcgtgatccaggccgtgcagaagagcgaggagggccaccccttcaaggcctacctggacgtggacatcaccctgagcagcgaggccttccacaactacatgaacgccgccatggtgcacatcaacagagccctgaagctgatcatcagactgttcctggtggaggacctggtggacagcctgaagctggccgtgttcatgtggctgatgacctacgtgggcgccgtgttcaacggcatcaccctgctgatcctggccgagctgctgatcttcagcgtgcccatcgtgtacgagaagtacaaggaccccagcaagaccccctggaacagacagaagaagggcagaatcagcacctggaagcccgagatgcagcagctgctgaagcaccacctgatcgtgatcaccagcctgctggtgctgtag

SEQ ID NO: 262229 - protein, 369 aa, Artificial Sequence
  derived and/or modified sequence
MLWEETGAAPAPARASDLPYRISSDHLKKEEKMTMMAHQYPSWIFINEKTFITREQLNSLLKTYNIFYENQKNLHILYGETEDGKLIVEGMLDIFWGVKRPIQLKIQDEKPFSSFTSMKSSDVFSSKGMTRWGEFDDLYRISELDRTQIPMSEKRNSQEDYLSYHSNTLKPHAKDEPDSPVLYRTMSEAALVRKRMKPLMMDRKERQKNRASINGHFYNHETSIFIPAFESETKVRVNSNMRTEEVIKQLLQKFKIENSPQDFALHIIFATGEQRRLKKTDIPLLQRLLQGPSEKNARIFLMDKDAEEISSDVAQYINFHFSLLESILQRLNEEEKREIQRIVTKFNKEKAIILKCLQNKLVIKTETTV

SEQ ID NO: 262230 - DNA, 1110 bp, Artificial Sequence
  derived and/or modified sequence
atgctgtgggaggagaccggcgccgctcctgcccctgcacgcgcatctgaccttccatatcgcatttcttccgaccacctgaagaaagaggaaaagatgaccatgatggctcaccagtacccttcctggatttttatcaatgaaaaaactttcataaccagggagcaacttaacagcttgttgaaaacatacaacatcttctacgaaaatcagaagaatcttcatatcttgtacggtgagactgaagacgggaagctaatcgtggagggaatgctcgacatattttggggcgtaaagcgacctattcagttgaagatccaggatgaaaagcctttttcatcatttactagcatgaaatcctctgacgtttttagtagtaaaggaatgacaagatggggagaattcgacgacctctacagaatcagcgagcttgatcggacacaaatacctatgtccgaaaagcggaactcacaggaagactatctatcctatcacagcaatacactgaaacctcacgccaaagacgagcccgactctcctgtgctatacagaacaatgtcggaggccgctttggtgcgcaaacggatgaaaccactgatgatggaccgtaaggagaggcagaaaaaccgcgcaagtatcaatggccatttttataaccacgagaccagtatttttatcccggcattcgaatctgagacaaaagtgcgagtcaatagcaacatgagaacagaggaggtgataaagcagttactccagaagttcaaaattgagaattctccccaagatttcgcattgcacataatctttgcgaccggagaacagcggagactcaagaaaaccgatattcctctgctccagagactgctgcagggcccttctgaaaaaaatgctcgtatatttttaatggacaaagacgctgaagagatctcctctgacgtcgctcagtatatcaattttcacttctccttgttggagagcattctgcagcggctcaatgaggaggagaaacgagagatccaacgaattgtcaccaagttcaacaaagaaaaagcaattatcttaaaatgtcttcagaacaagctggtgataaagacagagactacagtctag

SEQ ID NO: 262231 - DNA, 1110 bp, Artificial Sequence
  derived and/or modified sequence
atgctgtgggaggagaccggggccgccccagccccagcccgggccagtgacctgccctaccgcatcagcagtgaccacctgaagaaggaggagaagatgaccatgatggcccaccagtaccccagctggatcttcatcaatgagaagaccttcatcacccgggagcagctgaacagcctgctgaagacctacaacatcttctatgagaaccagaagaacctgcacatcctgtatggagaaacagaagatggcaagctgattgtggagggcatgctggacatcttctggggcgtgaagaggcccatccagctgaagatccaggatgagaagcccttcagcagcttcacctccatgaagagcagtgatgtgttcagcagcaagggcatgacccgctggggcgagtttgatgacctgtaccgcatcagcgagctggacaggacccagatccccatgtctgagaagaggaacagccaggaggactacctgagctaccacagcaacaccctgaagccccacgccaaggatgagccagacagccctgtgctgtaccgcaccatgtctgaggccgccctggtgaggaagaggatgaagcccctgatgatggacaggaaggagcggcagaagaacagagccagcatcaatggccacttctacaaccacgagaccagcatcttcatcccagcctttgaaagtgagaccaaggtgcgggtgaacagcaacatgaggacagaggaggtgatcaagcagctgctgcagaagttcaagattgagaacagcccccaggactttgccctgcacatcatctttgccactggagagcagaggcggctgaagaagacagacatccccctgctgcagaggctgctgcagggccccagcgagaagaatgcccgcatcttcctgatggacaaggatgctgaggagatcagcagtgatgtggcccagtacatcaacttccacttcagcctgctggagagcatcctgcagaggctgaatgaggaggagaagcgggagatccagagaattgtgaccaagttcaacaaggagaaggccatcatcctgaagtgcctgcagaacaagctggtgatcaagacagagaccaccgtgtag

SEQ ID NO: 262232 - DNA, 1110 bp, Artificial Sequence
  derived and/or modified sequence
atgctgtgggaggagaccggcgccgcccccgcccccgcccgggcctctgacctgccatacagaatctcttctgaccacctgaaaaaggaggaaaaaatgaccatgatggctcaccagtatcccagctggatcttcattaatgagaagacctttattacccgagagcagttaaattctcttttaaaaacctataacattttctacgagaatcaaaaaaacttacatattttgtatggcgagacggaggatggtaagcttattgtcgaggggatgctggatatcttctggggggtcaagaggcccatccagctaaagatccaggacgaaaaacccttttctagctttacctccatgaagtcatccgatgtgttttctagcaagggcatgactaggtggggagaattcgatgacttatatcgcatcagtgaactcgatagaactcagattccgatgtcagagaagcgcaatagccaagaggattacttgtcttaccactccaatacattgaaaccccatgccaaagacgaaccagatagtcctgtgctgtaccggacaatgtctgaagccgccctggtgcggaaaaggatgaaaccgctcatgatggaccgcaaggagcggcagaaaaaccgcgcgagcatcaatggccacttttacaaccacgaaacgagcatcttcatccccgcttttgaaagtgagaccaaggtgcgagtcaattctaatatgagaactgaggaagtgatcaaacagctcctccagaagttcaagatagagaatagcccacaagattttgcccttcatattatcttcgcaacaggcgagcaacgccggctcaagaagaccgatataccactgctgcagcggctgctgcaggggccgtcggagaaaaatgcacgcatcttcttgatggataaggatgcggaagaaatctcttccgacgttgcacaatacattaatttccacttctcattgcttgagtccattctccagaggctcaacgaggaggagaagcgcgagatccagaggatagtcacaaaatttaataaagagaaagcgatcattctgaaatgcctgcagaacaagctcgtgatcaagacagagaccaccgtttag

SEQ ID NO: 262233 - DNA, 1110 bp, Artificial Sequence
  derived and/or modified sequence
atgctctgggaggagactggtgcagccccagcacccgctagggccagtgatctcccttaccggatctcttccgatcatctcaaaaaagaggagaagatgaccatgatggctcatcagtatcccagctggatttttatcaatgagaagaccttcatcacaagagagcagttgaactccctgctgaagacctataacatcttttatgagaatcaaaaaaacctgcatatcctctacggtgagacggaggacggcaaactgattgtggaaggaatgctagacatcttctggggtgtaaagcggcctatccagctgaaaatccaggacgagaagcccttctccagtttcaccagtatgaaaagctcggatgtgttctctagcaagggcatgacaagatggggggagttcgatgatctgtatagaatatcagagctcgatagaacgcagattccaatgtctgaaaagagaaactcacaggaggactacttgtcctaccattctaatacactgaaaccgcatgcaaaagatgaaccagatagcccagtgctttaccggacgatgagcgaagctgctctagtgcgcaaaaggatgaagcccctgatgatggaccgcaaggaaagacagaaaaacagagccagtatcaacggacatttttacaatcacgaaacgtcaattttcatccctgcattcgaaagtgagactaaagtgcgggtgaactctaacatgaggacagaggaggtgatcaagcagctgcttcagaagttcaaaattgaaaactcccctcaggatttcgcactccacatcatcttcgcaacaggagaacaacgacgactgaagaaaacagatataccgctgctgcagagattgctgcaaggaccatccgagaagaacgcaaggattttcttgatggacaaagatgctgaagaaatttctagcgacgtggcacagtatatcaactttcactttagcctgttggagtctatccttcaacgactcaatgaggaggaaaagagggaaatacaacggatcgtaacaaaatttaacaaggagaaagcaatcatattgaagtgcctgcagaacaaactggtaattaagactgaaactacggtatag

SEQ ID NO: 262234 - DNA, 5994 bp, Artificial Sequence
  derived and/or modified sequence
ccaggatcgctgatcgcgtcgggggcactgcaagcgcccagctgagccatgctctgggaggagacaggcgccgcccctgcgcccgcgcgggcctcggacctcccctacaggtgagtgactcgcggagtcccagcccggcagagacagggcactggtttccctctaccagagttcctgacccagccgagaacaaaccgcgaagcaagttcagccgaacaacgatggtgaaaagggtcctcctgctcacagtgtgaataacaggatatcctcagaccatctcaaaaaggaggaaaagatgactatgatggctcaccagtacccctcttggatcttcattaatgagaagacattcataaccagggaacaacttaattctttattgaagacctataacattttttatgagaaccagaaaaatctgcatattttatatggagagactgaagatggcaaactaattgttgaaggaatgctggacattttctggggagtaaaacgacctatacagctaaaaatacaagatgagaagccattctcttcttttactagtatgaagtcatcagacgtcttctccagcaaaggaatgacacgctggggggaatttgacgatctctatcgtattagtgagctggacaggacccagattcctatgtctgaaaaaaggaattcccaggaagactatttatcttatcacagcaacaccctgaagccacatgcaaaggatgaaccagactccccagtgctctatagaaccatgagtgaagcagctctggtgagaaaaaggatgaagcctctgatgatggacagaaaagaaagacagaaaaatagagcctctattaatggacacttctataaccatgaaacatcaattttcattccagcctttgaatcagaaactaaggtcagagtaaacagtaacatgagaactgaagaagtaataaagcaacttctccaaaaatttaagattgaaaatagtccccaggattttgctcttcacattatttttgcaacaggagaacaaagacgactaaagaagacagacattccgctactgcagaggctcctacagggaccttctgaaaagaatgctcgcattttcctcatggataaagatgcagaagaaattagcagtgatgtggctcagtacattaactttcacttttctctcttggaatccattcttcaaagattaaatgaagaagagaaaagagagattcaaagaatagtaacaaaattcaataaagaaaaggcgattatactgaaatgtcttcaaaataaactagtaataaaaacagagacaacagtttagcagtacaagcttctattgctaaaacatttcaaaaaactcagagatattactctttgatgaatgcataagttctgtacttgcatttatacgaacatatatgagacttgaatcgtagaaaattgaatgtcaaaaaaagctcatttctttttgaagtgatgaggttaattagggttcacagttggacaaaatgagtttgagtttagtttcagtaactgaaataagcttgaatactgcatatgccaaatagcttttatagtaaaccatgtaatgaactcaaatttaaatggtgtcttcagataagcagtttaaacttcatttagcttggactctcaagagaactgaaacataatcaatggattcagaaatgactcagaaaaaagaagctgccagttcttggaatgaaaaagaaatacagtcttacaccatcaaggaatctacctgatagtgacagtagcttcttgaaaactctggcattttcataaaatctaggactatcttaaatggcctgttgacttctgactatctgtaacatcagagctgtctggcctttggaaaggaaaaattatggactctgttaagaaatcctaattgaaattttctgaacctccccccagcccttttattctctctcttctgctgatgaaagacctttcatcagttcaaagcttttcttaagctcttttttaagttaattgaactttttctttatttatttttcaaaaaaatgtttatatcacatagacatattacatcggctaaagtaagacttggcccacaaatacctatttgttgctgaatgaatacaatggataaagcaaggctgttgtagctgaagttacatagggaatcccaaactctgccctcttagcatcttattctacatgacaactctcaaggtactcacagatctgtttaacccacttgaaaaaaaaacactaaaaatgaagaaatgctataagtataaactatgattttatttataaattctgtattaaaatggaattatatgcaacattctttcattctgtaaactaattccatttgcattcctcataagcattgtagtaaattgatcatattacatgtactaaggaatgagattatatgcagtaaacccaactggaagattaacaatattaaaatatgaaacatttttaagacaaaggcattacttctcagtattaccaaacctaaactggttgaaggtgaaagtgtgctatggccttttcaagcctaagaagtctctcttactgagtaaaccagaggcttgcatcgctattctttcacctgtcaatattaataagaaaatagtctcatctcacttaaatgaggcaaatgtaatagttaaaattcaacatacttataaaaaactagtgtcatgtacctgccatgaacatgacaaaaggttagtcttcaatagactgaaatgtataagagaagaaccaagtcttacatagaaaaaaaaggtagatatgaaaagaaaaatcacagaagagagaatgcaaatggccactaagtatatgaaaaaagtcgtatcttaacagtgaacaactgtgttagtctgtatcaatcagaagacagaaacaaggtagtaatttaaacagggaaagtttaatataaataataattaagctatgataggagaataataataaagatgaaaagagaaggtaccctaaggctgagggaaagaatcctaacaaggaaaggcaggaatgagggtttcagaattcactggagaaggtgtggttgcagcccactggagagaagtttgctggcttgcccaggccagagcaggaccacagatactggacaagctggtacagccaaccccctaggtgtggaccagctgaggcaggtgggcagatatgcagagggacttggggctttgccaaagggtaagcacaaagaaggagtcacgggttctgttcgaggcactgttgggattaggagccggagggacctactttgcaggaacctagcataactttgtgtgacgagactgcacaagacaaagctcaggcaagtggctcagtagttggccagcccagcagggtcctctgtatgagtgtgcacccagctgaagagaagaaatggagagcagcaattggagcttcaggaccggcttgcactgtggctccaggttataccaccactgcccaaagcaaaagctagagaagcaagtggagaaatgctggagaaagctgcaccctacaggcaaccagcactgcagaaaccactccaggcaaagtagtgaaggaaaaaagcctgctctccagtagcctggcctgtcagcctggaggaatcaggaaagaccccttcctcttgcagtgtgtctccagcgccctctactgacaaagtatgccatcatgcaagctgcaaaggaaacatttcaagagtctatatctattttcacggagcgggcaaccaacagtgaatgtggagctgagagacagtaaaataataactgacatgccaccgaagtacaaagtaaaataaataaataaatacacattttggcctattagcaaagattaagaaatgataacattaaatactcaataaatcaccatgagatggggactcaaacttctggtaaaaatacaaatagatataatttttcttgaaggcaatttagtagtctgtttatcctataattctacttgtaagatcctatcatatgaaaataaccagagatacaaagacattctgcaaagatatgttttatattgttatttattgtgacaaaaggaaataaaaagcctaaatgttcagaaaattattttaaaagatgaaagagggaaataggccatggacggtggctcacgcctgtaatcccagcactttaggaggccaaggtaggtggatcacttgaggttgggatttcgagaccagcctggccaacatggtgaaaccctgcctctactaaaaatacaaaaaatgagccgggtgcaatggcaggcacctataatgccagctactcgggaggctgaggcaggagaatcgcttgaacccgggaggcggaggttgcatgagccgagatggcgccactgctctccagcctggacgacagagcaagactccgtctctaaaaaaaaaaaaagagggaaataaacatttatttgtatattgttatgtagccattaaaattctgtttccaagtaattttaattacaggggtaaattcttatatatctaaataagaatatacacatacacatgttccaaaatatttattatgtacttaaggcatatatattatatatgtatgtgtgtgtatatatatatgtatttgtgtgtgtgaacactaatatttgcatatatatacacacaagaaataaaaacatgttaaaaatggctatatctgcattgtagaattatgagtgattcatgtttttctaacttccctatctgtattaagtgttctatagtttatatttgttactttttacatcaggaaatagtaaagttattatttaaaacttatgaacaaaaaagtaacaagcacatgcaagcacagagttctaccaaatgcaaaaaatttcaaatcaattattcaaatgagacattaacatcacttctgtggtagttttatatccataaagtctgattcttctcctttgaagagatgaagcttaatcttcctcatcctgaaaatgggctggacttagtgacttacgtctttttattttatttttaattgacaaataataattgtatgtatttatggggtacaatattatattattatatatgtatacattatggaattattaaatcaagctaattaacatatccataacctcttataatttctttgtggtgagaacatttaaaaatgtactcttttagcaattagggacttacttttaatacaggaaaatggaagagactgtgagactttgaagtaggtcataaaagtcactgtggcttcctccttgctctctcttggaccacttgctctgggggaagtcaactgccatgtcctgagcagccctggaaagacctacatgatgaagaactgagaccttctatcaaatgccagcagggaattgaggcctcctgtcaacagccattttagaagtagatcttccagcctcagtcaagccttcagatgactgcagccctgtctaatagcttgaccgtaatttcatgagagaccttcagccagaaaacccaaggaaaccattctggattcctcatcctcagaaactgtatgagataagaagtgtttgttgtagtacgccgctaaatttggggcaatttgttacatagcaatgtatagctcatacaatttctgggaaaaaaatagtttattttcgaatcatttttgcataatgcaagaatataaacttgtcacagaataatttatccttgttttaggtggtccaaatatttcattgtcagttatatattagctcaaattaaattttagataatatatattattattaatggtaaagaatgtgtcacatttatctttatagcttttctgtacctaatattgtgtcttgtgcgtaggatgtgctcaataaaaattgattgaataaataagtgaatgaaagaataaatgaatgagtgaaggaattatctgaaatatttttataaaattccccatatgtatgtattacttattacaagtctggtcccatagctgaaaaaatattaaacattatatatatata

SEQ ID NO: 262235 - DNA, 4331 bp, Artificial Sequence
  derived and/or modified sequence
actgaggcacagggagtggctcaggtttcttgacacttccctgctgtggcgaaaaggagaaataattaacagctcctggggctccaggatcgctgatcgcgtcgggggcactgcaagcgcccagctgagccatgctctgggaggagacaggcgccgcccctgcgcccgcgcgggcctcggacctcccctacaggatatcctcagaccatctcaaaaaggaggaaaagatgactatgatggctcaccagtacccctcttggatcttcattaatgagaagacattcataaccagggaacaacttaattctttattgaagacctataacattttttatgagaaccagaaaaatctgcatattttatatggagagactgaagatggcaaactaattgttgaaggaatgctggacattttctggggagtaaaacgacctatacagctaaaaatacaagatgagaagccattctcttcttttactagtatgaagtcatcagacgtcttctccagcaaaggaatgacacgctggggggaatttgacgatctctatcgtattagtgagctggacaggacccagattcctatgtctgaaaaaaggaattcccaggaagactatttatcttatcacagcaacaccctgaagccacatgcaaaggatgaaccagactccccagtgctctatagaaccatgagtgaagcagctctggtgagaaaaaggatgaagcctctgatgatggacagaaaagaaagacagaaaaatagagcctctattaatggacacttctataaccatgaaacatcaattttcattccagcctttgaatcagaaactaaggtcagagtaaacagtaacatgagaactgaagaagtaataaagcaacttctccaaaaatttaagattgaaaatagtccccaggattttgctcttcacattatttttgcaacaggagaacaaagacgactaaagaagacagacattccgctactgcagaggctcctacagggaccttctgaaaagaatgctcgcattttcctcatggataaagatgcagaagaaattagcagtgatgtggctcagtacattaactttcacttttctctcttggaatccattcttcaaagattaaatgaagaagagaaaagagagattcaaagaatagtaacaaaattcaataaagaaaaggcgattatactgaaatgtcttcaaaataaactagtaataaaaacagagacaacagtttagcagtacaagcttctattgctaaaacatttcaaaaaactcagagatattactctttgatgaatgcataagttctgtacttgcatttatacgaacatatatgagacttgaatcgtagaaaattgaatgtcaaaaaaagctcatttctttttgaagtgatgaggttaattagggttcacagttggacaaaatgagtttgagtttagtttcagtaactgaaataagcttgaatactgcatatgccaaatagcttttatagtaaaccatgtaatgaactcaaatttaaatggtgtcttcagataagcagtttaaacttcatttagcttggactctcaagagaactgaaacataatcaatggattcagaaatgactcagaaaaaagaagctgccagttcttggaatgaaaaagaaatacagtcttacaccatcaaggaatctacctgatagtgacagtagcttcttgaaaactctggcattttcataaaatctaggactatcttaaatggcctgttgacttctgactatctgtaacatcagagctgtctggcctttggaaaggaaaaattatggactctgttaagaaatcctaattgaaattttctgaacctccccccagcccttttattctctctcttctgctgatgaaagacctttcatcagttcaaagcttttcttaagctcttttttaagttaattgaactttttctttatttatttttcaaaaaaatgtttatatcacatagacatattacatcggctaaagtaagacttggcccacaaatacctatttgttgctgaatgaatacaatggataaagcaaggctgttgtagctgaagttacatagggaatcccaaactctgccctcttagcatcttattctacatgacaactctcaaggtactcacagatctgtttaacccacttgaaaaaaaaacactaaaaatgaagaaatgctataagtataaactatgattttatttataaattctgtattaaaatggaattatatgcaacattctttcattctgtaaactaattccatttgcattcctcataagcattgtagtaaattgatcatattacatgtactaaggaatgagattatatgcagtaaacccaactggaagattaacaatattaaaatatgaaacatttttaagacaaaggcattacttctcagtattaccaaacctaaactggttgaaggtgaaagtgtgctatggccttttcaagcctaagaagtctctcttactgagtaaaccagaggcttgcatcgctattctttcacctgtcaatattaataagaaaatagtctcatctcacttaaatgaggcaaatgtaatagttaaaattcaacatacttataaaaaactagtgtcatgtacctgccatgaacatgacaaaaggttagtcttcaatagactgaaatgtataagagaagaaccaagtcttacatagaaaaaaaaggtagatatgaaaagaaaaatcacagaagagagaatgcaaatggccactaagtatatgaaaaaagtcgtatcttaacagtgaacaactgtgttagtctgtatcaatcagaagacagaaacaaggtagtaatttaaacagggaaagtttaatataaataataattaagctatgataggagaataataataaagatgaaaagagaaggtaccctaaggctgagggaaagaatcctaacaaggaaaggcaggaatgagggtttcagaattcactggagaaggtgtggttgcagcccactggagagaagtttgctggcttgcccaggccagagcaggaccacagatactggacaagctggtacagccaaccccctaggtgtggaccagctgaggcaggtgggcagatatgcagagggacttggggctttgccaaagggtaagcacaaagaaggagtcacgggttctgttcgaggcactgttgggattaggagccggagggacctactttgcaggaacctagcataactttgtgtgacgagactgcacaagacaaagctcaggcaagtggctcagtagttggccagcccagcagggtcctctgtatgagtgtgcacccagctgaagagaagaaatggagagcagcaattggagcttcaggaccggcttgcactgtggctccaggttataccaccactgcccaaagcaaaagctagagaagcaagtggagaaatgctggagaaagctgcaccctacaggcaaccagcactgcagaaaccactccaggcaaagtagtgaaggaaaaaagcctgctctccagtagcctggcctgtcagcctggaggaatcaggaaagaccccttcctcttgcagtgtgtctccagcgccctctactgacaaagtatgccatcatgcaagctgcaaaggaaacatttcaagagtctatatctattttcacggagcgggcaaccaacagtgaatgtggagctgagagacagtaaaataataactgacatgccaccgaagtacaaagtaaaataaataaataaatacacattttggcctattagcaaagattaagaaatgataacattaaatactcaataaatcaccatgagatggggactcaaacttctggtaaaaatacaaatagatataatttttcttgaaggcaatttagtagtctgtttatcctataattctacttgtaagatcctatcatatgaaaataaccagagatacaaagacattctgcaaagatatgttttatattgttatttattgtgacaaaaggaaataaaaagcctaaatgttcagaaaattattttaaaagatgaaagagggaaataggccatggacggtggctcacgcctgtaatcccagcactttaggaggccaaggtaggtggatcacttgaggttgggatttcgagaccagcctggccaacatggtgaaaccctgcctctactaaaaatacaaaaaatgagccgggtgcaatggcaggcacctataatgccagctactcgggaggctgaggcaggagaatcgcttgaacccgggaggcggaggttgcatgagccgagatggcgccactgctctccagcctggacgacagagcaagactccgtctct

SEQ ID NO: 262236 - DNA, 1110 bp, Artificial Sequence
  derived and/or modified sequence
atgctgtgggaggagaccggcgccgcccccgcccccgccagagccagcgacctgccctacagaatcagcagcgaccacctgaagaaggaggagaagatgaccatgatggcccaccagtaccccagctggatcttcatcaacgagaagaccttcatcaccagagagcagctgaacagcctgctgaagacctacaacatcttctacgagaaccagaagaacctgcacatcctgtacggcgagaccgaggacggcaagctgatcgtggagggcatgctggacatcttctggggcgtgaagagacccatccagctgaagatccaggacgagaagcccttcagcagcttcaccagcatgaagagcagcgacgtgttcagcagcaagggcatgaccagatggggcgagttcgacgacctgtacagaatcagcgagctggacagaacccagatccccatgagcgagaagagaaacagccaggaggactacctgagctaccacagcaacaccctgaagccccacgccaaggacgagcccgacagccccgtgctgtacagaaccatgagcgaggccgccctggtgagaaagagaatgaagcccctgatgatggacagaaaggagagacagaagaacagagccagcatcaacggccacttctacaaccacgagaccagcatcttcatccccgccttcgagagcgagaccaaggtgagagtgaacagcaacatgagaaccgaggaggtgatcaagcagctgctgcagaagttcaagatcgagaacagcccccaggacttcgccctgcacatcatcttcgccaccggcgagcagagaagactgaagaagaccgacatccccctgctgcagagactgctgcagggccccagcgagaagaacgccagaatcttcctgatggacaaggacgccgaggagatcagcagcgacgtggcccagtacatcaacttccacttcagcctgctggagagcatcctgcagagactgaacgaggaggagaagagagagatccagagaatcgtgaccaagttcaacaaggagaaggccatcatcctgaagtgcctgcagaacaagctggtgatcaagaccgagaccaccgtgtag

SEQ ID NO: 262237 - protein, 416 aa, Artificial Sequence
  derived and/or modified sequence
MKPGMVPPPPGEESQTVILPPGWQSYLSPQGRRYYVNTTTNETTWERPSSSPGIPASPGSHRSSLPPTVNGYHASGTPAHPPETAHMSVRKSTGDSQNLGSSSPSKKQSKENTITINCVTFPHPDTMPEQQLLKPTEWSYCDYFWADKKDPQGNGTVAGFELLLQKQLKGKQMQKEMSEFIRERIKIEEDYAKNLAKLSQNSLASQEEGSLGEAWAQVKKSLADEAEVHLKFSAKLHSEVEKPLMNFRENFKKDMKKCDHHIADLRKQLASRYASVEKARKALTERQRDLEMKTQQLEIKLSNKTEEDIKKARRKSTQAGDDLMRCVDLYNQAQSKWFEEMVTTTLELERLEVERVEMIRQHLCQYTQLRHETDMFNQSTVEPVDQLLRKVDPAKDRELWVREHKTGNIRPVDMEI

SEQ ID NO: 262238 - protein, 415 aa, Artificial Sequence
  derived and/or modified sequence
KPGMVPPPPGEESQTVILPPGWQSYLSPQGRRYYVNTTTNETTWERPSSSPGIPASPGSHRSSLPPTVNGYHASGTPAHPPETAHMSVRKSTGDSQNLGSSSPSKKQSKENTITINCVTFPHPDTMPEQQLLKPTEWSYCDYFWADKKDPQGNGTVAGFELLLQKQLKGKQMQKEMSEFIRERIKIEEDYAKNLAKLSQNSLASQEEGSLGEAWAQVKKSLADEAEVHLKFSAKLHSEVEKPLMNFRENFKKDMKKCDHHIADLRKQLASRYASVEKARKALTERQRDLEMKTQQLEIKLSNKTEEDIKKARRKSTQAGDDLMRCVDLYNQAQSKWFEEMVTTTLELERLEVERVEMIRQHLCQYTQLRHETDMFNQSTVEPVDQLLRKVDPAKDRELWVREHKTGNIRPVDMEI

SEQ ID NO: 262239 - protein, 290 aa, Artificial Sequence
  derived and/or modified sequence
MPEQQLLKPTEWSYCDYFWADKKDPQGNGTVAGFELLLQKQLKGKQMQKEMSEFIRERIKIEEDYAKNLAKLSQNSLASQEEGSLGEAWAQVKKSLADEAEVHLKFSAKLHSEVEKPLMNFRENFKKDMKKCDHHIADLRKQLASRYASVEKARKALTERQRDLEMKTQQLEIKLSNKTEEDIKKARRKSTQAGDDLMRCVDLYNQAQSKWFEEMVTTTLELERLEVERVEMIRQHLCQYTQLRHETDMFNQSTVEPVDQLLRKVDPAKDRELWVREHKTGNIRPVDMEI

SEQ ID NO: 262240 - DNA, 1251 bp, Artificial Sequence
  derived and/or modified sequence
atgaagccaggcatggtgcccccgcccccaggagaggaaagccagactgtgatccttccccctggttggcaatcctacttgtcgcctcaaggacgcaggtattatgttaataccacgaccaacgagactacctgggaacgcccctcctctagcccaggaatccccgcttcacctggatcacaccgctcatccctgccgcccaccgtcaacggataccatgccagcggcacccccgcacatccacccgagacggcccacatgagtgtgaggaaatctaccggggatagccagaatcttggatcttctagtccctcaaagaagcagtccaaggaaaacacaattactatcaactgtgttacctttccccatcccgatactatgcctgaacaacagctgctcaagcccacagaatggagttattgcgattacttttgggcagataaaaaggaccctcagggaaacggaacggtggccggctttgaactgttgctgcaaaagcagttgaaaggcaagcaaatgcagaaagaaatgtctgaattcattcgagagaggatcaagattgaagaagactatgcaaagaatctggccaagctgagtcagaattccctggccagccaagaggagggcagcctgggcgaggcctgggcccaggtcaagaaatctctcgcagacgaggcagaagtccatttgaagttctcagcgaaactgcacagcgaggtcgaaaaacctctaatgaattttcgcgagaatttcaaaaaagacatgaagaagtgcgaccaccatatcgccgacctacggaaacagctcgccagcaggtacgcctccgtggaaaaggcacggaaagcgcttaccgagagacaaagggacctggaaatgaaaacccagcaattagaaatcaagctgtccaacaaaacggaagaagatatcaagaaagctcgccggaaaagtactcaggccggagacgatctcatgcgctgcgtggacctgtataatcaagcccagagcaaatggttcgaggagatggtgacaaccacgctcgagcttgaaaggttggaagtggaaagagtggagatgattaggcagcatctgtgtcagtacactcagcttaggcacgaaacagacatgttcaatcagagcacagtcgagcctgttgatcagctgcttcggaaagtggatcctgctaaggacagagagctctgggttcgggagcataagacaggcaacatccgaccagtcgatatggaaatctag

SEQ ID NO: 262241 - DNA, 1248 bp, Artificial Sequence
  derived and/or modified sequence
aagcccggcatggtgccccctccacctggggaggaatcacagactgtgatcttgcctccaggatggcagtcctacctaagtcctcagggccgccgctactacgttaataccacaaccaacgaaaccacttgggaacggccgtcctccagcccgggcatccctgcgtctcccggcagccacaggagttcactgcctccaacagttaacgggtaccacgcatctggtacacccgcccaccctcccgagaccgcgcacatgagtgtgcgcaagtccacaggcgactcccagaatctgggctctagcagccccagtaaaaagcagtctaaggaaaacacaattaccatcaattgcgtcaccttcccccacccggataccatgcccgaacagcagctgctcaagccgacggagtggagctattgtgattacttttgggctgataaaaaagatccccagggcaacggcacagtcgccggttttgagctcttgctacagaagcagctgaaggggaaacagatgcagaaggagatgagcgaattcattcgagaaagaataaaaatagaagaggactacgccaagaatctcgccaagttgagccagaacagtcttgcatctcaagaggaggggtcacttggcgaggcctgggcccaggtgaagaagtctttggcagatgaagccgaagtgcatctgaagttcagcgctaagcttcattcggaagttgagaagcccttgatgaattttagagaaaatttcaaaaaagacatgaaaaaatgcgatcaccatattgctgacctgcgcaagcaattggcttctagatatgcctctgtggagaaggcaaggaaggccttaaccgagcgccagagagatcttgaaatgaagacccaacagctggaaattaagctcagcaacaaaaccgaagaagatataaagaaagcccgcaggaaaagcactcaggccggcgacgacctgatgaggtgcgtggacctctataatcaggcccagagcaagtggtttgaagaaatggtcacaacaacactggagctggagaggcttgaagttgaacgcgttgagatgattcgccagcacctatgccagtacacccagctgagacacgaaacggatatgtttaaccaaagcactgtcgagcctgtagatcagctccttaggaaggtcgaccctgcaaaggatcgggagctgtgggtgagggaacataagacagggaacatacggcctgtggacatggagatctag

SEQ ID NO: 262242 - DNA, 1251 bp, Artificial Sequence
  derived and/or modified sequence
atgaagcctgggatggtgccaccaccacctggagaggagagccagaccgtgattctgccccccggttggcagtcatatttgtcaccgcaaggacgtagatactacgtgaatacaacaaccaacgaaacaacttgggaacgaccttccagcagtccggggataccggcctctcccgggagccatcggagctccctgcctcctacagtgaacggctaccacgctagcgggaccccagcccacccacccgaaaccgcccatatgtctgtaagaaagagcactggtgactcacagaaccttggaagctcaagtcccagtaagaagcagtcaaaagagaataccattactattaactgcgtaacctttccacatcccgatacgatgcccgaacagcagctgttgaaacccactgagtggagttattgtgattacttctgggccgataaaaaggatccccaggggaatggtactgtggcaggattcgagctcctcctgcaaaagcagttgaaagggaagcagatgcaaaaagagatgagcgaatttatacgtgagaggatcaagattgaagaagattacgccaaaaaccttgcaaagttgtctcagaactccctagcgagccaggaggagggcagcctcggcgaggcctgggctcaagtcaaaaagtcgttggccgacgaggcagaagttcacctcaaattctctgctaaactgcattccgaggtggagaaacccctgatgaactttagagagaatttcaagaaagatatgaagaaatgcgaccaccatatcgccgacctcaggaaacagctggcttctagatacgcttctgttgagaaggcccgaaaagccctgacagaaagacagagagaccttgagatgaagacacagcagcttgagattaagctgagcaacaagaccgaggaggacattaaaaaagcaaggcgaaagagcacacaggctggagacgatttgatgagatgcgtggatttatacaaccaggctcagtcgaagtggtttgaggagatggtaacaaccacccttgagctggagaggctggaggtggaaagggtcgaaatgatccggcaacacctatgtcagtatactcaactgcgccatgagacagacatgtttaatcagtcaacggtagagcctgtggaccagctgcttcgcaaagtggatccggctaaagaccgtgagctctgggtaagagaacataaaacaggcaacatacgccccgtggacatggagatatag

SEQ ID NO: 262243 - DNA, 8181 bp, Artificial Sequence
  derived and/or modified sequence
agaaacattgcatctggaaagtccagaacaagttgttaatttcccagcaagcactggagcggatttggaaggaactatgcaatgtagtgggttctttgtgaaagaacagcaatgagcaaagccacaggaacctccgctggggtgcccagaacactggccctgggctagcgacttgcctcagccccatttcccggagaggctgccatgaagaggaagccggcggagtcttggtgctgagtctgagggcttcaggcaggacccaagactctcctctgaggtagcagcccccagagaaggttagctgttctctgatgaagcctggaatggtcccccctccgccgggagaagaaagccagacggtcatccttccacctggctggcagagctacctgtcgcctcagggccggcggtactatgtcaacacgaccaccaatgagaccacctgggaacgtcccagcagttctcctgggattccagccagccctggctctcacaggagctctctgcctccaacagtgaatggataccacgcatcagggaccccagcgcaccctccagagactgcccacatgagtgtccgaaaatccaccggtgattcccagaacctgggatcctcatcgccaagcaaaaagcagagcaaggaaaacaccatcacaataaactgtgtgacgttccctcacccagacacgatgccggaacagcagctgctgaaaccaaccgagtggagctactgcgactacttctgggctgataagaaggacccccaaggcaacggcaccgtggctgggtttgaactactgctccagaaacagctgaagggcaaacaaatgcagaaggaaatgtcagaattcatccgggaaaggataaagattgaagaagactatgcgaagaacttagctaagctctctcagaactccttggcttcacaggaggaaggctccttgggagaggcgtgggcccaggtgaagaagagcctggcggacgaagcagaagttcacctcaagttctctgccaagcttcacagcgaggtggagaagcccctgatgaacttccgtgagaacttcaagaaagacatgaagaagtgcgaccaccacattgccgaccttcgcaagcagctcgccagccgctatgcctcggtggagaaggcccggaaagccctcacagagcggcagagagacctggagatgaagacccagcagctggagatcaagctgagcaacaagacagaggaggacatcaagaaggcgcggagaaagtccacacaggctggagacgacctcatgcgctgtgtggatctctacaaccaggcccagtccaaatggtttgaagagatggtgaccaccacattggagctagagcggctggaggtggagagggtagagatgatccggcagcacctgtgccagtacacgcagctgcggcatgaaacagacatgttcaaccaaagcacagtcgagcccgtggatcagctgcttcgaaaagtggacccggccaaagacagggagctgtgggtcagagagcacaagacgggcaacatccgccctgtggacatggagatctagatgggcctgtgcagcttcggggggtcctgctggggaggggggctgggctcccaccatggggcccatgccgagtggatgccccccaccctctctcctgggccactgaggagaggggagagagctggtgattccagaagggtgacccggacagcctagctgggggctcccccatattcccaggcccagaagacagacccacagccctgcccttgtctctgaggctgaagaccccctgactcccatgctgtgcttgccgctctgaaacaaacagaggctggaactttgtggtccttgccgagttttgtaggggtcactgtcacatgcttgtgccctggaagccccaaggctcttcctccagctggctcccttgtctccagggctttggaggatcagggtagggagggctctgtctctaagccaggtgtcaggatcagaatcatgggtagaaggtgccattcagctcacagccgcacccagaatcctttgcagccctccttctttatttttttcccattgcattctgggagtccacatctggctttctcagccactgttcatcaccaggggttttaggaggaaggcttggctcctgtcttcccagacccaccatgcctggagaggtcaggatggaactacctcattcggcaaattagccccaaattgagcgctgaatcgtgtcccatgagatcaggcgccatctgtaaagtctcctctggaaatgccaatccatccttcccccagctgcttcctcggggaggcccctgcccccaccctgccagcccttcccagtctcattagaggaagctttccaaagttctcagttatcaagacctcatccagctcgtccaaaggcttcagggatggaaacaaaccagctcgtctcagaggccagcaagctggggcctgtccgccacggtgccctgtgcacctttgggctgccctggcccccactctcccgggccgcccaccacaggctcttaatggggccgggtcagtcctacatgtgagatgggttagggcaagtctttgccatcccccagatggctctgtcttcttgtgtatggcagggctgggactgctgtcccttgtacagttttctgtcactggtgggcactggacaggcatagcagactctcttgtggccacactaggttgtcgcctttcaggcagtgtcccgccacctttgcttcccgctccttctggacattccagagccctgcaccaaacccttacttggtgtctgcacctcctttccctctctccatcttccaatccctggaaaagtctggtctgagtgtgacttgggaagctttcagtgctgctgtttggcccagctcattactttctccctttctctaccacagcaaacacattctccaccatgtcagtctaaagagtctaaaggggccgggagaagcatgagcgaggggcagattctagtcgggagcccatgccctggaaatccatctttcttcatctttcccattgaccactttgggtttgacctgcacatctgcagtgagggcagaattcaacaagcacaactcactggtctttcagtcaacgtgctagaaaccgatgacttattaatctctaattttttggcgcctctttcattgaatgagaattgctttcgtatagttcacattagaaaaatgcctaatatactaaagtaaaccaaacgttgtcacttttctcttgttcttgaaacattgcaaccaaaaaggtcagcacaaaggccttcacctacgtgaagacctcctggtaggatctgtccatgggatggagaaccactctgtccagatctggggttgggtcatgacaccagctaccaattttagaatattatttcttggtttctttatgaaaaatgggtgctagtggtaattgctttgtggcttagtaaactactctgtggatgatttccaaacattcaaagccaatagccttgttattaacaagatattttgagtacaatatggctcattgacttttccattacatctgaggattccagagtcctctgttcatccctgggatagagtgagccctcttgcgtcttccagggtagctcaggttggcccagtttgggccagtccatttttggaggtcactctttcccccctcatcccctcacctccttctctttacccccttcacgtacttcctttctttcttccctctgttattcattcatcaagcaggttaaagccattgtgctaagatctaatctgaggacactataatggccctgtcgtcagggaagcccgtgatcgctcgttttcaggggtcttaccggtcagcaaccttggcattgatacataggcactctacagaatttaagttttcagaggtaagtctgttgttctgattaatctgcattcattcagcgaatgctcaagacaagccaggcatgctgagaagcggcgctctagttgtatgtaagatgggcattcctctgctctcctctattctccatgtcgactgagaagagtataataagaacattgtaccctctccacacttaaccctctgggattctttattataatataaaccaccgtcgtgaggcatttacctgttggatggaaggtagacagcaacaagattttaatcacctggtcaccagaccctcacggcccatatccaattcgaatttcagaaatttctctgtttgctttaaataactctttacaaataagggtcgggcacggtggctcacgcctgtaatcccagctctttgggaggccgaggtgggcagatcacgaggtcaggagatcgagaccatcctggctaacatggtgaaaccccgtctctgctaaaaatacaaaaaattagccagatgtggtggtgcacacctgtagtcccaactattcggcaggctgaggcagtagaatcgcttgaacctgggaggcggagattgcagtgaaccaagatcgggccactgcactccagcttgggtgacagagcaagactccatctcaaaaaaattataaataactctttgcaaataggaaagtgaagctcaagggtaaccagtgaggctatgaaattgccagtgaattaagaccagggctagagtcaacagtccagaacccctatccgtatgaacaggggcccgtttctggttgaaatcaaggttaggatgcaactgagaaaataaaagactgcactttggagaggcaagcacgctatccgggttgttgttttgttttatgtcttggtgcttaggtgaggacttagctgggtttattcaaagtgggcgggtctgggctattcttgagaatgtcccttccatttctgagaacaagtcagccccttctacctgcctccacccaggagactgatgcacaagatctgtttgtgaaagcctgatttaaaaagaaaaaaaaaattccttaagccaaatggtgttccaagttggttgctgtgacaacctccaggaagagccacttgttaccctctattctttctagtgctttcagtcagtggcaacacataggccccttggaccgtggggatggcggccctgagattctgtcagtgggaccaccctgggcctcctttctacctccactcagcaccctgttggccaaggagaatttctgcggtgggaggcagtgctctgctagtcaggattgataaacagctgggcacaccgaaacagtgtaccaacgaattcaccaaccaggggtttctttccctaccctttgtgaaaaccaatcaattactagatgagtggatggatgcagaaaaatctgggctgagccaaagtcccttttggaaatacaagccataacattcgaaggacatcagcgaccttggcttgtttaggtgattttacttccagctgcaggtagtcttgacaaggagtgtttaaacagaaggctcaagatgcattccttgtgtaggtcggagagagcacttctaatgttaagtggggtacagatcagctgcccccccacgtagcctggacatcgtcttatccccataatccttgccatccctacaaggcccatcgccaccaccttttcccaggtttattgaggtatgattgacatccagtaaaattcaccctttggaaatatacagctctgtgaattttgacaaatttagtgtcttgtgaccatcaccaagatcaacctgtttttaaccctccaaaaaattcccttctcctgccctctttccctggcaaccctgattgattatctgatcctataattttgccttttctagaatgtcatataaatggagtcacactgatgtcgccttttgagtctggcatctttccctcagcttaatgcttttgagtcattcatgatgtgtgcgtgtggtttgttccttctccttgccgggaagtatttcattgcatgggcgtactactctgcttctttatttttacactgagcctttcgccctggaagttcttggcccagggtcttcaacttgtttgcacgaccacttccagcttgctgcttccttcagttccccaggctcctcctccaaatgccagctgtgcccacaagctgttcttagggctcacactcgccttttggcgcgtggtgggtttttggtagtgcagaaagaatccagggatgggaggggaagggacggatgggtgctcaattgctgctcacgtctgctgcaacctgaagcttgcatctcagccagcagatctgctcccttctgggacccaggcttcagtgtcacacggtccttggctatgtattgggcgttggaggctttgaaaggcgagcagaagcagcatggacaagaaggctggggctggccctggggctcatcatgatgctttcctggatctgttgcttcatctgcaagctgagggtgtttgttctagatgagtgtctcaggccaccggcaactgcatgtacctcctccctttctcatttccaatgatgtaccctgtacacgtgttcatgctgtgtctggctctcatctgcacaatcgtgcatagaattgcctcaagtcctggtgagagagatgccgtggtacttttccatttagattcaaatggagctaaaattaagagttttatgagctgttaagaatgaggtagtttctcctaggaccccccaaagacagtgcaagtaatgaccgtttggatctcattcgtcgatctttgatagtatgttctggagtctactccccaggagccaggacaggcgtgaagatggagtccttgtcgcagctggagccttgcctagctggtgatcacacagcctggcctgtacctgcaccccactggatggtggtacatggtggcagggacaggaccacacccagttaaggccagaccaggctgagtgtgacccctgaggtaaacactccactaagctgtgtcttgttcatgccccctgctcagtgaaaggtgagtcccgagaccagttgggtacctctctatgcgaaccagagacatttctggatccaggccaggtgaagattagggccaggaagcctgagcccccggggcctcaaggtagggagccgaagaggctgccaggactctgctgggttgaaatttgccggggaggactcttgtctccccctcaggagtatttttgttgaggctttcctggaggtgaagaagcaattcccattgcagcaggttagagcgagaatcagacagagggcaaaaaccaattcgcttctccccacgttctaaatgctggggcatggctgtcaggagggcttcctgggaggtgtctctgggggtggggtgaggttggggcgatggcctttggagattgcgtgtggtgttcaggactgttccttggtgtttgagggaaactttagtgggattgcagtggaatgtaaggtcagggcacgtgggtgctctctcggggtggggtgactgggagacctagagggaaagcctgctatgcagggggagagcacaggactggccctgctctgcggcctcctttgtcccataacctgaagttaagtcacatcccctgtcgggacctccgtgcactcatctgtcaagtgggggcgcttcccttccagcatcacctgcagcagacgggctctcgggagtcgtgggttccaggcagctgtgtggacccagggacagacattcaaagggacgccagccatccttagtgacaggggccccaacttagcatcccttcccttccgttaggaaggagatgaccggaagcaaccccttcacagacacgagcacatcggcaaaccctatgaaagtggaattttctaacaaaataaacttgcttgtttgatctgttttctgtaacttttgctaaatactttatacatttttcatgttaaagagccgtgtctcccgccagcactcctcaccccggtatgaatgtgtttcctccacattgtatatccttccaccctctggctgcctagatcagtaaataaaattgatgtaatataatttataagtaacactgttgaaaccctgatcccagtggaggctgtaacccacctgcccccgcaccacccccctgacccctgttaccgcatttgtgtgtattaatgctgaagaattaaatgtttaaagagtttaaattttgaaggcgtttgctatatacagttgtcctgcattattataaagagttttcaggaagtt

SEQ ID NO: 262244 - DNA, 8024 bp, Artificial Sequence
  derived and/or modified sequence
atgcttttctttagagctcctattgcttctgggtttggggtgtgagaggatgcagagtgggagaccttaaaaccgtctgatctggctgctaaagcgagtgtctgacgaccacccattaacaccagcgagtagcgtttgctcacggctttaggataagaagcctggaatggtcccccctccgccgggagaagaaagccagacggtcatccttccacctggctggcagagctacctgtcgcctcagggccggcggtactatgtcaacacgaccaccaatgagaccacctgggaacgtcccagcagttctcctgggattccagccagccctggctctcacaggagctctctgcctccaacagtgaatggataccacgcatcagggaccccagcgcaccctccagagactgcccacatgagtgtccgaaaatccaccggtgattcccagaacctgggatcctcatcgccaagcaaaaagcagagcaaggaaaacaccatcacaataaactgtgtgacgttccctcacccagacacgatgccggaacagcagctgctgaaaccaaccgagtggagctactgcgactacttctgggctgataagaaggacccccaaggcaacggcaccgtggctgggtttgaactactgctccagaaacagctgaagggcaaacaaatgcagaaggaaatgtcagaattcatccgggaaaggataaagattgaagaagactatgcgaagaacttagctaagctctctcagaactccttggcttcacaggaggaaggctccttgggagaggcgtgggcccaggtgaagaagagcctggcggacgaagcagaagttcacctcaagttctctgccaagcttcacagcgaggtggagaagcccctgatgaacttccgtgagaacttcaagaaagacatgaagaagtgcgaccaccacattgccgaccttcgcaagcagctcgccagccgctatgcctcggtggagaaggcccggaaagccctcacagagcggcagagagacctggagatgaagacccagcagctggagatcaagctgagcaacaagacagaggaggacatcaagaaggcgcggagaaagtccacacaggctggagacgacctcatgcgctgtgtggatctctacaaccaggcccagtccaaatggtttgaagagatggtgaccaccacattggagctagagcggctggaggtggagagggtagagatgatccggcagcacctgtgccagtacacgcagctgcggcatgaaacagacatgttcaaccaaagcacagtcgagcccgtggatcagctgcttcgaaaagtggacccggccaaagacagggagctgtgggtcagagagcacaagacgggcaacatccgccctgtggacatggagatctagatgggcctgtgcagcttcggggggtcctgctggggaggggggctgggctcccaccatggggcccatgccgagtggatgccccccaccctctctcctgggccactgaggagaggggagagagctggtgattccagaagggtgacccggacagcctagctgggggctcccccatattcccaggcccagaagacagacccacagccctgcccttgtctctgaggctgaagaccccctgactcccatgctgtgcttgccgctctgaaacaaacagaggctggaactttgtggtccttgccgagttttgtaggggtcactgtcacatgcttgtgccctggaagccccaaggctcttcctccagctggctcccttgtctccagggctttggaggatcagggtagggagggctctgtctctaagccaggtgtcaggatcagaatcatgggtagaaggtgccattcagctcacagccgcacccagaatcctttgcagccctccttctttatttttttcccattgcattctgggagtccacatctggctttctcagccactgttcatcaccaggggttttaggaggaaggcttggctcctgtcttcccagacccaccatgcctggagaggtcaggatggaactacctcattcggcaaattagccccaaattgagcgctgaatcgtgtcccatgagatcaggcgccatctgtaaagtctcctctggaaatgccaatccatccttcccccagctgcttcctcggggaggcccctgcccccaccctgccagcccttcccagtctcattagaggaagctttccaaagttctcagttatcaagacctcatccagctcgtccaaaggcttcagggatggaaacaaaccagctcgtctcagaggccagcaagctggggcctgtccgccacggtgccctgtgcacctttgggctgccctggcccccactctcccgggccgcccaccacaggctcttaatggggccgggtcagtcctacatgtgagatgggttagggcaagtctttgccatcccccagatggctctgtcttcttgtgtatggcagggctgggactgctgtcccttgtacagttttctgtcactggtgggcactggacaggcatagcagactctcttgtggccacactaggttgtcgcctttcaggcagtgtcccgccacctttgcttcccgctccttctggacattccagagccctgcaccaaacccttacttggtgtctgcacctcctttccctctctccatcttccaatccctggaaaagtctggtctgagtgtgacttgggaagctttcagtgctgctgtttggcccagctcattactttctccctttctctaccacagcaaacacattctccaccatgtcagtctaaagagtctaaaggggccgggagaagcatgagcgaggggcagattctagtcgggagcccatgccctggaaatccatctttcttcatctttcccattgaccactttgggtttgacctgcacatctgcagtgagggcagaattcaacaagcacaactcactggtctttcagtcaacgtgctagaaaccgatgacttattaatctctaattttttggcgcctctttcattgaatgagaattgctttcgtatagttcacattagaaaaatgcctaatatactaaagtaaaccaaacgttgtcacttttctcttgttcttgaaacattgcaaccaaaaaggtcagcacaaaggccttcacctacgtgaagacctcctggtaggatctgtccatgggatggagaaccactctgtccagatctggggttgggtcatgacaccagctaccaattttagaatattatttcttggtttctttatgaaaaatgggtgctagtggtaattgctttgtggcttagtaaactactctgtggatgatttccaaacattcaaagccaatagccttgttattaacaagatattttgagtacaatatggctcattgacttttccattacatctgaggattccagagtcctctgttcatccctgggatagagtgagccctcttgcgtcttccagggtagctcaggttggcccagtttgggccagtccatttttggaggtcactctttcccccctcatcccctcacctccttctctttacccccttcacgtacttcctttctttcttccctctgttattcattcatcaagcaggttaaagccattgtgctaagatctaatctgaggacactataatggccctgtcgtcagggaagcccgtgatcgctcgttttcaggggtcttaccggtcagcaaccttggcattgatacataggcactctacagaatttaagttttcagaggtaagtctgttgttctgattaatctgcattcattcagcgaatgctcaagacaagccaggcatgctgagaagcggcgctctagttgtatgtaagatgggcattcctctgctctcctctattctccatgtcgactgagaagagtataataagaacattgtaccctctccacacttaaccctctgggattctttattataatataaaccaccgtcgtgaggcatttacctgttggatggaaggtagacagcaacaagattttaatcacctggtcaccagaccctcacggcccatatccaattcgaatttcagaaatttctctgtttgctttaaataactctttacaaataagggtcgggcacggtggctcacgcctgtaatcccagctctttgggaggccgaggtgggcagatcacgaggtcaggagatcgagaccatcctggctaacatggtgaaaccccgtctctgctaaaaatacaaaaaattagccagatgtggtggtgcacacctgtagtcccaactattcggcaggctgaggcagtagaatcgcttgaacctgggaggcggagattgcagtgaaccaagatcgggccactgcactccagcttgggtgacagagcaagactccatctcaaaaaaattataaataactctttgcaaataggaaagtgaagctcaagggtaaccagtgaggctatgaaattgccagtgaattaagaccagggctagagtcaacagtccagaacccctatccgtatgaacaggggcccgtttctggttgaaatcaaggttaggatgcaactgagaaaataaaagactgcactttggagaggcaagcacgctatccgggttgttgttttgttttatgtcttggtgcttaggtgaggacttagctgggtttattcaaagtgggcgggtctgggctattcttgagaatgtcccttccatttctgagaacaagtcagccccttctacctgcctccacccaggagactgatgcacaagatctgtttgtgaaagcctgatttaaaaagaaaaaaaaaattccttaagccaaatggtgttccaagttggttgctgtgacaacctccaggaagagccacttgttaccctctattctttctagtgctttcagtcagtggcaacacataggccccttggaccgtggggatggcggccctgagattctgtcagtgggaccaccctgggcctcctttctacctccactcagcaccctgttggccaaggagaatttctgcggtgggaggcagtgctctgctagtcaggattgataaacagctgggcacaccgaaacagtgtaccaacgaattcaccaaccaggggtttctttccctaccctttgtgaaaaccaatcaattactagatgagtggatggatgcagaaaaatctgggctgagccaaagtcccttttggaaatacaagccataacattcgaaggacatcagcgaccttggcttgtttaggtgattttacttccagctgcaggtagtcttgacaaggagtgtttaaacagaaggctcaagatgcattccttgtgtaggtcggagagagcacttctaatgttaagtggggtacagatcagctgcccccccacgtagcctggacatcgtcttatccccataatccttgccatccctacaaggcccatcgccaccaccttttcccaggtttattgaggtatgattgacatccagtaaaattcaccctttggaaatatacagctctgtgaattttgacaaatttagtgtcttgtgaccatcaccaagatcaacctgtttttaaccctccaaaaaattcccttctcctgccctctttccctggcaaccctgattgattatctgatcctataattttgccttttctagaatgtcatataaatggagtcacactgatgtcgccttttgagtctggcatctttccctcagcttaatgcttttgagtcattcatgatgtgtgcgtgtggtttgttccttctccttgccgggaagtatttcattgcatgggcgtactactctgcttctttatttttacactgagcctttcgccctggaagttcttggcccagggtcttcaacttgtttgcacgaccacttccagcttgctgcttccttcagttccccaggctcctcctccaaatgccagctgtgcccacaagctgttcttagggctcacactcgccttttggcgcgtggtgggtttttggtagtgcagaaagaatccagggatgggaggggaagggacggatgggtgctcaattgctgctcacgtctgctgcaacctgaagcttgcatctcagccagcagatctgctcccttctgggacccaggcttcagtgtcacacggtccttggctatgtattgggcgttggaggctttgaaaggcgagcagaagcagcatggacaagaaggctggggctggccctggggctcatcatgatgctttcctggatctgttgcttcatctgcaagctgagggtgtttgttctagatgagtgtctcaggccaccggcaactgcatgtacctcctccctttctcatttccaatgatgtaccctgtacacgtgttcatgctgtgtctggctctcatctgcacaatcgtgcatagaattgcctcaagtcctggtgagagagatgccgtggtacttttccatttagattcaaatggagctaaaattaagagttttatgagctgttaagaatgaggtagtttctcctaggaccccccaaagacagtgcaagtaatgaccgtttggatctcattcgtcgatctttgatagtatgttctggagtctactccccaggagccaggacaggcgtgaagatggagtccttgtcgcagctggagccttgcctagctggtgatcacacagcctggcctgtacctgcaccccactggatggtggtacatggtggcagggacaggaccacacccagttaaggccagaccaggctgagtgtgacccctgaggtaaacactccactaagctgtgtcttgttcatgccccctgctcagtgaaaggtgagtcccgagaccagttgggtacctctctatgcgaaccagagacatttctggatccaggccaggtgaagattagggccaggaagcctgagcccccggggcctcaaggtagggagccgaagaggctgccaggactctgctgggttgaaatttgccggggaggactcttgtctccccctcaggagtatttttgttgaggctttcctggaggtgaagaagcaattcccattgcagcaggttagagcgagaatcagacagagggcaaaaaccaattcgcttctccccacgttctaaatgctggggcatggctgtcaggagggcttcctgggaggtgtctctgggggtggggtgaggttggggcgatggcctttggagattgcgtgtggtgttcaggactgttccttggtgtttgagggaaactttagtgggattgcagtggaatgtaaggtcagggcacgtgggtgctctctcggggtggggtgactgggagacctagagggaaagcctgctatgcagggggagagcacaggactggccctgctctgcggcctcctttgtcccataacctgaagttaagtcacatcccctgtcgggacctccgtgcactcatctgtcaagtgggggcgcttcccttccagcatcacctgcagcagacgggctctcgggagtcgtgggttccaggcagctgtgtggacccagggacagacattcaaagggacgccagccatccttagtgacaggggccccaacttagcatcccttcccttccgttaggaaggagatgaccggaagcaaccccttcacagacacgagcacatcggcaaaccctatgaaagtggaattttctaacaaaataaacttgcttgtttgatctgttttctgtaacttttgctaaatactttatacatttttcatgttaaagagccgtgtctcccgccagcactcctcaccccggtatgaatgtgtttcctccacattgtatatccttccaccctctggctgcctagatcagtaaataaaattgatgtaatataatttataagtaacactgttgaaaccctgatcccagtggaggctgtaacccacctgcccccgcaccacccccctgacccctgttaccgcatttgtgtgtattaatgctgaagaattaaatgtttaaagagtttaaattttgaaggcgtttgctatatacagttgtcctgcattattataaagagttttcaggaagtt

SEQ ID NO: 262245 - DNA, 1944 bp, Artificial Sequence
  derived and/or modified sequence
tttcccggagaggctgccatgaagaggaagccggcggagtcttggtgctgagtctgagggcttcaggcaggacccaagactctcctctgaggtagcagcccccagagaaggttagctgttctctgatgaagcctggaatggtcccccctccgccgggagaagaaagccagacggtcatccttccacctggctggcagagctacctgtcgcctcagggccggcggtactatgtcaacacgaccaccaatgagaccacctgggaacgtcccagcagttctcctgggattccagccagccctggctctcacaggagctctctgcctccaacagtgaatggataccacgcatcagggaccccagcgcaccctccagagactgcccacatgagtgtccgaaaatccaccggtgattcccagaacctgggatcctcatcgccaagcaaaaagcagagcaaggaaaacaccatcacaataaactgtgtgacgttccctcacccagacacgatgccggaacagcagctgctgaaaccaaccgagtggagctactgcgactacttctgggctgataagaaggacccccaaggcaacggcaccgtggctgggtttgaactactgctccagaaacagctgaagggcaaacaaatgcagaaggaaatgtcagaattcatccgggaaaggataaagattgaagaagactatgcgaagaacttagctaagctctctcagaactccttggcttcacaggaggaaggctccttgggagaggcgtgggcccaggtgaagaagagcctggcggacgaagcagaagttcacctcaagttctctgccaagcttcacagcgaggtggagaagcccctgatgaacttccgtgagaacttcaagaaagacatgaagaagtgcgaccaccacattgccgaccttcgcaagcagctcgccagccgctatgcctcggtggagaaggcccggaaagccctcacagagcggcagagagacctggagatgaagacccagcagctggagatcaagctgagcaacaagacagaggaggacatcaagaaggcgcggagaaagtccacacaggctggagacgacctcatgcgctgtgtggatctctacaaccaggcccagtccaaatggtttgaagagatggtgaccaccacattggagctagagcggctggaggtggagagggtagagatgatccggcagcacctgtgccagtacacgcagctgcggcatgaaacagacatgttcaaccaaagcacagtcgagcccgtggatcagctgcttcgaaaagtggacccggccaaagacagggagctgtgggtcagagagcacaagacgggcaacatccgccctgtggacatggagatctagatgggcctgtgcagcttcggggggtcctgcccccaccctgccagcccttcccagtctcattagaggaagctttccaaagttctcagttatcaagacctcatccagctcgtccaaaggcttcagggatggaaacaaaccagctcgtctcagaggccagcaagctggggcctgtccgccacggtgccctgtgcacctttgggctgccctggcccccactctcccgggccgcccaccacaggctcttaatggggccgggtcagtcctacatgtgagatgggttagggcaagtctttgccatcccccagatggctctgtcttcttgtgtatggcagggctgggactgctgtcccttgtacagttttctgtcactggtgggcactggacaggcatagcagactctcttgtggccacactaggttgtcgcctttcaggcagtgtcccgccacctttgcttcccgctccttctggacattccagagccctgcaccaaacccttacttggtgtctgcacctcctttccctctctccatcttccaatccctggaaaagtctggtctgagtgtgactt

SEQ ID NO: 262246 - DNA, 1799 bp, Artificial Sequence
  derived and/or modified sequence
cctctctgctcccagaggagctgtcctctgtgcaggggctctgaatgctcaggtgcttctcactgctcatgctcacgcaaccccggaggtcacgtgtgtgctgcctctgacctcaggggtttatgggccgcagacttcccaatgtcacgctactgtaggaagcctggaatggtcccccctccgccgggagaagaaagccagacggtcatccttccacctggctggcagagctacctgtcgcctcagggccggcggtactatgtcaacacgaccaccaatgagaccacctgggaacgtcccagcagttctcctgggattccagccagccctggctctcacaggagctctctgcctccaacagtgaatggataccacgcatcagggaccccagcgcaccctccagagactgcccacatgagtgtccgaaaatccaccggtgattcccagaacctgggatcctcatcgccaagcaaaaagcagagcaaggaaaacaccatcacaataaactgtgtgacgttccctcacccagacacgatgccggaacagcagctgctgaaaccaaccgagtggagctactgcgactacttctgggctgataagaaggacccccaaggcaacggcaccgtggctgggtttgaactactgctccagaaacagctgaagggcaaacaaatgcagaaggaaatgtcagaattcatccgggaaaggataaagattgaagaagactatgcgaagaacttagctaagctctctcagaactccttggcttcacaggaggaaggctccttgggagaggcgtgggcccaggtgaagaagagcctggcggacgaagcagaagttcacctcaagttctctgccaagcttcacagcgaggtggagaagcccctgatgaacttccgtgagaacttcaagaaagacatgaagaagtgcgaccaccacattgccgaccttcgcaagcagctcgccagccgctatgcctcggtggagaaggcccggaaagccctcacagagcggcagagagacctggagatgaagacccagcagctggagatcaagctgagcaacaagacagaggaggacatcaagaaggcgcggagaaagtccacacaggctggagacgacctcatgcgctgtgtggatctctacaaccaggcccagtccaaatggtttgaagagatggtgaccaccacattggagctagagcggctggaggtggagagggtagagatgatccggcagcacctgtgccagtacacgcagctgcggcatgaaacagacatgttcaaccaaagcacagtcgagcccgtggatcagctgcttcgaaaagtggacccggccaaagacagggagctgtgggtcagagagcacaagacgggcaacatccgccctgtggacatggagatctagatgggcctgtgcagcttcggggggtcctgctggggaggggggctgggctcccaccatggggcccatgccgagtggatgccccccaccctctctcctgggccactgaggagaggggagagagctggtgattccagaagggtgacccggacagcctagctgggggctcccccatattcccaggcccagaagacagacccacagccctgcccttgtctctgaggctgaagaccccctgactcccatgctgtgcttgccgctctgaaacaaacagaggctggaactttgtggtccttgccgagttttgtaggggtcactgtcacatgcttgtgccctggaagccccaaggctcttcctccagctggctcccttgtctccagggctttggaggatca

SEQ ID NO: 262247 - DNA, 1251 bp, Artificial Sequence
  derived and/or modified sequence
atgaagccaggcatggtgcccccacctcctggagaggagagccagaccgtcatcctgcccccaggctggcagagctacctgagcccccagggccgccgctactacgtgaacaccaccaccaatgagaccacctgggagcggcccagcagcagccctggcatcccagccagccctggcagccacaggagcagcctgccccccaccgtgaatggctaccacgccagcggcaccccagcccaccccccagagacagcccacatgtctgtgaggaagagcactggagacagccagaacctgggcagcagcagccccagcaagaagcagagcaaagaaaacaccatcaccatcaactgtgtgaccttcccccacccagacaccatgcctgagcagcagctgctgaagcccacagagtggagctactgtgactacttctgggccgacaagaaggacccccagggcaatggcaccgtggccggctttgagctgctgctgcagaagcagctgaagggcaagcagatgcagaaggagatgtctgagttcatccgggagcgcatcaagattgaagaagattatgccaagaacctggccaagctgagccagaacagcctggccagccaggaggagggcagcctgggggaggcctgggcccaggtgaagaagagcctggctgatgaggccgaggtgcacctgaagttcagcgccaagctgcacagcgaggtggagaagcccctgatgaacttccgggagaacttcaagaaggacatgaagaagtgtgaccaccacatcgctgacctgaggaagcagctggccagccgctatgcctctgtggagaaggccaggaaggccctgacagagcggcagagggacctggagatgaagacccagcagctggagatcaagctgagcaacaagacagaggaggacatcaagaaggcccggaggaagagcacccaggccggagatgacctgatgagatgtgtggacctgtacaaccaggcccagagcaagtggtttgaggagatggtgaccaccaccctggagctggagcggctggaggtggagcgggtggagatgatccggcagcacctgtgccagtacacccagctgcggcatgaaacagacatgttcaaccagagcacagtggagcctgtggaccagctgctgaggaaggtggaccctgccaaggaccgggagctgtgggtgcgggagcacaagacaggcaacatccggcctgtggacatggagatctag

SEQ ID NO: 262248 - DNA, 1248 bp, Artificial Sequence
  derived and/or modified sequence
aagccaggcatggtgcccccacctcctggagaggagagccagaccgtcatcctgcccccaggctggcagagctacctgagcccccagggccgccgctactacgtgaacaccaccaccaatgagaccacctgggagcggcccagcagcagccctggcatcccagccagccctggcagccacaggagcagcctgcccccaacagtgaatggctaccacgccagcggcaccccagcccaccccccagagacagcccacatgtctgtgaggaagagcactggagacagccagaacctgggcagcagcagccccagcaagaagcagagcaaggagaacaccatcaccatcaactgtgtgaccttcccccacccagacaccatgcctgagcagcagctgctgaagcccacagagtggagctactgtgactacttctgggccgacaagaaggacccccagggcaatggaacagtggccggctttgagctgctgctgcagaagcagctgaagggcaagcagatgcagaaggagatgtctgagttcatccgggagcgcatcaagattgaggaggactatgccaagaacctggccaagctgagccagaacagcctggccagccaggaggagggcagcctgggggaggcctgggcccaggtgaagaagagcctggctgatgaagctgaggtgcacctgaagttcagcgccaagctgcacagcgaggtggagaagcccctgatgaacttccgggagaacttcaagaaggacatgaagaagtgtgaccaccacatcgctgacctgaggaagcagctggccagccgctatgcctctgtggagaaggccaggaaggccctgacagagcggcagagggacctggagatgaagacccagcagctggagatcaagctgagcaacaagacagaggaggacatcaagaaggcccggaggaagagcacccaggccggagatgacctgatgagatgtgtggacctgtacaaccaggcccagagcaagtggtttgaggagatggtgaccaccaccctggagctggagcggctggaggtggagcgggtggagatgatccggcagcacctgtgccagtacacccagctgcggcatgaaacagacatgttcaaccagagcacagtggagcctgtggaccagctgctgaggaaggtggaccctgccaaggaccgggagctgtgggtgcgggagcacaagacaggcaacatccggcctgtggacatggagatctag

SEQ ID NO: 262249 - DNA, 1251 bp, Artificial Sequence
  derived and/or modified sequence
atgaagcccggcatggtgccccccccccccggcgaggagagccagacagtaatacttccgccggggtggcagagctatctaagtccccaaggccgacgatattatgtgaataccaccaccaacgaaactacctgggagcgcccaagttcaagccccggaatccccgccagcccaggaagtcaccggtccagcctgccaccaaccgtcaacggatatcacgcatccggaacccccgcacacccacctgagacagctcacatgtctgtacgcaagagcactggagactcccagaatttgggcagctctagcccatccaagaaacagtccaaggagaataccatcaccatcaactgtgtgacgtttcctcacccagatacgatgccagagcagcagctccttaaacccacagagtggtcttattgcgactacttctgggccgacaagaaagatccccagggcaatggcacagtagccggctttgagctgctgctccagaagcagctgaagggtaaacaaatgcagaaggaaatgtccgagttcattagagaacggatcaagattgaggaggattatgctaaaaatttagcaaaattgagccagaactctcttgcgtcccaggaggaaggctccctgggagaggcctgggcccaggtgaaaaaatccctggctgatgaggctgaggttcatctgaaattctcggctaaactgcatagtgaggtggagaaacctctcatgaactttagggagaacttcaaaaaagatatgaaaaaatgtgaccaccatatcgccgatctaaggaaacaattagcctccaggtacgcttctgtagaaaaagctcgcaaagcccttacagaaaggcaacgggatctagaaatgaaaacacaacagctggagataaaactgtctaacaagacggaggaggacataaaaaaggctcggaggaaatctacccaggccggcgatgacctgatgagatgcgtggacctttataaccaggcccagtccaaatggttcgaggaaatggttaccacaacactggagcttgagaggctcgaagtggagcgggtggagatgattaggcagcatctgtgccaatacacccagttacgacatgagaccgatatgttcaaccaaagcaccgttgaaccagttgaccagcttctgcgcaaagtagatccagccaaggacagagagctatgggtgcgtgaacataagacaggcaatatcaggccggtagatatggagatctag

SEQ ID NO: 262250 - DNA, 1248 bp, Artificial Sequence
  derived and/or modified sequence
aagcccggcatggtgccccccccccccggcgaggagagccagaccgtgatcctgccacctggctggcagagctatctgtcaccacagggccgcagatattacgtaaacaccaccactaatgagacgacctgggaaagaccttcttcgagcccggggattcctgcatctcccggctctcatcggtcctctctacctccaaccgtgaatggctaccacgcctcaggtacacctgcccaccctcctgagacagcccatatgtccgtcagaaagagtacaggtgacagccaaaacctcggatcttcaagtccctcaaaaaagcagtcaaaggagaacacaatcacaatcaactgtgtgactttcccccaccctgataccatgcccgaacagcagctgctgaaacccaccgaatggtcctactgcgactacttctgggctgacaaaaaggatcctcagggcaacgggactgttgctggttttgagttgctcttgcaaaagcagctgaaggggaaacagatgcagaaagagatgagcgagttcattcgggaacgaattaaaatcgaggaggattacgctaaaaacctcgccaagctttcccagaattcacttgcgtctcaggaagaaggaagtctgggggaggcctgggcacaggtcaagaaatccttagccgacgaggctgaggtgcatctaaagttctctgccaaactgcactcggaagtggaaaaaccgctgatgaatttcagagagaactttaagaaggacatgaaaaaatgcgaccaccacatcgctgatctgagaaagcagctggcaagccggtacgcttccgtggagaaagcaagaaaggcgctaaccgaaaggcaaagagatctagagatgaagacacagcagttggaaatcaagctttccaacaagacagaagaagacatcaaaaaagcacgccgtaagagtactcaagcaggtgacgatctaatgaggtgtgtggacctgtacaatcaggcacagtctaagtggtttgaagaaatggtgacaacaacccttgaactcgagcggttagaagtcgagcgcgtggaaatgatcagacagcatctctgccagtacacccaactgcgacatgaaaccgatatgtttaaccagtcaactgtagaaccggttgatcaactgctgagaaaagttgaccccgccaaggatcgggagctgtgggtgagagagcataagacagggaatatacgcccagtagacatggaaatttag

SEQ ID NO: 262251 - DNA, 1251 bp, Artificial Sequence
  derived and/or modified sequence
atgaagcccggcatggtgccccccccccccggcgaggagagccagactgttatactaccccccggatggcagtcctacctttcgccgcaaggacggaggtactacgtcaatactactaccaatgagacgacttgggagagacccagtagctctcctggcatccctgcatcgcctggttcccaccgcagctcgctcccaccaaccgtcaacgggtaccatgcttctggtactccggcccaccccccagaaactgctcacatgtctgtgaggaagtctaccggcgactcacagaaccttggcagcagctctccaagtaagaaacagtcaaaggaaaataccattactatcaattgtgtcaccttccctcatcctgacacaatgcctgaacaacagcttctcaagcccacggaatggtcctactgcgactacttctgggcagacaagaaagaccctcagggtaacggcactgttgcgggcttcgagctgctcctgcagaagcagctgaagggtaagcagatgcagaaggaaatgagtgagttcataagggaacggatcaagatcgaagaggactacgccaagaatctcgcgaagttgtctcagaactccttggctagccaagaggaaggtagcctaggcgaggcatgggctcaggtgaagaagtcactggcggacgaagccgaggtgcaccttaaattttctgcaaagctgcacagcgaagtagagaaaccacttatgaattttcgtgagaacttcaagaaggacatgaagaaatgcgatcatcacatcgctgacctgaggaagcagttagcgtcacgatacgcttctgtcgaaaaggcacggaaggccctcaccgagaggcagagggatctggagatgaagacccagcagctcgagattaagctctcaaataagactgaggaggatatcaaaaaggcaaggagaaagagcacacaagccggggatgatctgatgagatgcgtggatctatataaccaggcccagagtaaatggtttgaggagatggtgaccacaacactggaattagaacggttggaggtggagagagtggaaatgattcgccagcacttatgccagtacacccagctaagacatgagacagacatgtttaatcagagtactgtggaacccgtggatcagctcctaaggaaagtggatccagcaaaggatagggagctttgggtccgggagcacaaaaccggaaatatccggcccgtagatatggaaatctag

SEQ ID NO: 262252 - DNA, 1251 bp, Artificial Sequence
  derived and/or modified sequence
atgaagcctggcatggtccccccaccacctggtgaggagtctcagaccgtgatattgcctcccggatggcaatcatatttgtcacctcagggacgtcggtattatgtcaataccacaacaaatgagaccacttgggagagacccagctcaagccctggaatccctgcctcacccggttcgcaccggagctccctgcctccgacagtcaatggttaccacgccagtggcacacccgctcatccacccgagacagcacatatgtctgtccgaaaaagcacaggcgattcgcagaatctgggctctagttcacccagcaagaagcagtctaaggagaatacaatcaccatcaactgtgtcacgttcccacaccccgacactatgcccgagcaacagctgctcaaaccgactgaatggtcctactgtgattacttctgggccgataaaaaggaccctcagggcaatggcacagtggcgggtttcgagctgctgctccaaaaacagctgaaagggaagcagatgcaaaaggagatgagtgaattcatccgggagaggatcaaaattgaggaagattatgctaagaacctggccaaattgtcacaaaactccctggcaagccaggaggagggctccctgggtgaagcctgggcccaagtaaaaaagtctctcgccgacgaagcagaagtacacctgaaatttagtgcgaagttacacagtgaagtcgagaaaccactcatgaacttccgggaaaactttaagaaggatatgaagaaatgcgatcaccatattgccgatctccgcaaacagctcgctagcaggtatgcctccgtggagaaggccaggaaagcccttactgagcgtcaacgggatcttgagatgaagacgcagcaacttgaaattaaactgagcaacaagactgaggaagacattaaaaaagcgcgaagaaagtccacccaagccggagacgatctgatgcgatgtgtggacctctacaaccaggcacaaagcaagtggtttgaggagatggtgactactacactggaactggaacggttagaagtggaacgggtggagatgatccgccagcatctatgccaatacacacagctcaggcatgagacagacatgttcaaccaatccacagtggaaccagtcgatcagctgcttaggaaagtcgaccccgcaaaggaccgcgaattatgggtcagggaacataaaaccggaaacatcaggcctgtagacatggagatctag

SEQ ID NO: 262253 - DNA, 1248 bp, Artificial Sequence
  derived and/or modified sequence
aagcccggaatggtgcccccaccacctggcgaagagagtcaaactgtgatcctgccaccaggctggcagagctatctatccccacagggaagaagatactatgtgaacaccaccaccaatgaaacgacttgggagagaccatctagcagccccggtatcccagcatctcctggcagccataggagtagcctgccacctactgtgaatgggtaccacgcatccgggacacccgcacatccacccgagacagctcacatgagcgtccgaaaatccaccggggattcgcagaatctgggtagttcttcaccgtccaaaaaacagagcaaggagaataccattacaattaattgtgtcacgttccctcaccccgacactatgcccgagcagcagcttctcaagcctaccgaatggtcctactgcgattacttctgggccgataagaaggatcctcaaggcaacggcaccgtagcagggttcgagctgctgctgcagaagcagctaaaaggcaaacagatgcagaaggaaatgagtgaattcattcgtgaaaggatcaagattgaagaggattatgccaaaaatcttgccaaattaagccaaaactctctggcctcccaagaggaggggagcctcggtgaggcctgggcgcaagtgaaaaaaagcctggccgatgaagctgaggtacacctcaagttctcagctaaacttcacagcgaagtagagaagcctctgatgaatttccgtgagaatttcaaaaaggacatgaaaaaatgcgaccaccacatcgcagaccttcgaaagcagctggcatcccgctacgcaagtgtggaaaaagccagaaaggcgctgaccgagcgccagcgcgatttggaaatgaagactcagcagcttgaaataaagcttagtaataagacagaagaggatatcaagaaagcacggcgaaaaagcacccaagctggggatgatctcatgcgatgcgtcgatctgtacaatcaagctcagagtaagtggtttgaagagatggtaacgaccacattggaactggagcgccttgaagtcgaacgcgtggagatgattcgacaacacctgtgccaatacacccagctgcggcacgagaccgatatgttcaaccagtcaacagttgaaccagtagatcagctgctgagaaaagtcgatcctgccaaagaccgcgaactgtgggttcgcgaacacaagactggtaacataagacccgtggatatggagatatag

SEQ ID NO: 262254 - DNA, 1251 bp, Artificial Sequence
  derived and/or modified sequence
atgaaacccggtatggtgcctcctcctcccggtgaagaatctcagaccgtgatactcccacctggatggcagagctacttaagtccccaaggcagaaggtactacgtcaacactacgaccaacgaaaccacatgggaaagacctagtagttcccccggaattccggcaagtcctggcagtcatcgttcttccctaccacccaccgtcaatggctaccacgcaagcgggacacctgctcaccctcccgaaactgctcacatgagtgtcaggaaaagcacaggggactcccaaaacttgggctccagctccccttcaaagaagcagagcaaggagaacacgattaccattaactgcgtaaccttcccacatcccgacactatgcctgagcaacaactcctcaaacctaccgaatggtcttactgtgactatttctgggcagacaagaaagatccgcaaggcaatggcacagttgccggtttcgagctgttgctgcagaaacagttaaaggggaagcagatgcagaaagagatgtctgaatttatccgagaacgcatcaaaatcgaagaagattacgccaaaaacctcgcgaagctgtcccaaaactcattggcatcacaagaagaaggatccctgggcgaggcttgggctcaagtcaagaaaagtcttgccgatgaggctgaagtacatctgaaattctcagctaagctgcactctgaggtggagaagccgctcatgaacttcagggagaactttaagaaggatatgaagaaatgtgaccaccacattgccgatcttaggaaacagctcgcgtccaggtacgcctctgtcgagaaagcaagaaaggccctcacagaacggcaaagagacctcgaaatgaagactcagcagctggagataaaactgtctaataagacagaagaggacataaaaaaagcgcgaaggaaatcaacccaggcaggggacgacctgatgaggtgcgttgacctctataaccaggcacagagcaagtggtttgaagagatggtgaccaccaccctggagctcgagcggctcgaagtcgagcgcgtggagatgattcgccagcacttgtgtcaatacacacaattgagacacgagacagatatgttcaatcaaagcactgtcgaacctgtggatcaacttctgaggaaggtcgaccccgctaaggaccgtgaactttgggttcgcgagcacaagaccggaaacattcgccctgtagacatggaaatttag

SEQ ID NO: 262255 - DNA, 1251 bp, Artificial Sequence
  derived and/or modified sequence
atgaagcccggcatggtgccccccccccccggcgaggagagccagaccgtgatcctgccccccggctggcagagctacctgagcccccagggcagaagatactacgtgaacaccaccaccaacgagaccacctgggagagacccagcagcagccccggcatccccgccagccccggcagccacagaagcagcctgccccccaccgtgaacggctaccacgccagcggcacccccgcccacccccccgagaccgcccacatgagcgtgagaaagagcaccggcgacagccagaacctgggcagcagcagccccagcaagaagcagagcaaggagaacaccatcaccatcaactgcgtgaccttcccccaccccgacaccatgcccgagcagcagctgctgaagcccaccgagtggagctactgcgactacttctgggccgacaagaaggacccccagggcaacggcaccgtggccggcttcgagctgctgctgcagaagcagctgaagggcaagcagatgcagaaggagatgagcgagttcatcagagagagaatcaagatcgaggaggactacgccaagaacctggccaagctgagccagaacagcctggccagccaggaggagggcagcctgggcgaggcctgggcccaggtgaagaagagcctggccgacgaggccgaggtgcacctgaagttcagcgccaagctgcacagcgaggtggagaagcccctgatgaacttcagagagaacttcaagaaggacatgaagaagtgcgaccaccacatcgccgacctgagaaagcagctggccagcagatacgccagcgtggagaaggccagaaaggccctgaccgagagacagagagacctggagatgaagacccagcagctggagatcaagctgagcaacaagaccgaggaggacatcaagaaggccagaagaaagagcacccaggccggcgacgacctgatgagatgcgtggacctgtacaaccaggcccagagcaagtggttcgaggagatggtgaccaccaccctggagctggagagactggaggtggagagagtggagatgatcagacagcacctgtgccagtacacccagctgagacacgagaccgacatgttcaaccagagcaccgtggagcccgtggaccagctgctgagaaaggtggaccccgccaaggacagagagctgtgggtgagagagcacaagaccggcaacatcagacccgtggacatggagatctag

SEQ ID NO: 262256 - DNA, 1248 bp, Artificial Sequence
  derived and/or modified sequence
aagcccggcatggtgccccccccccccggcgaggagagccagaccgtgatcctgccccccggctggcagagctacctgagcccccagggcagaagatactacgtgaacaccaccaccaacgagaccacctgggagagacccagcagcagccccggcatccccgccagccccggcagccacagaagcagcctgccccccaccgtgaacggctaccacgccagcggcacccccgcccacccccccgagaccgcccacatgagcgtgagaaagagcaccggcgacagccagaacctgggcagcagcagccccagcaagaagcagagcaaggagaacaccatcaccatcaactgcgtgaccttcccccaccccgacaccatgcccgagcagcagctgctgaagcccaccgagtggagctactgcgactacttctgggccgacaagaaggacccccagggcaacggcaccgtggccggcttcgagctgctgctgcagaagcagctgaagggcaagcagatgcagaaggagatgagcgagttcatcagagagagaatcaagatcgaggaggactacgccaagaacctggccaagctgagccagaacagcctggccagccaggaggagggcagcctgggcgaggcctgggcccaggtgaagaagagcctggccgacgaggccgaggtgcacctgaagttcagcgccaagctgcacagcgaggtggagaagcccctgatgaacttcagagagaacttcaagaaggacatgaagaagtgcgaccaccacatcgccgacctgagaaagcagctggccagcagatacgccagcgtggagaaggccagaaaggccctgaccgagagacagagagacctggagatgaagacccagcagctggagatcaagctgagcaacaagaccgaggaggacatcaagaaggccagaagaaagagcacccaggccggcgacgacctgatgagatgcgtggacctgtacaaccaggcccagagcaagtggttcgaggagatggtgaccaccaccctggagctggagagactggaggtggagagagtggagatgatcagacagcacctgtgccagtacacccagctgagacacgagaccgacatgttcaaccagagcaccgtggagcccgtggaccagctgctgagaaaggtggaccccgccaaggacagagagctgtgggtgagagagcacaagaccggcaacatcagacccgtggacatggagatctag

SEQ ID NO: 262257 - protein, 476 aa, Artificial Sequence
  derived and/or modified sequence
MSGARCRTLYPFSGERHGQGLRFAAGELITLLQVPDGGWWEGEKEDGLRGWFPASYVQLLEKPGMVPPPPGEESQTVILPPGWQSYLSPQGRRYYVNTTTNETTWERPSSSPGIPASPGSHRSSLPPTVNGYHASGTPAHPPETAHMSVRKSTGDSQNLGSSSPSKKQSKENTITINCVTFPHPDTMPEQQLLKPTEWSYCDYFWADKKDPQGNGTVAGFELLLQKQLKGKQMQKEMSEFIRERIKIEEDYAKNLAKLSQNSLASQEEGSLGEAWAQVKKSLADEAEVHLKFSAKLHSEVEKPLMNFRENFKKDMKKCDHHIADLRKQLASRYASVEKARKALTERQRDLEMKTQQLEIKLSNKTEEDIKKARRKSTQAGDDLMRCVDLYNQAQSKWFEEMVTTTLELERLEVERVEMIRQHLCQYTQLRHETDMFNQSTVEPVDQLLRKVDPAKDRELWVREHKTGNIRPVDMEI

SEQ ID NO: 262258 - DNA, 1431 bp, Artificial Sequence
  derived and/or modified sequence
atgagcggcgcccgctgtagaacactgtaccctttcagcggggagaggcacggccaggggctacggttcgccgccggagagcttatcaccttgctgcaggttcctgacggagggtggtgggagggggaaaaagaggacgggctacgtggatggttccccgctagctacgtacagctgctcgagaagcccggaatggttccgccccctcctggagaagaaagccagaccgtgatacttcctcccggatggcagagttatttgtctccgcaggggcggaggtattacgtcaataccactacaaacgagaccacttgggagcgaccttctagcagtccaggcataccagcctcacctggcagtcatcgcagtagcctgccccctactgtgaatggttaccatgctagcggcactccggcccaccccccggaaactgcccacatgagcgtgaggaagtccacaggagattcgcaaaacttagggagcagcagtccctccaaaaaacagtccaaagagaacaccatcacaatcaattgcgtgacatttccccatcccgacacaatgccagagcagcagctgcttaagcccacggaatggagctattgcgattacttttgggcagacaagaaggacccccagggaaatggaactgttgccgggtttgagcttctgctgcagaaacagctcaagggcaagcagatgcaaaaggaaatgtctgagttcatcagggaacgcattaaaatagaggaagattatgctaagaacctggcaaagctgtcacagaatagccttgcttcacaagaggaaggatcgttgggagaggcgtgggcacaagttaaaaagagtttggcggatgaagcggaagtccacctgaaattctctgctaaactccattccgaggttgagaaaccactgatgaacttcagggagaacttcaagaaggatatgaagaagtgtgaccaccatattgccgacctgaggaagcagcttgccagccgctacgctagcgtggaaaaagcgcgtaaagctctgaccgaacgccagcgcgaccttgagatgaaaacacagcagctcgagatcaagctgtcaaataaaactgaagaagacataaaaaaggcccggcggaagtctacccaagctggagacgacttgatgaggtgcgtggatctgtacaaccaggcacagtctaaatggtttgaggagatggtcactaccacccttgaactggaacgattggaggtggaaagggtcgagatgatccgtcaacatttgtgccagtacacccagctccggcatgagacagacatgtttaaccagagcactgtcgagccggtggaccaactactccgcaaggtggacccagcaaaggatcgcgagttgtgggtgcgcgaacataaaacgggtaacattcggcctgtggatatggaaatctag

SEQ ID NO: 262259 - DNA, 8211 bp, Artificial Sequence
  derived and/or modified sequence
gtcccccgcctgcctgaggacccccgcgcaccccagagacggcgcgcgcccagagcgcgggagcccggagcgccgggcgcctgggaccccgcggagccgctgcccagcccgtggggctcggcgggaatgcaggctgcgctgtgaacccgggcgccaaggccatgtccggcgctcgctgccggaccctgtaccccttctccggggagcggcacggccaggggctgcgcttcgccgcgggcgagctgatcacgctgctgcaggtcccggacggcggctggtgggaaggcgagaaggaggacgggctccgtggctggttcccggcgagctacgtgcagttgctggagaagcctggaatggtcccccctccgccgggagaagaaagccagacggtcatccttccacctggctggcagagctacctgtcgcctcagggccggcggtactatgtcaacacgaccaccaatgagaccacctgggaacgtcccagcagttctcctgggattccagccagccctggctctcacaggagctctctgcctccaacagtgaatggataccacgcatcagggaccccagcgcaccctccagagactgcccacatgagtgtccgaaaatccaccggtgattcccagaacctgggatcctcatcgccaagcaaaaagcagagcaaggaaaacaccatcacaataaactgtgtgacgttccctcacccagacacgatgccggaacagcagctgctgaaaccaaccgagtggagctactgcgactacttctgggctgataagaaggacccccaaggcaacggcaccgtggctgggtttgaactactgctccagaaacagctgaagggcaaacaaatgcagaaggaaatgtcagaattcatccgggaaaggataaagattgaagaagactatgcgaagaacttagctaagctctctcagaactccttggcttcacaggaggaaggctccttgggagaggcgtgggcccaggtgaagaagagcctggcggacgaagcagaagttcacctcaagttctctgccaagcttcacagcgaggtggagaagcccctgatgaacttccgtgagaacttcaagaaagacatgaagaagtgcgaccaccacattgccgaccttcgcaagcagctcgccagccgctatgcctcggtggagaaggcccggaaagccctcacagagcggcagagagacctggagatgaagacccagcagctggagatcaagctgagcaacaagacagaggaggacatcaagaaggcgcggagaaagtccacacaggctggagacgacctcatgcgctgtgtggatctctacaaccaggcccagtccaaatggtttgaagagatggtgaccaccacattggagctagagcggctggaggtggagagggtagagatgatccggcagcacctgtgccagtacacgcagctgcggcatgaaacagacatgttcaaccaaagcacagtcgagcccgtggatcagctgcttcgaaaagtggacccggccaaagacagggagctgtgggtcagagagcacaagacgggcaacatccgccctgtggacatggagatctagatgggcctgtgcagcttcggggggtcctgctggggaggggggctgggctcccaccatggggcccatgccgagtggatgccccccaccctctctcctgggccactgaggagaggggagagagctggtgattccagaagggtgacccggacagcctagctgggggctcccccatattcccaggcccagaagacagacccacagccctgcccttgtctctgaggctgaagaccccctgactcccatgctgtgcttgccgctctgaaacaaacagaggctggaactttgtggtccttgccgagttttgtaggggtcactgtcacatgcttgtgccctggaagccccaaggctcttcctccagctggctcccttgtctccagggctttggaggatcagggtagggagggctctgtctctaagccaggtgtcaggatcagaatcatgggtagaaggtgccattcagctcacagccgcacccagaatcctttgcagccctccttctttatttttttcccattgcattctgggagtccacatctggctttctcagccactgttcatcaccaggggttttaggaggaaggcttggctcctgtcttcccagacccaccatgcctggagaggtcaggatggaactacctcattcggcaaattagccccaaattgagcgctgaatcgtgtcccatgagatcaggcgccatctgtaaagtctcctctggaaatgccaatccatccttcccccagctgcttcctcggggaggcccctgcccccaccctgccagcccttcccagtctcattagaggaagctttccaaagttctcagttatcaagacctcatccagctcgtccaaaggcttcagggatggaaacaaaccagctcgtctcagaggccagcaagctggggcctgtccgccacggtgccctgtgcacctttgggctgccctggcccccactctcccgggccgcccaccacaggctcttaatggggccgggtcagtcctacatgtgagatgggttagggcaagtctttgccatcccccagatggctctgtcttcttgtgtatggcagggctgggactgctgtcccttgtacagttttctgtcactggtgggcactggacaggcatagcagactctcttgtggccacactaggttgtcgcctttcaggcagtgtcccgccacctttgcttcccgctccttctggacattccagagccctgcaccaaacccttacttggtgtctgcacctcctttccctctctccatcttccaatccctggaaaagtctggtctgagtgtgacttgggaagctttcagtgctgctgtttggcccagctcattactttctccctttctctaccacagcaaacacattctccaccatgtcagtctaaagagtctaaaggggccgggagaagcatgagcgaggggcagattctagtcgggagcccatgccctggaaatccatctttcttcatctttcccattgaccactttgggtttgacctgcacatctgcagtgagggcagaattcaacaagcacaactcactggtctttcagtcaacgtgctagaaaccgatgacttattaatctctaattttttggcgcctctttcattgaatgagaattgctttcgtatagttcacattagaaaaatgcctaatatactaaagtaaaccaaacgttgtcacttttctcttgttcttgaaacattgcaaccaaaaaggtcagcacaaaggccttcacctacgtgaagacctcctggtaggatctgtccatgggatggagaaccactctgtccagatctggggttgggtcatgacaccagctaccaattttagaatattatttcttggtttctttatgaaaaatgggtgctagtggtaattgctttgtggcttagtaaactactctgtggatgatttccaaacattcaaagccaatagccttgttattaacaagatattttgagtacaatatggctcattgacttttccattacatctgaggattccagagtcctctgttcatccctgggatagagtgagccctcttgcgtcttccagggtagctcaggttggcccagtttgggccagtccatttttggaggtcactctttcccccctcatcccctcacctccttctctttacccccttcacgtacttcctttctttcttccctctgttattcattcatcaagcaggttaaagccattgtgctaagatctaatctgaggacactataatggccctgtcgtcagggaagcccgtgatcgctcgttttcaggggtcttaccggtcagcaaccttggcattgatacataggcactctacagaatttaagttttcagaggtaagtctgttgttctgattaatctgcattcattcagcgaatgctcaagacaagccaggcatgctgagaagcggcgctctagttgtatgtaagatgggcattcctctgctctcctctattctccatgtcgactgagaagagtataataagaacattgtaccctctccacacttaaccctctgggattctttattataatataaaccaccgtcgtgaggcatttacctgttggatggaaggtagacagcaacaagattttaatcacctggtcaccagaccctcacggcccatatccaattcgaatttcagaaatttctctgtttgctttaaataactctttacaaataagggtcgggcacggtggctcacgcctgtaatcccagctctttgggaggccgaggtgggcagatcacgaggtcaggagatcgagaccatcctggctaacatggtgaaaccccgtctctgctaaaaatacaaaaaattagccagatgtggtggtgcacacctgtagtcccaactattcggcaggctgaggcagtagaatcgcttgaacctgggaggcggagattgcagtgaaccaagatcgggccactgcactccagcttgggtgacagagcaagactccatctcaaaaaaattataaataactctttgcaaataggaaagtgaagctcaagggtaaccagtgaggctatgaaattgccagtgaattaagaccagggctagagtcaacagtccagaacccctatccgtatgaacaggggcccgtttctggttgaaatcaaggttaggatgcaactgagaaaataaaagactgcactttggagaggcaagcacgctatccgggttgttgttttgttttatgtcttggtgcttaggtgaggacttagctgggtttattcaaagtgggcgggtctgggctattcttgagaatgtcccttccatttctgagaacaagtcagccccttctacctgcctccacccaggagactgatgcacaagatctgtttgtgaaagcctgatttaaaaagaaaaaaaaaattccttaagccaaatggtgttccaagttggttgctgtgacaacctccaggaagagccacttgttaccctctattctttctagtgctttcagtcagtggcaacacataggccccttggaccgtggggatggcggccctgagattctgtcagtgggaccaccctgggcctcctttctacctccactcagcaccctgttggccaaggagaatttctgcggtgggaggcagtgctctgctagtcaggattgataaacagctgggcacaccgaaacagtgtaccaacgaattcaccaaccaggggtttctttccctaccctttgtgaaaaccaatcaattactagatgagtggatggatgcagaaaaatctgggctgagccaaagtcccttttggaaatacaagccataacattcgaaggacatcagcgaccttggcttgtttaggtgattttacttccagctgcaggtagtcttgacaaggagtgtttaaacagaaggctcaagatgcattccttgtgtaggtcggagagagcacttctaatgttaagtggggtacagatcagctgcccccccacgtagcctggacatcgtcttatccccataatccttgccatccctacaaggcccatcgccaccaccttttcccaggtttattgaggtatgattgacatccagtaaaattcaccctttggaaatatacagctctgtgaattttgacaaatttagtgtcttgtgaccatcaccaagatcaacctgtttttaaccctccaaaaaattcccttctcctgccctctttccctggcaaccctgattgattatctgatcctataattttgccttttctagaatgtcatataaatggagtcacactgatgtcgccttttgagtctggcatctttccctcagcttaatgcttttgagtcattcatgatgtgtgcgtgtggtttgttccttctccttgccgggaagtatttcattgcatgggcgtactactctgcttctttatttttacactgagcctttcgccctggaagttcttggcccagggtcttcaacttgtttgcacgaccacttccagcttgctgcttccttcagttccccaggctcctcctccaaatgccagctgtgcccacaagctgttcttagggctcacactcgccttttggcgcgtggtgggtttttggtagtgcagaaagaatccagggatgggaggggaagggacggatgggtgctcaattgctgctcacgtctgctgcaacctgaagcttgcatctcagccagcagatctgctcccttctgggacccaggcttcagtgtcacacggtccttggctatgtattgggcgttggaggctttgaaaggcgagcagaagcagcatggacaagaaggctggggctggccctggggctcatcatgatgctttcctggatctgttgcttcatctgcaagctgagggtgtttgttctagatgagtgtctcaggccaccggcaactgcatgtacctcctccctttctcatttccaatgatgtaccctgtacacgtgttcatgctgtgtctggctctcatctgcacaatcgtgcatagaattgcctcaagtcctggtgagagagatgccgtggtacttttccatttagattcaaatggagctaaaattaagagttttatgagctgttaagaatgaggtagtttctcctaggaccccccaaagacagtgcaagtaatgaccgtttggatctcattcgtcgatctttgatagtatgttctggagtctactccccaggagccaggacaggcgtgaagatggagtccttgtcgcagctggagccttgcctagctggtgatcacacagcctggcctgtacctgcaccccactggatggtggtacatggtggcagggacaggaccacacccagttaaggccagaccaggctgagtgtgacccctgaggtaaacactccactaagctgtgtcttgttcatgccccctgctcagtgaaaggtgagtcccgagaccagttgggtacctctctatgcgaaccagagacatttctggatccaggccaggtgaagattagggccaggaagcctgagcccccggggcctcaaggtagggagccgaagaggctgccaggactctgctgggttgaaatttgccggggaggactcttgtctccccctcaggagtatttttgttgaggctttcctggaggtgaagaagcaattcccattgcagcaggttagagcgagaatcagacagagggcaaaaaccaattcgcttctccccacgttctaaatgctggggcatggctgtcaggagggcttcctgggaggtgtctctgggggtggggtgaggttggggcgatggcctttggagattgcgtgtggtgttcaggactgttccttggtgtttgagggaaactttagtgggattgcagtggaatgtaaggtcagggcacgtgggtgctctctcggggtggggtgactgggagacctagagggaaagcctgctatgcagggggagagcacaggactggccctgctctgcggcctcctttgtcccataacctgaagttaagtcacatcccctgtcgggacctccgtgcactcatctgtcaagtgggggcgcttcccttccagcatcacctgcagcagacgggctctcgggagtcgtgggttccaggcagctgtgtggacccagggacagacattcaaagggacgccagccatccttagtgacaggggccccaacttagcatcccttcccttccgttaggaaggagatgaccggaagcaaccccttcacagacacgagcacatcggcaaaccctatgaaagtggaattttctaacaaaataaacttgcttgtttgatctgttttctgtaacttttgctaaatactttatacatttttcatgttaaagagccgtgtctcccgccagcactcctcaccccggtatgaatgtgtttcctccacattgtatatccttccaccctctggctgcctagatcagtaaataaaattgatgtaatataatttataagtaacactgttgaaaccctgatcccagtggaggctgtaacccacctgcccccgcaccacccccctgacccctgttaccgcatttgtgtgtattaatgctgaagaattaaatgtttaaagagtttaaattttgaaggcgtttgctatatacagttgtcctgcattattataaagagttttcaggaagtt

SEQ ID NO: 262260 - DNA, 4277 bp, Artificial Sequence
  derived and/or modified sequence
gtcccccgcctgcctgaggacccccgcgcaccccagagacggcgcgcgcccagagcgcgggagcccggagcgccgggcgcctgggaccccgcggagccgctgcccagcccgtggggctcggcgggaatgcaggctgcgctgtgaacccgggcgccaaggccatgtccggcgctcgctgccggaccctgtaccccttctccggggagcggcacggccaggggctgcgcttcgccgcgggcgagctgatcacgctgctgcaggtcccggacggcggctggtgggaaggcgagaaggaggacgggctccgtggctggttcccggcgagctacgtgcagttgctggagaagcctggaatggtcccccctccgccgggagaagaaagccagacggtcatccttccacctggctggcagagctacctgtcgcctcagggccggcggtactatgtcaacacgaccaccaatgagaccacctgggaacgtcccagcagttctcctgggattccagccagccctggctctcacaggagctctctgcctccaacagtgaatggataccacgcatcagggaccccagcgcaccctccagagactgcccacatgagtgtccgaaaatccaccggtgattcccagaacctgggatcctcatcgccaagcaaaaagcagagcaaggaaaacaccatcacagagctagagcggctggaggtggagagggtagagatgatccggcagcacctgtgccagtacacgcagctgcggcatgaaacagacatgttcaaccaaagcacagtcgagcccgtggatcagctgcttcgaaaagtggacccggccaaagacagggagctgtgggtcagagagcacaagacgggcaacatccgccctgtggacatggagatctagatgggcctgtgcagcttcggggggtcctgctggggaggggggctgggctcccaccatggggcccatgccgagtggatgccccccaccctctctcctgggccactgaggagaggggagagagctggtgattccagaagggtgacccggacagcctagctgggggctcccccatattcccaggcccagaagacagacccacagccctgcccttgtctctgaggctgaagaccccctgactcccatgctgtgcttgccgctctgaaacaaacagaggctggaactttgtggtccttgccgagttttgtaggggtcactgtcacatgcttgtgccctggaagccccaaggctcttcctccagctggctcccttgtctccagggctttggaggatcagggtagggagggctctgtctctaagccaggtgtcaggatcagaatcatgggtagaaggtgccattcagctcacagccgcacccagaatcctttgcagccctccttctttatttttttcccattgcattctgggagtccacatctggctttctcagccactgttcatcaccaggggttttaggaggaaggcttggctcctgtcttcccagacccaccatgcctggagaggtcaggatggaactacctcattcggcaaattagccccaaattgagcgctgaatcgtgtcccatgagatcaggcgccatctgtaaagtctcctctggaaatgccaatccatccttcccccagctgcttcctcggggaggcccctgcccccaccctgccagcccttcccagtctcattagaggaagctttccaaagttctcagttatcaagacctcatccagctcgtccaaaggcttcagggatggaaacaaaccagctcgtctcagaggccagcaagctggggcctgtccgccacggtgccctgtgcacctttgggctgccctggcccccactctcccgggccgcccaccacaggctcttaatggggccgggtcagtcctacatgtgagatgggttagggcaagtctttgccatcccccagatggctctgtcttcttgtgtatggcagggctgggactgctgtcccttgtacagttttctgtcactggtgggcactggacaggcatagcagactctcttgtggccacactaggttgtcgcctttcaggcagtgtcccgccacctttgcttcccgctccttctggacattccagagccctgcaccaaacccttacttggtgtctgcacctcctttccctctctccatcttccaatccctggaaaagtctggtctgagtgtgacttgggaagctttcagtgctgctgtttggcccagctcattactttctccctttctctaccacagcaaacacattctccaccatgtcagtctaaagagtctaaaggggccgggagaagcatgagcgaggggcagattctagtcgggagcccatgccctggaaatccatctttcttcatctttcccattgaccactttgggtttgacctgcacatctgcagtgagggcagaattcaacaagcacaactcactggtctttcagtcaacgtgctagaaaccgatgacttattaatctctaattttttggcgcctctttcattgaatgagaattgctttcgtatagttcacattagaaaaatgcctaatatactaaagtaaaccaaacgttgtcacttttctcttgttcttgaaacattgcaaccaaaaaggtcagcacaaaggccttcacctacgtgaagacctcctggtaggatctgtccatgggatggagaaccactctgtccagatctggggttgggtcatgacaccagctaccaattttagaatattatttcttggtttctttatgaaaaatgggtgctagtggtaattgctttgtggcttagtaaactactctgtggatgatttccaaacattcaaagccaatagccttgttattaacaagatattttgagtacaatatggctcattgacttttccattacatctgaggattccagagtcctctgttcatccctgggatagagtgagccctcttgcgtcttccagggtagctcaggttggcccagtttgggccagtccatttttggaggtcactctttcccccctcatcccctcacctccttctctttacccccttcacgtacttcctttctttcttccctctgttattcattcatcaagcaggttaaagccattgtgctaagatctaatctgaggacactataatggccctgtcgtcagggaagcccgtgatcgctcgttttcaggggtcttaccggtcagcaaccttggcattgatacataggcactctacagaatttaagttttcagaggtaagtctgttgttctgattaatctgcattcattcagcgaatgctcaagacaagccaggcatgctgagaagcggcgctctagttgtatgtaagatgggcattcctctgctctcctctattctccatgtcgactgagaagagtataataagaacattgtaccctctccacacttaaccctctgggattctttattataatataaaccaccgtcgtgaggcatttacctgttggatggaaggtagacagcaacaagattttaatcacctggtcaccagaccctcacggcccatatccaattcgaatttcagaaatttctctgtttgctttaaataactctttacaaataagggtcgggcacggtggctcacgcctgtaatcccagctctttgggaggccgaggtgggcagatcacgaggtcaggagatcgagaccatcctggctaacatggtgaaaccccgtctctgctaaaaatacaaaaaattagccagatgtggtggtgcacacctgtagtcccaactattcggcaggctgaggcagtagaatcgcttgaacctgggaggcggagattgcagtgaaccaagatcgggccactgcactccagcttgggtgacagagcaagactccatctcaaaaaaattataaataactctttgcaaataggaaagtgaagctcaagggtaaccagtgaggctatgaaattgccagtgaattaagaccagggctagagtcaacagtccagaacccctatccgtatgaacaggggcccgtttctggttgaaatcaaggttaggatgcaactgagaaaataaaagactgcactttggagaggcaagcacgctatccgggttgttgttttgttttatgtcttggtgcttaggtgaggacttagctgggtttattcaaagtgggcgggtctgggctattcttgagaatgtcccttccatttctgagaacaagtcagccccttctacctgcctccacccaggagactgatgcacaagatctgtttgtgaaagcctgattt

SEQ ID NO: 262261 - DNA, 1431 bp, Artificial Sequence
  derived and/or modified sequence
atgtctggggcccgctgcaggaccctgtaccccttctctggagagagacatggccagggcctgcgctttgctgctggggagctgatcaccctgctgcaggtgcctgatggcggctggtgggagggggagaaggaggatggcctgcggggctggttccctgccagctatgtgcagctgctggagaagccaggcatggtgcccccacctcctggagaggagagccagaccgtcatcctgcccccaggctggcagagctacctgagcccccagggccgccgctactacgtgaacaccaccaccaatgagaccacctgggagcggcccagcagcagccctggcatcccagccagccctggcagccacaggagcagcctgccccccaccgtgaatggctaccacgccagcggcaccccagcccaccccccagagacagcccacatgtctgtgaggaagagcactggagacagccagaacctgggcagcagcagccccagcaagaagcagagcaaagaaaacaccatcaccatcaactgtgtgaccttcccccacccagacaccatgcctgagcagcagctgctgaagcccacagagtggagctactgtgactacttctgggccgacaagaaggacccccagggcaatggcaccgtggccggctttgagctgctgctgcagaagcagctgaagggcaagcagatgcagaaggagatgtctgagttcatccgggagcgcatcaagattgaagaagattatgccaagaacctggccaagctgagccagaacagcctggccagccaggaggagggcagcctgggggaggcctgggcccaggtgaagaagagcctggctgatgaggccgaggtgcacctgaagttcagcgccaagctgcacagcgaggtggagaagcccctgatgaacttccgggagaacttcaagaaggacatgaagaagtgtgaccaccacatcgctgacctgaggaagcagctggccagccgctatgcctctgtggagaaggccaggaaggccctgacagagcggcagagggacctggagatgaagacccagcagctggagatcaagctgagcaacaagacagaggaggacatcaagaaggcccggaggaagagcacccaggccggagatgacctgatgagatgtgtggacctgtacaaccaggcccagagcaagtggtttgaggagatggtgaccaccaccctggagctggagcggctggaggtggagcgggtggagatgatccggcagcacctgtgccagtacacccagctgcggcatgaaacagacatgttcaaccagagcacagtggagcctgtggaccagctgctgaggaaggtggaccctgccaaggaccgggagctgtgggtgcgggagcacaagacaggcaacatccggcctgtggacatggagatctag

SEQ ID NO: 262262 - DNA, 1431 bp, Artificial Sequence
  derived and/or modified sequence
atgagcggcgcccggtgccggaccctgtaccccttcagcggcgagagacacggacaaggactgcgcttcgctgccggggagctcattaccttgctgcaagtgcccgacggcgggtggtgggaaggggagaaggaggatgggctccgaggatggttcccagctagttatgtgcagctgctagaaaagcctgggatggtaccgccaccaccaggggaagaatcccagaccgttatcctccccccagggtggcagtcttacctaagcccccagggtagaaggtactatgtcaataccacaacaaacgagactacttgggaacggcccagctcttccccaggaattcccgcatcgcctggctctcaccgctcttccctgccccccaccgtcaatggctatcacgcgtcgggaaccccagcgcaccctcccgaaactgcgcatatgtccgtccggaagtccaccggtgatagccaaaatctcgggtcgtcatctcccagcaaaaaacagagcaaggagaacaccattactatcaactgcgtcacgtttccacaccctgacacaatgcccgagcagcagttacttaagccaacagaatggagctattgtgattatttctgggctgataaaaaagacccccagggcaacggaacagttgctggcttcgagttactgcttcagaaacagctaaaaggaaagcagatgcagaaggaaatgtccgagttcattagagagaggatcaagatcgaggaagactatgctaagaaccttgcgaagctatcccagaactcactagctagccaggaggagggctccctgggcgaagcttgggctcaggtgaagaaatcactggccgacgaggccgaggtccatctcaagtttagcgccaagctccattccgaggtggaaaagccacttatgaatttccgtgagaatttcaagaaggatatgaagaagtgtgaccaccacatagccgacctgcggaaacagctggcatccaggtacgcctctgtggaaaaggctcggaaagccttaactgaaagacaaagggacttggaaatgaaaacccagcagctggaaataaagttgagcaataaaaccgaggaggacattaaaaaagcaagaaggaagagtacccaggccggcgatgacctgatgcgctgcgtggatctttacaaccaggcccagagcaagtggtttgaggagatggtaacgaccacacttgagctcgagcgcctggaggtcgagagagttgaaatgatacggcagcacctgtgccagtatacgcagctgcgtcacgaaacagacatgttcaaccagagcacagtggagcctgtggaccagttactgcgaaaggtagacccagctaaggaccgggaactctgggtaagggagcataaaaccgggaatattagacccgtcgacatggagatctag

SEQ ID NO: 262263 - DNA, 1431 bp, Artificial Sequence
  derived and/or modified sequence
atgtctggagcgaggtgcagaacactgtatcctttttccggagagaggcacggacaaggcctgaggttcgcagccggtgaattaattactctgctgcaagttcctgatgggggttggtgggagggggaaaaggaggacgggttaagaggttggttccccgcttcctatgtgcaactgttggaaaaacctgggatggtgcccccaccacccggagaggagagccagacagtgattcttccacccggttggcagagctacctctccccccagggacggcgttactatgtaaataccacgactaatgagacaacttgggaaagaccctccagttcacctggcatccccgctagccccggaagccatagaagtagtttgccacctacagtaaatggataccacgcaagcgggactcctgcccacccgccagagaccgcgcacatgtccgttaggaaatccacaggcgactcccagaacctgggaagctcatctccaagcaagaagcagagtaaggagaatacaattactatcaattgtgttacattccctcatcccgataccatgcctgagcagcagttgttaaaacccacagagtggtcttactgcgattatttttgggccgataagaaagatcctcaggggaatggcaccgtcgcgggattcgaattactcctacagaagcaactgaaaggtaaacagatgcagaaagaaatgtcagaattcatcagggagcggatcaagattgaggaggactatgccaagaatttggctaagttgagtcagaacagtctcgcctctcaagaggagggtagcctcggtgaagcatgggcccaggtaaaaaagtcgctggcggatgaggccgaagtccacctcaagttttccgccaagctgcacagtgaggtggaaaagcccctcatgaacttccgcgagaatttcaagaaagatatgaagaaatgtgatcaccacatcgccgaccttagaaaacagctggccagcaggtatgcttctgtcgagaaggcccgaaaagcacttactgagcgtcagcgggaccttgagatgaagacacagcaactggagatcaaactgagtaataagaccgaggaagatataaagaaggccaggcggaaatccacccaggcaggcgatgatctgatgagatgtgttgatttgtacaatcaggcccagagtaagtggtttgaggagatggtgactactaccctggaacttgaacggctggaggtcgagcgggtcgaaatgatccgtcagcacctatgtcagtacacccagctgaggcacgaaacggacatgtttaatcaatccactgtggagccagtggaccagttactgcggaaagttgatcccgcaaaagaccgcgagctctgggttagagagcacaaaaccgggaacataagaccagtggatatggaaatatag

SEQ ID NO: 262264 - DNA, 1431 bp, Artificial Sequence
  derived and/or modified sequence
atgagcggcgccagatgcagaaccctgtaccccttcagcggcgagagacacggccagggcctgagattcgccgccggcgagctgatcaccctgctgcaggtgcccgacggcggctggtgggagggcgagaaggaggacggcctgagaggctggttccccgccagctacgtgcagctgctggagaagcccggcatggtgccccccccccccggcgaggagagccagaccgtgatcctgccccccggctggcagagctacctgagcccccagggcagaagatactacgtgaacaccaccaccaacgagaccacctgggagagacccagcagcagccccggcatccccgccagccccggcagccacagaagcagcctgccccccaccgtgaacggctaccacgccagcggcacccccgcccacccccccgagaccgcccacatgagcgtgagaaagagcaccggcgacagccagaacctgggcagcagcagccccagcaagaagcagagcaaggagaacaccatcaccatcaactgcgtgaccttcccccaccccgacaccatgcccgagcagcagctgctgaagcccaccgagtggagctactgcgactacttctgggccgacaagaaggacccccagggcaacggcaccgtggccggcttcgagctgctgctgcagaagcagctgaagggcaagcagatgcagaaggagatgagcgagttcatcagagagagaatcaagatcgaggaggactacgccaagaacctggccaagctgagccagaacagcctggccagccaggaggagggcagcctgggcgaggcctgggcccaggtgaagaagagcctggccgacgaggccgaggtgcacctgaagttcagcgccaagctgcacagcgaggtggagaagcccctgatgaacttcagagagaacttcaagaaggacatgaagaagtgcgaccaccacatcgccgacctgagaaagcagctggccagcagatacgccagcgtggagaaggccagaaaggccctgaccgagagacagagagacctggagatgaagacccagcagctggagatcaagctgagcaacaagaccgaggaggacatcaagaaggccagaagaaagagcacccaggccggcgacgacctgatgagatgcgtggacctgtacaaccaggcccagagcaagtggttcgaggagatggtgaccaccaccctggagctggagagactggaggtggagagagtggagatgatcagacagcacctgtgccagtacacccagctgagacacgagaccgacatgttcaaccagagcaccgtggagcccgtggaccagctgctgagaaaggtggaccccgccaaggacagagagctgtgggtgagagagcacaagaccggcaacatcagacccgtggacatggagatctag

SEQ ID NO: 262265 - protein, 684 aa, Artificial Sequence
  derived and/or modified sequence
MNPPAAFLAGRQNIGSEVEISTIEKQRKELQLLIGELKDRDKELNDMVAVHQQQLLSWEEDRQKVLTLEERCSKLEGELHKRTEIIRSLTKKVKALESNQMECQTALQKTQLQLQEMAQKATHSSLLSEDLEARNETLSNTLVELSAQVGQLQAREQALTTMIKLKDKDIIEAVNHIADCSGKFKMLEHALRDAKMAETCIVKEKQDYKQKLKALKIEVNKLKEDLNEKTTENNEQREEIIRLKQEKSCLHDELLFTVEREKRKDELLNIAKSKQERTNSELHNLRQIYVKQQSDLQFLNFNVENSQELIQMYDSKMEESKALDSSRDMCLSDLENNHPKVDIKREKNQKSLFKDQKFEAMLVQQNRSDKSSCDECKEKKQQIDTVFGEKSVITLSSIFTKDLVEKHNLPWSLGGKTQIEPENKITLCKIHTKSPKCHGTGVQNEGKQPSETPTLSDEKQWHDVSVYLGLTNCPSSKHPEKLDVECQDQMERSEISCCQKNEACLGESGMCDSKCCHPSNFIIEAPGHMSDVEWMSIFKPSKMQRIVRLKSGCTCSESICGTQHDSPASELIAIQDSHSLGSSKSALREDETESSSNKKNSPTSLLIYKDAPAFNEKASIVLPSQDDFSPTSKLQRLLAESRQMVTDLELSTLLPISHENLTGSATNKSEVPEESAQKNTFVSY

SEQ ID NO: 262266 - protein, 445 aa, Artificial Sequence
  derived and/or modified sequence
MPNSSPKDPTTASGNGSKVEREKRKDELLNIAKSKQERTNSELHNLRQIYVKQQSDLQFLNFNVENSQELIQMYDSKMEESKALDSSRDMCLSDLENNHPKVDIKREKNQKSLFKDQKFEAMLVQQNRSDKSSCDECKEKKQQIDTVFGEKSVITLSSIFTKDLVEKHNLPWSLGGKTQIEPENKITLCKIHTKSPKCHGTGVQNEGKQPSETPTLSDEKQWHDVSVYLGLTNCPSSKHPEKLDVECQDQMERSEISCCQKNEACLGESGMCDSKCCHPSNFIIEAPGHMSDVEWMSIFKPSKMQRIVRLKSGCTCSESICGTQHDSPASELIAIQDSHSLGSSKSALREDETESSSNKKNSPTSLLIYKDAPAFNEKASIVLPSQDDFSPTSKLQRLLAESRQMVTDLELSTLLPISHENLTGSATNKSEVPEESAQKNTFVSY

SEQ ID NO: 262267 - DNA, 2055 bp, Artificial Sequence
  derived and/or modified sequence
atgaacccacctgcggcatttctcgcgggccggcagaacatcggctctgaagtcgagatttcaactattgaaaaacagcgtaaagagctccagctgctgattggtgagctgaaggatcgagacaaagagctcaacgatatggtcgccgtgcaccagcagcaactgctatcctgggaggaggacagacagaaggtgttaaccttagaagagcgatgtagtaaactggagggtgaacttcataagcgaacagaaattattaggagtctgacaaaaaaggttaaggccctcgaaagcaatcagatggagtgccagactgccctgcagaagactcagttgcagctgcaagagatggcccagaaggccacacacagctctctactttccgaagatctcgaggctcgtaatgaaacactatcaaacactctggttgaactgagcgcacaggttggccagttgcaggccagagagcaggcgctaaccacaatgataaaactgaaagacaaggacatcatcgaagcagtgaatcatatagctgactgcagcggaaaatttaagatgctggaacatgctcttcgagacgccaagatggctgagacttgtatcgtgaaggaaaaacaggattacaaacagaaactaaaggctctcaagattgaggtgaacaagcttaaagaggacctgaatgagaagacaacagagaataacgaacagcgggaggagatcattcgccttaaacaggaaaaaagttgtcttcacgatgagttgctgttcaccgtggaaagagaaaagcggaaagacgaactcctgaatatcgccaaaagcaaacaggagcgcactaacagtgagctgcacaacttgcgtcagatctacgtaaagcagcagagcgatttgcagtttctaaactttaacgttgaaaacagccaggagctcatccaaatgtatgactcaaagatggaggagagcaaagcactcgactcgagtcgcgatatgtgcctgtctgatctggagaacaatcaccctaaggtcgacatcaagcgggaaaagaatcagaaaagtctctttaaggatcagaaattcgaagccatgctagtgcagcaaaaccgctccgacaagtcaagctgcgacgagtgcaaagaaaaaaagcaacagattgataccgtgttcggagagaaatcagtgatcaccctgagctcaatcttcacaaaggaccttgtggagaaacacaacctgccttggtcccttgggggtaaaacgcagatcgaaccggagaataaaattacgctgtgtaagatccacacgaaaagccctaaatgccacggaaccggcgtgcagaatgaggggaagcaacctagtgaaactcctactctctctgatgaaaaacagtggcacgatgttagtgtgtacctagggctcaccaattgcccgtcgagtaagcatccagaaaaacttgacgttgagtgccaggatcagatggagagatccgaaataagctgttgtcagaaaaatgaagcttgtctcggagagagcggaatgtgcgattcaaagtgctgtcacccatccaatttcatcattgaggcacccggccatatgagtgatgttgaatggatgagtattttcaagccgagcaagatgcagcgtatcgtgagactgaaaagcggctgtacatgtagcgaaagtatatgtggcacacagcacgattctcccgcttctgagctgatcgcaattcaggatagccatagcctggggtccagcaagagcgccttacgggaggatgagacggagagctcctcaaacaaaaaaaatagccccacctcgctgctcatttataaggatgcaccggctttcaacgagaaggccagcatagttctacctagccaggatgactttagtccaacatcgaaactgcagagactgcttgcggaatctcgtcagatggtcaccgacttggagctgtctacactcctcccaatctcacacgagaatctgaccggcagcgccactaacaaatccgaggtgccagaggaatccgcgcagaagaacacgttcgttagctattag

SEQ ID NO: 262268 - DNA, 2055 bp, Artificial Sequence
  derived and/or modified sequence
atgaaccccccagctgccttcctggccggccggcagaacatcggcagcgaggtggagatcagcaccatcgagaagcagaggaaggagctgcagctgctgattggagagctgaaggaccgggacaaggagctgaatgacatggtggccgtgcaccagcagcagctgctgtcctgggaggaggaccggcagaaggtgctgaccctggaggagcgctgcagcaagctggagggggagctgcacaagaggacagagatcatccgcagcctgaccaagaaggtgaaggccctggagagcaaccagatggagtgccagacagccctgcagaagacccagctgcagctgcaggagatggcccagaaggccacccacagcagcctgctgtctgaggacctggaggccagaaatgagaccctgagcaacaccctggtggagctgagcgcccaggtgggccagctgcaggcccgggagcaggccctgaccaccatgatcaagctgaaggacaaggacatcattgaagctgtgaaccacatcgctgactgcagcggcaagttcaagatgctggagcacgccctgagagatgccaagatggccgagacctgcatcgtgaaggagaagcaggactacaagcagaagctgaaggccctgaagattgaggtgaacaagctgaaggaggacctgaatgagaagaccacagagaacaatgagcagcgggaggagatcatccggctgaagcaggagaagagctgcctgcatgatgagctgctcttcaccgtggagcgggagaagaggaaggatgagctgctgaacatcgccaagagcaagcaggagaggaccaacagcgagctgcacaacctgcggcagatctacgtgaagcagcagagcgacctgcagttcctgaacttcaacgtggagaacagccaggagctgatccagatgtatgacagcaagatggaggagagcaaggccctggacagcagccgggacatgtgcctgagtgacctggagaacaaccaccccaaggtggacatcaagcgggagaagaaccagaagagcctcttcaaggaccagaagtttgaggccatgctggtgcagcagaacagaagtgacaagagcagctgtgatgagtgcaaggagaagaagcagcagattgacacagtgtttggagagaagagcgtcatcaccctgagcagcatcttcaccaaggacctggtggagaagcacaacctgccctggagcctgggcggcaagacccagatcgagcctgagaacaagatcaccctgtgcaagatccacaccaagagccccaagtgccacggcaccggggtgcagaatgaaggcaagcagcccagcgagacccccaccctgagtgatgagaagcagtggcatgatgtgtctgtgtacctgggcctgaccaactgccccagcagcaagcaccctgagaagctggatgtggagtgccaggaccagatggagaggtctgagatcagctgctgccagaagaatgaggcctgcctgggggagagcggcatgtgtgacagcaagtgctgccaccccagcaacttcatcatcgaggcccctggccacatgtctgatgtggagtggatgagcatcttcaagcccagcaagatgcagagaattgtgcggctgaagagcggctgcacctgcagcgagagcatctgtggcacccagcacgacagccctgccagcgagctgattgccatccaggacagccacagcctgggcagcagcaagagcgccctgagagaagatgaaacagagagcagcagcaacaagaagaacagccccaccagcctgctgatctacaaggatgccccagccttcaatgagaaggccagcatcgtgctgcccagccaggatgacttcagccccaccagcaagctgcagaggctgctggccgagagccggcagatggtgacagacctggagctgagcaccctgctgcccatcagccatgagaacctgaccggcagcgccaccaacaagtctgaggtgcctgaggagagcgcccagaagaacacctttgtgtcctactag

SEQ ID NO: 262269 - DNA, 2055 bp, Artificial Sequence
  derived and/or modified sequence
atgaacccccccgccgccttcctggccggccggcagaacatcggcagtgaggtcgagatatcaactattgagaaacagaggaaagaactgcagctactgatcggtgaattaaaagatcgcgataaagagttgaatgatatggtggcagtccatcagcagcaattgttgtcctgggaggaggacaggcaaaaagtactcaccttggaagagagatgcagcaaacttgaaggggaattgcacaaacgaacagagatcataagatccctaaccaagaaggttaaggctctggagtccaatcagatggagtgccagactgcactgcagaagacccaattgcaattgcaggagatggctcagaaggccacccattcaagtttgctttccgaggatctcgaagcccgaaatgagacgctgtctaataccttggtggagttgtcagctcaggtcgggcaactgcaggctcgggagcaggccctgaccaccatgatcaaactcaaagataaagacatcattgaagcagtgaaccacattgctgattgtagtggcaagtttaaaatgttggagcacgcccttagagatgctaaaatggctgagacttgtatcgtaaaggagaagcaggactacaaacagaaactgaaggccctgaagattgaagttaataaactcaaagaagacctaaatgagaaaaccacagagaataatgaacagagagaggaaattatacgattgaagcaggaaaagtcatgcttgcacgacgagctcttatttaccgtggagcgcgagaagcgaaaagacgagctgttgaacattgccaagtctaagcaggaacgaactaacagcgagctccataacttgcgacaaatctatgttaagcagcagtcagatctacaatttctgaatttcaacgtggagaactctcaagagctcatccaaatgtatgacagcaaaatggaagagtctaaagccctcgatagctcccgcgacatgtgcctttcggacctcgaaaacaatcaccctaaggtagacattaagagggaaaaaaaccagaaatctttgttcaaagaccagaagttcgaggcaatgctggtccagcagaaccgttctgataaaagttcctgtgatgaatgtaaagagaagaagcagcagattgataccgtgttcggcgagaaaagcgttattactctgtcgagtatcttcacgaaagatctggtggagaagcacaatctgccttggtctcttggcggaaaaacgcaaattgaaccagaaaacaagattactctgtgcaagatccatactaaatctcccaaatgccatggaacgggagtgcaaaacgagggtaagcagccatccgagaccccaaccctcagcgacgagaaacagtggcatgatgtttcagtgtacttaggcctgactaattgtccttcttccaagcatccagagaagttagatgttgagtgccaggaccagatggagagaagcgaaatttcgtgttgccaaaaaaacgaggcttgcctgggcgaatctgggatgtgtgacagtaagtgctgccacccatctaactttatcatcgaggcccccggccacatgagcgacgtcgagtggatgagtatctttaaacccagtaaaatgcaacgaatcgtaagactcaaaagtgggtgtacgtgctccgaatctatatgcggtacacaacacgacagtcccgcatccgaacttatcgccattcaggactctcacagtcttggttcctctaagtccgcactgcgggaggatgaaactgaatcaagcagcaacaagaaaaactctccaacatcactgcttatctacaaggatgctcccgcctttaacgagaaagccagcatcgtgctgccaagccaggatgattttagtcctactagcaaacttcagagattgttggctgaatcacgacaaatggttactgacttagagctgtccacccttctcccgatcagtcacgagaacctgaccggtagtgccacaaacaagtccgaagtgcccgaggagagcgcgcagaaaaatacgttcgtttcttactag

SEQ ID NO: 262270 - DNA, 2055 bp, Artificial Sequence
  derived and/or modified sequence
atgaatcccccagccgctttccttgccggtcgacaaaacatcggctcggaggttgagatctcaaccattgagaagcaacggaaggagttacagctgctgatcggggaattaaaggacagggacaaagagctgaacgatatggtcgcagtgcaccagcaacaactcttgtcatgggaggaggaccgacagaaagttctgaccttggaggaaagatgcagtaaactggagggggagctccacaagcggactgagatcatccgcagcctgacaaaaaaagtaaaggctctggaatctaaccagatggagtgccagaccgcccttcagaagacccagctgcagctgcaagagatggcacagaaagctacccactcgagcctactgagtgaagatctcgaggccagaaatgagaccctgtccaatactcttgtcgagctgagcgcacaggtgggccagttgcaggccagagagcaagccctcaccactatgattaagctcaaggataaagacatcatagaggcagtgaaccacatcgcggactgttctgggaaattcaaaatgctagaacacgcactccgcgacgctaaaatggccgagacttgtattgtcaaggagaagcaagactacaaacaaaagctgaaggccctgaagattgaggtgaataaactgaaggaggacctaaacgaaaaaacaacagagaataatgagcagagggaggaaattatacggctgaagcaggagaaatcctgtctccacgatgagttgctgtttaccgtggagcgagaaaaacgcaaggatgaacttcttaacatcgccaaatccaagcaggagcgcaccaactcagaactgcacaatctgaggcagatctatgtgaagcagcagtccgatctgcaatttttgaatttcaatgtcgaaaactcccaggaactcatccagatgtacgattccaaaatggaagagtcaaaagcgctggacagctccagggatatgtgtctttcagatctggaaaataatcaccccaaggtggacatcaaaagggaaaagaaccaaaaatccctatttaaggaccagaagtttgaggcaatgctggtacagcagaatcggagcgataagagtagctgcgacgagtgcaaggagaagaagcagcagattgacactgtattcggcgaaaagtcggtgatcacgctgtccagtatctttacaaaggacctggtcgaaaaacacaacctgccatggtcccttgggggaaagacccagatcgaaccagagaataaaatcaccttatgtaagattcacaccaaatctccaaaatgccacgggacgggtgttcaaaacgagggcaagcaaccgagtgagacccctacactcagtgacgagaaacagtggcacgatgttagcgtttatctcgggctgacaaactgccctagcagcaaacatccggagaaactggatgttgaatgccaagaccaaatggaaagaagcgagatctcttgctgccagaaaaatgaggcgtgtctcggcgagtcaggaatgtgcgatagcaaatgttgccatccctccaattttatcattgaggccccaggacatatgagcgacgtggaatggatgagcatttttaagccaagcaaaatgcaaaggatagttaggctgaaaagcgggtgtacgtgctctgagagcatctgcggcacacaacacgattccccggcttctgagttaatcgcaattcaggattctcatagcctcggctcttctaagtccgctctgcgggaggacgaaaccgaatcctcatctaacaaaaagaacagtcccacatccttgctaatctataaagatgcacccgctttcaacgagaaggctagcattgtactgccttctcaggatgatttttcacctacaagcaaattgcagaggctgctggctgagagccggcagatggtcacggatctggaattgtctacgctcctacccatcagccatgagaatttgaccggttccgccaccaataagagcgaggtgccagaggagagcgcacaaaagaacacattcgtgagctattag

SEQ ID NO: 262271 - DNA, 3546 bp, Artificial Sequence
  derived and/or modified sequence
gccggttctttcaggccttccagcgccggagcctcgggcgtgggcaaaaagcgtccatacgcagcctgagccacttgggagcccccagtttccgaggcagaagaacagtgcccaccagcgcagcggggctgcggcccggaaaccctggcggggagccccgagccccggcgggcgcacgccgcgtgggcaccaggcaggcggttggagtacggggcgggggtcggccgagggcgcggggccccggggctccgggctcgcccccgccgctcggggcaggcgcgccgatggcgtttctgaggtgacgccgcccacaccgggcttctccgggggcggaggaaacacctatgaaccctccggcagccttccttgccgggcgccagaacatcgggtcagaagttgagatttccactatcgagaaacaacggaaggagctgcagttgctcattggagaattaaaagatcgagataaagagctcaatgacatggttgcagtgcaccagcaacagcttctttcatgggaagaggatcggcagaaagtgttgacactggaagaacgttgcagcaaattagaaggtgaactacataaaagaactgaaataatcaggtcactcacgaagaaggtaaaagctcttgaatccaatcaaatggaatgccaaacagctctccaaaagacccaactacagcttcaggaaatggctcaaaaggcaacgcattcttctcttctctctgaagaccttgaggctagaaacgaaactctcagcaacacgttagtggaactttctgcccaggtaggacagctacaagctcgagaacaagctcttacgacaatgataaagctaaaggacaaagatattattgaggcagttaatcacattgcagattgttcgggtaaatttaaaatgctagagcatgccctacgtgatgccaagatggcggagacttgtattgtgaaagaaaagcaagattataagcagaaattgaaggcacttaagattgaagtcaacaaactaaaagaggacctcaatgaaaagacgacagaaaataatgagcaacgagaagagatcattcgcctcaagcaagagaaaagttgcctgcacgatgaattgctttttactgtagagagagaaaagaggaaagatgaattgcttaatattgcgaagtcaaagcaagaacgcacaaattcagaactgcacaatctgagacagatttatgtaaaacaacagagtgatctgcagtttcttaatttcaatgtggaaaattctcaggaattaatacagatgtatgactcaaagatggaggaatcaaaggctctggactccagcagagacatgtgtttatcagaccttgaaaataaccacccaaaagtcgatattaagagggaaaaaaatcagaagtcactgtttaaggaccagaaatttgaagccatgttggttcagcaaaataggtcagacaagagctcttgcgatgaatgcaaagagaagaaacaacagatcgatactgtgtttggggagaaaagtgtaattacgctgtcatccatattcaccaaagacttagtagagaaacacaacctcccttggtctctgggaggaaaaacccagattgaacccgaaaacaaaattacattgtgcaagatccacacaaaatcaccaaaatgtcatggcactggggttcagaacgaaggaaaacaaccctcagaaacacccactttatctgatgagaagcagtggcatgatgtcagtgtttacctgggcctgaccaactgtccaagttcaaaacatccagaaaagctggatgtagaatgtcaagatcagatggaaaggtccgaaatctcatgctgccagaaaaatgaagcctgtctgggcgaaagtggcatgtgtgactccaagtgctgccacccgagtaacttcataattgaagccccaggccacatgtctgacgtggagtggatgagtattttcaagccttccaaaatgcagagaattgtccgcctcaaatctgggtgcacctgttcagaaagcatctgtggcacacaacatgactccccggcaagtgagctaattgccatccaagattcccactctttgggttcttcaaaatctgccttgagagaagatgagacggagtcctcttccaataaaaagaactcacctacgagtttgttaatctacaaagatgcaccagcattcaatgaaaaggcttcaattgtgttaccctcccaggatgatttctcgcccacgagcaagctccagcgtttgctggcggaatctcgtcagatggtgacggacctggagctgagcacactgctgcccatcagccatgagaatctcactggcagtgccacaaataagtcagaggtcccagaagagtcagctcaaaaaaatacctttgtcagttattgaaggaaacaaaaggcaacttcagtattcatcgtgatcacgaatttctcatctatgtggaaggcagaaagcagacaccaatactgaatgaatacttaaccgtaaaactgaaagaggattctagttcttcataaacggcacttaattccagctgggagcagaactagaaagttaatttttaaacatctacacttcattttcaagttaaccatttttgtgctgaagaaatattttcatgtgtaagaaagtagaccttattgtacatatagaaagttggaattatgctaagaatgaaaaagacttctctgtaaagatacggactacagttaaatgctagagaagctctttaaaaatgtgaatgtcaaatagagaaagaaccctgcatagaaagtgctgttttaactatctgatttttaaaaaatctgtgcatacatttaaattctaaacaatagcttatcagagtcagctcaaaatatatgagaaacagtattctctcatggttttagcttttgactttgctgtgtaaatagacataaggtgctttgatataaaatataaaatgtaactggaaaatagctcgaggtccttctgtcccaagctgagcagagccccatctttctgggtctatattagtcccacctactgacacaaacaaaagcttgctggaagatcgagttttagacgcatttttaaaaatcttaaagactaaaacacttccattttaacttgtaaagtaatttaattttttaaagattatactatatgcctctgtgtcttctctaaaagaatagatcaacttcagtccataaaagatatttttaatattaaagaaaaaatatgtttccttggtttctttttattttacaggagtaaaataaggaaggaacgttcatcactttaaactgaacctggcaagttaatttcctcaggaatggggatgtatttttttaagcattgcagatatcaaagttctattgtgctgaataaatgcccctttgttaacaggtctcagtgttacttcagagatgattttcatgagcggggaagagccacctcatttagcctttttaattagggtgctgaaaagagaagttgggtgaggtttggttatgttctttatcaatgcgtgctttctccctcaggctgggct

SEQ ID NO: 262272 - DNA, 2055 bp, Artificial Sequence
  derived and/or modified sequence
atgaacccccccgccgccttcctggccggcagacagaacatcggcagcgaggtggagatcagcaccatcgagaagcagagaaaggagctgcagctgctgatcggcgagctgaaggacagagacaaggagctgaacgacatggtggccgtgcaccagcagcagctgctgagctgggaggaggacagacagaaggtgctgaccctggaggagagatgcagcaagctggagggcgagctgcacaagagaaccgagatcatcagaagcctgaccaagaaggtgaaggccctggagagcaaccagatggagtgccagaccgccctgcagaagacccagctgcagctgcaggagatggcccagaaggccacccacagcagcctgctgagcgaggacctggaggccagaaacgagaccctgagcaacaccctggtggagctgagcgcccaggtgggccagctgcaggccagagagcaggccctgaccaccatgatcaagctgaaggacaaggacatcatcgaggccgtgaaccacatcgccgactgcagcggcaagttcaagatgctggagcacgccctgagagacgccaagatggccgagacctgcatcgtgaaggagaagcaggactacaagcagaagctgaaggccctgaagatcgaggtgaacaagctgaaggaggacctgaacgagaagaccaccgagaacaacgagcagagagaggagatcatcagactgaagcaggagaagagctgcctgcacgacgagctgctgttcaccgtggagagagagaagagaaaggacgagctgctgaacatcgccaagagcaagcaggagagaaccaacagcgagctgcacaacctgagacagatctacgtgaagcagcagagcgacctgcagttcctgaacttcaacgtggagaacagccaggagctgatccagatgtacgacagcaagatggaggagagcaaggccctggacagcagcagagacatgtgcctgagcgacctggagaacaaccaccccaaggtggacatcaagagagagaagaaccagaagagcctgttcaaggaccagaagttcgaggccatgctggtgcagcagaacagaagcgacaagagcagctgcgacgagtgcaaggagaagaagcagcagatcgacaccgtgttcggcgagaagagcgtgatcaccctgagcagcatcttcaccaaggacctggtggagaagcacaacctgccctggagcctgggcggcaagacccagatcgagcccgagaacaagatcaccctgtgcaagatccacaccaagagccccaagtgccacggcaccggcgtgcagaacgagggcaagcagcccagcgagacccccaccctgagcgacgagaagcagtggcacgacgtgagcgtgtacctgggcctgaccaactgccccagcagcaagcaccccgagaagctggacgtggagtgccaggaccagatggagagaagcgagatcagctgctgccagaagaacgaggcctgcctgggcgagagcggcatgtgcgacagcaagtgctgccaccccagcaacttcatcatcgaggcccccggccacatgagcgacgtggagtggatgagcatcttcaagcccagcaagatgcagagaatcgtgagactgaagagcggctgcacctgcagcgagagcatctgcggcacccagcacgacagccccgccagcgagctgatcgccatccaggacagccacagcctgggcagcagcaagagcgccctgagagaggacgagaccgagagcagcagcaacaagaagaacagccccaccagcctgctgatctacaaggacgcccccgccttcaacgagaaggccagcatcgtgctgcccagccaggacgacttcagccccaccagcaagctgcagagactgctggccgagagcagacagatggtgaccgacctggagctgagcaccctgctgcccatcagccacgagaacctgaccggcagcgccaccaacaagagcgaggtgcccgaggagagcgcccagaagaacaccttcgtgagctactag

SEQ ID NO: 262273 - protein, 280 aa, Artificial Sequence
  derived and/or modified sequence
MEDEVVRFAKKMDKMVQKKNASTRIGMSVNAIRKQSTDEEVTSLAKSLIKSWKKLLDGPSTEKDLDEKKKEPAITSQNSPEAREESTSSGNVSNRKDETNARDTYVSSFPRAPSTSDSVRLKCREMLAAALRTGDDYIAIGADEEELGSQIEEAIYQEIRNTDMKYKNRVRSRISNLKDAKNPNLRKNVLCGNIPPDLFARMTAEEMASDELKEMRKNLTKEAIREHQMAKTGGTQTDLFTCGKCKKKNCTYTQVQTRSADEPMTTFVVCNECGNRWKFC

SEQ ID NO: 262274 - DNA, 843 bp, Artificial Sequence
  derived and/or modified sequence
atggaggacgaggtggtgagattcgccaagaagatggacaagatggtgcagaagaagaacgccagcaccagaatcggcatgagcgtgaacgccatcagaaagcagagcaccgacgaggaggtgaccagcctggccaagagcctgatcaagagctggaagaagctgctggacggccccagcaccgagaaggacctggacgagaagaagaaggagcccgccatcaccagccagaacagccccgaggccagagaggagagcaccagcagcggcaacgtgagcaacagaaaggacgagaccaacgccagagacacctacgtgagcagcttccccagagcccccagcaccagcgacagcgtgagactgaagtgcagagagatgctggccgccgccctgagaaccggcgacgactacatcgccatcggcgccgacgaggaggagctgggcagccagatcgaggaggccatctaccaggagatcagaaacaccgacatgaagtacaagaacagagtgagaagcagaatcagcaacctgaaggacgccaagaaccccaacctgagaaagaacgtgctgtgcggcaacatcccccccgacctgttcgccagaatgaccgccgaggagatggccagcgacgagctgaaggagatgagaaagaacctgaccaaggaggccatcagagagcaccagatggccaagaccggcggcacccagaccgacctgttcacctgcggcaagtgcaagaagaagaactgcacctacacccaggtgcagaccagaagcgccgacgagcccatgaccaccttcgtggtgtgcaacgagtgcggcaacagatggaagttctgctag

SEQ ID NO: 262275 - DNA, 843 bp, Artificial Sequence
  derived and/or modified sequence
atggaagacgaggtggtgagatttgcgaaaaagatggacaagatggtgcagaagaaaaatgcctctacacggattggcatgtccgtcaacgccatcaggaagcagtccaccgacgaagaggtcacctcactcgctaagagcctcatcaaatcctggaaaaagttgttggatggaccaagtacggaaaaggaccttgatgagaagaagaaggagcccgccatcactagtcagaacagccctgaggccagagaggaaagtactagttctggcaacgtatcaaataggaaagacgagaccaacgcacgggacacatacgtgagtagctttcctcgggccccgtcgactagcgattcagtgcgactgaaatgccgggaaatgttagccgccgccctacgtacaggtgacgattatatcgcaataggggcagatgaggaggagctggggtcccaaatagaggaagccatctaccaagagattcgaaatacagacatgaagtataaaaatcgagtgcggagccggataagtaacttgaaagacgctaagaatccgaatttgcgcaagaacgtattgtgcggcaatattccccccgatctctttgcacggatgactgccgaggaaatggcatccgacgagctcaaggagatgcggaaaaacctgactaaggaggctattcgagagcaccagatggctaaaactggcgggactcaaacggatctgtttacgtgcgggaagtgcaaaaagaagaactgcacatacacacaggtacaaacgagatctgcagacgaacccatgactacatttgtggtgtgtaatgagtgcgggaaccggtggaaattctgctag

SEQ ID NO: 262276 - DNA, 843 bp, Artificial Sequence
  derived and/or modified sequence
atggaggatgaggtggtgcgctttgccaagaagatggacaagatggtgcagaagaagaatgccagcaccagaattggcatgtctgtgaatgccatcaggaagcagagcacagatgaggaggtgaccagcctggccaagagcctcatcaagtcctggaagaagctgctggatggccccagcacagagaaggacctggatgagaagaagaaggagcccgccatcaccagccagaacagccctgaggcccgggaggagagcaccagcagtggaaatgtgagcaacaggaaggatgagaccaatgcccgggacacctacgtgagcagcttcccccgggcccccagcaccagtgacagcgtgcggctgaagtgccgggagatgctggccgccgccctgaggactggagatgactacatcgccatcggggctgatgaggaggagctgggcagccagatcgaggaggccatctaccaggagatccggaacacagacatgaagtacaagaacagagtgcgcagccgcatcagcaacctgaaggatgccaagaaccccaacctgaggaagaatgtgctgtgtggcaacatccccccagacctgtttgccaggatgacagctgaggagatggccagtgatgagctgaaggagatgaggaagaacctgaccaaggaggccatccgggagcaccagatggccaagacaggaggcacccagacagacctcttcacctgtgggaagtgcaagaagaagaactgcacctacacccaggtgcagaccaggtctgcagatgagcccatgaccacctttgtggtgtgcaatgaatgtggcaaccgctggaagttctgctag

SEQ ID NO: 262277 - DNA, 843 bp, Artificial Sequence
  derived and/or modified sequence
atggaggacgaggtggtgcggttcgccaagaagatggacaagatggtgcagaagaagaacgcctctacccgcatcggcatgtcagtcaacgcgatcagaaagcagtcaactgatgaagaggtaacctcacttgccaaatcattgatcaaaagttggaagaagctcttggacggtccttctaccgagaaggatctggacgaaaaaaaaaaggaacctgcaatcaccagccagaatagccctgaagctagagaagagagtacaagctccgggaacgtcagcaacaggaaggacgaaactaacgccagagacacttacgtctcgtcctttccacgtgccccgagcaccagtgattctgtgcggctcaaatgtcgcgagatgctggcggctgcactcaggactggggatgattatatcgccattggggcggacgaagaggaactcggctctcagatcgaggaggcaatctaccaggagatacggaacacagatatgaagtataagaaccgggttcgtagcagaatctctaacctgaaggatgccaaaaatccaaacctcagaaagaacgtgctctgtggcaacatcccacccgaccttttcgcccgcatgacagcagaggaaatggcatcagacgagctcaaggagatgaggaagaacctgaccaaagaggcaatacgcgaacatcagatggctaaaacaggaggaacacaaacagatctgtttacatgtggtaagtgcaagaagaagaactgcacatatacacaggtccagacaaggtctgcagacgagcctatgactactttcgtagtctgcaatgaatgtgggaatcgctggaagttctgctag

SEQ ID NO: 262278 - DNA, 843 bp, Artificial Sequence
  derived and/or modified sequence
atggaggatgaagtggtgcgtttcgcaaagaagatggataagatggttcagaagaagaatgccagtactagaattggaatgtccgtgaatgcaattcggaaacaaagcacggacgaagaggtgacgagtctggcaaagagtcttattaaatcctggaaaaagttactggatggtcccagcactgagaaggatttggatgagaaaaagaaagagcccgctatcacaagccaaaattctcccgaggcgcgagaggaatccacttcctctggcaatgtgtctaatcgcaaagatgaaactaatgctcgcgatacctatgtgagcagtttcccaagggcaccttcaaccagtgactcggtcaggctcaaatgcagggagatgctagcggctgccctgcgcaccggcgacgattacatcgctatcggcgcagacgaagaggagctcggcagccaaatcgaagaagcaatctatcaagaaatacggaataccgacatgaagtacaagaatcgggtcagaagtagaataagcaacttaaaagatgctaagaaccctaatcttaggaagaacgtgttatgtggcaacattcctccggatcttttcgcacgaatgaccgccgaagagatggcaagtgacgaactcaaagaaatgcggaagaatctcaccaaggaggcaattagggagcaccaaatggcgaaaacgggcggaacccaaacggatttgttcacgtgcggaaagtgcaagaagaaaaattgtacctatactcaagtgcagactcgcagcgctgatgagcccatgacaacttttgtggtctgcaacgaatgtggcaaccggtggaaattttgctag

SEQ ID NO: 262279 - DNA, 2718 bp, Artificial Sequence
  derived and/or modified sequence
agccggaagccacgcctgcccactagcccgacgcccgcctggcgggaacatgggctcgcccctcaccagcgatctgcagtcagttggtagcgcctgcacgtcgcgcgcggtgttcgattgtcgctgcctggggaggaggagccggagccgccgccgccgccgccgccgccgcgggcttcgttcgtaaggaagggggcctaggcccgggcctgcggtggtgggggttgctgcgcgccgggggtcgctcctgctgtgtcttccgctccagcttcgcccacttccccttgccagcggggtgggcgcggagaagacctgccggagccatggaggacgaagtggtccgctttgccaagaagatggacaagatggtgcagaagaagaacgcgtccacaagaatcggaatgtcagttaatgctattcgcaagcagagtacagatgaggaagttacatctttggcaaagtctctcatcaaatcctggaaaaaattattagatgggccatcaactgagaaagaccttgacgaaaagaagaaagaacctgcaattacatcgcagaacagccctgaggcaagagaagaaagtacttccagcggcaatgtaagcaacagaaaggatgagacaaatgctcgagatacttatgtttcatcctttcctcgggcaccaagcacttctgattctgtgcggttgaagtgtagggagatgcttgctgcagctcttcgaacaggggatgactacattgcaattggagctgatgaggaagaattaggatctcaaattgaagaagctatatatcaagaaataaggaatacagacatgaaatacaaaaatagagtacgaagtaggatatcaaatcttaaagatgcaaaaaatccaaatttaaggaaaaatgtcctctgtgggaatattcctcctgacttatttgctagaatgacagcagaggaaatggctagtgatgagctgaaagagatgcggaaaaacttgaccaaagaagccatcagagagcatcagatggccaagactggtgggacccagactgacttgttcacatgtggcaaatgtaaaaagaagaattgcacttacacacaggtacaaacccgtagtgctgatgaaccaatgacaacatttgttgtctgtaatgaatgtggaaatcgatggaagttctgttgagttggaagaattggcaaaatatctggaccattaagaaaacggattttgtaactagctttaaactaggccaagcaactagttttcctgcaaatcaaatttttaaagcaacttgggttagactttgtttttgacctaacatcccttccttaaatgccttctgtagtttcagatcagtagggagaccatataataattttatggtacctgtttcaaaacatattttttctgtttttataagtaagttgatattaattaaactcttggcaatatttcttctttcttaaaggaaaatataccttaactttttttcttttacactgtgaaacatacacagtagaaattctgttactctctgttattaatacataaatgaaaatacatttttttccatattggcatgtagctacaaatattaaaggaggagaaaaggtaatataattttaggtttaccaaatatggtgtgtattcaaataatacttgaccagcttatctaaaatgtacataattttgaggtagcttatgaatttgattttaattattatgttcacaagcttggaatattagatattattttgcatctgtaactaaccgtgatcatcatttcttgtaatttcttgtacatgtatattacttgttcttaatagatttttggaaacaagactttattgagatcagtttggttttcctgttaatttacctgtttgactttataatgtgttttagttttgcagaagaacactgttgtagtttagaaggcttttcataaatcccctcataggcaaagatgaaaacttcccactatttttttcccctcttaggaagacatactggaaagaaaatgtttagcatcttagtgtagtatagctattgtaaacagttcatgactagattttgattcggaaatctatactgaccaaggattaatcttaaggattgtataattcattaaagctgtggtctttccatgtggagactgatagaaaataattttgtcccaagtcttatttgctgactttttctgtcatgagtgagattgttgaacaaactgaatatatgggctatagcaagtagctttacagtacagatcttacaattaagttttgcttttgttaaagtgtgtaccattttttctgtttggagtaagacaaaaattgttttgacataggttccctagggtacacttgctctagcatactttaaaggccactgttgcaaagtctacattttatgctgaatctgcattctgtcaggcacccgtagaaagacctcagtacatgctttgcactctcctttgctccctttttccaatttcttattgcatatcattttgttgtaatacagaaagcagcatttttaaatgtccgtgttaagaattggcccactggtaccaactcacctctattttgtcagttcatagttgaagattttgttttatttcaaaaacaaagtacatttttgaaataatgtttcagaataaaataatctcacttttaagtgatccattttaaaatttgtaattcaataaagttttttttgttgttaaacatatatc

SEQ ID NO: 262280 - protein, 391 aa, Artificial Sequence
  derived and/or modified sequence
LEGTAGTITSNEWSSPTSPEGSTASGGSQALDKPIDNDAEGVWSPDIEQSFQEALAIYPPCGRRKIILSDEGKMYGRNELIARYIKLRTGKTRTRKQVSSHIQVLARRKAREIQAKLKFWQGALPGQAGTSHDVKPFSQQTYAVQPPLPLPGFESPAGPAPSPSAPPAPPWQGRSVASSKLWMLEFSAFLEQQQDPDTYNKHLFVHIGQSSPSYSDPYLEAVDIRQIYDKFPEKKGGLKDLFERGPSNAFFLVKFWADLNTNIEDEGSSFYGVSSQYESPENMIITCSTKVCSFGKQVVEKVETEYARYENGHYSYRIHRSPLCEYMINFIHKLKHLPEKYMMNSVLENFTILQVVTNRDTQETLLCIAYVFEVSASEHGAQHHIYRLVKE

SEQ ID NO: 262281 - DNA, 1176 bp, Artificial Sequence
  derived and/or modified sequence
ctggagggcaccgccggcaccatcaccagcaacgagtggagcagccccaccagccccgagggcagcaccgccagcggcggcagccaggccctggacaagcccatcgacaacgacgccgagggcgtgtggagccccgacatcgagcagagcttccaggaggccctggccatctaccccccctgcggcagaagaaagatcatcctgagcgacgagggcaagatgtacggcagaaacgagctgatcgccagatacatcaagctgagaaccggcaagaccagaaccagaaagcaggtgagcagccacatccaggtgctggccagaagaaaggccagagagatccaggccaagctgaagttctggcagggcgccctgcccggccaggccggcaccagccacgacgtgaagcccttcagccagcagacctacgccgtgcagccccccctgcccctgcccggcttcgagagccccgccggccccgcccccagccccagcgccccccccgcccccccctggcagggcagaagcgtggccagcagcaagctgtggatgctggagttcagcgccttcctggagcagcagcaggaccccgacacctacaacaagcacctgttcgtgcacatcggccagagcagccccagctacagcgacccctacctggaggccgtggacatcagacagatctacgacaagttccccgagaagaagggcggcctgaaggacctgttcgagagaggccccagcaacgccttcttcctggtgaagttctgggccgacctgaacaccaacatcgaggacgagggcagcagcttctacggcgtgagcagccagtacgagagccccgagaacatgatcatcacctgcagcaccaaggtgtgcagcttcggcaagcaggtggtggagaaggtggagaccgagtacgccagatacgagaacggccactacagctacagaatccacagaagccccctgtgcgagtacatgatcaacttcatccacaagctgaagcacctgcccgagaagtacatgatgaacagcgtgctggagaacttcaccatcctgcaggtggtgaccaacagagacacccaggagaccctgctgtgcatcgcctacgtgttcgaggtgagcgccagcgagcacggcgcccagcaccacatctacagactggtgaaggagtag

SEQ ID NO: 262282 - DNA, 219 bp, Artificial Sequence
  derived and/or modified sequence
ctggagggcaccgccggcaccatcaccagcaacgagtggagcagccccaccagccccgagggcagcaccgccagcggcggcagccaggccctggacaagcccatcgacaacgacgccgagggcgtgtggagccccgacatcgagcagagcttccaggaggccctggccatctaccccccctgcggcagaagaaagatcatcctgagcgacgagggctag

SEQ ID NO: 262283 - DNA, 1176 bp, Artificial Sequence
  derived and/or modified sequence
cttgagggcaccgcagggacaatcacatctaatgaatggtcatccccaacaagtcccgaaggctccaccgccagcgggggcagtcaggcattagacaaacccatcgataacgacgcggaaggtgtgtggtcccccgacatcgaacagagctttcaagaagcattggccatctaccccccgtgtggccggagaaagatcattctatccgatgaggggaagatgtatggcagaaatgaactgattgcccggtacatcaagctgcggaccgggaagacaagaacgaggaaacaggttagttctcacattcaagtgctggcccggagaaaggctcgtgaaatccaggctaaacttaagttctggcagggcgccctgcccgggcaagccgggacttctcacgacgttaagccattttcccaacagacctacgcggtacaacccccactacctcttcccggattcgaaagtcctgctgggcccgcgccttcacctagtgctcccccggcccctccgtggcaaggcagaagcgttgcatcgagcaagctgtggatgctggagttctcggccttcctcgaacagcaacaggatcccgacacttataataagcatctctttgttcatatcgggcagagcagtccctcctacagcgatccatatttggaggcggttgacattcggcagatttatgataagtttcctgagaaaaagggtggcttaaaggacctctttgagagagggccaagcaatgccttctttctagtgaaattttgggctgacctcaatacaaatattgaggacgagggctcttcattctatggggtaagctctcaatatgaaagtccagagaatatgataatcacctgttccaccaaagtttgttcttttgggaagcaagtcgtggagaaggtggagactgaatacgctcgttatgagaatggtcattattcttatcggattcatcgttctcctctctgcgagtacatgataaactttatacataaactgaaacacctccctgagaaatacatgatgaattcggtgctggagaactttactatactgcaggtggtgaccaatcgcgatactcaggagaccctgctttgtattgcatacgtgttcgaggtgtctgcgtctgagcatggggcacagcaccatatttatcgtctggtcaaggagtag

SEQ ID NO: 262284 - DNA, 219 bp, Artificial Sequence
  derived and/or modified sequence
cttgagggaactgcaggcaccattaccagcaacgagtggagcagcccaactagtccagaaggatctacagcttccggcggcagtcaggcactggacaagcctatcgataacgatgcggagggagtatggagcccggacatagagcagtcttttcaggaagccctcgctatctacccaccttgtggtagacgaaagattatcttgtctgacgaagggtag

SEQ ID NO: 262285 - DNA, 1176 bp, Artificial Sequence
  derived and/or modified sequence
ctggagggcacagctggcaccatcaccagcaatgagtggagcagccccaccagccctgagggcagcacagccagcggcggcagccaggccctggacaagcccatcgacaatgatgctgagggcgtgtggagcccagacatcgagcagagcttccaggaggccctggccatctacccaccctgtggccgcaggaagatcatcctgagtgatgagggcaagatgtatggaagaaatgagctgattgcccgctacatcaagctgaggacaggcaagaccaggaccaggaagcaggtgagcagccacatccaggtgctggcccggaggaaggcccgggagatccaggccaagctgaagttctggcagggcgccctgcccggccaggccggcaccagccatgatgtgaagcccttcagccagcagacctatgctgtgcagccccccctgcccctgcccggctttgagagccctgctggccctgcccccagccccagcgcccccccagccccaccctggcagggccgctctgtggccagcagcaagctgtggatgctggagttcagcgccttcctggagcagcagcaggaccctgacacctacaacaagcacctgtttgtgcacatcggccagagcagccccagctacagcgacccctacctggaggccgtggacatccggcagatctatgacaagtttcctgagaagaagggcggcctgaaggacctgtttgagcggggccccagcaatgccttcttcctggtgaagttctgggccgacctgaacaccaacattgaagatgagggcagcagcttctatggagtgagcagccagtatgagagccctgagaacatgatcatcacctgcagcaccaaggtgtgcagctttgggaagcaggtggtggagaaggtggagacagaatatgcccgctatgaaaatggccactacagctaccgcatccacaggagccccctgtgtgagtacatgatcaacttcatccacaagctgaagcacctgcctgagaagtacatgatgaacagcgtgctggagaacttcaccatcctgcaggtggtgaccaacagagacacccaggagaccctgctgtgcatcgcctacgtgtttgaggtgtctgccagcgagcacggggcccagcaccacatctaccgcctggtgaaggagtag

SEQ ID NO: 262286 - DNA, 219 bp, Artificial Sequence
  derived and/or modified sequence
ctggagggcacagctggcaccatcaccagcaatgagtggagcagccccaccagccctgagggcagcacagccagcggcggcagccaggccctggacaagcccatcgacaatgatgctgagggcgtgtggagcccagacatcgagcagagcttccaggaggccctggccatctacccaccctgtggccgcaggaagatcatcctgagtgatgagggctag

SEQ ID NO: 262287 - DNA, 1176 bp, Artificial Sequence
  derived and/or modified sequence
ctggagggcaccgccggcaccatcaccagcaacgagtggagcagccccacgtcgccagagggctccaccgcttctggcggctctcaggccttggataaaccaattgacaatgatgcagagggggtgtggtcccccgacattgaacagtcattccaagaggcactggcgatctatcccccttgcggaagaagaaagatcatactgtcagacgagggcaaaatgtacgggaggaacgaactgatagcccgctatatcaagcttaggacagggaaaacaagaacgcgaaaacaagtgtcaagccacatccaggtactggcccggaggaaagcgcgtgagatccaagctaagctcaaattttggcaaggggccctgcccggacaggccggaacttcgcatgatgtgaagcccttcagccagcagacatatgctgtgcagcctcctctgccattacctggctttgaaagtccggctggtcctgctcctagcccctccgcccctccggccccgccgtggcaaggccgctctgtcgcgagttcaaagttatggatgctggagttttctgccttcctggagcagcaacaggaccccgatacttataacaagcatttgttcgttcacataggtcaatcttctcccagttacagtgatccctacctggaggctgtagatatcaggcagatctacgataaattcccagagaagaagggcggattaaaagacctcttcgaaagaggtccatctaatgcttttttcctggtgaaattttgggctgacttaaacacaaatatcgaagatgaaggatctagcttctatggagtctctagtcagtacgaatcccctgaaaacatgatcatcacctgcagtaccaaggtttgttccttcggcaaacaggtcgtagagaaagtggagactgaatatgcacggtatgaaaatggtcactatagctacaggatccacaggagtccactgtgtgaatatatgataaatttcattcataagcttaagcacctgccggagaagtacatgatgaattccgtgctcgagaacttcacaattcttcaggtggtgaccaatagagacacacaggagaccttgctttgtatagcttatgtgttcgaagtgtcggccagcgagcatggcgcccagcatcacatatacagactcgtgaaggagtag

SEQ ID NO: 262288 - DNA, 219 bp, Artificial Sequence
  derived and/or modified sequence
ctggagggcaccgccggcaccatcaccagcaacgagtggagcagccctacatctcctgagggaagcacggcttcgggtgggtcacaggccctcgacaagccaatcgacaatgacgccgagggcgtgtggagcccagatattgagcagagctttcaagaggccttggcaatctatccaccttgtggccgacgcaagatcattcttagcgatgaggggtag

SEQ ID NO: 262289 - DNA, 1176 bp, Artificial Sequence
  derived and/or modified sequence
ctcgaaggaacggccggaacgattacttccaatgaatggagctcacctacgtcacccgagggtagtacagcgtctggcggttctcaggcactggacaaacctatagataacgatgcggagggtgtgtggagccccgacattgagcaatcttttcaagaagcccttgcaatctacccaccctgtggcagacgcaagattatcctcagtgacgaaggcaaaatgtacggacggaacgagctcattgctcggtatataaaattgaggacagggaagaccagaacacgcaagcaggtgtccagtcacattcaagttctggccagacggaaagcccgagaaatacaggctaagcttaaattttggcagggtgcactaccaggacaggcgggaactagccacgatgtcaagcctttcagccagcagacctacgcggtgcagccacccctccccctgcctgggttcgagtctcccgctggcccagcccctagcccttccgctccccctgccccaccctggcagggtcgctccgtggcttccagtaaactgtggatgctcgaattttcagcctttctggagcagcagcaagatcccgacacgtataacaagcatctgttcgtacacatagggcagagcagcccctcttacagcgacccctatctggaggctgtggacatccgtcagatttacgacaaattccctgaaaagaagggcggtctaaaggacctgtttgaacgcggtccctcaaatgcctttttcctcgtcaagttctgggccgacctgaacacaaatatagaggacgaggggtctagtttttatggagtgtcctcacaatacgagtctccagaaaatatgattatcacttgttccaccaaggtgtgtagctttggcaaacaagtggtagagaaagtggagacagagtacgctcggtatgagaatggccactattcctatcggattcatcggtcacctttatgtgagtatatgattaactttatccacaagctgaagcacctgcccgaaaaatatatgatgaactcagtgttagaaaacttcaccattctgcaagtcgtcacaaatcgcgacactcaggagaccctgctgtgtatagcctatgtcttcgaggtatctgcatctgagcatggcgctcagcaccacatttaccgactagtgaaggagtag

SEQ ID NO: 262290 - DNA, 219 bp, Artificial Sequence
  derived and/or modified sequence
cttgagggaactgctggtaccataacttccaacgagtggtcatcccctacatcaccggaaggcagcactgcctccggcggaagtcaagccctggacaagcccatcgataatgacgccgaaggcgtttggagccctgatatcgaacagagtttccaggaggctcttgcgatctatccgccttgcggtaggcgaaagataatcctgtccgatgagggatag

SEQ ID NO: 262291 - DNA, 1637 bp, Artificial Sequence
  derived and/or modified sequence
gtggccccgccgccactccctccggctccctccctcccgccgcggcgcgcatctcattccagccctcattccgcgcattccagcgtcctcctcgcacactcgaggccagggggcgggagggccgcagctccggcgccgccgcgtcccgccagaacgatcgccgcggccggaagagttggcgctcggggcggactccttggaactggcttagcgcacccatcccaccttcccgcaccctgggaccggtccaacgagcgctcctccaagcggagccttggagggcacggccggcaccattacctccaacgagtggagctctcccacctcccctgaggggagcaccgcctctgggggcagtcaggcactggacaagcccatcgacaatgacgcagagggcgtgtggagcccggatattgagcagagtttccaggaggccctcgccatctacccgccctgtggcaggcgcaaaatcatcctgtcggacgagggcaagatgtatggtcggaacgagctgattgcccgctacatcaagctccggacagggaagacccgcaccaggaagcaggtctccagccacatccaggtgctggctcgtcgcaaagctcgcgagatccaggccaagctaaagttttggcaaggagctttgccaggccaagccggaacgtcccatgatgtgaagcctttctctcagcaaacctatgctgtccagcctccgctgcctctgccagggtttgagtctcctgcagggcccgccccatcgccctctgcgcccccggcacccccatggcagggccgcagcgtggccagctccaagctctggatgttggagttctctgccttcctggagcagcagcaggacccggacacgtacaacaagcacctgttcgtgcacattggccagtccagcccaagctacagcgacccctacctcgaagccgtggacatccgccaaatctatgacaaattcccggagaaaaagggtggactcaaggatctcttcgaacggggaccctccaatgccttttttcttgtgaagttctgggcagacctcaacaccaacatcgaggatgaaggcagctccttctatggggtctccagccagtatgagagccccgagaacatgatcatcacctgctccacgaaggtctgctctttcggcaagcaggtggtggagaaagttgagacagagtatgctcgctatgagaatggacactactcttaccgcatccaccggtccccgctctgtgagtacatgatcaacttcatccacaagctcaagcacctccctgagaagtacatgatgaacagcgtgctggagaacttcaccatcctgcaggtggtcaccaacagagacacacaggagaccttgctgtgcattgcctatgtctttgaggtgtcagccagtgagcacggggctcagcaccacatctacaggctggtgaaagaatgagagactcggggagcagggaggggggaagagacgtgtgtgcaggaaacggggacgtggggaggggacctgcaggggcagccccctgaagtgccaagagagctgagaggagcagttgtgactctacccaggaacaaactgtgcctgaacctgaggtgcccaaccccaaataaacccaagatgctgtgta

SEQ ID NO: 262292 - DNA, 570 bp, Artificial Sequence
  derived and/or modified sequence
ttccagcgtcctcctcgcacactcgaggccagggggcgggagggccgcagctccggcgccgccgcgtcccgccagaacgatcgccgcggccggaagagttggcgctcggggcggactccttggaactggcttagcgcacccatcccaccttcccgcaccctgggaccggtaaggctggggcgcggggacttggtaggactttgccggagggcaggagtctgcgcggtgcgtgcggagctccctcccgggacgagactgggaagagcgaggcacgtggaggcggcgcgactgaggctgctggaggcgaagcggctccaggggcgggtccaacgagcgctcctccaagcggagccttggagggcacggccggcaccattacctccaacgagtggagctctcccacctcccctgaggggagcaccgcctctgggggcagtcaggcactggacaagcccatcgacaatgacgcagagggcgtgtggagcccggatattgagcagagtttccaggaggccctcgccatctacccgccctgtggcaggcgcaaaatcatcctgtcggacgagggca

SEQ ID NO: 262293 - DNA, 918 bp, Artificial Sequence
  derived and/or modified sequence
atggccgccatgagcagcgcccagatcatcagcgccaccgccttccacagcagcatggccctggccagaggccccggcagacccgccgtgagcggcttctggcagggcgccctgcccggccaggccggcaccagccacgacgtgaagcccttcagccagcagacctacgccgtgcagccccccctgcccctgcccggcttcgagagccccgccggccccgcccccagccccagcgccccccccgcccccccctggcagggcagaagcgtggccagcagcaagctgtggatgctggagttcagcgccttcctggagcagcagcaggaccccgacacctacaacaagcacctgttcgtgcacatcggccagagcagccccagctacagcgacccctacctggaggccgtggacatcagacagatctacgacaagttccccgagaagaagggcggcctgaaggacctgttcgagagaggccccagcaacgccttcttcctggtgaagttctgggccgacctgaacaccaacatcgaggacgagggcagcagcttctacggcgtgagcagccagtacgagagccccgagaacatgatcatcacctgcagcaccaaggtgtgcagcttcggcaagcaggtggtggagaaggtggagaccgagtacgccagatacgagaacggccactacagctacagaatccacagaagccccctgtgcgagtacatgatcaacttcatccacaagctgaagcacctgcccgagaagtacatgatgaacagcgtgctggagaacttcaccatcctgcaggtggtgaccaacagagacacccaggagaccctgctgtgcatcgcctacgtgttcgaggtgagcgccagcgagcacggcgcccagcaccacatctacagactggtgaaggagtag

SEQ ID NO: 262294 - DNA, 918 bp, Artificial Sequence
  derived and/or modified sequence
atggcagctatgagctcggcgcagataatcagcgcgacagccttccatagctcaatggccctggcacgggggcctgggaggcctgctgtgtccggcttttggcagggcgccctccctggccaagctggtaccagccatgacgtgaagccattcagccagcagacctacgcagttcaacccccgcttccactacctgggttcgagtcacccgctgggccagcaccatccccaagcgcccccccagcccccccctggcagggccgatccgtggcttctagcaaactctggatgcttgagttttccgctttcttggagcagcaacaggatcctgacacttataacaagcacctcttcgttcacattggtcagtcaagtccctcatacagcgatccctacctggaagcagtcgatatccggcagatatatgataaattccccgagaagaagggtggcctgaaggacttatttgagcgcgggccctcaaatgcattctttctcgtgaaattctgggcggatctcaatactaacattgaagatgagggcagtagcttttatggggtgagcagccagtatgagtctcctgaaaatatgatcattacctgctcaaccaaggtttgctcttttggtaagcaggtggtggaaaaagtcgaaactgaatacgctcgatatgaaaatggtcactatagctatcgcattcatagatcaccgctgtgcgagtacatgattaactttattcacaagctgaaacatctgcccgaaaaatacatgatgaatagcgtgctagaaaatttcactatcctgcaggtggtgaccaacagagatacacaggagaccctcctgtgcatcgcatacgtgttcgaggtaagcgcctccgagcatggcgcccaacatcatatctaccggctcgtcaaagaatag

SEQ ID NO: 262295 - DNA, 918 bp, Artificial Sequence
  derived and/or modified sequence
atggccgccatgagcagcgcccagatcatcagcgccacagccttccacagctccatggccctggcccggggccctggccggcctgctgtgtctggcttctggcagggcgccctgcccggccaggccggcaccagccatgatgtgaagcccttcagccagcagacctatgctgtgcagccccccctgcccctgcccggctttgagagccctgctggccctgcccccagccccagcgcccccccagccccaccctggcagggccgctctgtggccagcagcaagctgtggatgctggagttcagcgccttcctggagcagcagcaggaccctgacacctacaacaagcacctgtttgtgcacatcggccagagcagccccagctacagcgacccctacctggaggccgtggacatccggcagatctatgacaagtttcctgagaagaagggcggcctgaaggacctgtttgagcggggccccagcaatgccttcttcctggtgaagttctgggccgacctgaacaccaacattgaagatgagggcagcagcttctatggagtgagcagccagtatgagagccctgagaacatgatcatcacctgcagcaccaaggtgtgcagctttgggaagcaggtggtggagaaggtggagacagaatatgcccgctatgaaaatggccactacagctaccgcatccacaggagccccctgtgtgagtacatgatcaacttcatccacaagctgaagcacctgcctgagaagtacatgatgaacagcgtgctggagaacttcaccatcctgcaggtggtgaccaacagagacacccaggagaccctgctgtgcatcgcctacgtgtttgaggtgtctgccagcgagcacggggcccagcaccacatctaccgcctggtgaaggagtag

SEQ ID NO: 262296 - DNA, 918 bp, Artificial Sequence
  derived and/or modified sequence
atggccgccatgagcagcgcccagatcatcagcgccaccgccttccactcatctatggctctggcacgaggacccggccgacctgctgtttccggcttttggcaaggtgccctgcctgggcaagcaggtaccagtcacgatgttaagcccttctcacagcaaacctacgccgtgcagcctcccctacccctgcctggattcgaatcccccgctgggcccgcaccatccccctccgctcctcctgccccaccgtggcaagggaggagtgtggccagttcaaagctttggatgttggagttcagcgctttcttggagcaacagcaggaccctgacacctacaataagcacctgtttgttcatatcgggcaaagttctccctcctacagcgacccttatttggaggcagtggatatcaggcaaatctacgataagtttccagaaaaaaagggaggtttaaaagaccttttcgaaagaggaccgtccaacgctttcttcttggtcaaattctgggctgacctcaatactaatatcgaagatgaagggtcttcattctacggcgtttcatcccagtatgaatcacccgagaacatgatcataacttgcagtaccaaggtgtgcagctttggcaagcaggtggtggaaaaagttgaaaccgaatacgcccggtacgaaaatggacattattcctatcgtatccatcgatctcctctgtgcgaatatatgattaattttatccataaactgaagcatctcccggagaaatatatgatgaactctgtcctcgagaacttcaccatcctgcaggtggtcaccaaccgggatactcaggagactctcctttgtatcgcatacgtgtttgaagtgtccgcttccgagcacggggctcagcaccacatttatcgcctggtcaaggagtag

SEQ ID NO: 262297 - DNA, 918 bp, Artificial Sequence
  derived and/or modified sequence
atggcagctatgtcatccgctcaaatcatctcagcgactgcgttccattcatctatggctctcgcccgtggcccaggtagacctgctgtctcaggattttggcaaggggctttacccggacaggctgggacctcacatgacgtgaagccattctcccagcagacatatgctgttcagccacctttaccactccccggttttgaatcccctgccggtcccgctccctctccatcggccccaccagccccaccttggcaaggacgctcagtcgcctcttcaaaactgtggatgctcgaattcagcgctttcttggaacaacagcaagatcctgatacgtacaataaacatctgttcgtgcatatcggacagagttccccctcctattctgacccttacttggaggctgtggacatacgccaaatctacgataaatttcccgagaaaaaggggggactgaaggacctgtttgaacggggtccaagcaacgcgttcttcctggtaaagttttgggccgatctgaatactaatattgaggacgagggcagctctttctatggcgtcagctctcagtacgagtctcctgagaacatgattataacctgcagtactaaggtgtgcagttttggaaagcaagtggtggagaaagttgaaactgaatacgccaggtatgaaaatggtcactatagctaccgcatccaccggtcacctctgtgcgagtatatgattaattttatccacaaactgaagcatctgccagagaaatatatgatgaattctgttttggagaatttcactatattgcaagttgtgactaatcgcgatactcaggaaactctgttatgcatcgcctatgtatttgaggtgagtgcatccgagcacggtgctcaacaccacatatatcgccttgtgaaggagtag

SEQ ID NO: 262298 - protein, 58 aa, Artificial Sequence
  derived and/or modified sequence
MAKERGLISPSDFAQLQKYMEYSTKKVSDVLKLFEDGEMAKYVQGDAIGYEGFQQFLK

SEQ ID NO: 262299 - protein, 21 aa, Artificial Sequence
  derived and/or modified sequence
MAKERGLISPSDFAQLQKYME

SEQ ID NO: 262300 - protein, 44 aa, Artificial Sequence
  derived and/or modified sequence
MAKERGLISPSDFAQLQKYMEYSTKKVSDVLKLFEDGEMAKYVQ

SEQ ID NO: 262301 - DNA, 2208 bp, Artificial Sequence
  derived and/or modified sequence
atggcaaaagagcgaggcctgatctcaccctcagatttcgcacagctgcaaaagtatatggagtattctacgaaaaaggtaagcgatgtcctcaagctgttcgaggatggggagatggcaaagtacgtacaaggagacgccatcggttatgaagggttccaacagtttctaaagatttatctggaggtagataacgtgccgagacatctctccctcgcactatttcagtcctttgagaccgggcattgtttgaacgagaccaatgtcacaaaggacgtggtttgtctgaacgatgttagctgctacttcagcctcctcgaaggagggcggccagaagacaaactcgaattcacattcaagttgtatgacactgaccggaacgggattctggacagctctgaagtggataagattattttgcagatgatgagggtggctgagtatttggattgggatgtgtccgagctgagacctattttgcaagagatgatgaaagagatcgactacgacggctcagggtctgtgtcccaggcggagtgggtgcgtgccggcgctactactgttcccctgctcgtcctacttgggctggagatgaccctgaaggacgatggccaacatatgtggaggcctaagcggttccctagacctgtatattgtaacctgtgtgaatcaagcatcgggctcggcaagcaaggactatcctgcaacctatgcaaatacaccgtacatgatcagtgtgccatgaaagccttgccctgcgaagtgtccacctacgccaaaagcagaaaggatatcggggtccaaagccatgtctgggttcgaggcggttgtgagtcaggaagatgtgacaggtgccaaaagaaaattcgaatctatcacagcttgaccggcctgcattgtgtgtggtgccatctggagattcacgacgactgtctgcaggccgtcggacacgaatgcgactgtgggctccttagagatcacattctgcctccttcctccatatacccctccgtcctggcgagtggaccagacaggaagaactccaagacctctcaaaaaaccatggacgacttgaacctctcgacctcagaagcccttcgaatcgaccccgttccaaacactcacccactcctggtttttgtcaaccctaaaagcgggggcaagcaaggccagagagttctgtggaagttccagtatatcctcaatcctaggcaagtgttcaatctgctgaaagatggcccagaaatcggactcagactgtttaaggatgtcccagacagccgcattttggtctgcggcggcgacgggactgtgggctggatcctggagacaattgacaaggccaatctgcccgtgttacccccagtggctgtcttgccgctcggcacaggcaacgacctcgccagatgcctcaggtggggcggagggtatgagggacagaacctcgcaaagattctgaaggatctagagatgagcaaggtggtgcacatggatcgctggagtgtcgaagtcataccacagcagacggaggagaagagtgaccctgtgcctttccagatcataaacaactattttagcataggtgtggatgcaagtattgcacacagatttcacatcatgagggaaaagtaccccgagaaatttaactcacggatgaaaaacaaactctggtattttgaattcgcgacatcggaaagcattttctcgacctgcaagaagctggaggagtcgttaactgttgaaatctgtggcaaaccactggacctctccaacctaagcctggaaggcattgcggtgctcaacatccccagtatgcacggtggatccaatctatggggtgataccagacggccacacggtgacatttacggtattaatcaggctttgggcgcaacagctaaagtgatcaccgaccctgacatcttaaaaacgtgtgtgccagatctctcagataaaagactagaggtcgtggggctcgaaggcgccattgaaatgggtcagatctataccaagttgaagaacgccgggagacgactggctaaatgttcagaaatcactttccacaccaccaagaccctgcccatgcagatcgatggcgagccttggatgcagacaccttgtaccatcaagatcacacataagaaccaaatgccaatgctgatgggtccacctccacgaagtactaatttttttggattcctgagttag

SEQ ID NO: 262302 - DNA, 2208 bp, Artificial Sequence
  derived and/or modified sequence
atggcaaaagaacgagggctcatttccccctccgacttcgcccagctgcagaagtacatggagtactctaccaagaaagtctctgacgtcctcaagctgtttgaagatggggagatggctaaatacgtgcagggagacgcaattgggtacgagggctttcaacagtttctaaagatctacttagaggtagacaatgtcccaagacatctgagcctggctcttttccagtcttttgaaactgggcactgcctgaacgaaacgaatgtgacaaaggatgtggtctgcctcaacgacgtttcctgttatttttccctgctcgaaggcggccgccctgaggataaattggagttcactttcaaattatacgataccgacagaaacggtatactcgacagcagtgaagtagacaagattatcctacagatgatgcgagtggccgaataccttgactgggacgtaagtgagctgagacctatcctccaagagatgatgaaagaaatagattacgacggatccgggtcagtatcgcaggctgagtgggtccgcgctggggccaccaccgtgccgcttctagtcctgctcggattagagatgaccctgaaggatgatggccagcacatgtggagaccaaaaaggtttcctcgtcccgtttactgtaatctgtgcgaaagttccattgggctgggcaagcaggggcttagttgtaatctgtgcaagtacaccgtccatgaccaatgcgcaatgaaagcccttccctgtgaggtgtctacttacgctaaatctcggaaggacataggagtacaatctcatgtgtgggttagaggggggtgtgagtctggaagatgcgatcgatgccaaaagaagataagaatctatcactcgctgaccggactgcactgcgtgtggtgtcatctggagatccacgacgactgcctccaggcggttggacacgaatgtgactgcggcttgctccgagatcacattctgccacccagcagcatttacccaagcgtcctagctagtggccctgacagaaagaactctaaaacgtctcagaaaactatggatgatttgaacctgtccacatccgaagccttgcgtatcgatcctgtacctaacacccaccccctcctggtgttcgtgaatccgaaatctggcggaaagcaaggccagagagtgctatggaaattccaatatattctcaatccccgacaggtgttcaacttgcttaaagatggccctgagattgggctgcgacttttcaaggatgtccccgattcccggatactcgtatgcggtggagatggtacagtgggttggatcttagagaccatcgataaagctaatctgccagttttgcctcctgtggcggtcttgcctcttggcacaggtaacgaccttgcacggtgcctgagatgggggggaggatatgaagggcagaatctggccaagatcctgaaggacctggagatgtcaaaggtggttcacatggatcgatggtctgtggaggttattcctcagcagacggaggagaaaagcgatcctgttcctttccagatcattaacaactacttttctatcggcgtggatgctagtatcgcccatcgcttccatattatgagagaaaagtatcccgagaaatttaatagccgcatgaagaacaaactgtggtatttcgagttcgctactagtgagagcatcttttctacttgcaagaaactggaagaatccctgaccgtggagatctgcgggaaacctttggatctgtctaacctcagccttgagggaattgctgtgctgaacattcctagtatgcacgggggtagtaatctgtggggagatactagaagaccccatggagacatctacggaataaaccaggccttaggggcgaccgccaaggtcatcactgatcctgacatccttaagacatgcgtgcctgacctctcagataagcgcctcgaagtcgtggggcttgagggagctattgaaatgggccagatatatacaaaattgaaaaatgctggacggagactcgccaagtgtagcgaaatcacctttcacaccacaaagaccctacccatgcagattgatggcgagccgtggatgcagacaccgtgtacaatcaagataacccataagaaccagatgcctatgttaatggggccgcctcccagaagcaccaacttttttgggtttctttcgtag

SEQ ID NO: 262303 - DNA, 744 bp, Artificial Sequence
  derived and/or modified sequence
atggctaaggaacgggggctgatctctccctccgatttcgcccagctgcagaagtatatggagtactctactaaaaaggtatcagatgttctgaaattgtttgaagatggagagatggcaaagtacgtgcaaggcgacgccatcggctacgaaggatttcagcagttccttaagatctacctagaggtggataatgtaccaaggcatttatcattggctctgttccagtccttcgaaaccggacactgcttgaatgagaccaatgtaaccaaagatgtggtgtgtcttaatgatgtgtcttgctactttagtctcttagaaggcggcagaccagaagataagcttgagttcacatttaagctgtacgacaccgaccgaaatggaatccttgactcttccgaagtcgacaagatcatcctgcagatgatgcgtgttgcagaataccttgactgggatgtctctgagctgcgaccaattcttcaagaaatgatgaaagagatcgactacgacggctccgggagcgtgagccaggcggaatgggtccgagccggggccactaccgtgcccctcctggtcctcctgggtcttgaaatgacactgaaggatgacgggcaacatatgtggcgtcccaagagattcccgagaccagtgtattgtaacctgtgcgagtcgagtatcggcctgggcaaacaaggtctgtcatgtaaccgtcctatcacatgcgtgggcgcaagacggctgtag

SEQ ID NO: 262304 - DNA, 351 bp, Artificial Sequence
  derived and/or modified sequence
atggctaaagagcggggcctgatttctccctctgattttgcacaactgcagaagtatatggagtattccacaaaaaaagtgtccgatgttctgaagctgttcgaggatggcgaaatggcaaagtacgtgcagggagacgctatcggttacgagggttttcagcagtttctcaagatttacctggaagtggacaatgtcccccgccatttaagcctcgcgctgttccagtcgtttgagaccggtcactgtctaaacgagactaacgtcactaaggacgtcgtctgtctaaacgatgtctcctgttatttcagtctgttggaaggcggtcggccggaggataagctcgagtag

SEQ ID NO: 262305 - DNA, 177 bp, Artificial Sequence
  derived and/or modified sequence
atggctaaggagcgtgggttaatcagcccatctgacttcgcccaactccagaaatacatggaatacagcacaaaaaaggtgtccgacgtactcaagttattcgaagatggggaaatggccaagtacgttcagggtgatgccataggctatgaaggcttccagcagtttctaaaatag

SEQ ID NO: 262306 - DNA, 444 bp, Artificial Sequence
  derived and/or modified sequence
atggctaaagagagaggcctgatttcccctagcgatttcgcccaacttcagaagtatatggaatattctaccaaaaaagtgagcgacgtactcaaattgtttgaggatggagagatggcaaaatacgttcagggggacgctattggctatgagggattccagcagtttctcaagatttacctcgaggtagataacgtgcctcggcacctttccctggctctgttccagagttttgagacgggacattgtcttaatgaaaccaacgtcaccaaggatgtggtctgtttgaacgatgtctcttgttacttctctctcctcgaaggcgggcgacctgaggataagttggaatttactttcaaactctatgacacggaccggaatggaatcctggattcttcagaggtcgataagattatcctgcagatgatgcgggtggctgagtag

SEQ ID NO: 262307 - DNA, 2208 bp, Artificial Sequence
  derived and/or modified sequence
atggcgaaggaacgtggccttatctcaccctctgatttcgctcagctgcagaaatatatggaatatagcaccaaaaaagtttccgacgtgttgaagttgttcgaggacggggagatggctaaatatgttcagggcgacgctattggatatgagggttttcaacagtttcttaagatctacctcgaagtcgacaatgtaccccgccacttatccctggctttgttccagagtttcgagacagggcattgtctgaacgagaccaatgttaccaaggacgtggtgtgcctcaacgatgtgagctgttatttctccctgctcgaagggggcagacccgaggataaactggaattcacattcaagctatacgatacagatagaaacggtatcttagattccagcgaggttgacaagatcatcctgcagatgatgcgcgtagcagagtatctggattgggatgtgtcagagctacgccccattctacaggaaatgatgaaggaaatcgattacgatggctcagggtctgtcagccaggctgagtgggtgcgcgccggtgcaaccaccgtgcctttactggtactgctgggactggaaatgaccctcaaggatgacggccaacatatgtggcgacccaagcgattcccaaggccggtgtactgtaacctttgcgaatctagcatcggtcttggtaaacaaggcctctcctgtaatctgtgcaaatatacggtacatgatcagtgcgcaatgaaagccctgccatgtgaggttagcacttatgctaagagtaggaaggacattggggtgcagtcccacgtgtgggttagaggcggctgcgagtccggccgatgtgatagatgccagaagaagatccgcatttatcacagtctgaccggcctccattgtgtctggtgccacctggaaatccatgacgattgcctgcaagctgtgggacacgagtgcgattgcggtttgctgagggatcatatacttccaccctcctcgatttacccatcagtcctggcctccgggccagaccgtaagaatagcaagacatcgcagaagaccatggatgatttgaacctttctactagtgaggccctacgaatcgatcctgtacccaatacccacccacttctggtcttcgtgaaccctaagtcaggcggtaaacaggggcagagggttctgtggaagtttcagtatatcttgaaccctcggcaggtcttcaatcttttaaaagacggcccggagattgggctgagattatttaaggatgtgccggacagccgcattctggtttgcgggggagacggaacagtagggtggatcctggagacaattgataaagcaaatctacctgtgctgccccccgtcgctgtactgccgctggggaccggaaatgacctcgccaggtgtctgagatggggcgggggatacgaagggcagaatctggccaagatcctcaaggatttggaaatgtctaaggtggtccatatggataggtggtccgtcgaagtaatccctcagcagaccgaggagaagagtgaccctgttcccttccagatcatcaacaattacttttcaattggtgtcgacgcatctatcgcccacagattccacataatgagagagaagtaccccgaaaagtttaacagccgcatgaaaaataagttgtggtactttgagttcgctacgtctgagtcaatcttctcaacgtgcaagaaactggaggagagcctgaccgtagagatctgtgggaaacctcttgatctatccaatttgagcctggaaggcatcgctgtgcttaatatcccgagcatgcatggggggtctaatctgtggggggacactaggcggccacacggggacatctatggcattaaccaggccttgggcgctacggctaaggttattacagacccagacatcctgaagacttgcgttcctgatctctccgataagcgccttgaggtggtcggcctagagggagccattgaaatgggtcagatttacacgaagcttaaaaatgcgggtcggcgcctcgccaagtgttccgagattaccttccacacaaccaaaaccctgcccatgcagattgacggggaaccctggatgcagaccccgtgtaccatcaagataacacacaaaaatcagatgcctatgctaatggggccaccgcctagatccactaatttttttgggttcctgtcctag

SEQ ID NO: 262308 - DNA, 402 bp, Artificial Sequence
  derived and/or modified sequence
atggcaaaggagagaggcttaattagtccctctgactttgctcagttgcaaaagtacatggaatactccacaaaaaaggtctccgatgtcctgaaactgttcgaggacggcgagatggctaagtacgtgcagggagatgctatagggtacgagggttttcaacagttcttgaagatctatctagaagttgataatgtcccccggcacttaagtttggctctattccagtcttttgaaactgggcattgtttaaatgaaaccaacgtgaccaaagatgtggtctgcttaaatgatgtcagctgttatttcagtttactggaaggcggtaggccggaggataaacttgagttcactttcaagctgtatgatacagaccggaacggtattcttgactcgagctag

SEQ ID NO: 262309 - DNA, 324 bp, Artificial Sequence
  derived and/or modified sequence
atggccaaagagaggggtctgatatccccaagtgatttcgcccaactgcagaaatatatggagtactccactaaaaaggtgtccgacgtcctcaagctgtttgaagatggagagatggcgaagtatgtccaaggcgacgctatcggatacgaaggatttcagcagttccttaagatttatttagaagtagacaacgtccccagacacttatccctggcactgttccaatcattcgaaaccggccactgtcttaatgaaactaatgtaacgaaggatgttgtttgcctgaacgatgtgagctgttacttttctctgctcgaatag

SEQ ID NO: 262310 - DNA, 402 bp, Artificial Sequence
  derived and/or modified sequence
atggccaaggagcggggcctcattagtcccagtgattttgcccaactccagaaatatatggaatacagcacaaagaaagtgagcgatgtgctcaagctattcgaagatggggagatggccaaatacgtgcagggagacgctatcggatacgaaggcttccaacaattcctgaagatatacctggaggttgacaatgtgccaagacacctgtcgcttgccttgtttcaatcttttgaaactggacactgtctgaacgaaactaacgtcacaaaggacgtagtgtgcctaaacgacgtatcttgctatttctcgctcctcgaaggcggcaggcccgaggacaagctggagtttacgtttaaactgtacgataccgatagaaacggtattcttgacagcagctag

SEQ ID NO: 262311 - DNA, 2208 bp, Artificial Sequence
  derived and/or modified sequence
atggccaaggagcggggcctcatcagccccagcgactttgcccagctgcagaagtacatggagtacagcaccaagaaggtgtctgatgtgctgaagctgtttgaagatggagagatggccaagtatgtgcagggagatgccatcggctatgagggcttccagcagttcctgaagatctacctggaggtggacaacgtgcccaggcacctgagcctggccctcttccagagctttgagaccggccactgcctgaatgagaccaacgtgaccaaggatgtggtgtgcctgaatgatgtgtcctgctacttcagcctgctggagggcggccggcctgaggacaagctggagttcaccttcaagctgtatgacacagacagaaatggcatcctggacagcagcgaggtggacaagatcatcctgcagatgatgagggtggccgagtacctggactgggatgtgtctgagctgcggcccatcctgcaggagatgatgaaggagattgattatgatggcagcggctctgtgtcccaggccgagtgggtgcgggccggggccaccaccgtgcccctgctggtgctgctgggcctggagatgaccctgaaggatgatggccagcacatgtggaggcccaagcgcttccccaggcctgtgtactgcaacctgtgtgagagcagcatcggcctgggcaagcagggcctgagctgcaacctgtgcaagtacacagtgcatgaccagtgtgccatgaaggccctgccctgtgaggtgtccacctacgccaagagcaggaaggacattggagtgcagagccacgtgtgggtgcggggcggctgtgagagcggccgctgtgaccgctgccagaagaagatccgcatctaccacagcctgaccggcctgcactgtgtgtggtgccacctggagatccatgatgactgcctgcaggccgtgggccatgaatgtgactgtggcctgctgcgggaccacatcctgccccccagcagcatctaccccagcgtgctggccagcggccctgacaggaagaacagcaagaccagccagaagaccatggatgacctgaacctgagcaccagcgaggccctgagaattgatcctgtgcccaacacccaccccctgctggtgtttgtgaaccccaagagcggcggcaagcagggccagagggtgctgtggaagttccagtacatcctgaacccccggcaggtgttcaacctgctgaaggatggccctgagatcggcctgcggctcttcaaggatgtgcctgacagccgcatcctggtgtgtggaggagatggcaccgtgggctggatcctggagaccatcgacaaggccaacctgcctgtgctgccccctgtggccgtgctgcccctgggcactggaaatgacctggcccgctgcctgcgctggggcggcggctatgagggccagaacctggccaagatcctgaaggacctggagatgagcaaggtggtgcacatggaccgctggagcgtggaggtgatcccccagcagacagaggagaagagtgaccctgtgcccttccagatcatcaacaactacttcagcattggagtggatgccagcatcgcccaccgcttccacatcatgagggagaagtacccagagaagttcaacagcaggatgaagaacaagctgtggtactttgaatttgccaccagcgagagcatcttcagcacctgcaagaagctggaggagagcctgactgtggagatctgtgggaagcccctggacctgagcaacctgagcctggagggcattgctgtgctgaacatccccagcatgcacggcggcagcaacctgtggggagacacccggcggccccatggagacatctacggcatcaaccaggccctgggcgccacagccaaggtgatcacagatcctgacatcctgaagacctgtgtgcctgacctgagtgacaagaggctggaggtggtgggcctggagggcgccatcgagatgggccagatctacaccaagctgaagaatgccggccgccgcctggccaagtgcagcgagatcaccttccacaccaccaagaccctgcccatgcagattgatggagagccctggatgcagaccccctgcaccatcaagatcacccacaagaaccagatgcccatgctgatgggccccccacccaggagcaccaacttcttcggcttcctgtcctag

SEQ ID NO: 262312 - DNA, 744 bp, Artificial Sequence
  derived and/or modified sequence
atggccaaggagcggggcctcatcagccccagcgactttgcccagctgcagaagtacatggagtacagcaccaagaaggtgtctgatgtgctgaagctgtttgaagatggagagatggccaagtatgtgcagggagatgccatcggctatgagggcttccagcagttcctgaagatctacctggaggtggacaacgtgcccaggcacctgagcctggccctcttccagagctttgagaccggccactgcctgaatgagaccaacgtgaccaaggatgtggtgtgcctgaatgatgtgtcctgctacttcagcctgctggagggcggccggcctgaggacaagctggagttcaccttcaagctgtatgacacagacagaaatggcatcctggacagcagcgaggtggacaagatcatcctgcagatgatgagggtggccgagtacctggactgggatgtgtctgagctgcggcccatcctgcaggagatgatgaaggagattgattatgatggcagcggctctgtgtcccaggccgagtgggtgcgggccggggccaccaccgtgcccctgctggtgctgctgggcctggagatgaccctgaaggatgatggccagcacatgtggaggcccaagcgcttccccaggcctgtgtactgcaacctgtgtgagagcagcatcggcctgggcaagcagggcctgagctgcaaccggcccatcacctgtgtgggcgcccggcggctgtag

SEQ ID NO: 262313 - DNA, 351 bp, Artificial Sequence
  derived and/or modified sequence
atggccaaggagcggggcctcatcagccccagcgactttgcccagctgcagaagtacatggagtacagcaccaagaaggtgtctgatgtgctgaagctgtttgaagatggagagatggccaagtatgtgcagggagatgccatcggctatgagggcttccagcagttcctgaagatctacctggaggtggacaacgtgcccaggcacctgagcctggccctcttccagagctttgagaccggccactgcctgaatgagaccaacgtgaccaaggatgtggtgtgcctgaatgatgtgtcctgctacttcagcctgctggagggcggccggcctgaggacaagctggagtag

SEQ ID NO: 262314 - DNA, 177 bp, Artificial Sequence
  derived and/or modified sequence
atggccaaggagcggggcctcatcagccccagcgactttgcccagctgcagaagtacatggagtacagcaccaagaaggtgtctgatgtgctgaagctgtttgaagatggagagatggccaagtatgtgcagggagatgccatcggctatgagggcttccagcagttcctgaagtag

SEQ ID NO: 262315 - DNA, 444 bp, Artificial Sequence
  derived and/or modified sequence
atggccaaggagcggggcctcatcagccccagcgactttgcccagctgcagaagtacatggagtacagcaccaagaaggtgtctgatgtgctgaagctgtttgaagatggagagatggccaagtatgtgcagggagatgccatcggctatgagggcttccagcagttcctgaagatctacctggaggtggacaacgtgcccaggcacctgagcctggccctcttccagagctttgagaccggccactgcctgaatgagaccaacgtgaccaaggatgtggtgtgcctgaatgatgtgtcctgctacttcagcctgctggagggcggccggcctgaggacaagctggagttcaccttcaagctgtatgacacagacagaaatggcatcctggacagcagcgaggtggacaagatcatcctgcagatgatgagggtggccgagtag

SEQ ID NO: 262316 - DNA, 402 bp, Artificial Sequence
  derived and/or modified sequence
atggccaaggagcggggcctcatcagccccagcgactttgcccagctgcagaagtacatggagtacagcaccaagaaggtgtctgatgtgctgaagctgtttgaagatggagagatggccaagtatgtgcagggagatgccatcggctatgagggcttccagcagttcctgaagatctacctggaggtggacaacgtgcccaggcacctgagcctggccctcttccagagctttgagaccggccactgcctgaatgagaccaacgtgaccaaggatgtggtgtgcctgaatgatgtgtcctgctacttcagcctgctggagggcggccggcctgaggacaagctggagttcaccttcaagctgtatgacacagacagaaatggcatcctggacagcagctag

SEQ ID NO: 262317 - DNA, 324 bp, Artificial Sequence
  derived and/or modified sequence
atggccaaggagcggggcctcatcagccccagcgactttgcccagctgcagaagtacatggagtacagcaccaagaaggtgtctgatgtgctgaagctgtttgaagatggagagatggccaagtatgtgcagggagatgccatcggctatgagggcttccagcagttcctgaagatctacctggaggtggacaacgtgcccaggcacctgagcctggccctcttccagagctttgagaccggccactgcctgaatgagaccaacgtgaccaaggatgtggtgtgcctgaatgatgtgtcctgctacttcagcctgctggagtag

SEQ ID NO: 262318 - DNA, 2208 bp, Artificial Sequence
  derived and/or modified sequence
atggccaaggagcggggcctgatcagccccagcgacttcgcccagctgcagaaatatatggaatacagtacaaagaaggtctcggatgtgcttaagctgttcgaagatggcgagatggccaagtacgtgcagggagacgctatcggatacgaaggctttcagcagttccttaagatttatttggaggtcgataacgtccccagacatcttagcctcgccctgttccagagttttgaaactggacattgtctgaatgaaacgaacgtaacgaaggacgtggtgtgcctcaatgacgtgtcctgctatttcagcttactcgagggcgggagacccgaagataagctggaattcactttcaagctctatgataccgacaggaacgggattttggattccagcgaagtggataaaatcatcctgcagatgatgcgcgtggctgagtacctggactgggacgtgtccgaactgcgtcccatcctccaggagatgatgaaggagattgattatgatggatcgggctctgtgtctcaagctgagtgggtgcgcgcaggtgctaccaccgtccctctcttagtcctgctgggcctggagatgactttaaaggacgatgggcagcacatgtggcgccctaaaagatttcccaggccagtctattgcaatctctgcgagtcttcaatagggctcgggaaacaaggcctgtcttgcaacctttgtaaatatacagtgcacgaccagtgtgcaatgaaagccctcccatgcgaagtttcaacctacgctaagtctcggaaagacataggcgtgcaatcccatgtctgggtgcgcggaggatgtgagtctggaaggtgtgatcgctgtcaaaaaaagattcgcatttatcactcactcacgggcctacattgcgtttggtgccacctggagattcacgatgactgcctgcaggcggtagggcatgagtgtgactgtggcttattgcgcgatcatatccttcctccctcgagcatctatcccagcgtgctggccagtggacccgacagaaaaaactcaaagacgtcacagaaaacaatggatgacctcaatctgagtacctccgaagctctaagaatcgatcccgtcccaaacacccacccactcttggtattcgtgaatccaaagagcggaggcaagcaggggcagcgggtgctgtggaagttccagtatattctcaatccgaggcaagttttcaatcttctgaaggatggtcctgagatcggtctccgcctgtttaaggatgtgcccgactcgcgaatcctggtctgcggaggagatggcacagttggatggatcctggaaacaatcgacaaggccaatctgccggtcctgccgccagtagcagtgctgccgctgggaacaggaaatgatttggcaaggtgtttacgctggggcggcggttatgagggacagaacttagctaaaattctaaaggatctggagatgagcaaagtggtgcatatggacaggtggtcggtagaggttatcccacaacagacagaggagaagtcagatcccgtgccgtttcagatcatcaacaattatttctctattggggtcgacgccagtatagcccatcggttccatatcatgagggagaagtatccggaaaagtttaactctaggatgaaaaataagctttggtattttgagttcgccacatctgagtcaatcttctccacctgtaaaaaactcgaagagagcctgacagttgagatctgtgggaagccgctagacctgtcaaacctgagcttggaaggaatagctgtgcttaacatccccagcatgcacggcgggagcaatttatggggcgatacccggcggccacacggcgatatctacggtatcaatcaagccttgggcgccacagcaaaggtgatcacagacccggacatccttaaaacttgcgttcctgacttgagcgataagcgcttggaggtggtagggcttgagggggccattgaaatggggcagatttacacgaaacttaaaaatgcgggaaggcggctagccaagtgcagcgaaatcaccttccacactaccaaaactcttcccatgcagatcgacggagaaccttggatgcagactccctgcaccatcaaaataactcataagaaccagatgccaatgttaatgggtcccccacctcgttcgactaatttcttcggcttcctaagctag

SEQ ID NO: 262319 - DNA, 2208 bp, Artificial Sequence
  derived and/or modified sequence
atggccaaggagcggggcctgatcagccccagcgacttcgcccagctgcagaaatatatggagtatagcaccaagaaagtgtctgatgtgctgaaactatttgaagacggcgaaatggccaagtacgttcaaggcgacgcaattgggtacgaaggcttccagcagttcttgaagatatacttggaagtcgataatgtacccagacaccttagtctggctctgtttcagtcatttgagacgggacattgtctgaatgaaacgaacgtcactaaagacgtagtttgcctgaacgatgtctcttgctacttctcactcctcgaggggggacggccagaagacaagctagagttcaccttcaagttatacgatactgacaggaatggcatattagactcatctgaagtggataagatcatcctccaaatgatgcgagtggccgaatacttggattgggatgtatccgaactgcgacccattctacaggagatgatgaaggagattgactatgacgggagtggcagtgtctcccaggccgaatgggtgagggctggcgctacgacggttccactgctggtgctcctcgggctggagatgacactcaaagacgacgggcagcacatgtggcgacctaaacgttttccaaggcccgtgtattgtaacttatgcgaaagctctatcggactcggcaaacagggcttgagctgcaacttgtgtaagtacaccgtacacgaccagtgcgccatgaaagccctgccttgcgaggtttccacgtacgccaaatcaagaaaagatattggcgtccagtcccatgtttgggtacgtggggggtgcgagagcggccgctgtgatcggtgtcagaaaaagattaggatatatcattcgctaaccggtctgcactgtgtatggtgtcacctcgagatccatgatgactgtcttcaggctgtcgggcatgagtgtgattgtggcctgctccgggatcatatccttcctccttcttccatctaccccagcgtgttagctagtggaccggacagaaagaacagtaagacttcccagaagaccatggacgatcttaacttgagcacatccgaggccttgcggatcgaccccgtgcccaacacacacccattgcttgtctttgtcaacccaaagtccggcggaaaacaaggacagcgcgtactctggaagttccagtacatccttaaccctagacaggtgtttaatctattgaaggatggccctgaaattgggctgcgcctcttcaaggatgtccccgactccagaatcctcgtttgcgggggagacggtacagtggggtggatcctggaaactattgataaagctaatctcccggtgctgcctcctgtcgctgtcctaccactaggaacaggcaacgacctggctcgttgccttaggtggggggggggctacgaagggcaaaatctagcgaaaatcctcaaggacctcgagatgtccaaagtggtgcacatggataggtggagcgtggaggtgattcctcaacaaaccgaggaaaaatccgacccagtcccttttcaaataattaataattatttcagtattggcgtcgatgccagtatcgctcatagattccacattatgagggaaaaatatcccgaaaaatttaatagccggatgaagaataagctctggtacttcgagtttgccacaagcgagtctattttctcaacatgcaagaaactcgaagagagcctgacagttgagatatgtggcaagccgctggacctcagcaacttaagcctggaagggatcgccgtgctcaacattccctcaatgcacgggggcagtaatctatggggcgacacacgccggccacacggagatatttatggtattaaccaggcactcggtgctactgctaaagtgattaccgacccggacattcttaaaacctgtgtgcctgacctctctgataagaggctggaggtagtgggcttggagggtgccatcgaaatggggcaaatctacacaaagctcaagaacgcgggaagaagacttgctaaatgttccgagattacatttcatacgaccaagaccctgcccatgcaaatcgatggtgagccttggatgcagaccccatgcactatcaaaataactcacaagaaccagatgccaatgctcatgggccctcctccccgctctacaaacttcttcggatttctgagttag

SEQ ID NO: 262320 - DNA, 744 bp, Artificial Sequence
  derived and/or modified sequence
atggccaaggagcggggcctgatcagccccagcgacttcgcccagttgcagaaatacatggagtactccacaaaaaaagtctccgatgtgctgaagcttttcgaagatggcgagatggccaagtacgtgcagggggacgcaatcgggtacgagggctttcagcagttcctgaagatctacctggaagtagataatgtgcccaggcacctgagtctggcactattccagtccttcgaaacaggtcactgcctgaacgagacaaacgtgacaaaggatgtcgtctgcttaaacgacgtctcttgttacttctcccttttagagggcgggcgcccagaggataagctggaatttacttttaaactttatgatacagatcggaatggtatcctggattcttccgaagtggataagattatcctccagatgatgcgggtcgctgagtacctggactgggacgtttcggagcttcgacccatattgcaggagatgatgaaggagatcgactatgacggcagcggcagtgtatcccaagctgaatgggtgagagcgggagccacaaccgtgccccttctggtactgctagggctggagatgactcttaaagacgacgggcagcatatgtggcgtccaaagagattcccccgtccagtttactgtaacctgtgtgagtcatccataggcctcgggaaacagggactgtcttgcaatcggccgatcacttgtgtgggcgccaggcgtctctag

SEQ ID NO: 262321 - DNA, 351 bp, Artificial Sequence
  derived and/or modified sequence
atggccaaggagcggggcctgatcagccccagcgacttcgcccagctgcaaaaatatatggaatactccactaagaaggtcagcgatgtgctcaagctatttgaagatggggagatggctaaatacgtccagggggatgccatcggatacgaggggttccagcagtttttgaaaatttacctggaggtggacaatgtaccccggcacctctcactggctttgttccagtccttcgagactggacattgcctgaacgagaccaatgtcactaaggacgttgtgtgcctgaatgacgtgtcctgttacttcagtctgcttgaaggaggtaggcccgaagataaactggagtag

SEQ ID NO: 262322 - DNA, 177 bp, Artificial Sequence
  derived and/or modified sequence
atggccaaggagcggggcctgatcagccccagcgacttcgcccagctgcaaaaatatatggagtattctactaagaaggtgtctgacgtactaaagctcttcgaagacggagagatggctaaatacgtacaaggggacgctattgggtatgaaggctttcaacagtttctaaagtag

SEQ ID NO: 262323 - DNA, 444 bp, Artificial Sequence
  derived and/or modified sequence
atggccaaggagcggggcctgatcagccccagcgacttcgcccagttgcagaagtacatggagtactccacaaagaaagtgtcagacgtgctgaagctcttcgaggacggtgaaatggcaaagtacgtccagggggatgcaatcggatacgaaggatttcagcagttcttgaagatctatctggaggtcgacaatgtacctaggcacctgtccctggccctctttcagtccttcgaaacaggccactgtcttaatgaaacaaacgtgacaaaggatgtcgtatgtctgaacgacgtgtcgtgttatttcagcttactagaaggtggaaggcccgaggataagctagagttcacctttaaactgtacgacacggaccgcaacggcattttggactcttctgaggtggacaaaatcatactacagatgatgagggtggccgagtag

SEQ ID NO: 262324 - DNA, 2208 bp, Artificial Sequence
  derived and/or modified sequence
atggccaaggagcggggcctgatcagccccagcgacttcgcccagctccagaaatacatggaatatagcacgaaaaaggtgtcggacgttctgaaattattcgaagacggggagatggccaagtatgttcagggggacgctatcggctatgaaggcttccagcagtttctgaagatttatctggaagtggacaacgttcctagacacctttccctggccctgttccagtcatttgagacagggcactgtcttaatgaaacaaatgtgacgaaggacgtggtttgcctgaatgacgtctcctgttacttcagtctgctagagggtggtaggccagaggacaaactggaatttacctttaagctctacgacacagaccgaaatggcatcctggactcaagcgaagtagacaagatcatcctccagatgatgagagtggctgagtacctggattgggatgtgagtgagctcagacctattctacaggagatgatgaaagaaatcgattacgacggctctggttccgtgagtcaggcagagtgggtaagggccggcgctactactgttccgttgctggtgctcctgggcctggagatgacactgaaagatgacggccaacacatgtggaggcctaaaagattccctaggcctgtttactgtaacttgtgtgagagtagcatcgggcttggcaagcagggtctatcctgcaacctgtgcaaatatacagttcacgatcagtgcgccatgaaagccctcccatgcgaggtgtcaacatatgccaagtcccgcaaagacatcggcgtccagtcgcacgtgtgggtgcgagggggttgtgaaagcgggcgctgtgatcgctgtcagaagaaaatccgaatctatcactcactgaccggcttgcactgcgtttggtgtcatctggaaatacacgacgattgtcttcaggccgtgggccacgagtgtgactgtggcttgttgcgcgaccacatcctgcctccttcctccatctatccaagcgtgctggcctcagggccagatagaaaaaattctaaaacatcacagaaaaccatggatgacttaaatctgagcacaagtgaagcccttcggattgatccagtaccaaatacgcacccactgctggtattcgtgaatcccaagtccggggggaaacaaggtcagcgggtgttgtggaaattccagtacatccttaatccccggcaggtgttcaatctcctaaaggacggaccagaaatcggtttgcgcctcttcaaggacgtcccggactcccgcatcctggtctgcgggggggacggaacagtggggtggatactcgaaacgatcgataaggctaacctgccggtgctccctccagtggccgtgctcccacttggcacaggcaacgatctggcccgctgcctgcggtggggcggtgggtacgagggccagaacttggccaaaatcttaaaagatctggagatgtccaaagtcgtgcacatggatcggtggagcgtggaggtaatcccacagcaaaccgaggaaaaaagcgaccccgtcccattccagatcataaataactattttagcatcggcgtcgacgctagtatcgcccatcggttccatatcatgagagagaagtaccccgaaaaatttaatagccggatgaagaacaagctgtggtactttgagttcgctacctctgaatccattttcagcacctgcaagaagctcgaagagagcctgacagtggagatctgcggaaaaccactggatctgtctaacctgtccctggagggcatcgccgtcctaaatattccaagcatgcatggagggagcaatttatggggagatactcgtagacctcacggtgatatttatgggattaaccaggccttgggtgctacagctaaggtcattacagaccccgacattctgaaaacatgcgtaccagacctttccgacaagcggctggaggttgtggggctggagggggcaatagaaatgggccagatctacacaaaattgaagaatgccggtagaagactggccaaatgctcagagatcaccttccacacaacaaagacactcccgatgcaaatagacggcgaaccttggatgcagactccctgcactatcaaaatcactcacaaaaatcaaatgccaatgctgatggggcctccacctcggtctactaatttctttggctttctaagttag

SEQ ID NO: 262325 - DNA, 402 bp, Artificial Sequence
  derived and/or modified sequence
atggccaaggagcggggcctgatcagccccagcgacttcgcccagcttcagaagtacatggagtatagcactaaaaaggtatccgacgtgctcaagctcttcgaggatggggaaatggccaaatacgtccagggggatgctatagggtacgagggatttcaacagttcctgaaaatctacttggaggtcgacaatgtccctagacacttgtcactcgctctgttccaatcgtttgaaacgggacattgtctaaatgagaccaacgtcacaaaagacgtggtatgtcttaacgacgtgagttgttacttctcactgctcgaagggggccgccccgaggataaactggagtttactttcaaactgtacgacaccgatagaaatgggatacttgatagtagctag

SEQ ID NO: 262326 - DNA, 324 bp, Artificial Sequence
  derived and/or modified sequence
atggccaaggagcggggcctgatcagccccagcgacttcgcccagctgcaaaagtatatggaatacagcaccaaaaaggtgagcgacgtgctgaagctgtttgaagacggcgagatggcaaagtacgtccagggtgatgctattggctacgaaggttttcagcagttcctcaagatttacctggaggtggacaacgtaccacggcacctatccttggccttattccagagtttcgagaccggacactgccttaatgagacaaatgtcaccaaagacgtagtatgcttaaacgacgtttcatgctattttagcctcctggaatag

SEQ ID NO: 262327 - DNA, 402 bp, Artificial Sequence
  derived and/or modified sequence
atggccaaggagcggggcctgatcagccccagcgacttcgcccagcttcagaagtacatggagtactccactaagaaggtctctgacgtgctcaagctcttcgaggacggcgaaatggcaaaatacgtgcagggcgacgcaatcggctatgaaggcttccagcaatttctcaaaatctacctggaagtagacaatgtgccccgccacctgagccttgccctgtttcagtccttcgaaactgggcactgcctgaacgaaacgaacgtcacgaaggacgtggtctgtctgaatgatgtgagttgctacttctctctactagaaggaggacgtcccgaggataaattagaattcacctttaagctgtatgatactgatcgtaatggtatcttagactcatcttag

SEQ ID NO: 262328 - DNA, 2208 bp, Artificial Sequence
  derived and/or modified sequence
atggctaaggaacggggtctgatatcgccctcagattttgcccaattgcaaaagtacatggagtactcaaccaaaaaggtcagcgacgtgctgaagctcttcgaggatggcgaaatggcaaagtacgtacagggagacgccatcggatatgagggtttccaacagtttctgaagatctatctggaggtggataacgttccacggcacctgtccctggcactcttccagagctttgagaccgggcattgcctgaatgagactaacgtgacaaaggatgtcgtctgcctcaatgatgtcagttgctacttttcactacttgaaggaggacggccagaagataagctcgaatttacctttaaactctatgatactgaccggaacgggattctcgattcttctgaagtcgacaaaatcatcctccagatgatgagagtggccgagtacctcgattgggacgtgtctgagttgcgtccaatcctgcaggagatgatgaaggagatcgattatgacggtagcggcagcgtctcacaggcagaatgggttagggctggtgccaccacggttcctctactggtgttgctcggcctggagatgactttaaaggatgacggccagcatatgtggagaccgaagcggttccctcgcccagtgtactgcaacctgtgcgagagcagtattggtctagggaaacaaggcttgagctgtaatctctgtaagtatactgttcacgatcaatgtgccatgaaggccctgccttgcgaagttagcacttacgcgaagagcaggaaagatattggtgtgcagtcccacgtatgggttcgaggcggttgcgagtctgggaggtgcgatcgatgtcagaaaaaaatcaggatttaccactccttaacgggcctccactgtgtgtggtgccacctggaaatccacgatgactgtttgcaagccgtgggtcatgagtgcgactgtgggctgttgagggatcacatattaccgccatcttccatatatccgtcggtgcttgcctctggccctgacaggaagaacagtaagactagccagaagaccatggatgacctcaatctgagcacatcagaggcactccgtatagatcccgtgcctaacacacatcccctgttggtatttgttaatccaaaaagtgggggtaagcagggacagcgggtcctgtggaagtttcaatacatattgaatcccaggcaggttttcaatctgcttaaggacggcccagaaatcgggctgaggctattcaaggacgtccccgattcaaggatcctggtgtgtggaggcgacggcaccgttggttggatattggagaccatcgacaaagcgaatttaccagttctgcctcccgttgccgtgctccctctgggtacaggcaatgatctggcccgatgtctgaggtggggaggtgggtatgaaggtcagaacctcgccaagatcctgaaggacctggaaatgtctaaggtggttcatatggaccgctggagcgtggaagtgattccacagcagacagaggagaagagtgatccagtgccttttcagatcattaataattatttctctatcggcgttgacgcctcaatcgcccacagattccacatcatgcgggagaaatacccagagaagttcaattcccggatgaaaaataaactatggtactttgagtttgcaacttccgagtccatttttagcacctgcaagaagctggaagagtctctgaccgtggagatttgcgggaaaccactcgacctttctaacctcagcttggagggtatagccgtgctgaacatccctagtatgcacggcggttctaacctatggggtgacaccagacgaccacacggagatatctatggcatcaaccaggctcttggggctaccgcaaaagtaattaccgatcccgatattctcaagacatgtgtgccagatctctcagataaaagacttgaagtggtgggacttgagggcgctatcgagatgggacaaatatatacaaaactgaagaacgctggcagacgtttggccaagtgcagtgagatcaccttccacaccacaaaaacacttcctatgcaaatagatggcgagccttggatgcagactccctgtaccattaagattactcacaagaatcaaatgccaatgttgatgggacccccacctcgatcgactaacttcttcggttttctctcctag

SEQ ID NO: 262329 - DNA, 2208 bp, Artificial Sequence
  derived and/or modified sequence
atggctaaagaaagggggttgatctccccatctgatttcgctcagttacagaagtacatggagtactccactaaaaaagtgagcgatgtgttgaaactgttcgaagatggcgagatggcgaagtatgttcaaggagatgcgatcggttatgaggggtttcagcagttcttgaaaatatatctcgaagttgacaatgtgccccgtcatttgtcactggctctgttccagtcatttgaaaccggacactgcctcaacgagaccaatgtgaccaaagatgtagtctgtctcaatgacgttagctgctacttttctcttctcgagggtgggaggcctgaagacaagttagagttcacgttcaaactttatgataccgaccgaaatggaatcctagatagcagcgaggtggataaaattatactgcagatgatgagggtagcagagtatctcgattgggacgtgagtgagctacggccaatcctgcaagagatgatgaaggaaatcgattacgacggttccggtagcgtgagtcaggcagaatgggttcgggcaggcgctacaacggtgcctttactcgtcctgttgggcctggaaatgacgctgaaagatgacggccagcatatgtggcgtcctaagcggttccccagacctgtctactgtaatctgtgtgaatcttcaatcggtttgggtaagcagggcctttcctgcaatctctgcaagtacacagtgcatgaccaatgcgcaatgaaagcactgccatgtgaagtctcaacgtatgccaaatctcggaaagacatcggggtgcagagtcacgtgtgggttaggggcggttgcgaatctgggaggtgcgaccgttgtcagaagaagatccgtatttaccattcacttaccgggctccactgtgtttggtgccacctcgaaatccacgacgactgcttacaggctgtaggacatgagtgtgactgcggactcctccgtgaccatatcctgcccccatccagtatctacccatcggtattagctagcgggcctgatcgtaagaattccaagaccagccagaaaactatggatgatctgaacctctccacctcagaggcattgcggattgacccggttcccaacacgcatcctctccttgtgtttgttaatcctaaaagtggcggaaaacaggggcaaagggtgctatggaaattccagtacattctgaaccccagacaggtattcaacttgctcaaggacgggcctgaaatcggtctgagattatttaaagacgttccagatagccgaatactggtgtgtgggggtgatggtactgtgggctggattcttgaaacaatcgacaaggccaatctacctgtcctgccaccagtggcggtattaccgctgggcaccggtaacgacctggccagatgcctgaggtggggaggcggatacgaaggccagaatctagctaagatcctgaaggatcttgaaatgagtaaggtggtgcatatggacaggtggtcagtcgaggttattcctcaacaaacagaggaaaagagcgaccccgtgccctttcaaatcatcaacaattacttctcaattggagtggacgcatccatagcccaccgcttccacatcatgagggaaaaatacccagagaaatttaactctagaatgaagaacaaactgtggtacttcgagttcgccacgagcgagtctatcttcagcacctgtaaaaagttggaggaatccctcaccgtggagatctgcgggaagccgctcgatctgtccaacctgagcctggaagggattgcagtgctcaatattccctccatgcatgggggatcgaacctgtggggagataccaggcgaccgcacggagacatttatggtatcaatcaagcactcggggcaacagccaaggtgatcaccgatccagatatactgaagacttgtgtgcctgatctgtctgacaagcgattggaagtggtgggcctggagggggcaatagaaatggggcaaatctacactaagctcaagaatgccggacgccgactggctaagtgcagcgagattacttttcacacaactaaaaccttaccaatgcagatcgatggggagccgtggatgcaaactccttgcaccataaagataacccacaagaaccagatgcctatgttgatggggccacccccaaggtccaccaacttctttggtttcttaagttag

SEQ ID NO: 262330 - DNA, 744 bp, Artificial Sequence
  derived and/or modified sequence
atggctaaagagcggggactgatctcgccctccgacttcgcacagttacagaaatatatggaatattctactaagaaagtgtcagacgtgctcaagctttttgaggatggagagatggcaaaatacgtgcagggcgatgcgatcggctacgaaggtttccaacagttcctgaagatctatttggaggtggataatgtccctcgacacctgtcactagcattgttccagagcttcgagactgggcattgtttgaatgagaccaacgtaacaaaggacgtggtatgcctaaacgacgtttcatgctacttctccctgctggaggggggaaggcccgaagacaagcttgagttcacattcaagctgtatgacacagaccggaacggtattttggacagtagtgaggtagacaagatcatcctgcagatgatgagggttgctgagtacctcgattgggatgtgtccgagttgagacctatcctgcaggagatgatgaaggaaatcgattatgacggatctggcagcgtttcccaagctgagtgggtcagggcaggagcaactaccgtccccctgctagtactgctggggttagagatgacccttaaggatgatggccagcacatgtggaggccaaaaaggtttccacgcccagtgtattgtaacctctgcgaatcttcgataggcctgggcaagcagggtctttcttgcaatcgccctataacgtgcgttggggctagacgcctttag

SEQ ID NO: 262331 - DNA, 351 bp, Artificial Sequence
  derived and/or modified sequence
atggctaaagaacggggacttatcagccccagcgactttgcccaacttcagaagtatatggaatacagcaccaaaaaagtgagtgacgtcctaaaattgtttgaggatggtgagatggccaaatacgtgcagggggatgcgataggctatgaggggttccagcagttcctcaaaatttatcttgaggtggacaatgtgccacgccatttgagtctcgctctcttccaatcctttgagactggtcactgcctcaacgagactaatgtaacaaaggacgtggtgtgtctaaacgatgttagttgttacttcagcctcctcgagggcggacggccagaggataagctggagtag

SEQ ID NO: 262332 - DNA, 177 bp, Artificial Sequence
  derived and/or modified sequence
atggcgaaggaacgaggcttgataagcccctcggacttcgcccagctgcaaaaatacatggaatactctaccaagaaagtatctgatgttcttaagctgtttgaggacggagaaatggccaagtacgtgcagggcgatgctattggatatgagggctttcagcagtttctgaaatag

SEQ ID NO: 262333 - DNA, 444 bp, Artificial Sequence
  derived and/or modified sequence
atggctaaagagcgtgggctaatttcaccttccgattttgcccagctccagaaatacatggaatactccaccaaaaaggtctccgacgtacttaagttgtttgaggatggtgaaatggcgaaatacgtgcagggggatgccatcggatatgaagggtttcagcaatttctgaagatttatctggaggtcgacaatgtgcccagacatttgagcttggcgctatttcagtccttcgagacaggacactgtcttaacgaaacgaacgtgaccaaggacgtggtctgcttgaacgacgtgagttgttacttctcactgctggaaggaggtcgtcccgaagataagctcgagttcacctttaaattgtatgatacagacaggaacggtattctcgatagcagtgaggttgataaaatcatcctgcagatgatgcgcgttgcagagtag

SEQ ID NO: 262334 - DNA, 2208 bp, Artificial Sequence
  derived and/or modified sequence
atggcgaaggaaagaggtctgatctccccatccgatttcgcacagctgcagaagtacatggagtatagtactaagaaagtttccgacgtactgaagctattcgaagatggggagatggcaaagtatgtccaaggcgacgcaatcggatatgaaggatttcagcagtttttgaagatttaccttgaggtcgacaacgtccctagacaccttagtttagctctgttccagagcttcgagaccggccactgtctcaacgaaacaaacgtgacaaaggatgtagtctgtctgaatgatgtgtcctgttacttctccttactggaggggggaagaccagaagataaactcgaatttacattcaaactgtacgataccgacagaaatgggatcctggacagttcggaggttgacaaaatcatcctccaaatgatgcgcgtcgccgagtatctggattgggatgtgtcagagctccgccctattctgcaagaaatgatgaaggagatagattacgacggttctgggtccgtgtctcaggctgaatgggtaagggctggagccacaaccgtacctctcctcgtgcttttaggcctcgaaatgaccctgaaggatgatgggcagcacatgtggagacccaaaaggtttcctcgcccagtgtattgcaatctctgcgagagctccatcggcctgggaaagcagggattgtcttgtaatttgtgtaagtacaccgtacacgaccagtgcgccatgaaagctttaccctgcgaagtgtccacttatgcaaagtcacggaaggatattggtgtccagagccacgtgtgggtaaggggcggttgcgaatccgggcgatgcgaccggtgtcagaagaaaattaggatctatcacagtctgaccggcctgcactgtgtctggtgccatttagaaatccacgatgactgcctgcaggccgtgggccacgaatgcgactgtggtctcctgcgggatcatatcctgcccccatcctcaatttaccctagtgtcttagcttcagggccagatagaaaaaatagtaagacctctcaaaaaaccatggatgacctgaacttgagcacctccgaggcactgagaatcgaccctgtccccaatacccaccccctgctcgtgttcgtcaacccaaaatccggcggtaagcaaggacagcgggtcttgtggaagtttcagtatatactgaatccacgtcaggtttttaaccttctgaaagacggacctgagatcggccttcgtctattcaaagacgttcccgactccagaattctcgtgtgtggcggagatgggacagttggctggatcctcgaaacaattgataaggccaatctgcccgtcttgcctcccgttgcggtgctgccactggggaccggaaatgacctggctcgctgtctgcgttggggcggtggttacgaagggcagaacctggcgaaaattttgaaagatttggagatgagcaaagtggtgcacatggacagatggagcgtggaagttattccccaacaaacagaggaaaagagcgatccggtgccatttcagatcatcaacaattacttctccatcggagtcgatgcctctatagctcacaggttccacataatgcgtgaaaaataccctgaaaagttcaacagccgcatgaagaacaaactttggtacttcgaattcgcaacgagcgaaagcatcttcagtacatgtaagaagctggaggagtcactgacagtcgagatttgcgggaagcccctggacctcagcaatctctccctggaggggatcgcagtgttaaacatcccctctatgcacggaggttctaatctttggggagatacaagacggccacacggggatatctacggaataaaccaagcgctgggcgcaaccgctaaggtaataaccgatccagacattctgaaaacttgcgtcccagacctttcagacaagcgcctcgaagtggtgggactggagggggcaattgagatgggacaaatctataccaaactgaagaacgcgggtcggcgacttgccaagtgctccgaaatcacttttcacactacgaagaccttgcctatgcagatcgacggcgagccttggatgcaaactccctgcacaattaaaatcacgcataagaatcaaatgccaatgctgatgggcccacccccacgatcaacaaattttttcgggttcctttcctag

SEQ ID NO: 262335 - DNA, 402 bp, Artificial Sequence
  derived and/or modified sequence
atggccaaagagcgaggcttgatatccccatccgacttcgcccaactgcagaaatacatggaatatagcactaaaaaggtgtctgacgtcctgaagttgttcgaggacggtgagatggctaagtacgttcagggtgatgctatcgggtacgaggggtttcagcagttcttaaaaatttacctggaggtggacaacgtgcctcgtcacctgtctctggcactgttccaaagtttcgaaactggacattgcctgaacgaaactaatgtgaccaaggacgttgtgtgcctcaatgacgtttcatgctactttagcttgctagagggcggacgaccagaagacaaactggagtttacttttaagctgtatgatacagaccgcaacggaatccttgactcgagctag

SEQ ID NO: 262336 - DNA, 324 bp, Artificial Sequence
  derived and/or modified sequence
atggccaaagaaagaggcctgatatcaccatccgacttcgcccagctgcaaaaatacatggagtacagcacaaaaaaggtcagcgatgttctgaagctgtttgaggatggtgagatggccaagtatgtccaaggggatgccatagggtatgagggttttcagcaattcctgaagatctaccttgaggtcgataacgttccaagacacttgagcttggccctgtttcagtctttcgaaacgggccactgtctaaacgagacaaacgtgacgaaagatgttgtgtgtctgaacgacgtgagctgttacttttctctcctggagtag

SEQ ID NO: 262337 - DNA, 402 bp, Artificial Sequence
  derived and/or modified sequence
atggccaaagagcgcggactcatcagcccgagcgattttgcccagctccaaaagtatatggagtactccacaaagaaggtgtctgacgtcctgaagctgtttgaggacggggagatggctaaatacgtgcaaggggacgctatcggctacgagggcttccaacaattcctgaagatctatctcgaagtcgacaacgtccccaggcacctgtctctcgcattattccagtcctttgagactggacattgcctgaatgagactaacgtgaccaaagatgtggtttgcctgaatgatgtttcatgttacttcagtctcctcgaaggcggtcgtcccgaggataaactggagttcacatttaagctttacgatacagaccgtaacggaatactggatagttcctag

SEQ ID NO: 262338 - DNA, 2208 bp, Artificial Sequence
  derived and/or modified sequence
atggccaaggagagaggcctgatcagccccagcgacttcgcccagctgcagaagtacatggagtacagcaccaagaaggtgagcgacgtgctgaagctgttcgaggacggcgagatggccaagtacgtgcagggcgacgccatcggctacgagggcttccagcagttcctgaagatctacctggaggtggacaacgtgcccagacacctgagcctggccctgttccagagcttcgagaccggccactgcctgaacgagaccaacgtgaccaaggacgtggtgtgcctgaacgacgtgagctgctacttcagcctgctggagggcggcagacccgaggacaagctggagttcaccttcaagctgtacgacaccgacagaaacggcatcctggacagcagcgaggtggacaagatcatcctgcagatgatgagagtggccgagtacctggactgggacgtgagcgagctgagacccatcctgcaggagatgatgaaggagatcgactacgacggcagcggcagcgtgagccaggccgagtgggtgagagccggcgccaccaccgtgcccctgctggtgctgctgggcctggagatgaccctgaaggacgacggccagcacatgtggagacccaagagattccccagacccgtgtactgcaacctgtgcgagagcagcatcggcctgggcaagcagggcctgagctgcaacctgtgcaagtacaccgtgcacgaccagtgcgccatgaaggccctgccctgcgaggtgagcacctacgccaagagcagaaaggacatcggcgtgcagagccacgtgtgggtgagaggcggctgcgagagcggcagatgcgacagatgccagaagaagatcagaatctaccacagcctgaccggcctgcactgcgtgtggtgccacctggagatccacgacgactgcctgcaggccgtgggccacgagtgcgactgcggcctgctgagagaccacatcctgccccccagcagcatctaccccagcgtgctggccagcggccccgacagaaagaacagcaagaccagccagaagaccatggacgacctgaacctgagcaccagcgaggccctgagaatcgaccccgtgcccaacacccaccccctgctggtgttcgtgaaccccaagagcggcggcaagcagggccagagagtgctgtggaagttccagtacatcctgaaccccagacaggtgttcaacctgctgaaggacggccccgagatcggcctgagactgttcaaggacgtgcccgacagcagaatcctggtgtgcggcggcgacggcaccgtgggctggatcctggagaccatcgacaaggccaacctgcccgtgctgccccccgtggccgtgctgcccctgggcaccggcaacgacctggccagatgcctgagatggggcggcggctacgagggccagaacctggccaagatcctgaaggacctggagatgagcaaggtggtgcacatggacagatggagcgtggaggtgatcccccagcagaccgaggagaagagcgaccccgtgcccttccagatcatcaacaactacttcagcatcggcgtggacgccagcatcgcccacagattccacatcatgagagagaagtaccccgagaagttcaacagcagaatgaagaacaagctgtggtacttcgagttcgccaccagcgagagcatcttcagcacctgcaagaagctggaggagagcctgaccgtggagatctgcggcaagcccctggacctgagcaacctgagcctggagggcatcgccgtgctgaacatccccagcatgcacggcggcagcaacctgtggggcgacaccagaagaccccacggcgacatctacggcatcaaccaggccctgggcgccaccgccaaggtgatcaccgaccccgacatcctgaagacctgcgtgcccgacctgagcgacaagagactggaggtggtgggcctggagggcgccatcgagatgggccagatctacaccaagctgaagaacgccggcagaagactggccaagtgcagcgagatcaccttccacaccaccaagaccctgcccatgcagatcgacggcgagccctggatgcagaccccctgcaccatcaagatcacccacaagaaccagatgcccatgctgatgggccccccccccagaagcaccaacttcttcggcttcctgagctag

SEQ ID NO: 262339 - DNA, 744 bp, Artificial Sequence
  derived and/or modified sequence
atggccaaggagagaggcctgatcagccccagcgacttcgcccagctgcagaagtacatggagtacagcaccaagaaggtgagcgacgtgctgaagctgttcgaggacggcgagatggccaagtacgtgcagggcgacgccatcggctacgagggcttccagcagttcctgaagatctacctggaggtggacaacgtgcccagacacctgagcctggccctgttccagagcttcgagaccggccactgcctgaacgagaccaacgtgaccaaggacgtggtgtgcctgaacgacgtgagctgctacttcagcctgctggagggcggcagacccgaggacaagctggagttcaccttcaagctgtacgacaccgacagaaacggcatcctggacagcagcgaggtggacaagatcatcctgcagatgatgagagtggccgagtacctggactgggacgtgagcgagctgagacccatcctgcaggagatgatgaaggagatcgactacgacggcagcggcagcgtgagccaggccgagtgggtgagagccggcgccaccaccgtgcccctgctggtgctgctgggcctggagatgaccctgaaggacgacggccagcacatgtggagacccaagagattccccagacccgtgtactgcaacctgtgcgagagcagcatcggcctgggcaagcagggcctgagctgcaacagacccatcacctgcgtgggcgccagaagactgtag

SEQ ID NO: 262340 - DNA, 351 bp, Artificial Sequence
  derived and/or modified sequence
atggccaaggagagaggcctgatcagccccagcgacttcgcccagctgcagaagtacatggagtacagcaccaagaaggtgagcgacgtgctgaagctgttcgaggacggcgagatggccaagtacgtgcagggcgacgccatcggctacgagggcttccagcagttcctgaagatctacctggaggtggacaacgtgcccagacacctgagcctggccctgttccagagcttcgagaccggccactgcctgaacgagaccaacgtgaccaaggacgtggtgtgcctgaacgacgtgagctgctacttcagcctgctggagggcggcagacccgaggacaagctggagtag

SEQ ID NO: 262341 - DNA, 177 bp, Artificial Sequence
  derived and/or modified sequence
atggccaaggagagaggcctgatcagccccagcgacttcgcccagctgcagaagtacatggagtacagcaccaagaaggtgagcgacgtgctgaagctgttcgaggacggcgagatggccaagtacgtgcagggcgacgccatcggctacgagggcttccagcagttcctgaagtag

SEQ ID NO: 262342 - DNA, 444 bp, Artificial Sequence
  derived and/or modified sequence
atggccaaggagagaggcctgatcagccccagcgacttcgcccagctgcagaagtacatggagtacagcaccaagaaggtgagcgacgtgctgaagctgttcgaggacggcgagatggccaagtacgtgcagggcgacgccatcggctacgagggcttccagcagttcctgaagatctacctggaggtggacaacgtgcccagacacctgagcctggccctgttccagagcttcgagaccggccactgcctgaacgagaccaacgtgaccaaggacgtggtgtgcctgaacgacgtgagctgctacttcagcctgctggagggcggcagacccgaggacaagctggagttcaccttcaagctgtacgacaccgacagaaacggcatcctggacagcagcgaggtggacaagatcatcctgcagatgatgagagtggccgagtag

SEQ ID NO: 262343 - DNA, 402 bp, Artificial Sequence
  derived and/or modified sequence
atggccaaggagagaggcctgatcagccccagcgacttcgcccagctgcagaagtacatggagtacagcaccaagaaggtgagcgacgtgctgaagctgttcgaggacggcgagatggccaagtacgtgcagggcgacgccatcggctacgagggcttccagcagttcctgaagatctacctggaggtggacaacgtgcccagacacctgagcctggccctgttccagagcttcgagaccggccactgcctgaacgagaccaacgtgaccaaggacgtggtgtgcctgaacgacgtgagctgctacttcagcctgctggagggcggcagacccgaggacaagctggagttcaccttcaagctgtacgacaccgacagaaacggcatcctggacagcagctag

SEQ ID NO: 262344 - DNA, 324 bp, Artificial Sequence
  derived and/or modified sequence
atggccaaggagagaggcctgatcagccccagcgacttcgcccagctgcagaagtacatggagtacagcaccaagaaggtgagcgacgtgctgaagctgttcgaggacggcgagatggccaagtacgtgcagggcgacgccatcggctacgagggcttccagcagttcctgaagatctacctggaggtggacaacgtgcccagacacctgagcctggccctgttccagagcttcgagaccggccactgcctgaacgagaccaacgtgaccaaggacgtggtgtgcctgaacgacgtgagctgctacttcagcctgctggagtag

SEQ ID NO: 262345 - DNA, 2582 bp, Artificial Sequence
  derived and/or modified sequence
agcccagctcgggctccagctccagcgccggcgcttcagctgcgaccgcgagccctctcaagcaaggtagagaccccgcgagccccccagcgccccaccctcccccatcggaaaaggacaggggcctaccctctgaagaggtccaagcaacggaagtactactacgaagctgcctttctggccatccttgagaaaaatagacagatggccaaggagaggggcctaataagccccagtgattttgcccagctgcaaaaatacatggaatactccaccaaaaaggtcagtgatgtcctaaagctcttcgaggatggcgagatggctaaatatgtccaaggagatgccattgggtacgagggattccagcaattcctgaaaatctatctcgaagtggataatgttcccagacacctaagcctggcactgtttcaatcctttgagactggtcactgcttaaatgagacaaatgtgacaaaagatgtggtgtgtctcaatgatgtttcctgctacttttcccttctggagggtggtcggccagaagacaagttagaattcaccttcaagctgtacgacacggacagaaatgggatcctggacagctcagaagtggacaaaattatcctacagatgatgcgagtggctgaatacctggattgggatgtgtctgagctgaggccgattcttcaggagatgatgaaagagattgactatgatggcagtggctctgtctctcaagctgagtgggtccgggctggggccaccaccgtgccactgctagtgctgctgggtctggagatgactctgaaggacgacggacagcacatgtggaggcccaagaggttccccagaccagtctactgcaatctgtgcgagtcaagcattggtcttggcaaacagggactgagctgtaaccgtccaatcacatgtgtgggtgcgaggaggctgtgagtccgggcgctgcgaccgctgtcagaaaaagatccggatctaccacagtctgaccgggctgcattgtgtatggtgccacctagagatccacgatgactgcctgcaagcggtgggccatgagtgtgactgtgggctgctccgggatcacatcctgcctccatcttccatctatcccagtgtcctggcctctggaccggatcgtaaaaatagcaaaacaagccagaagaccatggatgatttaaatttgagcacctctgaggctctgcggattgaccctgttcctaacacccacccacttctcgtctttgtcaatcctaagagtggcgggaagcaggggcaaagggtgctctggaagttccagtatatattaaaccctcgacaggtgttcaacctcctaaaggatggtcctgagatagggctccgattattcaaggatgttcctgatagccggattttggtgtgtggtggagacggcacagtaggctggattctagagaccattgacaaagctaacttgccagttttgcctcctgttgctgtgttgcccctgggtactggaaatgatctggctcgatgcctaagatggggaggaggttatgaaggacagaatctggcaaagatcctcaaggatttagagatgagtaaagtggtacatatggatcgatggtctgtggaggtgatacctcaacaaactgaagaaaaaagtgacccagtcccctttcaaatcatcaataactacttctctattggcgtggatgcctctattgctcatcgattccacatcatgcgagagaaatatccggagaagttcaacagcagaatgaagaacaagctatggtacttcgaatttgccacatctgaatccatcttctcaacatgcaaaaagctggaggagtctttgacagttgagatctgtgggaaaccgctggatctgagcaacctgtccctagaaggcatcgcagtgctaaacatccctagcatgcatggtggctccaacctctggggtgataccaggagaccccatggggatatctatgggatcaaccaggccttaggtgctacagctaaagtcatcaccgaccctgatatcctgaaaacctgtgtaccagacctaagtgacaagagactggaagtggttgggctggagggtgcaattgagatgggccaaatctataccaagctcaagaatgctggacgtcggctggccaagtgctctgagatcaccttccacaccacaaaaacccttcccatgcaaattgacggagaaccctggatgcagacgccctgtacaatcaagatcacccacaagaaccagatgcccatgctcatgggcccacccccccgctccaccaatttctttggcttcttgagctaagggggacacccttggcctccaagccagccttgaacccacctccctgtccctggactctactcccgaggctctgtacattgctgccacatactcctgccagcttgggggagtgttccttcaccctcacagtatttattatcctgcaccacctcactgttccccatgcgcacacacatacacacaccccaaaacacatacattgaaagtgcctcatctgaataaaatgacttgtgtttcccctttgggatctgctaagtaa

SEQ ID NO: 262346 - protein, 945 aa, Artificial Sequence
  derived and/or modified sequence
MAEGQGGGGQRWDWAGGGRAAEEEVVRRRCRRGEEAQVAQPWPEGSRGTAAGPPVEERFRQLHLRKQVSYRKAITKSGLQHLAPPPPTPGAPCSESERQIRSTVDWSESATYGEHIWFETNVSGDFCYVGEQYCVARMLKSVSRRKCAACKIVVHTPCIEQLEKINFRCKPSFRESGSRNVREPTFVRHHWVHRRRQDGKCRHCGKGFQQKFTFHSKEIVAISCSWCKQAYHSKVSCFMLQQIEEPCSLGVHAAVVIPPTWILRARRPQNTLKASKKKKRASFKRKSSKKGPEEGRWRPFIIRPTPSPLMKPLLVFVNPKSGGNQGAKIIQSFLWYLNPRQVFDLSQGGPKEALEMYRKVHNLRILACGGDGTVGWILSTLDQLRLKPPPPVAILPLGTGNDLARTLNWGGGYTDEPVSKILSHVEEGNVVQLDRWDLHAEPNPEAGPEDRDEGATDRLPLDVFNNYFSLGFDAHVTLEFHESREANPEKFNSRFRNKMFYAGTAFSDFLMGSSKDLAKHIRVVCDGMDLTPKIQDLKPQCVVFLNIPRYCAGTMPWGHPGEHHDFEPQRHDDGYLEVIGFTMTSLAALQVGGHGERLTQCREVVLTTSKAIPVQVDGEPCKLAASRIRIALRNQATMVQKAKRRSAAPLHSDQQPVPEQLRIQVSRVSMHDYEALHYDKEQLKEASVPLGTVVVPGDSDLELCRAHIERLQQEPDGAGAKSPTCQKLSPKWCFLDATTASRFYRIDRAQEHLNYVTEIAQDEIYILDPELLGASARPDLPTPTSPLPTSPCSPTPRSLQGDAAPPQGEELIEAAKRNDFCKLQELHRAGGDLMHRDEQSRTLLHHAVSTGSKDVVRYLLDHAPPEILDAVEENGETCLHQAAALGQRTICHYIVEAGASLMKTDQQGDTPRQRAEKAQDTELAAYLENRQHYQMIQREDQETAV

SEQ ID NO: 262347 - DNA, 2838 bp, Artificial Sequence
  derived and/or modified sequence
atggccgagggccagggcggcggcggccagagatgggactgggccggcggcggcagagccgccgaggaggaggtggtgagaagaagatgcagaagaggcgaggaggcccaggtggcccagccctggcccgagggcagcagaggcaccgccgccggcccccccgtggaggagagattcagacagctgcacctgagaaagcaggtgagctacagaaaggccatcaccaagagcggcctgcagcacctggccccccccccccccacccccggcgccccctgcagcgagagcgagagacagatcagaagcaccgtggactggagcgagagcgccacctacggcgagcacatctggttcgagaccaacgtgagcggcgacttctgctacgtgggcgagcagtactgcgtggccagaatgctgaagagcgtgagcagaagaaagtgcgccgcctgcaagatcgtggtgcacaccccctgcatcgagcagctggagaagatcaacttcagatgcaagcccagcttcagagagagcggcagcagaaacgtgagagagcccaccttcgtgagacaccactgggtgcacagaagaagacaggacggcaagtgcagacactgcggcaagggcttccagcagaagttcaccttccacagcaaggagatcgtggccatcagctgcagctggtgcaagcaggcctaccacagcaaggtgagctgcttcatgctgcagcagatcgaggagccctgcagcctgggcgtgcacgccgccgtggtgatcccccccacctggatcctgagagccagaagaccccagaacaccctgaaggccagcaagaagaagaagagagccagcttcaagagaaagagcagcaagaagggccccgaggagggcagatggagacccttcatcatcagacccacccccagccccctgatgaagcccctgctggtgttcgtgaaccccaagagcggcggcaaccagggcgccaagatcatccagagcttcctgtggtacctgaaccccagacaggtgttcgacctgagccagggcggccccaaggaggccctggagatgtacagaaaggtgcacaacctgagaatcctggcctgcggcggcgacggcaccgtgggctggatcctgagcaccctggaccagctgagactgaagccccccccccccgtggccatcctgcccctgggcaccggcaacgacctggccagaaccctgaactggggcggcggctacaccgacgagcccgtgagcaagatcctgagccacgtggaggagggcaacgtggtgcagctggacagatgggacctgcacgccgagcccaaccccgaggccggccccgaggacagagacgagggcgccaccgacagactgcccctggacgtgttcaacaactacttcagcctgggcttcgacgcccacgtgaccctggagttccacgagagcagagaggccaaccccgagaagttcaacagcagattcagaaacaagatgttctacgccggcaccgccttcagcgacttcctgatgggcagcagcaaggacctggccaagcacatcagagtggtgtgcgacggcatggacctgacccccaagatccaggacctgaagccccagtgcgtggtgttcctgaacatccccagatactgcgccggcaccatgccctggggccaccccggcgagcaccacgacttcgagccccagagacacgacgacggctacctggaggtgatcggcttcaccatgaccagcctggccgccctgcaggtgggcggccacggcgagagactgacccagtgcagagaggtggtgctgaccaccagcaaggccatccccgtgcaggtggacggcgagccctgcaagctggccgccagcagaatcagaatcgccctgagaaaccaggccaccatggtgcagaaggccaagagaagaagcgccgcccccctgcacagcgaccagcagcccgtgcccgagcagctgagaatccaggtgagcagagtgagcatgcacgactacgaggccctgcactacgacaaggagcagctgaaggaggccagcgtgcccctgggcaccgtggtggtgcccggcgacagcgacctggagctgtgcagagcccacatcgagagactgcagcaggagcccgacggcgccggcgccaagagccccacctgccagaagctgagccccaagtggtgcttcctggacgccaccaccgccagcagattctacagaatcgacagagcccaggagcacctgaactacgtgaccgagatcgcccaggacgagatctacatcctggaccccgagctgctgggcgccagcgccagacccgacctgcccacccccaccagccccctgcccaccagcccctgcagccccacccccagaagcctgcagggcgacgccgcccccccccagggcgaggagctgatcgaggccgccaagagaaacgacttctgcaagctgcaggagctgcacagagccggcggcgacctgatgcacagagacgagcagagcagaaccctgctgcaccacgccgtgagcaccggcagcaaggacgtggtgagatacctgctggaccacgccccccccgagatcctggacgccgtggaggagaacggcgagacctgcctgcaccaggccgccgccctgggccagagaaccatctgccactacatcgtggaggccggcgccagcctgatgaagaccgaccagcagggcgacacccccagacagagagccgagaaggcccaggacaccgagctggccgcctacctggagaacagacagcactaccagatgatccagagagaggaccaggagaccgccgtgtag

SEQ ID NO: 262348 - DNA, 3816 bp, Artificial Sequence
  derived and/or modified sequence
ggagagtgtctctaaggtgacactcgggtgcgcggcagcagcggcggttgcaggagctcgctctccgcccgggctccggctccgctccagccgtccggggggcgccgcggcgcgcagagcgcagcaccccgactccagccaggagcccccgcccccccggagcgcaggaggaccccggcccgcctctcccaggcgcagcgcccagcatctcgctgctcctgtcgtctaagcgtcggcgtcgctagggacctgcggaacccggcgctcccctccctccccgcctcgcgtccccggcccgggcggactggagactcgaacttgagcgggtgcccgaaaggccgcaggagccgcgggcggaaggcggccgcacgatggccgaggggcagggcggcggagggcagcgctgggactgggctggcggcggccgggcagccgaggaggaggtggtgcggcggcgatgccggcgcggggaggaggcccaggtcgcgcagccctggcccgagggttcccggggcacggccgctgggcccccggtggaggagcgtttccgccagctgcacctacgaaagcaggtgtcttacaggaaagccatcaccaagtcgggcctccagcacctggccccccctccgcccacccctggggccccgtgcagcgagtcagagcggcagatccggagtacagtggactggagcgagtcagcgacatatggggagcacatctggttcgagaccaacgtgtccggggacttctgctacgttggggagcagtactgtgtagccaggatgctgaagtcagtgtctcgaagaaagtgcgcagcctgcaagattgtggtgcacacgccctgcatcgagcagctggagaagataaatttccgctgtaagccgtccttccgtgaatcaggctccaggaatgtccgcgagccaacctttgtacggcaccactgggtacacagacgacgccaggacggcaagtgtcggcactgtgggaagggattccagcagaagttcaccttccacagcaaggagattgtggccatcagctgctcgtggtgcaagcaggcataccacagcaaggtgtcctgcttcatgctgcagcagatcgaggagccgtgctcgctgggggtccacgcagccgtggtcatcccgcccacctggatcctccgcgcccggaggccccagaatactctgaaagcaagcaagaagaagaagagggcatccttcaagaggaagtccagcaagaaagggcctgaggagggccgctggagacccttcatcatcaggcccaccccctccccgctcatgaagcccctgctggtgtttgtgaaccccaagagtgggggcaaccagggtgcaaagatcatccagtctttcctctggtatctcaatccccgacaagtcttcgacctgagccagggagggcccaaggaggcgctggagatgtaccgcaaagtgcacaacctgcggatcctggcgtgcgggggcgacggcacggtgggctggatcctctccaccctggaccagctacgcctgaagccgccaccccctgttgccatcctgcccctgggtactggcaacgacttggcccgaaccctcaactggggtgggggctacacagatgagcctgtgtccaagatcctctcccacgtggaggaggggaacgtggtacagctggaccgctgggacctccacgctgagcccaaccccgaggcagggcctgaggaccgagatgaaggcgccaccgaccggttgcccctggatgtcttcaacaactacttcagcctgggctttgacgcccacgtcaccctggagttccacgagtctcgagaggccaacccagagaaattcaacagccgctttcggaataagatgttctacgccgggacagctttctctgacttcctgatgggcagctccaaggacctggccaagcacatccgagtggtgtgtgatggaatggacttgactcccaagatccaggacctgaaaccccagtgtgttgttttcctgaacatccccaggtactgtgcgggcaccatgccctggggccaccctggggagcaccacgactttgagccccagcggcatgacgacggctacctcgaggtcattggcttcaccatgacgtcgttggccgcgctgcaggtgggcggacacggcgagcggctgacgcagtgtcgcgaggtggtgctcaccacatccaaggccatcccggtgcaggtggatggcgagccctgcaagcttgcagcctcacgcatccgcatcgccctgcgcaaccaggccaccatggtgcagaaggccaagcggcggagcgccgcccccctgcacagcgaccagcagccggtgccagagcagttgcgcatccaggtgagtcgcgtcagcatgcacgactatgaggccctgcactacgacaaggagcagctcaaggaggcctctgtgccgctgggcactgtggtggtcccaggagacagtgacctagagctctgccgtgcccacattgagagactccagcaggagcccgatggtgctggagccaagtccccgacatgccagaaactgtcccccaagtggtgcttcctggacgccaccactgccagccgcttctacaggatcgaccgagcccaggagcacctcaactatgtgactgagatcgcacaggatgagatttatatcctggaccctgagctgctgggggcatcggcccggcctgacctcccaacccccacttcccctctccccacctcaccctgctcacccacgccccggtcactgcaaggggatgctgcaccccctcaaggtgaagagctgattgaggctgccaagaggaacgacttctgtaagctccaggagctgcaccgagctgggggcgacctcatgcaccgagacgagcagagtcgcacgctcctgcaccacgcagtcagcactggcagcaaggatgtggtccgctacctgctggaccacgcccccccagagatccttgatgcggtggaggaaaacggggagacctgtttgcaccaagcagcggccctgggccagcgcaccatctgccactacatcgtggaggccggggcctcgctcatgaagacagaccagcagggcgacactccccggcagcgggctgagaaggctcaggacaccgagctggccgcctacctggagaaccggcagcactaccagatgatccagcgggaggaccaggagacggctgtgtagcgggccgcccacgggcagcaggagggacaatgcggccaggggacgagcgccttccttgcccacctcactgccacattccagtgggacggccacggggggacctaggccccagggaaagagccccatgccgccccctaaggagccgcccagacctagggctggactcaggagctgggggggcctcacctgttcccctgaggaccccgccggacccggaggctcacagggaacaagacacggctgggttggatatgcctttgccggggttctggggcagggcgctccctggccgcagcagatgccctcccaggagtggaggggctggagagggggaggccttcgggaagaggcttcctgggccccctggtcttcggccgggtccccagcccccgctcctgccccaccccacctcctccgggcttcctcccggaaactcagcgcctgctgcacttgcctgccctgccttgcttggcacccgctccggcgaccctccccgctcccctgtcatttcatcgcggactgtgcggcctgggggtggggggcgggactctcacggtgacatgtttacagctgggtgtgactcagtaaagtggatttttttttcttt

SEQ ID NO: 262349 - DNA, 2838 bp, Artificial Sequence
  derived and/or modified sequence
atggctgagggtcaaggtggtggaggtcagcggtgggattgggcaggggggggcagggcagccgaggaggaagtcgtcaggcggcggtgccgcagaggcgaagaagctcaggtggctcagccatggcctgaaggatcgagaggcaccgcggctggccccccggtggaggaacgcttccgtcagttacatttacgaaagcaggtgagctacagaaaagccattacaaagagcggacttcagcacttggctcccccgccacctacgccaggtgctccctgcagtgaatcagaaagacagatccggtctaccgtggattggtccgaatcagctacatacggcgaacacatatggttcgagaccaacgtctctggagacttctgctacgttggcgaacagtactgtgttgcccggatgctcaagtccgtcagcaggaggaaatgcgcagcttgcaagatagttgtccacacaccctgtatagaacagctcgaaaagattaacttcagatgtaagccctcgttccgagagtcggggagtagaaacgtcagagagcctactttcgtgcggcaccactgggtgcataggaggagacaagatggcaaatgcagacattgtgggaagggctttcagcagaagtttacattccactccaaagaaatcgttgccatttcatgttcctggtgcaagcaggcctaccactcgaaggtgtcctgtttcatgttgcagcagatcgaggagccttgcagcttaggagtgcatgctgccgttgtaatccctcccacctggatcctccgagcaaggagaccccagaacacgttgaaggcaagcaagaagaaaaaaagagcttcatttaagagaaaatcaagcaagaaaggccccgaagaaggaaggtggcggccctttatcataaggcccactcctagtcctctcatgaagcctttactggtcttcgtcaacccaaagtcgggaggaaatcagggtgctaagataatccaatcttttctttggtatctgaatccccggcaggtgtttgatctttcacagggcggtcctaaggaagccctggagatgtacagaaaggtccataacctcaggatcctagcgtgtggaggtgacgggaccgtgggctggatcctgtcgacgctggatcaactgagactcaaaccacccccaccggtggccatcctcccactcggaaccggtaacgatctcgcaagaactctcaactggggcggaggatacacggacgagcctgtgtcaaagattctttcccacgtagaggagggtaacgtggtgcagctcgaccgctgggacttgcacgccgaacccaaccctgaggctggtcctgaggacagggatgagggtgccacagatcggctgcctctggacgttttcaacaactacttcagtttgggttttgatgcgcatgtgacattggagtttcacgaatctcgggaagccaaccctgaaaagtttaactctagatttagaaacaagatgttttacgcggggactgcgttttcagactttctcatgggctcatccaaggacctggcaaagcacataagggttgtgtgcgacggcatggatctcacacccaagattcaggatcttaaaccccagtgtgtcgtgtttcttaacatccccaggtattgcgcggggaccatgccatgggggcatcccggcgaacatcacgatttcgaaccccagcgacacgacgacgggtatctggaagtgatcgggttcacgatgacctcacttgccgccctgcaagtcggaggacacggggagaggctcactcagtgtcgtgaagtggttcttaccacctcaaaggccatccccgtgcaggtagacggcgaaccctgcaagcttgcagcgagccgaatcagaattgcactacgcaaccaggctacgatggtgcaaaaggccaagcgccgaagcgcagcgccccttcattccgatcagcaaccagtacccgaacagctccggatccaggtgtcccgggtctccatgcacgactatgaggcgctgcactacgacaaggagcaacttaaagaagccagcgttccgctcggaactgtcgtagttcctggtgacagtgacctggagctttgccgggcgcacatagagcggctgcagcaggaaccagatggcgctggagcaaagagcccaacatgccagaagctgagcccaaagtggtgtttcctagatgctaccaccgcaagccgcttttaccggatcgacagagcacaggaacacctcaactatgttacagaaatcgcccaagacgagatttatattctcgatcctgagctgctgggggcctcggctcgccccgatctccctacacccaccagtcctctacccacaagtccatgcagccccaccccgcggtcactccagggggatgcggctccccctcaaggcgaagagctcatcgaggctgccaaacgaaacgacttctgtaaacttcaggagctgcacagggccggaggcgacctaatgcatagggacgaacaatcaagaaccttgctgcaccacgccgtcagcacaggttccaaagacgtcgtgcgttacttgcttgatcacgccccccccgagattttggatgccgtagaggaaaacggggagacatgcttgcatcaggccgcagcactggggcagcgaaccatatgtcactacattgtagaggcaggagcttcactgatgaagacagaccagcaaggggatacaccaagacagagggccgaaaaagcacaggacacagagcttgccgcttatctggaaaataggcaacactaccagatgatccaaagggaagaccaggagacagccgtctag

SEQ ID NO: 262350 - DNA, 2838 bp, Artificial Sequence
  derived and/or modified sequence
atggccgagggccagggcggcggcggccagcgctgggactgggccggcggcggccgggctgctgaggaggaggtggtgagaagacgctgcagaagaggagaggaggcccaggtggcccagccctggccagagggcagccggggcacagctgctggcccccctgtggaggagcgcttccggcagctgcacctgaggaagcaggtgtcctacaggaaggccatcaccaagagcggcctgcagcacctggcccctcctccacccacccctggggccccctgcagcgagagcgagcggcagatccgcagcacagtggactggagcgagagcgccacctacggggagcacatctggtttgagaccaacgtgtctggggacttctgctacgtgggggagcagtactgtgtggccaggatgctgaagtctgtgtccaggaggaaatgtgccgcctgcaagatcgtggtgcacaccccctgcatcgagcagctggagaagatcaacttccgctgcaagcccagcttccgggagagcggcagcagaaatgtgcgggagcccacctttgtgcgccaccactgggtgcacagaagacggcaggacggcaagtgccgccactgtgggaagggcttccagcagaagttcaccttccacagcaaggagatcgtggccatcagctgctcctggtgcaagcaggcctaccacagcaaggtgtcctgcttcatgctgcagcagatcgaggagccctgcagcctgggcgtgcatgctgctgtggtgatcccccccacctggatcctgcgggcccggcggccccagaacaccctgaaggccagcaagaagaagaagagggccagcttcaagaggaagagcagcaagaagggccctgaggagggccgctggaggcccttcatcatccggcccacccccagccccctgatgaagcccctgctggtgtttgtgaaccccaagagcggcggcaaccagggcgccaagatcatccagagcttcctgtggtacctgaacccccggcaggtgtttgacctgagccagggcggccccaaggaggccctggagatgtacaggaaggtgcacaacctgcgcatcctggcctgtggaggagatggcaccgtgggctggatcctgagcaccctggaccagctgcggctgaagcccccacctcctgtggccatcctgcccctgggcactggaaatgacctggcccggaccctgaactggggcggcggctacacagatgagcctgtgtccaagatcctgagccacgtggaggagggcaatgtggtgcagctggaccgctgggacctgcacgccgagcccaaccctgaggccggcccagaagatagagatgagggcgccacagaccggctgcccctggatgtgttcaacaactacttcagcctgggctttgatgcccacgtgaccctggagttccacgagagccgggaggccaaccctgagaagttcaacagccgcttcaggaacaagatgttttatgccggcacagccttcagtgacttcctgatgggcagcagcaaggacctggccaagcacatccgggtggtgtgtgatggcatggacctgacccccaagatccaggacctgaagccccagtgtgtggtgttcctgaacatcccccgctactgtgccggcaccatgccctggggccaccctggagagcaccacgactttgagccccagagacatgatgatggctacctggaggtgattggcttcaccatgaccagcctggccgccctgcaggtgggcggccacggggagcggctgacccagtgccgggaggtggtgctgaccaccagcaaggccatccctgtgcaggtggatggagagccctgcaagctggccgccagccgcatccgcatcgccctgaggaaccaggccaccatggtgcagaaggccaagagaagatctgctgcccccctgcacagcgaccagcagcctgtgcctgagcagctgcgcatccaggtgtcccgggtgtccatgcatgactatgaggccctgcactatgacaaggagcagctgaaggaggcctctgtgcccctgggcaccgtggtggtgcctggggacagcgacctggagctgtgccgggcccacatcgagcggctgcagcaggagccagatggagctggggccaagagccccacctgccagaagctgagccccaagtggtgcttcctggatgccaccacagccagccgcttctacagaattgaccgggcccaggagcacctgaactacgtgacagaaattgcccaggatgagatctacatcctggaccctgagctgctgggcgccagcgcccggccagacctgcccacccccaccagccccctgcccaccagcccctgcagccccacccccaggagcctgcagggagatgctgccccaccccagggcgaggagctgattgaggccgccaagagaaatgacttctgcaagctgcaggagctgcacagagctggaggagacctgatgcacagagatgagcagagcaggaccctgctgcaccacgctgtgtccacaggcagcaaggatgtggtgcgctacctgctggaccacgcccctcctgagatcctggatgctgtggaggagaatggagagacctgcctgcaccaggccgccgccctgggccagaggaccatctgccactacatcgtggaggccggggccagcctgatgaagacagaccagcagggcgacaccccccggcagagagctgagaaggcccaggacacagagctggccgcctacctggagaaccggcagcactaccagatgatccagcgggaggaccaggagacagctgtgtag

SEQ ID NO: 262351 - DNA, 2838 bp, Artificial Sequence
  derived and/or modified sequence
atggccgagggccagggcggcggcggccagcggtgggactgggccggcggtggacgggccgcagaagaggaagtcgtccgtcgtcggtgtcgacgcggtgaagaggcccaggtggctcagccttggccagaaggttctcgcggcaccgcagcagggcccccggtggaggagaggtttcgtcaacttcatttgagaaagcaagtgtcttataggaaggcaatcaccaaaagcggcttgcagcacctggctccaccccctcccacccctggcgccccatgctccgagagcgaacggcaaataagaagcaccgtggactggtctgagtccgctacctacggagagcatatctggtttgaaacaaatgttagtggtgacttttgctacgttggagaacagtactgcgtggcccgcatgctcaagagcgtgagtcgccgtaagtgcgcggcatgcaagatcgtggtccacactccttgtatcgagcagctcgaaaagataaacttccggtgcaagccatccttcagggaatctggctcaaggaatgtgcgcgaacccaccttcgttagacaccattgggtccatcggcggagacaagacgggaagtgccgccattgtggtaaaggcttccagcagaaatttactttccattcaaaagagatagtggctatctcttgctcttggtgcaagcaggcctatcactctaaagtgagctgcttcatgctgcagcagatcgaggaaccttgcagcttgggcgtacacgccgctgttgttatcccccccacatggatactgagagctcgacgtccccaaaataccctgaaagcttcaaaaaaaaaaaagcgggccagctttaaaagaaagtccagtaaaaagggcccggaagagggccgatggcgccccttcattatccgcccgaccccatcaccactgatgaaaccgcttctcgtgtttgtaaaccccaagagtggcggcaatcagggggctaagattatccagagctttctctggtacctcaatcccaggcaggttttcgatctgagccagggcggtcccaaagaagccttagaaatgtacagaaaggttcacaacctccgtattttggcatgcggaggagatggaaccgtgggatggatcctgtcaaccttggatcagctgcggttgaagccccctcctcccgtggctatcctgcccctcggcacgggaaatgatctggctagaacactgaactggggcggcggctacaccgacgagcctgtgtccaagattctgagccacgtagaggagggcaacgtagttcagctggatagatgggatctccatgcagaaccgaatcctgaagccggacctgaagatcgggacgagggggccactgaccggcttcctctcgacgtatttaacaattacttctcccttggcttcgacgcacatgtgacactcgaatttcacgaatctcgcgaggccaatccagagaaatttaacagtcgattcaggaacaagatgttctacgccgggaccgcgttcagcgatttcctgatgggctcctccaaggatctggcaaaacatatcagagtcgtgtgcgatggaatggatctgaccccaaagattcaggatctcaagccccagtgtgttgtttttcttaatattcctagatattgtgcaggcacgatgccttgggggcaccctggagagcaccacgactttgagccccagcgccacgacgatgggtatctggaggtgatcggattcacaatgacaagcctggctgcactgcaagtggggggtcatggtgagcgtttgacccagtgccgagaagtcgtgctgactacatctaaagccattccagtccaagtggatggcgagccttgtaagctggccgcctcacggattcgaatcgctttaaggaatcaggccaccatggtgcagaaagcgaagcgccgttcagccgctcctctgcactcagaccagcagccagttcccgagcagctgcgcatccaggtatctcgggtttccatgcacgactatgaggctctgcattacgacaaggagcagcttaaggaggccagtgtaccactcgggacggtcgttgtccctggggacagcgacctggaactgtgccgcgcccacatcgaaaggctgcagcaggaacctgatggggcaggtgctaaaagtcccacctgccagaagctctcgccaaaatggtgcttcctggacgctaccacagcgtcacgattctacaggatagatagagctcaggagcacctcaactacgttactgagatcgctcaggacgagatttacatcttggaccctgagcttctgggagccagtgcccgaccagacctgccaacacccacctctcccttacccactagcccctgctcacccacaccccggtcgctgcagggcgacgccgctcccccgcagggggaggagttaattgaagccgcaaaacgcaacgacttttgtaaacttcaagagttgcaccgagccggcggcgacctaatgcacagggacgaacagtctaggacattattgcatcacgccgtttcaacaggaagcaaggatgttgttcgctacctcttggaccacgcaccgcctgagatcctggatgctgttgaagagaatggcgagacatgtctgcaccaggctgcggccctgggccagcgcaccatatgccactacatcgttgaagccggagccagtctgatgaagactgatcagcagggagatacaccaagacaacgggcggaaaaggcacaggatacagaactggctgcctacctggagaatcggcaacattaccagatgatacagagagaggaccaagagactgccgtgtag

SEQ ID NO: 262352 - DNA, 2838 bp, Artificial Sequence
  derived and/or modified sequence
atggcagagggtcagggcggaggcggtcagaggtgggactgggccggaggcggacgtgctgccgaggaggaggtggtgcgcagaagatgccgccgtggggaagaagcccaggtggcccagccctggcctgaggggtccagaggtaccgcagcaggtccgcctgttgaggagagattcaggcaattacacctgcgaaaacaggttagctacaggaaggctatcacaaagtctggcctacagcacctggctcctcctccaccaactcctggcgctccctgtagcgagagcgaacgtcagattcgctccacagtcgactggagtgaatcagccacttacggggagcacatctggtttgagacaaatgtgagtggggatttctgttatgtaggagagcagtactgcgtggcacgaatgcttaaatctgtcagtcgacgcaaatgtgcagcctgtaaaatcgttgtgcatacaccttgcatcgagcagttagagaaaataaatttccgctgcaagcccagttttagagagtctggttccaggaacgtacgggaacctacctttgtccgccaccattgggtgcatcgcagaagacaggatggaaagtgccggcactgtggtaaaggattccagcagaaatttacctttcattctaaagagatcgtcgcaatttcttgtagctggtgcaagcaggcgtatcatagtaaagtcagctgtttcatgctacagcaaatcgaggaaccctgttccctgggagtgcatgctgctgtggtcatcccccctacatggattcttagggcaagaagaccacagaacaccctcaaggcctcaaagaagaagaagagggcctcatttaagcgtaagagcagcaagaaagggcctgaagaaggacgctggcggccatttatcatccggcctactccttcgcctctgatgaaaccactacttgtcttcgtgaatcccaaaagtggcggaaaccaaggggctaagatcatccagtccttcctgtggtacctcaatccgaggcaggtctttgacctgagtcaaggaggtccaaaagaggccttagagatgtacagaaaggtgcacaacctgaggatcctcgcgtgcggaggggatgggaccgttggttggatcctctctaccctggaccaacttcgcttgaaaccacctccccctgtcgccatcttgccactcggtacaggcaacgatttggccaggacacttaattggggcggaggatacacagacgaacctgtctccaagatactctcccatgtggaagaaggcaacgttgtgcagttagacagatgggacttgcacgctgaaccaaatccagaagcaggaccagaagatagggacgagggggcaacagatcggctgccactcgatgtgttcaacaattacttcagtctcggcttcgacgcccacgtcaccttggaatttcacgaatctagagaggcaaacccagaaaagtttaatagtaggtttcgtaataagatgttttacgctggtaccgcatttagcgactttctgatgggctctagcaaagatctggccaaacacattcgtgtggtgtgtgatggaatggatctgacacctaagattcaggaccttaaaccacagtgtgtagtgttcttgaatattccacgctactgcgcgggtacgatgccctggggtcacccaggggagcaccacgattttgagccacagagacatgacgacggatacctcgaggtgatagggtttaccatgacaagtctggccgctctgcaggtgggagggcacggggagcgattgacacaatgtcgtgaggtggtattaaccaccagcaaggccatccccgtccaggtcgatggcgaaccctgtaagttagcagcctcaaggattaggatcgctcttcgaaaccaggcaacaatggtacaaaaggccaagaggcggtcggcggcaccactccacagcgaccagcagcctgtaccggagcagttgcgaattcaagtgtcaagggtttcgatgcacgattatgaagctctgcattatgacaaagagcagttaaaggaggcatccgttcccctggggactgtcgtggtaccaggagacagcgatctggagttatgcagggcccatatagaacggttgcaacaggaacccgacggagcaggggctaagtctccaacctgtcaaaaactatccccaaagtggtgcttcctggatgccactaccgccagtagattttaccgcatagacagagcccaggagcacctgaattatgtgaccgagatcgcacaagatgaaatatatattttggatcctgagttactgggggctagtgctcggcctgatttacctacccccacttcaccattacctaccagcccctgcagccctacaccgaggtccctgcagggcgatgcagctccacctcagggtgaggaacttattgaggctgctaagagaaatgacttctgtaagttgcaggagctgcacagggcaggtggcgatcttatgcatagggatgaacagagcaggaccctgctgcatcacgccgtgagcaccggatctaaggacgtggtccgatatctccttgaccatgctccaccagagatattggatgcggttgaagaaaacggggagacatgcctgcaccaagcagccgcacttgggcagcgaaccatctgtcactatatcgtcgaggctggcgctagtctcatgaagacagaccagcaaggcgacacccccaggcagcgagctgagaaggcacaggatacggaactcgctgcttatctcgagaatagacagcactaccagatgatccaacgggaggaccaggaaaccgctgtatag

SEQ ID NO: 262353 - protein, 143 aa, Artificial Sequence
  derived and/or modified sequence
MAELQEVQITEEKPLLPGQTPEAAKTHSVETPYGSVTFTVYGTPKPKRPAILTYHDVGLNYKSCFQPLFQFEDMQEIIQNFVRVHVDAPGMEEGAPVFPLGYQYPSLDQLADMIPCVLQYLNFSTIIGVGVGAGAYILARYAL

SEQ ID NO: 262354 - DNA, 987 bp, Artificial Sequence
  derived and/or modified sequence
atggccgagctgcaggaggtgcagatcaccgaggagaagcccctgctgcccggccagacccccgaggccgccaagacccacagcgtggagaccccctacggcagcgtgaccttcaccgtgtacggcacccccaagcccaagagacccgccatcctgacctaccacgacgtgggcctgaactacaagagctgcttccagcccctgttccagttcgaggacatgcaggagatcatccagaacttcgtgagagtgcacgtggacgcccccggcatggaggagggcgcccccgtgttccccctgggctaccagtaccccagcctggaccagctggccgacatgatcccctgcgtgctgcagtacctgaacttcagcaccatcatcggcgtgggcgtgggcgccggcgcctacatcctggccagatacgccctgaccggcctgaccagcagcatccccgagatgatcctgggccacctgttcagccaggaggagctgagcggcaacagcgagctgatccagaagtacagaaacatcatcacccacgcccccaacctggacaacatcgagctgtactggaacagctacaacaacagaagagacctgaacttcgagagaggcggcgacatcaccctgagatgccccgtgatgctggtggtgggcgaccaggccccccacgaggacgccgtggtggagtgcaacagcaagctggaccccacccagaccagcttcctgaagatggccgacagcggcggccagccccagctgacccagcccggcaagctgaccgaggccttcaagtacttcctgcagggcatgggctacatggccagcagctgcatgaccagactgagcagaagcagaaccgccagcctgaccagcgccgccagcgtggacggcaacagaagcagaagcagaaccctgagccagagcagcgagagcggcaccctgagcagcggcccccccggccacaccatggaggtgagctgctag

SEQ ID NO: 262355 - DNA, 1074 bp, Artificial Sequence
  derived and/or modified sequence
atggccgagctgcaggaggtgcagatcaccgaggagaagcccctgctgcccggccagacccccgaggccgccaagacccacagcgtggagaccccctacggcagcgtgaccttcaccgtgtacggcacccccaagcccaagagacccgccatcctgacctaccacgacgtgggcctgaactacaagagctgcttccagcccctgttccagttcgaggacatgcaggagatcatccagaacttcgtgagagtgcacgtggacgcccccggcatggaggagggcgcccccgtgttccccctgggctaccagtaccccagcctggaccagctggccgacatgatcccctgcgtgctgcagtacctgaacttcagcaccatcatcggcgtgggcgtgggcgccggcgcctacatcctggccagatacgccctgaaccaccccgacaccgtggagggcctggtgctgatcaacatcgaccccaacgccaagggctggatggactgggccgcccacaagctgaccggcctgaccagcagcatccccgagatgatcctgggccacctgttcagccaggaggagctgagcggcaacagcgagctgatccagaagtacagaaacatcatcacccacgcccccaacctggacaacatcgagctgtactggaacagctacaacaacagaagagacctgaacttcgagagaggcggcgacatcaccctgagatgccccgtgatgctggtggtgggcgaccaggccccccacgaggacgccgtggtggagtgcaacagcaagctggaccccacccagaccagcttcctgaagatggccgacagcggcggccagccccagctgacccagcccggcaagctgaccgaggccttcaagtacttcctgcagggcatgggctacatggccagcagctgcatgaccagactgagcagaagcagaaccgccagcctgaccagcgccgccagcgtggacggcaacagaagcagaagcagaaccctgagccagagcagcgagagcggcaccctgagcagcggcccccccggccacaccatggaggtgagctgctag

SEQ ID NO: 262356 - DNA, 987 bp, Artificial Sequence
  derived and/or modified sequence
atggctgagctccaggaggtgcagatcaccgaggagaagcctctgctgccaggccagactcccgaggccgcaaaaacacactctgtggagactccatatggctctgtgaccttcacggtctacggaacgcctaagcccaaacggcctgccatactcacttaccatgatgtgggactcaattacaagtcatgttttcagcccctttttcagttcgaggacatgcaggaaattatccagaatttcgtgcgcgtgcatgtggacgcaccgggtatggaagaaggcgctccggtgttccccttggggtatcagtacccatccctcgatcagttagccgacatgatcccatgcgtactgcaatacctgaatttctctactatcatcggggtcggggttggggccggcgcctatattctcgctcggtatgccttaacagggctcaccagctcaatacctgagatgatccttggtcacctgttctcgcaggaggagttgtctggcaatagtgaattaatccagaagtaccgcaacattatcacacacgcccctaacctggataatatcgaactgtactggaacagttataacaatagaagggacctaaacttcgagaggggtggggatattacgctgaggtgcccagtaatgctcgtggtgggcgaccaggccccacatgaagatgccgtcgtcgagtgcaactcaaagctcgatccgactcagacatcctttttgaaaatggccgatagcggtggtcaaccacaattgactcagccagggaaacttactgaggcctttaagtactttctgcagggcatgggctacatggcctcctcttgtatgacaagactatcccgctccaggaccgcttccctgacttcagctgcctctgtggatgggaaccgatctcggagccgcacgttgtcccagagttctgagagcggcacactgtcaagtggccctccaggacatacaatggaggtgagttgctag

SEQ ID NO: 262357 - DNA, 1074 bp, Artificial Sequence
  derived and/or modified sequence
atggcggagctccaggaggtgcagatcactgaagagaaacctctcctgcccggacagacacctgaagccgccaaaactcattccgttgagaccccatacggtagtgtcacgtttactgtttatggaaccccgaaaccaaaaaggcctgctatcctaacttaccatgatgtgggcctgaactacaaatcctgctttcagcccctctttcagtttgaggatatgcaagaaatcattcagaatttcgttcgcgttcacgtggatgctccgggtatggaggagggcgcccccgtgtttcccctgggctaccagtaccccagcctggaccagctggcagatatgatcccatgtgtgctgcagtatttgaacttctctactatcatcggtgtgggcgtgggcgccggggcatatatcctagctagatacgctctcaaccatccggacactgtggagggcttagtactgataaacatcgaccctaatgctaaaggatggatggattgggctgcacacaaattgacagggctgacaagcagtattccggagatgatcttgggtcacctgttttcacaagaagagctcagcggcaatagtgagttaatccagaagtaccgaaacatcattacacacgcccccaatcttgacaatattgaactttactggaacagttataacaaccgtcgcgacctgaattttgaaagggggggtgacataaccctcagatgcccagtgatgttagttgtgggcgatcaggcccctcacgaagatgctgtagttgagtgcaattctaagctggatcccactcagacctcttttttaaagatggccgactccggcggccagcctcagctgacgcagcctggcaaactcactgaagccttcaagtatttcctgcaggggatgggatacatggcttcatcatgcatgacaaggttgtccaggtccagaacagcctccctgacatcagctgccagtgtagacggtaatagaagcaggagtaggaccctgtcccaatcatcggagtcgggtacactcagctccggcccaccaggacacacaatggaggtgtcttgttag

SEQ ID NO: 262358 - DNA, 1074 bp, Artificial Sequence
  derived and/or modified sequence
atggctgagcttcaagaggtgcagatcaccgaggagaaacctttactcccaggccaaaccccagaagctgcaaagactcactccgtggagactccttatgggagcgtgacctttacagtctatggcactccgaaaccaaagaggccagccatcctcacgtaccatgatgtcggcctgaattataagtcatgttttcaacctctgtttcaattcgaggacatgcaagagattatccaaaattttgtccgggtacatgtagatgcacctggcatggaggagggagcccccgtcttccctctgggatatcagtacccaagtttagaccagctcgcagacatgattccttgcgtgttgcagtaccttaattttagcaccatcatcggagtgggcgtgggcgctggggcttatattctggcgaggtacgctctcaaccatccagacaccgtggaagggttagtgctgattaacattgatcctaatgcaaagggttggatggactgggccgctcataaactgaccggcttgacctcaagtatacctgaaatgatattgggacacctctttagtcaggaggaactgtctgggaattctgagctgatacaaaaatatcgcaacattattacgcatgcaccaaatcttgataatattgagctctactggaactcctataacaaccggagagaccttaatttcgagagaggaggcgatattaccctcaggtgccctgtaatgctcgtggttggtgatcaggcccctcatgaggatgctgtcgtggaatgcaactctaagttggatcctacgcagacttctttcctgaagatggccgattctggtggccagccacagcttacacagcccggtaaactgaccgaagccttcaaatattttctgcagggcatggggtacatggcctcttcgtgcatgactcgactaagcaggagccggacggcgtctttgacctccgcggcctccgtcgacggaaacagaagcagaagcagaacactgtcccaatcttccgagtccggaactctgtcttctggcccccctgggcatacaatggaagtaagctgttag

SEQ ID NO: 262359 - DNA, 987 bp, Artificial Sequence
  derived and/or modified sequence
atggccgagctgcaggaagtccagatcactgaggaaaagcctttgttacctggccagactccggaggcggcaaaaacccactctgtagagacaccttacggctcagtgacatttaccgtgtacgggacccccaaacctaaaaggccagcaatacttacatatcacgatgtggggctcaattataaatcatgctttcagccactgtttcagtttgaagacatgcaggaaattatccaaaacttcgtccgcgttcacgtcgatgcaccaggcatggaagaaggggctccggtgttcccacttggataccagtatcccagcctcgaccagctcgcagatatgattccatgcgtcctgcagtaccttaattttagcacgattatcggtgtgggcgttggcgccggcgcctacatcctagcccgctatgctcttacggggctcacatcctctattcccgagatgattctggggcacttgttttcccaagaagagttatctggaaatagcgaactgattcaaaagtataggaatataatcactcatgcccccaacctggacaacattgagctgtattggaattcgtacaacaaccgtagggatttaaattttgagaggggtggtgatatcacactgcgctgtcccgtaatgctggtcgttggcgaccaagccccgcacgaagacgccgtcgttgaatgtaacagcaaattagacccaacccaaacctcatttctgaaaatggccgacagcggcggacagccacaacttactcagccaggaaaactgacagaggctttcaaatatttcctccagggaatggggtacatggcgtcttcatgcatgactaggctttctaggtcacggaccgcgagcctcacctcagccgcaagtgtggacggaaatagaagcagaagtcgcacgctgtctcagtcgagcgagtccggcacgctctcatcaggcccgcccgggcacactatggaggtgagctgttag

SEQ ID NO: 262360 - DNA, 1074 bp, Artificial Sequence
  derived and/or modified sequence
atggccgagctccaggaggtgcagataaccgaagaaaagccactgctaccagggcagactccagaggccgccaaaacccattctgtggagacgccctatggctccgttacctttaccgtctacggcactcctaaacctaaaagacccgccatcctgacatatcacgacgtgggccttaattataagtcttgttttcaaccactgttccagttcgaggacatgcaggagattatccagaacttcgtcagggtgcacgtggacgcgccaggaatggaggaaggagcccctgtcttcccacttggctaccaatacccttcactggatcagctggctgatatgatcccttgtgttctccagtacctgaatttctccacaattataggggtgggcgtcggagcaggggcttacattcttgccagatacgctcttaatcacccggataccgtggaggggctggtcctaatcaatattgaccccaatgccaaaggatggatggactgggcagctcataagttgactgggctcaccagctcaatcccagaaatgatcttgggacacttattttcccaggaagaattgagtggaaactctgagcttatccagaagtaccgaaatattatcacacatgctcctaacttagataacattgagctgtattggaacagttacaataatagacgcgatctgaacttcgagagggggggggatatcactcttcgctgtcccgtgatgctggtcgtcggggaccaggcacctcacgaggatgctgtcgtagagtgtaactctaagctggatcctacccagacaagctttctcaaaatggccgatagtggtggccagcctcaactgactcaacccggaaagctcaccgaggccttcaagtatttcctgcaagggatgggttatatggcttccagttgcatgactaggttgagcagatcccgaacagccagtctgaccagcgccgcctcagtcgatggaaacaggtcacgctcacgcacactctctcagtcatcagagtcaggaacactgagttccgggccgccaggacataccatggaggttagttgctag

SEQ ID NO: 262361 - DNA, 1074 bp, Artificial Sequence
  derived and/or modified sequence
atggctgagctccaggaggtgcagattaccgaagaaaaacccctgctgcctggccagacacctgaggccgcgaaaactcactccgtggaaactccctacggctcagtgacttttacagtttatggcacgccaaaacccaaaaggccggcgattctcacgtaccacgacgttgggttgaattacaaatcttgtttccagcccctctttcagtttgaggacatgcaggagattatacagaatttcgtccgagtgcatgtcgatgctccaggtatggaagagggagcacccgttttccccctgggatatcagtaccctagccttgatcagctcgccgatatgattccttgcgtgctgcagtatttgaactttagtaccatcatcggagttggcgtgggggcgggggcttacattctggccaggtatgccctgaatcaccccgatactgtggaggggctagttctcattaatatcgacccaaacgctaaagggtggatggactgggctgcccataaacttacgggcctcacctcctccatcccagaaatgatcctcggccacctgttctcacaagaggagttgtccggcaacagtgaacttatacagaaatatcgaaatattatcacgcatgcaccaaaccttgataacattgagctctactggaactcatacaataacaggcgcgacttaaattttgaacgcggcggagatatcacactgcgatgtcccgtgatgttggtggtcggcgatcaggcacctcacgaagacgcagtggtagaatgtaattctaaactagatcctacccagacaagctttctgaaaatggctgattccggcggtcaacctcagcttacgcagcccggcaagctcaccgaagctttcaagtacttcctccagggaatgggatatatggcctcttcttgtatgaccaggctcagccgcagcagaacggccagcctcacttcagccgcctctgtagatgggaatagatcgcgctcccgaacactgtcccagtcttctgagagcggcactttgagttccgggcctcctgggcacacaatggaagtgtcctgttag

SEQ ID NO: 262362 - DNA, 1074 bp, Artificial Sequence
  derived and/or modified sequence
atggccgagctgcaagaagttcagattaccgaggaaaaaccactactacctggtcagactccagaggcagcaaaaacacattcagtggagaccccatatggtagcgtgacatttacagtctacggaactccaaaaccaaaaagaccagcaatcctgacgtatcacgacgttggtctgaactataaatcctgctttcagcccctgtttcaattcgaagatatgcaagagattatccagaacttcgtgagagtgcacgtggatgccccagggatggaggagggagcgccggtatttcccctcggttaccagtacccctccctggatcaactggccgatatgatcccctgcgtgctgcagtatttgaactttagcactatcattggggtaggcgtcggagccggggcatatatcctggccagatatgccttgaaccatccagacaccgtcgagggcttagtcctcatcaacatcgatcctaatgccaagggatggatggactgggcagcacataagttaactggactgaccagtagtataccagagatgatccttggacacctgttctctcaggaagagttgtctggaaacagcgaactaatacagaaatatcggaatattatcactcacgcaccgaacctagacaatatagaactctactggaactcttacaacaatagaagagacctcaacttcgagcggggtggcgacataactctcaggtgcccagtaatgcttgttgttggtgatcaggccccgcacgaggacgccgtggtagagtgcaactccaaactggaccctacgcagacttctttcctcaagatggctgactccgggggtcagccacagctcactcagcccggcaagttaaccgaagcattcaagtactttttacaagggatgggttacatggctagttcatgtatgacaaggctgagcagatctagaaccgccagtctaacgagcgccgcctcagtggacggaaaccgttccaggagcagaactctgagccagtcatccgagtccggcactctgtcatcgggtcctcccgggcacaccatggaggtctcttgttag

SEQ ID NO: 262363 - DNA, 987 bp, Artificial Sequence
  derived and/or modified sequence
atggccgagctgcaggaggtgcagatcacagaggagaagcccctgctgcccggccagaccccagaggccgccaagacccacagcgtggagaccccctacggctctgtgaccttcaccgtgtatggcacccccaagcccaagaggcctgccatcctgacctaccatgatgtgggcctgaactacaagagctgcttccagcccctcttccagtttgaggacatgcaggagatcatccagaactttgtgcgggtgcacgtggatgcccctggcatggaggagggcgcccctgtgttccccctgggctaccagtaccccagcctggaccagctggccgacatgatcccctgtgtgctgcagtacctgaacttcagcaccatcattggagtgggcgtgggcgctggggcctacatcctggcccgctatgccctgaccggcctgaccagcagcatccctgagatgatcctgggccacctgttcagccaggaggagctgagcggcaacagcgagctgatccagaagtacagaaacatcatcacccacgcccccaacctggacaacatcgagctgtactggaacagctacaacaacagaagagacctgaactttgagcggggcggggacatcaccctgcgctgccctgtgatgctggtggtgggggaccaggcccctcatgaagatgctgtggtggagtgcaacagcaagctggaccccacccagaccagcttcctgaagatggctgacagcggcggccagccccagctgacccagcccgggaagctgacagaggccttcaagtacttcctgcagggcatgggctacatggccagcagctgcatgacccggctgagccgcagcaggacagccagcctgaccagcgctgcctctgtggatggcaacagaagccgcagcaggaccctgagccagagcagcgagagcggcaccctgagcagcggccccccaggccacaccatggaggtgtcctgctag

SEQ ID NO: 262364 - DNA, 1074 bp, Artificial Sequence
  derived and/or modified sequence
atggccgagctgcaggaggtgcagatcacagaggagaagcccctgctgcccggccagaccccagaggccgccaagacccacagcgtggagaccccctacggctctgtgaccttcaccgtgtatggcacccccaagcccaagaggcctgccatcctgacctaccatgatgtgggcctgaactacaagagctgcttccagcccctcttccagtttgaggacatgcaggagatcatccagaactttgtgcgggtgcacgtggatgcccctggcatggaggagggcgcccctgtgttccccctgggctaccagtaccccagcctggaccagctggccgacatgatcccctgtgtgctgcagtacctgaacttcagcaccatcattggagtgggcgtgggcgctggggcctacatcctggcccgctatgccctgaaccacccagacacagtggagggcctggtgctgatcaacatcgaccccaatgccaagggctggatggactgggccgcccacaagctgaccggcctgaccagcagcatccctgagatgatcctgggccacctgttcagccaggaggagctgagcggcaacagcgagctgatccagaagtacagaaacatcatcacccacgcccccaacctggacaacatcgagctgtactggaacagctacaacaacagaagagacctgaactttgagcggggcggggacatcaccctgcgctgccctgtgatgctggtggtgggggaccaggcccctcatgaagatgctgtggtggagtgcaacagcaagctggaccccacccagaccagcttcctgaagatggctgacagcggcggccagccccagctgacccagcccgggaagctgacagaggccttcaagtacttcctgcagggcatgggctacatggccagcagctgcatgacccggctgagccgcagcaggacagccagcctgaccagcgctgcctctgtggatggcaacagaagccgcagcaggaccctgagccagagcagcgagagcggcaccctgagcagcggccccccaggccacaccatggaggtgtcctgctag

SEQ ID NO: 262365 - DNA, 987 bp, Artificial Sequence
  derived and/or modified sequence
atggccgagctgcaggaggtgcagatcaccgaggagaagcccctgctgcccggacagactccagaagctgctaaaactcacagcgttgagaccccttacggaagcgtgacttttacggtgtatgggaccccaaaacccaagcgaccggccatcctaacatatcacgacgtgggcctcaattataagtcttgcttccagcctttgtttcagtttgaggacatgcaggagatcattcaaaactttgtgagggtccacgttgacgcccccggcatggaagagggtgcccctgttttccccctcggttatcagtatccctcccttgatcagctggctgacatgatcccttgcgtcctgcaatatctcaattttagcacaatcattggtgtgggggtgggagctggagcctacatcctggccagatacgcactcactggtcttacctccagcatccctgagatgatactaggccatctgttcagccaggaagaactgtcaggcaatagtgagctaatccaaaagtatcgtaacatcataactcacgctcccaatctggacaacattgaattgtactggaattcctataataatcgcagggacctcaacttcgaacgtggtggcgacatcactctccggtgcccagtgatgctagtcgtcggtgatcaagccccacatgaggacgcagtcgtggaatgcaactccaagctggaccctacccaaacatctttcttaaagatggctgacagtgggggacagccccagctgacacagcccgggaagttgactgaagcgtttaaatatttccttcagggaatgggatacatggccagttcttgtatgacgaggctgtctagaagcaggactgcaagtttgactagtgcagcctccgtcgatggtaaccggagtcgatcgcgcacgctctcccagagcagcgagtccggcaccctgagttccggtcctcccggccacactatggaggtttcctgttag

SEQ ID NO: 262366 - DNA, 1074 bp, Artificial Sequence
  derived and/or modified sequence
atggccgagctgcaggaggtgcagatcaccgaggagaagcccctgctccccggccagactcccgaggccgcaaaaacacattcggtggagaccccctacgggagtgtcactttcacagtctacggtacgccaaagcctaaaaggccagctatcctcacctaccacgatgttggcctgaactataaaagttgctttcagccactttttcagtttgaggacatgcaggaaatcattcagaactttgtgagagttcatgtcgatgctcctggaatggaagagggcgctcctgtgttccccctcggatatcagtacccctcgctcgatcagcttgcagacatgataccctgcgtcctgcagtacttgaacttttctaccattatcggggtgggtgtcggtgctggcgcctacattcttgccaggtatgctctgaatcaccctgataccgtggagggacttgtgctcatcaacatcgaccccaatgcaaaaggctggatggattgggcagcacataagctgaccggtttaacctcctctattcctgaaatgattctgggccatctgttcagccaggaggagctgtctggaaactccgaactgatccagaaatacaggaacattataacccacgctcccaacctcgacaacatcgagctatactggaactcctataacaatcgccgcgacctgaattttgagaggggaggcgacatcacccttaggtgtccagtgatgctggtggtcggagaccaagcccctcacgaagatgctgttgtcgagtgtaactccaagttggatccaacacaaactagcttccttaaaatggccgattccggcggacaaccccagcttacccagcctgggaagctcaccgaggccttcaagtattttttacagggcatgggctatatggcctcttcctgtatgacacgtctttcccgtagccgcacggcgtctctgacctccgccgcctccgttgatgggaacaggagtcggagtcggacacttagccaatccagcgagtccggtacccttagttccggtccacctgggcatactatggaggtctcctgttag

SEQ ID NO: 262367 - DNA, 1074 bp, Artificial Sequence
  derived and/or modified sequence
atggccgagctgcaggaggtgcagatcaccgaggagaagcccctgctccctggtcagactcccgaagcagctaagacacactctgttgaaacgccttacggtagtgtgacttttaccgtatacggcactcccaaaccaaaacgacccgcaattctaacttaccacgatgttggcctcaactataaatcctgcttccaacctctcttccagtttgaagacatgcaggagataatccagaacttcgtgagggtccatgtcgatgcaccaggcatggaagaaggcgcgcccgtgtttcctctgggataccagtatccttccctggaccagttggccgacatgattccctgcgtgcttcagtacctgaatttcagcacaatcataggcgtgggagtaggggcaggggcttatatattggctcgctatgccctgaaccaccccgataccgtcgaggggctcgtgcttatcaatattgaccctaacgccaaaggctggatggactgggctgcacacaaactcacaggcctcacgagttcaatccctgagatgatcttaggacacttattttcccaggaagagctatccggtaacagcgagctgattcagaagtaccggaacatcattacacatgccccgaaccttgataatattgaattgtattggaacagctataacaatagacgggatctgaacttcgagcgggggggcgatatcacactccggtgcccagtgatgctggtcgtaggcgatcaggcaccacatgaggatgctgttgtcgaatgtaactcaaaactggaccccacgcagacctcttttcttaaaatggccgactctggggggcagccacaactgactcagcctgggaagttgacagaagcctttaagtatttcctgcagggcatgggttatatggcctcctcctgcatgactaggttatccaggtctagaacagcttccctgacctcggctgctagcgtcgacggcaacaggtcaagaagtcggaccctttctcaatcttccgaatctgggacattatcatcagggcctccgggacacaccatggaagtgtcttgctag

SEQ ID NO: 262368 - DNA, 987 bp, Artificial Sequence
  derived and/or modified sequence
atggccgagctgcaggaggtgcagatcaccgaggagaagcccctgctcccaggccagacacccgaggccgccaaaacccacagcgtcgagactccctatggatcagtgacttttaccgtgtacggcacgcccaagcctaagcggccagcgatactcacctaccatgatgtcggtcttaactataagagctgctttcagcccttattccagttcgaagatatgcaggagatcatacaaaacttcgtgcgggtacacgtggacgccccgggcatggaagagggtgcacccgtctttcctttgggataccaatatccttctctggatcaactcgctgacatgattccatgcgttctccagtacttaaacttttccacgatcatcggtgttggcgtcggcgctggtgcctacatcctggcacgctatgctctgaccggcttgacatccagcattcccgaaatgattctcgggcatctatttagtcaagaggaactttcgggcaacagcgagttgattcagaagtacaggaacattatcacccatgccccaaacttggacaatatagaactgtactggaacagctataataatcggcgagatctgaactttgagcgggggggtgatatcactctaagatgtccggtgatgcttgtggtgggtgaccaggccccccacgaggatgccgtggttgagtgtaactctaagctggaccctactcaaacttcgtttctcaagatggccgatagcggtggtcagcctcagctgacacaacctggaaagttgactgaggctttcaagtattttctgcagggcatgggctacatggctagttcctgcatgacacggctgtctcgttcccggacagcttcacttacctccgcggcctctgttgatggcaaccgctcccgatcccggacgctcagccaatccagcgaatcaggaacactgtctagcggaccaccggggcacacaatggaagttagttgctag

SEQ ID NO: 262369 - DNA, 1074 bp, Artificial Sequence
  derived and/or modified sequence
atggccgagctgcaggaggtgcagatcaccgaggagaagcccctgctgccagggcagacaccagaggcggctaagactcactccgtagagaccccttacggatctgtgacttttacggtgtatggcacgcccaaacctaagcgaccagctatccttacgtatcatgacgtgggattgaattataaaagttgcttccaacccttgtttcagtttgaagatatgcaggaaatcatccagaattttgttcgtgtacacgtggatgcccctgggatggaggagggcgccccagtcttccctttaggctaccagtaccctagcctagaccaactcgcggatatgattccgtgcgtgctgcagtatttgaattttagtaccattatcggagtcggggtgggagcaggcgcgtatatactggcccgctacgctcttaatcatcccgacacagtcgagggcttagtcttaattaacattgatccaaacgcaaagggctggatggactgggccgcccacaagctgactggccttacttcctctattcctgaaatgattttggggcacttattttcacaagaagagttgagcggaaactccgaactaatacaaaagtatcgaaatataattacccacgctcccaacctggataatattgagctctattggaattcctataataatcgccgagacctgaatttcgagcgcggcggcgatatcaccctgcgttgcccagtcatgctggtcgtcggggaccaggcgccgcatgaggatgctgtggtagagtgcaactctaagttagacccaacacaaaccagttttctgaagatggcagattcagggggccagccccaacttacccagcctggcaaactgaccgaggcgttcaagtatttccttcaggggatgggttacatggccagctcctgcatgacccgactcagtcggtcccggacagcatcgcttacttctgcagccagcgtggacgggaatcggagcaggagccggacactaagtcagtcctcagaatctggtaccctctcaagtggaccacctgggcatactatggaagtcagttgttag

SEQ ID NO: 262370 - DNA, 1074 bp, Artificial Sequence
  derived and/or modified sequence
atggccgagctgcaggaggtgcagatcaccgaggagaagcccctgcttccgggacagacacccgaagcggcaaagacccattcagtggaaactccctatggcagcgtgacctttacagtttatgggacacccaagccaaagaggcccgccatcctgacctatcatgatgtggggctgaactacaaaagttgcttccagcctctgttccagtttgaagacatgcaggagatcatccagaactttgttcgggtgcacgtcgacgcccctggaatggaggagggagcaccagtttttccattaggataccaatatccgagcctagaccagttggccgatatgataccttgtgtactgcaatatctaaatttctcaactatcattggcgtcggagttggggccggcgcatatatcctggctaggtatgcccttaatcatcccgatacggtggagggattggtgcttatcaatatcgatcccaatgccaaaggttggatggactgggctgcccacaagctgactggcctcacaagcagtatccctgagatgattttgggccatctcttcagccaagaggaattaagcggcaactcagagcttatacagaaatatcgcaacatcatcactcatgcgcccaatctggataacattgagctgtactggaactcctataataatagaagagacctgaacttcgagcggggtggggacattactctccggtgccctgtaatgttggtggtgggtgaccaagcaccacacgaagacgccgtggtcgagtgcaactcaaagctggatccaacacaaactagtttcttgaaaatggctgattccggggggcagcctcaactgacgcagcccggtaaactgaccgaagcattcaagtattttttacagggtatgggctacatggcctcgtcatgtatgacaagactctcccgctcgaggactgcctccctgacatccgcagcctcggttgacggcaaccgctccagatccagaaccttgtctcagagttctgaatctggcacccttagctccgggccccccggacacacaatggaagtctcctgttag

SEQ ID NO: 262371 - DNA, 1074 bp, Artificial Sequence
  derived and/or modified sequence
atggccgagctgcaggaggtgcagatcaccgaggagaagcccctgctgcctggtcagacgccagaggcagcaaagacacattccgttgaaactccttacggctctgtgacctttactgtctacgggacccccaagcccaagcggcctgccattctgacttatcatgacgttgggctgaactataagtcatgtttccaaccattgtttcaattcgaggacatgcaggagatcatacagaattttgtgcgcgtccacgtggacgcccctggtatggaagaaggcgcaccagtgtttcctttgggctaccagtacccatctctcgatcagctggccgacatgataccatgtgtactccagtacctgaacttttccacgataattggcgtcggtgttggcgctggggcatacatcctggctaggtatgcccttaatcatcctgataccgtggaaggcctggtgctgatcaacattgacccgaacgccaaaggctggatggactgggccgcacacaaactcacaggcctcaccagctcgatacctgagatgatcctggggcatctgttctcacaagaagagctgtctggtaatagtgaactgattcagaagtatagaaatattattacacatgcaccaaatctggacaatattgagctatattggaattcctacaataatcggagagatctgaattttgagcgcggtggagacataactctgcggtgccccgtgatgctggtagtgggagaccaggctccacacgaggacgccgtggtggaatgtaactctaaactcgatcccacacaaacaagttttctgaagatggcagacagcgggggccagccccaacttacgcagccaggtaaactgacggaggcatttaaatattttctgcagggcatgggttacatggctagctcctgtatgacaagactcagccgttcaagaaccgcctccctcactagtgccgccagcgtggatggcaaccgatcccggtcaaggaccttatctcagtcaagcgagtcgggcactctctcctctggccctccgggccatactatggaggtgtcttgctag

SEQ ID NO: 262372 - DNA, 987 bp, Artificial Sequence
  derived and/or modified sequence
atggcggagcttcaggaggtgcagattactgaggagaaaccgctcttgcccggtcagacgcctgaagccgctaagactcacagcgttgaaaccccttacggatcggttactttcacagtttacggaacgcctaagccaaaaagaccggctatcctgacataccacgacgtgggactcaactacaaaagctgttttcagcccctgttccagttcgaggatatgcaggaaatcattcagaactttgtgcgagtgcacgtggatgcacctggtatggaggaaggcgcaccagttttccctctaggctaccaatatcctagtctcgatcaattggctgacatgattccctgtgttttgcagtatctgaacttctcgacaattattggcgtgggggttggtgctggagcttacatcttagcacggtacgcgctcacagggctgactagctccataccagagatgatactgggacatctctttagccaggaagagctgtcagggaatagcgagctaattcagaagtaccgtaacatcataacgcatgccccaaaccttgataacatagagctttattggaacagttataacaacagacgtgaccttaattttgaaaggggaggcgacattaccttgcggtgcccagtaatgttggtggtgggggaccaggccccacatgaggatgcagtggtggaatgtaattccaagctggaccctactcagaccagtttcctcaaaatggccgacagcggtggtcagccgcagctgacacagcccggtaaactgacagaggcatttaagtattttttgcaagggatgggctacatggcctctagctgcatgacccgactgtctagatcgcgtacggcgagtctgacttccgctgcctcagtggatgggaatcggtctagaagcaggaccttatcccaatcgtccgagtctggcacgctgtcttcaggaccccctggtcacaccatggaggtcagctgttag

SEQ ID NO: 262373 - DNA, 1074 bp, Artificial Sequence
  derived and/or modified sequence
atggccgaactgcaggaggtgcagatcaccgaggaaaagccactgctgccgggtcagacgcctgaggcagccaaaacacactctgtggagacaccgtatggatcggtcacatttactgtgtacggtactcctaagccaaagagacctgcgatcttaacatatcacgacgtagggctcaactataagtcttgctttcaacccttgttccaattcgaagatatgcaggaaattatccagaatttcgtgagagtccacgtggacgcaccaggtatggaagaaggtgcaccggtgttccctctcggctaccagtatcccagtttggatcagctcgcagatatgataccgtgtgttttgcagtatctcaatttctctacaatcatcggcgttggcgtcggtgcaggggcatatatcctcgcgagatacgccctaaatcaccccgacactgtggagggcctggttttaataaatatagatcccaatgcaaaagggtggatggactgggccgctcacaagctcactggactgacctcaagcatccctgagatgattctcggtcatttattttcccaagaggaactgagcggaaactcagagctgatccaaaaataccgcaacattattacacacgcccctaacctggataacatcgagctgtactggaactcttataataacaggagagatttgaactttgagagaggtggggatattacactccgatgtccagtgatgttggttgtgggagatcaggcccctcacgaggacgctgtcgtggaatgcaacagcaagctggatcccacacagacgagcttcctgaagatggccgacagcgggggacagccgcagcttacccagcctggcaaattgactgaagcattcaagtattttctgcagggaatgggatacatggcaagtagctgtatgaccaggctgagtcggtcccgtactgcgtcccttacctccgccgcttcagtagatggcaacaggtctaggtcacggaccctcagccagtcttcagagtccgggaccctgtctagtggccctcctggacacacgatggaggtgtcttgttag

SEQ ID NO: 262374 - DNA, 1074 bp, Artificial Sequence
  derived and/or modified sequence
atggccgagttacaggaggtgcagatcacagaggaaaagcccctcctccccggtcagacccccgaagctgccaaaacccactctgtggagacaccatacggaagcgtgacatttactgtgtacggcacccccaaacccaaaaggcccgctatcttaacctatcatgacgtaggcttgaactataaatcctgtttccagccgctgtttcaatttgaagatatgcaggagattatccagaactttgtgcgcgtccacgttgatgcaccgggaatggaggaaggagccccagttttccctttgggttatcagtaccctagtttagatcagctcgcggatatgatcccatgtgtgctccaatatctaaacttctccacaatcatcggcgtcggcgtgggcgctggcgcttacattctggccaggtacgcgctaaatcatcctgacaccgttgagggtttggtccttattaacatcgaccccaatgccaaaggatggatggattgggccgctcacaaattgacaggtctaacttcaagtatccctgaaatgattcttggacatctgttttcccaggaggaacttagcggaaattcggagctgatccagaaataccggaatatcatcacacacgcccctaacctcgacaatattgagttgtattggaattcttataacaaccgacgagacctgaatttcgagcgcggaggcgatattactctgcgctgccccgtgatgctggttgtcggagaccaggctccccatgaagacgcagtggtagaatgtaacagcaagttagatcctacacagacatctttcctaaagatggccgatagtggcggacagccgcagctgacacagcctggtaaactcaccgaggccttcaagtacttcctgcagggaatgggctacatggcgtcatcgtgtatgaccagactgagccgaagccgaactgcatctctgactagcgcagcaagcgtcgatggaaataggagtagatcaagaaccttatcacaaagcagcgagagcggtacactcagcagtggcccaccaggccacactatggaagtgtcttgctag

SEQ ID NO: 262375 - DNA, 987 bp, Artificial Sequence
  derived and/or modified sequence
atggctgaactacaggaggtccagatcacagaggagaagccactgctgcctgggcagacacccgaagccgcaaagactcactcagtcgaaactccttatgggtctgtaacatttacggtgtacgggacacccaagcctaaacggccagccattttaacgtatcacgacgtgggactgaactacaagtcgtgcttccaacctctcttccaatttgaggatatgcaggagataattcagaatttcgtccgtgtgcacgtggatgccccagggatggaagagggtgcacctgtgttccctctggggtatcaataccccagtctggatcaactggcagatatgataccttgtgttctccaatatctcaacttctcaacgatcatcggtgtgggtgtaggggctggagcttacattctggcccgatatgcgctgacgggcttgactagcagcatccctgaaatgatcctgggtcatctctttagccaggaggaactgagtggaaactcagagctcatccaaaagtaccgtaacattattacacacgccccaaacttggacaacattgaactgtactggaactcttataacaataggagggacctgaacttcgagcgaggaggcgacattaccctgcgctgccctgttatgcttgtcgtgggtgaccaagcaccccatgaggatgccgttgtggagtgcaacagcaagcttgaccctacccagacctcattcttgaaaatggctgatagcgggggacagccacagctcactcagccaggaaagctcacagaggcatttaaatacttcctccagggcatgggatacatggccagctcctgtatgaccagactcagcagatcccgaactgcatctctgactagtgccgcttccgtggacggaaaccgatctcgttcccgtacactctcgcagtcgagtgagtcaggtactctttcctccggacccccaggccacactatggaagtgtcgtgctag

SEQ ID NO: 262376 - DNA, 1074 bp, Artificial Sequence
  derived and/or modified sequence
atggcagagctgcaagaagtgcagatcaccgaggagaagccgctgctgccaggccaaacgccggaagcagcaaagactcatagcgtggaaaccccctatggaagcgtcactttcaccgtctacggcacccctaaaccgaaacggcctgctattcttacatatcatgacgtagggcttaattataaatcttgcttccagccattgttccagttcgaggacatgcaggagatcatccagaattttgttcgcgtgcatgtcgacgcccctggcatggaggaaggagccccagtgttcccgctcggatatcagtacccctcactggaccagttggccgacatgatcccttgtgtactgcagtacttgaatttctccacaatcatcggcgtgggagtaggagctggggcatacatcctggctaggtacgcccttaatcatcccgacaccgttgaggggctcgtgctcattaacatagatccgaacgccaagggatggatggactgggctgcccataaattgaccggcctcactagctcaatcccagagatgatcctgggacacttatttagtcaggaggagctgtccggaaatagcgagctgattcaaaaatatcggaatatcattacgcacgcaccgaacctcgacaacatagaactgtactggaattcctataacaatcggcgagaccttaattttgaacggggtggagatataacactaagatgtcctgtaatgctggtcgtgggagatcaggcacctcacgaggatgcagtggtggagtgtaatagtaagctggatccaactcagacttcattcttaaagatggcagattcgggtggacaaccccagctgacacagccaggcaaactcacggaggcattcaagtactttcttcagggcatgggttacatggcttcatcttgcatgacgagattatcgcgaagcagaaccgcctcactgacgagcgctgcctccgtggatgggaatcggagccgcagccgcaccttgagtcagtcttccgagagcggcacattatcttctggccctcctggacacaccatggaagtgagctgttag

SEQ ID NO: 262377 - DNA, 1074 bp, Artificial Sequence
  derived and/or modified sequence
atggcagagctgcaggaggtgcagatcaccgaagaaaaacctctgctcccagggcagactcccgaagccgctaagactcacagcgtggagacaccctatgggtctgtgactttcaccgtatacggaacaccgaagccgaaaaggcccgctattcttacttatcacgatgtcgggctgaattacaagtcctgcttccagcctctcttccagttcgaagatatgcaagagataattcagaatttcgttagggtccatgtagatgcccctggcatggaagaaggagcaccagtctttcccctaggttatcagtacccaagtttagaccaactcgccgacatgatcccctgtgtcctgcagtacttgaattttagtaccattatcggggtgggtgttggcgcaggggcatatattctggcccgatatgccctgaaccaccccgacacagttgaaggactggtacttataaacattgatccgaatgccaaaggttggatggattgggcggcacacaagctgaccggacttacctcatcgattccagaaatgattctgggccacttattttcacaagaagaactgagcggtaattccgaattgattcaaaaatacagaaacattataacacatgccccaaacctggataatattgaactgtattggaacagctacaacaaccgacgggacctgaacttcgagcgcggtggggatattactcttcgctgccccgtgatgttggtggtcggagaccaggcccctcacgaggatgccgttgtcgagtgtaactccaaacttgacccgacccaaacatctttcctcaagatggctgatagcggcggtcagcctcagctcacccaaccgggaaaactgactgaggcattcaaatactttcttcagggcatgggttacatggcctcaagctgcatgacccgcctcagtcgttcacgaactgcctcccttacatcagcagcttctgtggacggcaaccgctcgagatccaggacacttagccagtcatctgagtcagggactctgagctccgggcctcctggacataccatggaggtgagctgttag

SEQ ID NO: 262378 - DNA, 1074 bp, Artificial Sequence
  derived and/or modified sequence
atggccgagctccaggaagtgcagattacagaagagaagccgcttctgccaggacaaacccccgaggccgcaaaaacccatagcgtggagactccatatggctcggtcaccttcacggtgtacggcaccccaaagccaaagagacctgcgatcctcacgtaccacgatgttggattaaactacaagtcatgcttccagccactattccagttcgaggacatgcaggagattatacagaactttgtccgcgtccatgtcgacgccccaggaatggaggagggagctcctgtgttccctttgggatatcaatatcctagtcttgatcaactggcagatatgataccttgcgttctgcagtacctgaatttttccacgattatcggagtgggcgtcggcgcaggcgcatacatcttggctcgatacgccctcaaccatcccgacacagtggaggggctggtgctcatcaacatcgatcctaacgccaaaggctggatggattgggcagcccacaagctcacgggcctcacctcatcaattccggagatgatcctgggacatttgttctcccaagaggaattaagtggcaactctgagctgatccagaaatacaggaatatcatcacccacgcgcctaatctggacaatattgaactgtattggaatagctacaataatcggagggatcttaattttgagcgaggcggagatatcaccttgcgctgcccagtgatgctagtcgtgggagatcaggcccctcatgaagacgccgtagtcgagtgcaattcgaagcttgacccaacccaaacctcatttctgaagatggctgattccgggggacagccgcagctcactcagcctggaaagcttactgaagcatttaagtacttcctgcagggcatgggatatatggcaagctcatgtatgacccgtctttcacgaagtagaactgccagccttacctctgctgcgagcgtagatggaaatagatcccggtcgcgtacactgtcccagagcagcgaatcaggaaccctgagctcgggaccgcctggccacactatggaggtatcttgctag

SEQ ID NO: 262379 - protein, 317 aa, Artificial Sequence
  derived and/or modified sequence
MMLSLNNLQNIIYNPVIPFVGTIPDQLDPGTLIVIRGHVPSDADRFQVDLQNGSSMKPRADVAFHFNPRFKRAGCIVCNTLINEKWGREEITYDTPFKREKSFEIVIMVLKDKFQVAVNGKHTLLYGHRIGPEKIDTLGIYGKVNIHSIGFSFSSDLQSTQASSLELTEISRENVPKSGTPQLRLPFAARLNTPMGPGRTVVVKGEVNANAKSFNVDLLAGKSKDIALHLNPRLNIKAFVRNSFLQESWGEEERNITSFPFSPGMYFEMIIYCDVREFKVAVNGVHSLEYKHRFKELSSIDTLEINGDIHLLEVRSW

SEQ ID NO: 262380 - protein, 300 aa, Artificial Sequence
  derived and/or modified sequence
MMLSLNNLQNIIYNPVIPFVGTIPDQLDPGTLIVIRGHVPSDADRFQVDLQNGSSMKPRADVAFHFNPRFKRAGCIVCNTLINEKWGREEITYDTPFKREKSFEIVIMVLKDKFQVPKSGTPQLPSNRGGDISKIAPRTVYTKSKDSTVNHTLTCTKIPPMNYVSKRLPFAARLNTPMGPGRTVVVKGEVNANAKSFNVDLLAGKSKDIALHLNPRLNIKAFVRNSFLQESWGEEERNITSFPFSPGMYFEMIIYCDVREFKVAVNGVHSLEYKHRFKELSSIDTLEINGDIHLLEVRSW

SEQ ID NO: 262381 - DNA, 954 bp, Artificial Sequence
  derived and/or modified sequence
atgatgctttccctgaataacctgcaaaatatcatttacaatcccgtgatccctttcgttggaaccattcctgatcagcttgatcccggcactctgatcgtcattagaggtcacgtccctagcgatgcggacagatttcaggtcgatctccaaaatggcagttccatgaagccgcgggccgatgttgcattccacttcaacccccgattcaagagggcaggttgcattgtttgtaatacacttatcaacgagaaatgggggcgggaagagattacttacgacaccccattcaaaagggaaaagtcgtttgagattgtcataatggtccttaaagacaagtttcaggttgcagtgaacggaaaacacacactgttgtatggacaccggattgggccagagaagatagacacactgggcatctacggaaaagtgaacattcacagcatcggcttctcttttagctctgatttgcagagtacgcaagccagctctctggaactgacagagatttctcgcgaaaatgtgcccaagtccggcacccctcagctgagactcccttttgctgctcgtctaaatacacctatgggcccagggagaacagttgtcgtcaaaggagaggtgaacgcgaatgcaaaaagcttcaatgtcgacctgctggctggcaagtctaaggatatcgctctgcatctgaatccccgactgaacatcaaggcctttgtgagaaacagcttcttacaggaaagctggggcgaggaggagcgcaacattacatcttttcctttctctcccgggatgtactttgagatgattatttactgtgatgttagagaattcaaggtggctgtaaacggcgtccattcacttgagtacaagcatagattcaaggagctgtcaagcatcgatacgttggagatcaatggcgatatccacttgctcgaggttagatcatggtag

SEQ ID NO: 262382 - DNA, 954 bp, Artificial Sequence
  derived and/or modified sequence
atgatgctgtccctgaacaatctgcaaaacatcatttacaaccctgttattccatttgtagggaccattcccgaccaactcgatccaggaactcttatcgtcataagggggcacgtgcctagcgatgctgacagatttcaagttgacctgcagaacggctcaagtatgaaacccagggcggacgtggcgttccacttcaatcctcgatttaagcgcgctgggtgtattgtgtgcaacacccttatcaacgagaagtggggcagggaagaaattacatatgacacgcccttcaagagagaaaagtcattcgagatagtcatcatggtgctgaaggataaattccaagtggccgtgaacggaaagcacaccctgctgtacggtcacagaatagggcccgagaaaatcgacacactgggcatttacggaaaagtgaatattcacagcatcgggttcagcttctccagtgacctgcagagcacccaggctagctccctggaactcacagagattagtagggagaatgtacccaagagtgggacacctcagcttaggctgccctttgcggccaggctgaacacacccatgggcccaggcagaacagtggttgtgaaaggggaggtcaatgccaacgcgaaaagctttaacgtcgatctgttggctggcaagtcaaaggatatagcgcttcatctgaacccaagactcaatattaaagcatttgtccgtaatagctttttacaggaaagttggggtgaggaagagcgaaatatcacctcgtttcccttctctcctggcatgtattttgagatgattatttactgcgatgtccgagagtttaaagtggcggtgaatggcgttcacagtctcgagtataaacatagatttaaggaattgtccagtatagacacactagagattaatggagacatccacctgcttgaagtaaggagttggtag

SEQ ID NO: 262383 - DNA, 903 bp, Artificial Sequence
  derived and/or modified sequence
atgatgctttcactgaataatctgcagaatattatatataacccggtaataccgtttgtgggcaccatcccggaccagcttgatcctgggactttgatcgttatcagaggccacgtcccatcagatgccgaccgctttcaggtggacctccagaatggttccagtatgaagccccgggctgacgtggcttttcactttaatccccggtttaaaagggctggctgtatcgtctgcaatacactcattaatgaaaagtgggggcgggaggagatcacctacgatactcctttcaaacgcgaaaaatcgtttgagatcgtcatcatggtgttaaaggacaagttccaggtcccgaaatcagggactcctcagcttccctccaaccggggcggcgacataagtaagattgcacccaggaccgtgtacaccaaaagtaaggatagcaccgttaaccacactttgacctgcaccaagatacctccaatgaactacgtgtccaagcgccttccctttgctgctagactgaataccccaatgggccccgggagaacagtggtggtaaagggtgaggtgaacgctaatgctaagagttttaatgtggatctccttgctggaaagagcaaggacattgcattacacctcaaccctcgcctgaacattaaggcctttgtgcggaacagctttctgcaagaaagttggggggaggaggagagaaatatcacctcctttcccttctccccaggcatgtactttgagatgatcatctattgcgatgtcagagagttcaaagttgctgtgaatggcgtacattcattagaatacaaacaccgcttcaaagagctctcgtcgattgacactcttgagatcaacggggacattcatctcctggaagtccggtcctggtag

SEQ ID NO: 262384 - DNA, 507 bp, Artificial Sequence
  derived and/or modified sequence
atgatgctgtcccttaataacctccagaacattatctataatcccgtcataccattcgtaggtacaattccagaccagctggaccctggaaccttaatcgtcatcagggggcacgtgcccagtgacgctgataggtttcaggtagacctccagaatggcagctcaatgaagccccgtgcagatgtcgcctttcacttcaatccgagatttaagcgggcaggctgcatcgtctgcaacactctgataaatgagaaatggggccgggaggagatcacctacgataccccttttaagcgcgaaaaatccttcgaaatcgtaatcatggtgctgaaggacaagttccaagtggccgttaatggaaaacatacattactgtacggacacaggataggcccagaaaaaatcgatacactcggaatctacgggaaggtaaatattcattccataggcttcagcttcagtagcgacctgcagtccactcaggctagttctctggagcttacctag

SEQ ID NO: 262385 - DNA, 321 bp, Artificial Sequence
  derived and/or modified sequence
atgatgctgagccttaataacctgcaaaacattatctacaaccctgtcatcccatttgtcggcacaatcccagaccagctagacccaggtaccctgattgtcatccgtggacatgtgccctctgacgcggatcgcttccaggtcgatctgcagaatggctccagtatgaagcctagggctgatgtggcgtttcattttaatccacgcttcaagagagccggctgcatcgtgtgcaatacattgatcaatgagaagtggggaagagaggaaataacctacgataccccatttaagcgggagaagagcttcgaaattgtctag

SEQ ID NO: 262386 - DNA, 954 bp, Artificial Sequence
  derived and/or modified sequence
atgatgcttagcctgaacaaccttcagaacataatttacaatcctgtgattccattcgtggggaccatcccagaccagttagatcctggtactctcattgtaattaggggacacgtaccgtctgacgccgaccgatttcaggtggatctacaaaacggctcatctatgaaacctcgtgcagacgtagcattccatttcaaccctcgcttcaagcgcgcagggtgcattgtgtgcaacaccctaatcaatgagaaatggggccgcgaggaaattacctacgacactcctttcaagcgggagaaatcattcgaaatcgtaattatggtgcttaaggataagttccaggtcgccgtcaatggcaaacacactctgctgtacggtcacaggattggcccggagaagattgacaccctcggaatctacggaaaggtgaacattcattctataggattttcattctcgtctgacctgcagagtactcaggcgagttctctggaactgaccgaaatctctcgcgagaatgtgcctaaatcaggtacaccccagctgcgcctacccttcgctgctcgcctgaatacacctatgggcccaggccgaacggtcgttgtcaaaggggaagtgaacgctaacgccaagagctttaacgtggaccttctagctggaaagtccaaagacatagccctgcacctgaacccacgtcttaatattaaggccttcgtgcgaaacagcttcctgcaagagtcctggggagaagaagagcggaacatcacttctttccctttcagtccgggaatgtacttcgaaatgattatttattgcgacgtccgggagtttaaggtagctgtaaatggagtgcattcacttgagtataagcaccggtttaaggagctaagctccatcgataccctcgaaatcaacggagacatacatctgctcgaggtgcgtagttggtag

SEQ ID NO: 262387 - DNA, 132 bp, Artificial Sequence
  derived and/or modified sequence
atgatgctcagccttaacaacctgcagaacatcatctacaaccctgtgataccttttgtggggaccatcccagatcagctcgaccctggaacgttgattgtaatcaggggccacgtccctagcgatgcctag

SEQ ID NO: 262388 - DNA, 954 bp, Artificial Sequence
  derived and/or modified sequence
atgatgctgagcctgaacaacctgcagaacatcatctacaaccctgtgatcccctttgtgggcaccatcccagaccagctggaccccggcaccctgattgtcatccggggccacgtgcccagtgatgctgaccgcttccaggtggacctgcagaatggcagctccatgaagcccagggcagatgtggccttccacttcaacccccgcttcaagagagctggctgcatcgtgtgcaacaccctcatcaatgagaagtggggccgggaggagatcacctatgacacccccttcaagcgggagaagagctttgaaattgtcatcatggtgctgaaggacaagttccaggtggccgtgaatggcaagcacaccctgctgtatggccaccgcatcggccctgagaagattgacaccctgggcatctacggcaaggtgaacatccacagcatcggcttctccttcagcagtgacctgcagagcacccaggccagcagcctggagctgacagagatcagcagagaaaatgtgcccaagagcggcaccccccagctgcggctgccctttgctgcccggctgaacacccccatgggccctggccgcacagtggtggtgaagggggaggtgaatgccaatgccaagagcttcaacgtggacctgctggccggcaagagcaaggacatcgccctgcacctgaacccccggctgaacatcaaggcctttgtgagaaattccttcctgcaggagagctggggcgaggaggagaggaacatcaccagcttccccttcagccctggcatgtactttgagatgatcatctactgtgatgtgcgggagttcaaggtggccgtgaatggagtgcacagcctggagtacaagcaccgcttcaaggagctgagcagcattgacaccctggagatcaacggggacatccacctgctggaggtgcgctcctggtag

SEQ ID NO: 262389 - DNA, 903 bp, Artificial Sequence
  derived and/or modified sequence
atgatgctgagcctgaacaacctgcagaacatcatctacaaccctgtgatcccctttgtgggcaccatcccagaccagctggaccccggcaccctgattgtcatccggggccacgtgcccagtgatgctgaccgcttccaggtggacctgcagaatggcagctccatgaagcccagggcagatgtggccttccacttcaacccccgcttcaagagagctggctgcatcgtgtgcaacaccctcatcaatgagaagtggggccgggaggagatcacctatgacacccccttcaagcgggagaagagctttgaaattgtcatcatggtgctgaaggacaagttccaggtgcccaagagcggcaccccccagctgcccagcaacagaggaggagacatcagcaagatcgcccccaggacagtgtacaccaagagcaaggacagcacagtgaaccacaccctgacctgcaccaagatcccccccatgaactacgtgtccaagaggctgccctttgctgcccggctgaacacccccatgggccctggccgcacagtggtggtgaagggggaggtgaatgccaatgccaagagcttcaacgtggacctgctggccggcaagagcaaggacatcgccctgcacctgaacccccggctgaacatcaaggcctttgtgaggaacagcttcctgcaggagagctggggcgaggaggagaggaacatcaccagcttccccttcagccctggcatgtactttgagatgatcatctactgtgatgtgcgggagttcaaggtggccgtgaatggagtgcacagcctggagtacaagcaccgcttcaaggagctgagcagcattgacaccctggagatcaatggagacatccacctgctggaggtgcgctcctggtag

SEQ ID NO: 262390 - DNA, 507 bp, Artificial Sequence
  derived and/or modified sequence
atgatgctgagcctgaacaacctgcagaacatcatctacaaccctgtgatcccctttgtgggcaccatcccagaccagctggaccccggcaccctgattgtcatccggggccacgtgcccagtgatgctgaccgcttccaggtggacctgcagaatggcagctccatgaagcccagggcagatgtggccttccacttcaacccccgcttcaagagagctggctgcatcgtgtgcaacaccctcatcaatgagaagtggggccgggaggagatcacctatgacacccccttcaagcgggagaagagctttgaaattgtcatcatggtgctgaaggacaagttccaggtggccgtgaatggcaagcacaccctgctgtatggccaccgcatcggccctgagaagattgacaccctgggcatctacggcaaggtgaacatccacagcatcggcttctccttcagcagtgacctgcagagcacccaggccagcagcctggagctgacctag

SEQ ID NO: 262391 - DNA, 321 bp, Artificial Sequence
  derived and/or modified sequence
atgatgctgagcctgaacaacctgcagaacatcatctacaaccctgtgatcccctttgtgggcaccatcccagaccagctggaccccggcaccctgattgtcatccggggccacgtgcccagtgatgctgaccgcttccaggtggacctgcagaatggcagctccatgaagcccagggcagatgtggccttccacttcaacccccgcttcaagagagctggctgcatcgtgtgcaacaccctcatcaatgagaagtggggccgggaggagatcacctatgacacccccttcaagcgggagaagagctttgaaattgtgtag

SEQ ID NO: 262392 - DNA, 132 bp, Artificial Sequence
  derived and/or modified sequence
atgatgctgagcctgaacaacctgcagaacatcatctacaaccctgtgatcccctttgtgggcaccatcccagaccagctggaccccggcaccctgattgtcatccggggccacgtgcccagtgatgcctag

SEQ ID NO: 262393 - DNA, 2437 bp, Artificial Sequence
  derived and/or modified sequence
tggacttggatccgaggcagacgaggaagctgagaaaaccctggcgttgaccccgtggacctgggcgccccgggaaggccagcgcttggtccaggcaggcggggcctgtgcggtgaccaccctggtcctgaaaagtcccagccccgagcgccctccctcctagacctggaggcctggaacagccagccgcccacggacgccagagccgggaaccctgacggcacttagctgctgacaaacaacctgctccgtggagcgcctgaaacaccagtctttggggccagtgcctcagtttcaatccaggtaacctttaaatgaaacttgcctaaaatcttaggtcatacacagaagagactccaatcgacaagaagctggaaaagaatgatgttgtccttaaacaacctacagaatatcatctataacccggtaatcccgtttgttggcaccattcctgatcagctggatcctggaactttgattgtgatacgtgggcatgttcctagtgacgcagacagattccaggtggatctgcagaatggcagcagcatgaaacctcgagccgatgtggcctttcatttcaatcctcgtttcaaaagggccggctgcattgtttgcaatactttgataaatgaaaaatggggacgggaagagatcacctatgacacgcctttcaaaagagaaaagtcttttgagatcgtgattatggtgctgaaggacaaattccaggtggctgtaaatggaaaacatactctgctctatggccacaggatcggcccagagaaaatagacactctgggcatttatggcaaagtgaatattcactcaattggttttagcttcagctcggacttacaaagtacccaagcatctagtctggaactgacagagataagtagagaaaatgttccaaagtctggcacgccccagcttaggctgccattcgctgcaaggttgaacacccccatgggccctggacgaactgtcgtcgttaaaggagaagtgaatgcaaatgccaaaagctttaatgttgacctactagcaggaaaatcaaaggatattgctctacacttgaacccacgcctgaatattaaagcatttgtaagaaattcttttcttcaggagtcctggggagaagaagagagaaatattacctctttcccatttagtcctgggatgtactttgagatgataatttattgtgatgttagagaattcaaggttgcagtaaatggcgtacacagcctggagtacaaacacagatttaaagagctcagcagtattgacacgctggaaattaatggagacatccacttactggaagtaaggagctggtagcctacctacacagctgctacaaaaaccaaaatacagaatggcttctgtgatactggccttgctgaaacgcatctcactgtcattctattgtttatattgttaaaatgagcttgtgcaccattaggtcctgctgggtgttctcagtccttgccatgaagtatggtggtgtctagcactgaatggggaaactgggggcagcaacacttatagccagttaaagccactctgccctctctcctactttggctgactcttcaagaatgccattcaacaagtatttatggagtacctactataatacagtagctaacatgtattgagcacagattttttttggtaaaactgtgaagagctaggatatatacttggtgaaacaaaccagtatgttccctgttctcttgagcttcgactcttctgtgcgctactgctgcgcactgctttttctacaggcattacatcaactcctaaggggtcctctgggattagttatgcagatattaaatcacccgaagacactaacttacagaagacacaactccttccccagtgatcactgtcataaccagtgctctaccgtatcccatcactgaggactgatgttgactgacatcattttctttatcgtaataaacatgtggctctattagctgcaagctttaccaagtaattggcatgacatctgagcacagaaattaaggcaaaaaaccaaagcaaaacaaatacatggtgctgaaattaacttgatgccaagcccaaggcagctgatttctgtgtatttgaacttagggcaaatcagagtctacacagacgcctacagaaagtttcaggaagaggcaagatgcattcaatttgaaagatatttatgggcaacaaagtaaggtcaggattagacttcaggcattcataaggcaggcactatcagaaagtgtacgccaactaagggacccacaaagcaggcagaggtaatgcagaaatctgttttgttcccatgaaatcaccaatcaaggcctccgttcttctaaagattagtccatcatcattagcaactgagatcaaagcactcttccactttacgtgattaaaatcaaacctgtatcagcaa

SEQ ID NO: 262394 - DNA, 4369 bp, Artificial Sequence
  derived and/or modified sequence
tagacctggaggcctggaacagccaggtggacgtcggcccacctttcttttctttccttcccattttcctaccacctcccaccccactccgccttccgggcaaaggcagccagatccacccaggacacattctttgtccttatccctctgtgctcgtcccacagcaagccagtcgcggtccaaggctccagaggctgtgcaggaggccgagctgggtggcgatcagcggcgggtccctgtccaaaacccagcagagccgccagggacgccccagacacagaaggcggggcgcggggagggtggggagaccacagcagtgaggcgcgcgagccgggaagtgaacgaggactgactcctgtcgcttcccgtagccgcccacggacgccagagccgggaaccctgacggcacttagctgctgacaaacaacctgctccgtggagcgcctgaaacaccagtctttggggccagtgcctcagtttcaatccaggtaacctttaaatgaaacttgcctaaaatcttaggtcatacacagaagagactccaatcgacaagaagctggaaaagaatgatgttgtccttaaacaacctacagaatatcatctataacccggtaatcccgtttgttggcaccattcctgatcagctggatcctggaactttgattgtgatacgtgggcatgttcctagtgacgcagacagattccaggtggatctgcagaatggcagcagcatgaaacctcgagccgatgtggcctttcatttcaatcctcgtttcaaaagggccggctgcattgtttgcaatactttgataaatgaaaaatggggacgggaagagatcacctatgacacgcctttcaaaagagaaaagtcttttgagatcgtgattatggtgctgaaggacaaattccaggtggctgtaaatggaaaacatactctgctctatggccacaggatcggcccagagaaaatagacactctgggcatttatggcaaagtgaatattcactcaattggttttagcttcagctcggacttacaaagtacccaagcatctagtctggaactgacagagataagtagagaaaatgttccaaagtctggcacgccccagcttaggctgccattcgctgcaaggttgaacacccccatgggccctggacgaactgtcgtcgttaaaggagaagtgaatgcaaatgccaaaagctttaatgttgacctactagcaggaaaatcaaaggatattgctctacacttgaacccacgcctgaatattaaagcatttgtaagaaattcttttcttcaggagtcctggggagaagaagagagaaatattacctctttcccatttagtcctgggatgtactttgagatgataatttattgtgatgttagagaattcaaggttgcagtaaatggcgtacacagcctggagtacaaacacagatttaaagagctcagcagtattgacacgctggaaattaatggagacatccacttactggaagtaaggagctggtagcctacctacacagctgctacaaaaaccaaaatacagaatggcttctgtgatactggccttgctgaaacgcatctcactgtcattctattgtttatattgttaaaatgagcttgtgcaccattaggtcctgctgggtgttctcagtccttgccatgaagtatggtggtgtctagcactgaatggggaaactgggggcagcaacacttatagccagttaaagccactctgccctctctcctactttggctgactcttcaagaatgccattcaacaagtatttatggagtacctactataatacagtagctaacatgtattgagcacagattttttttggtaaaactgtgaagagctaggatatatacttggtgaaacaaaccagtatgttccctgttctcttgagcttcgactcttctgtgcgctactgctgcgcactgctttttctacaggcattacatcaactcctaaggggtcctctgggattagttatgcagatattaaatcacccgaagacactaacttacagaagacacaactccttccccagtgatcactgtcataaccagtgctctaccgtatcccatcactgaggactgatgttgactgacatcattttctttatcgtaataaacatgtggctctattagctgcaagctttaccaagtaattggcatgacatctgagcacagaaattaaggcaaaaaaccaaagcaaaacaaatacatggtgctgaaattaacttgatgccaagcccaaggcagctgatttctgtgtatttgaacttagggcaaatcagagtctacacagacgcctacagaaagtttcaggaagaggcaagatgcattcaatttgaaagatatttatgggcaacaaagtaaggtcaggattagacttcaggcattcataaggcaggcactatcagaaagtgtacgccaactaagggacccacaaagcaggcagaggtaatgcagaaatctgttttgttcccatgaaatcaccaatcaaggcctccgttcttctaaagattagtccatcatcattagcaactgagatcaaagcactcttccactttacgtgattaaaatcaaacctgtatcagcaagttaaatggttccatttctgtgatttttctattatttgaggggagttggcagaagttccatgtatatgggatctttacaggtcagatcttgttacaggaaatttcaaaggtttgggagtggggagggaaaaaagctcagtcagtgaggatcattttatcacattagactggggcagaactctgccaggatttaggaatattttcagaacagattttagatattatttctatccatatattgaaaagaataccattgtcaatcttatttttttaaaagtactcagtgtagaaatcgctagcccttaattcttttccagcttttcatattaatgtatgcagagtctcaccaagctcaaagacactggttgggggtggagggtgccacagggaaagctgtagaaggcaagaagactcgagaatcccccagagttatttttctccataaagaccatcagagtgcttaactgagctgttggagactgtgaggcatttaggaaaaaaatagcccactcacatcattccttgtaagtcttaagttcattttcattttacgtggaggaaaaaaatttaaaaagctattagtatttattaatgaattttactgagacatttcttagaaatatgcacttctatactagcaagctctgtctctaaaatgcaagttggccttttgcttgccacatttctgcattaaacttctatattagcttcaaaggcttttaaactcaatgcgaacattctacgggatgttcttagatgcctttaaaaagggggcagatctaattttatttgaaccctcactttccaacttcaccatgacccagtactagagattagggcacttcaaagcattgaaaaaaatctactgatacttactttcttagacaagtagttcttagttaaccaccaatggaactgggttcattctgaatcctggaggagcttcctcgtgccacccagtgtttctgggccctctgtgtgagcagccaggtgtgagctgttttagaagcagcgtgttgccttcatctctcccgtttcccaaaagaacaaaggataaaggtgacagtcacactcctgggttaaaaaaagcattccagaaccacttctctttatgggcacaacaaagaaacgaaggctgaagttcgcctacccaaaatgaaaagtaggctttacagtcaaaagtacttctgttgattgctaaataacttcattttcttgaaatagagcaactttgagtgaaatctgcaacatggataccatgtatgtaagatactgctgtacagaagagttaaggcttacagtgcaaatgaggcgtcagctttgggtgctaaaattaacaagtctaatattattaccatcaatcaggaagagaataataaatgtttaaacaaacacagcagtctgtataaaaataccgtgtatcatttactctttctgcagctctatacgataggcaggagaggcttatgtggcagcacaagccaggtggggattttgtaaagaagtgataaaacatttgtaagtaatccaagtaggtgtattaaggcaccaaaagtaacatggcacccaacacccaaaaataaaaatatgaaatatgagtgtgaactctgagtagagtatgaaacaccacagaaagtcttagaaatagctctggagtggctctcccaggacagtttccagttgctgaatagtcttttggcactgatgttctacttcttcacattcatctaaaaaaaaaaaaaaaaaa

SEQ ID NO: 262395 - DNA, 1110 bp, Artificial Sequence
  derived and/or modified sequence
aaacaacctgctccgtggagcgcctgaaacaccagtctttggggccagtgcctcagtttcaatccaggtaacctttaaatgaaacttgcctaaaatcttaggtcatacacagaagagactccaatcgacaagaagctggaaaagaatgatgttgtccttaaacaacctacagaatatcatctataacccggtaatcccgtttgttggcaccattcctgatcagctggatcctggaactttgattgtgatacgtgggcatgttcctagtgacgcagacagattccaggtggatctgcagaatggcagcagcatgaaacctcgagccgatgtggcctttcatttcaatcctcgtttcaaaagggccggctgcattgtttgcaatactttgataaatgaaaaatggggacgggaagagatcacctatgacacgcctttcaaaagagaaaagtcttttgagatcgtgattatggtgctgaaggacaaattccaggttccaaagtctggcacgccccagcttcctagtaatagaggaggagacatttctaaaatcgcacccagaactgtctacaccaagagcaaagattcgactgtcaatcacactttgacttgcaccaaaataccacctatgaactatgtgtcaaagaggctgccattcgctgcaaggttgaacacccccatgggccctggacgaactgtcgtcgttaaaggagaagtgaatgcaaatgccaaaagctttaatgttgacctactagcaggaaaatcaaaggatattgctctacacttgaacccacgcctgaatattaaagcatttgtaagaaattcttttcttcaggagtcctggggagaagaagagagaaatattacctctttcccatttagtcctgggatgtactttgagatgataatttattgtgatgttagagaattcaaggttgcagtaaatggcgtacacagcctggagtacaaacacagatttaaagagctcagcagtattgacacgctggaaattaatggagacatccacttactggaagtaaggagctggtagcctacctacacagctgctacaaaaaccaaaatacagaatggcttctgtgatactggccttgc

SEQ ID NO: 262396 - DNA, 846 bp, Artificial Sequence
  derived and/or modified sequence
atagttctagaagcttgtttctcccacctgaaaagactggatttgggacatgatcctgtagaacttcggagattggggaagataatcggaagaggtagaagacaccgtccatgacacttcctggggaagcagatgtatgtataaggatccgcccacggacgccagagccgggaaccctgacggcacttagctgctgacaaacaacctgctccgtggagcgcctgaaacaccagtctttggggccagtgcctcagtttcaatccaggtaacctttaaatgaaacttgcctaaaatcttaggtcatacacagaagagactccaatcgacaagaagctggaaaagaatgatgttgtccttaaacaacctacagaatatcatctataacccggtaatcccgtttgttggcaccattcctgatcagctggatcctggaactttgattgtgatacgtgggcatgttcctagtgacgcagacagattccaggtggatctgcagaatggcagcagcatgaaacctcgagccgatgtggcctttcatttcaatcctcgtttcaaaagggccggctgcattgtttgcaatactttgataaatgaaaaatggggacgggaagagatcacctatgacacgcctttcaaaagagaaaagtcttttgagatcgtgattatggtgctgaaggacaaattccaggtggctgtaaatggaaaacatactctgctctatggccacaggatcggcccagagaaaatagacactctgggcatttatggcaaagtgaatattcactcaattggttttagcttcagctcggacttacaaagtacccaagcatctagtctggaactgac

SEQ ID NO: 262397 - DNA, 799 bp, Artificial Sequence
  derived and/or modified sequence
attttgtctttacattttacataatttcagatacattttcctcatatcaaataattcagcattttttagtactaacatcatagtctgtaagccattcaaaaaatgtatttcacaaaataggctatctcatcctttgagctattgagatgaattaatttatactcctcctaagatccctctcgtcactaagattcttttattttatgacaaaaccatagttctagaagcttgtttctcccacctgaaaagactggatttgggacatgatcctgtagaacttcggagccgcccacggacgccagagccgggaaccctgacggcacttagctgctgacaaacaacctgctccgtggagcgcctgaaacaccagtctttggggccagtgcctcagtttcaatccaggtaacctttaaatgaaacttgcctaaaatcttaggtcatacacagaagagactccaatcgacaagaagctggaaaagaatgatgttgtccttaaacaacctacagaatatcatctataacccggtaatcccgtttgttggcaccattcctgatcagctggatcctggaactttgattgtgatacgtgggcatgttcctagtgacgcagacagattccaggtggatctgcagaatggcagcagcatgaaacctcgagccgatgtggcctttcatttcaatcctcgtttcaaaagggccggctgcattgtttgcaatactttgataaatgaaaaatggggacgggaagagatcacctatgacacgcctttcaaaagagaaaagtcttttgagatcgtga

SEQ ID NO: 262398 - DNA, 1852 bp, Artificial Sequence
  derived and/or modified sequence
gacttcctttgaccgtacgtgaaacttaagtgatggctgcttgtgatgcatacgaagtgttcatgctggcgggacctgtccctggggatacttcgggggttgcgtgatttaatgcaagcagatggcttaaattgggtcactggcttgttattatacatgtggccagtgcctcagtttcaatccaggtaacctttaaatgaaacttgcctaaaatcttaggtcatacacagaagagactccaatcgacaagaagctggaaaagaatgatgttgtccttaaacaacctacagaatatcatctataacccggtaatcccgtttgttggcaccattcctgatcagctggatcctggaactttgattgtgatacgtgggcatgttcctagtgacgcagacagattccaggtggatctgcagaatggcagcagcatgaaacctcgagccgatgtggcctttcatttcaatcctcgtttcaaaagggccggctgcattgtttgcaatactttgataaatgaaaaatggggacgggaagagatcacctatgacacgcctttcaaaagagaaaagtcttttgagatcgtgattatggtgctgaaggacaaattccaggtggctgtaaatggaaaacatactctgctctatggccacaggatcggcccagagaaaatagacactctgggcatttatggcaaagtgaatattcactcaattggttttagcttcagctcggacttacaaagtacccaagcatctagtctggaactgacagagataagtagagaaaatgttccaaagtctggcacgccccagcttaggctgccattcgctgcaaggttgaacacccccatgggccctggacgaactgtcgtcgttaaaggagaagtgaatgcaaatgccaaaagctttaatgttgacctactagcaggaaaatcaaaggatattgctctacacttgaacccacgcctgaatattaaagcatttgtaagaaattcttttcttcaggagtcctggggagaagaagagagaaatattacctctttcccatttagtcctgggatgtactttgagatgataatttattgtgatgttagagaattcaaggttgcagtaaatggcgtacacagcctggagtacaaacacagatttaaagagctcagcagtattgacacgctggaaattaatggagacatccacttactggaagtaaggagctggtagcctacctacacagctgctacaaaaaccaaaatacagaatggcttctgtgatactggccttgctgaaacgcatctcactgtcattctattgtttatattgttaaaatgagcttgtgcaccattaggtcctgctgggtgttctcagtccttgccatgaagtatggtggtgtctagcactgaatggggaaactgggggcagcaacacttatagccagttaaagccactctgccctctctcctactttggctgactcttcaagaatgccattcaacaagtatttatggagtacctactataatacagtagctaacatgtattgagcacagattttttttggtaaaactgtgaagagctaggatatatacttggtgaaacaaaccagtatgttccctgttctcttgagcttcgactcttctgtgcgctactgctgcgcactgctttttctacaggcattacatcaactcctaaggggtcctctgggattagttatgcagatattaaatcacccgaagacactaacttacagaagacacaactccttccccagtgatcactgtcataaccagtgctctaccgtatcccatcactgaggactgatgttgactgacatcattttctttatcgtaataaacatg

SEQ ID NO: 262399 - DNA, 554 bp, Artificial Sequence
  derived and/or modified sequence
agatcatagggggtctggagggtgaaaaaaaagagtttggtgctcatggatggggctagtattggggtgtaggggagattaggtcaaagcaagaggattcaaaggagaaatgaattcctttagattggggaagataatcggaagaggtagaagacaccgtccatgacacttcctggggaagcagatgtatgtataaggatatggagtctcgttctgttgcccaggctggagtgcagtggcacaatctcggctcacttcaacctccgtctcccaggttcaagcaattctcctgtctcagcctcctgagtagctgggactacagggccagtgcctcagtttcaatccaggtaacctttaaatgaaacttgcctaaaatcttaggtcatacacagaagagactccaatcgacaagaagctggaaaagaatgatgttgtccttaaacaacctacagaatatcatctataacccggtaatcccgtttgttggcaccattcctgatcagctggatcctggaactttgattgtgatacgtgggcatgttcctagtgacgca

SEQ ID NO: 262400 - DNA, 954 bp, Artificial Sequence
  derived and/or modified sequence
atgatgctgagcctgaacaacctgcagaacatcatctacaaccccgtcataccattcgttggcaccattcctgatcaactggatcctggcactctgatcgtaattagaggacacgtgccgtccgacgcagatcgattccaggttgatttacagaatgggagcagtatgaagccccgtgcggacgtggcatttcattttaaccctcggtttaagcgcgcaggatgtattgtgtgcaataccttgatcaacgagaagtggggaagagaggagattacatacgacacgccttttaaacgtgaaaaatccttcgagatcgtaatcatggtgctcaaagacaagtttcaagtggccgtgaacgggaagcatacccttctgtacggacatcggatcgggcctgaaaagattgataccctaggtatttacggaaaggtgaatatacactctattggattctccttcagttcggatctacagtctacccaggcctcttccctggaactgaccgagatatctagggagaacgttccaaagagtgggacccctcagctacggctccccttcgcggctcgtctgaacacccctatgggccctggcagaacggtggtagttaagggggaggtgaatgccaatgctaaaagctttaatgtggatctgttagctggtaagtcaaaagatatcgctcttcaccttaatcctaggttgaatataaaggccttcgtgagaaacagttttctccaggagtcttggggggaggaggagcggaatatcacaagcttcccctttagccctggtatgtattttgagatgattatatactgcgacgtgcgtgagtttaaagttgccgtgaatggtgttcatagtctggaatataaacatagattcaaggagttgtccagcatcgatacattagaaattaacggtgatatccacttgctggaggtgaggagctggtag

SEQ ID NO: 262401 - DNA, 954 bp, Artificial Sequence
  derived and/or modified sequence
atgatgctgagcctgaacaacctgcagaacatcatctacaaccccgtaatccccttcgtggggacaatccccgatcaactggacccaggcaccctgatcgtaatcaggggccacgtcccatcagacgctgatcgctttcaggttgacctgcagaatggatctagcatgaagccgagagcagatgttgcattccacttcaatccccggttcaagagggctggatgtattgtgtgtaacactctcattaacgagaagtggggccgcgaggaaatcacctacgacacgcctttcaaacgagaaaagtcattcgagatagtgataatggtgctcaaggataaattccaggtggccgtaaatgggaaacacacactgctgtacgggcaccggatagggccagaaaagatcgatactctgggaatctacgggaaagtcaatattcactcaattggttttagcttttcatcagacctgcagagtacacaggcatcttcacttgaactgacagagatcagcagagagaatgtgccgaagtcgggcacaccacagctcagattgccattcgcggctcggcttaacacgcccatggggcctggtagaaccgtggtggtgaagggggaggtgaacgccaacgccaaatccttcaacgtggatctgctggccgggaagagcaaggacattgctttgcatctcaaccccaggttgaacattaaggcatttgtgcgcaatagcttcctgcaggaaagctggggcgaagaggaaaggaatatcaccagtttcccattctcccctggtatgtattttgagatgatcatctattgtgacgtgagagagttcaaagtggcggttaacggtgtgcattccctcgaatataagcaccggttcaaggagctgtcttctattgacacactggaaatcaacggcgacatccatctcctggaagtcaggtcctggtag

SEQ ID NO: 262402 - DNA, 903 bp, Artificial Sequence
  derived and/or modified sequence
atgatgctgagcctgaacaacctgcagaacatcatctacaaccccgtgattcctttcgtggggactattcccgaccaactggatcccgggaccctaattgtgattaggggacacgtgccctctgacgcagataggttccaggttgatctccagaacgggagcagcatgaaacctagagccgacgtcgcctttcacttcaacccaagattcaagcgagccgggtgtatcgtctgtaatacgctgatcaacgagaaatggggtagggaggagataacatatgacacgccctttaaacgggaaaagagttttgagattgtgatcatggtgctgaaggacaaattccaggtccctaagtccgggacaccccagcttccctccaaccggggcggcgatatctctaagatcgctccaagaaccgtctatactaaaagcaaagattccactgtcaatcacacattaacctgtactaagataccacctatgaactacgtttccaagcgcctcccttttgctgcccgattgaatacgccaatgggacccggaagaactgtggtagtcaagggggaggttaatgccaatgccaagtccttcaatgtagaccttctggcgggaaaaagtaaagacattgcacttcatctcaacccaaggctgaatattaaggccttcgtccggaacagttttctccaggaaagctggggagaggaggagaggaatattacatcatttccattttcacccgggatgtacttcgaaatgataatctattgcgatgtgagggaatttaaggttgccgtgaacggtgtacactccttagaatacaagcatagattcaaggaattgtcctccattgacaccctggagattaatggggatatccacctgctggaggtgcgctcctggtag

SEQ ID NO: 262403 - DNA, 507 bp, Artificial Sequence
  derived and/or modified sequence
atgatgctgagcctgaacaacctgcagaacatcatctacaaccccgtgataccatttgtgggaacaatccccgatcagctggatcccggaactctgattgtgatccgtggacatgtgcccagcgatgcggaccgctttcaggttgatctccagaatggctcgagtatgaagccccgggcagacgtggctttccacttcaacccgcgctttaagcgggccgggtgcattgtctgcaatactctaataaacgagaaatgggggagggaggagatcacctacgacacaccttttaagagagagaaatccttcgaaatcgtgataatggttctgaaggacaagttccaagtcgccgtaaatggcaagcacacactgctgtacggacaccggataggccccgagaagattgacacactcggtatctatggaaaagtgaatatacactcaataggcttcagcttctcctccgacttgcagtcaacccaagcttcctcactggagttgacatag

SEQ ID NO: 262404 - DNA, 321 bp, Artificial Sequence
  derived and/or modified sequence
atgatgctgagcctgaacaacctgcagaacatcatctacaaccccgttatcccgttcgtggggaccattccagatcaactggaccctggtaccctcatcgtgattaggggccacgtgccttccgacgccgatcggtttcaagttgatttgcaaaacgggtccagcatgaaaccaagggccgatgtagcttttcatttcaaccctaggtttaaaagagcgggatgtatagtgtgcaacacactcattaatgagaagtggggaagagaggaaatcacgtatgacaccccatttaagcgcgagaagtcattcgagatcgtgtag

SEQ ID NO: 262405 - DNA, 954 bp, Artificial Sequence
  derived and/or modified sequence
atgatgctgagcctgaacaacctgcagaacatcatctacaaccccgtgattccgtttgttggaaccattcccgaccaactggatcctgggacactgatcgtgattcgaggacacgtcccttccgatgccgaccgttttcaggtggatttgcagaacggatcgtccatgaagcctcgtgccgacgtggcattccacttcaacccgcggttcaagcgtgctggctgtattgtgtgcaatactctgatcaatgaaaagtggggtcgggaggagattacatacgatacacccttcaaacgcgaaaagtcctttgagatagtgatcatggtgcttaaagacaaattccaggtggccgtgaacggaaaacacactctgctgtatggtcatagaattggacctgaaaaaatagacaccctcggaatctacggaaaggtaaacatccattcaattggtttctccttttccagcgacctgcagtccacccaggccagctccctggagctcaccgaaataagcagagagaatgtgccaaaatcaggcacaccccagctgcgactgccctttgcggcccggctgaatactccaatgggtccaggtagaaccgtggtagtgaaaggagaggtgaacgccaacgccaagtcatttaacgttgaccttctggcgggcaaatcaaaggacatcgctctccatttaaacccgcgcctcaatatcaaggctttcgtgcgaaattcctttctccaggaaagctggggggaggaagaacgcaatataacgagcttccccttctcccccggcatgtacttcgagatgattatctactgtgatgttagagagtttaaggttgctgttaatggggtccactcccttgagtataagcataggttcaaggaactctcatccatcgataccctggaaattaatggagatattcacctcttagaagttcgcagttggtag

SEQ ID NO: 262406 - DNA, 132 bp, Artificial Sequence
  derived and/or modified sequence
atgatgctgagcctgaacaacctgcagaacatcatctacaaccccgtaattccttttgttggaaccatccccgatcaactggaccccggtacactcatagttattcgtggccacgtgccaagcgacgcatag

SEQ ID NO: 262407 - DNA, 954 bp, Artificial Sequence
  derived and/or modified sequence
atgatgctttccctaaataatttgcagaacataatttataacccggtcatcccgtttgtcgggaccatccccgatcagctggatccaggaactttaatagtcatccgtggtcacgtcccaagtgacgcagatcgcttccaggtcgacttacagaatggcagttctatgaagcctagggcggatgtggcttttcattttaatcctcgcttcaaacgggcaggctgtatcgtttgcaacacacttatcaatgagaagtggggaagggaggagatcacctatgatacccccttcaagagggaaaagtctttcgaaatcgtgatcatggtactgaaagacaaatttcaggtcgccgttaacggcaaacacactcttctctatggccacaggataggacctgagaaaattgatactctaggtatatacggtaaagttaacattcactccatcgggttttccttctccagcgacctgcaatctacccaagcttcatcccttgagctgaccgaaatcagccgggagaacgtgcccaagtctggtacaccccagctgcgactcccctttgctgcgagattgaacactcctatgggtcctggaaggactgtggttgtcaaaggagaggtcaatgcaaatgctaaatctttcaacgtggacctcctggcaggcaagagtaaggacatcgcgctgcatctaaatccacgtcttaacattaaggcctttgtgagaaatagtttcctgcaggagtcttggggcgaagaggaacggaatataacttcatttccattcagtcctggaatgtattttgaaatgatcatctattgcgatgtcagagagttcaaggttgccgtgaacggggtccactcactggaatataagcatcggtttaaagagctgagctccatcgacactctggagatcaacggcgacatccaccttctagaggtgaggtcgtggtag

SEQ ID NO: 262408 - DNA, 954 bp, Artificial Sequence
  derived and/or modified sequence
atgatgttgagtttgaataacctgcagaatattatttataatcccgtcatcccctttgtgggaaccattcctgatcaattggatccagggactctgatcgtgattaggggccatgttccgtccgatgctgaccgctttcaggtcgacctccaaaacggcagttccatgaaacccagggcagacgtcgcatttcactttaaccctaggttcaaacgcgctggctgtatcgtgtgcaataccctcatcaatgagaagtgggggagagaggaaattacttacgatacaccttttaaacgagagaagagttttgagattgtgataatggtgctgaaagacaaattccaggtggccgtgaacggcaaacacaccctgctttatggccaccggattggacctgaaaaaatagatacgctaggaatctacggcaaagttaacatccatagcatcggattcagcttcagctccgatttacagtctactcaggcatcttcattagagctgaccgaaatctcccgcgagaacgtgccaaagagtggaacaccccagctgaggctgccttttgcagcacggctcaatacccctatgggacctggtagaacggtggtggttaaaggtgaggttaatgctaatgcgaaatcctttaatgtggacttgctggcaggaaagtctaaagacattgccttgcatttgaaccccagactgaacatcaaggcgttcgtccggaacagttttctgcaggaaagctggggtgaggaagagcggaatatcactagctttccgttctccccaggaatgtatttcgagatgattatatattgcgatgtgagggagtttaaggtggccgtcaacggggtgcatagcttagaatataaacatcgatttaaggaactctcgtctattgacacactagaaattaacggagatatacatttactagaagttcgcagttggtag

SEQ ID NO: 262409 - DNA, 903 bp, Artificial Sequence
  derived and/or modified sequence
atgatgctgagcctgaataacctgcagaacatcatctataaccctgtgataccctttgtcggaaccattcccgatcagttggacccaggtactttaatcgtcattcgaggacacgttccatccgatgccgaccgcttccaggtggacttgcaaaatggtagctcgatgaagccaagggctgacgtggcatttcattttaatccaaggttcaagagagcaggctgcatcgtttgtaacacactgatcaatgaaaagtgggggagggaggagatcacctatgatacaccattcaagagagagaaaagtttcgaaatagtgatcatggtcctgaaggacaaattccaggtgccaaagtctgggacaccccagctgccctccaataggggcggtgatattagcaaaattgccccacggaccgtttataccaagagcaaggactctactgtgaaccacacattgacctgtactaagattcctcctatgaactacgtcagcaaacggctgccttttgcagcacggctgaacacccccatgggacccggtcgaacagtggttgtgaagggtgaagtgaacgcaaatgccaagtctttcaacgtcgacttattggccggaaagtccaaggatatagccctccacctgaaccccaggcttaatatcaaagcgttcgtgcgcaattcttttctccaggagagctggggcgaggaagagcgaaacataacaagcttcccattcagccctggtatgtactttgagatgattatttactgtgacgtgagggagttcaaggtggctgttaatggagtccattcgctcgagtacaagcacagatttaaggagctgtcatccatcgataccctggaaataaacggtgacattcatctgcttgaggtccggagttggtag

SEQ ID NO: 262410 - DNA, 507 bp, Artificial Sequence
  derived and/or modified sequence
atgatgctcagccttaataatctgcaaaatatcatatataacccagtaatcccttttgttggaaccatcccagatcagttggatcccggaaccttaatcgttatcagggggcacgtccccagcgatgcagatagatttcaggtggacctccagaacggttcatcgatgaagcccagagctgacgtcgcctttcattttaatcccaggtttaagcgtgccggatgcatcgtttgcaacacactgattaacgagaagtggggtcgggaagagatcacttacgacaccccattcaagagagaaaagagttttgagatcgtcatcatggtactgaaggacaaatttcaggtcgcagtgaacgggaagcatacgctcctttacggacacagaatcggcccagagaagatcgatacccttggtatttacggtaaagtgaatatacatagtatcggattctcgttctcctcagaccttcagtcaacacaggcatcttcacttgagctgacctag

SEQ ID NO: 262411 - DNA, 321 bp, Artificial Sequence
  derived and/or modified sequence
atgatgcttagtctcaataatctgcagaatattatctacaaccctgttatcccattcgtaggtaccattccagaccaactggatcccggaacgttaattgtgattcggggacatgttccctctgatgccgaccgattccaagtggaccttcagaacggatcctccatgaagcccagagctgatgttgcctttcactttaacccccgtttcaagagggccggatgcatcgtgtgtaacaccctgattaatgagaagtggggtcgtgaggagatcacctatgacacaccctttaaaagggaaaagtcgttcgagatcgtctag

SEQ ID NO: 262412 - DNA, 954 bp, Artificial Sequence
  derived and/or modified sequence
atgatgctgagtctgaataacctgcagaacattatatataatccggtgatccccttcgtcgggaccattcccgaccagctagatccgggtaccttgatagttatcaggggacacgtgccgagcgacgctgatcgattccaggtcgatctacagaacggctcctctatgaaaccaagagctgatgtggccttccacttcaaccccagattcaagagggccggttgtattgtttgcaacacccttatcaatgaaaaatggggtagagaggagatcacttacgacaccccattcaaaagagagaagtcttttgagatcgtgattatggtgttgaaggataagtttcaggtggccgtaaacggcaagcacaccctgctctacgggcaccgcattggtccagaaaaaattgacactcttggcatctacggcaaagtgaacatccatagtatcggtttttcattctcatccgacttacaatcgacccaagcgagcagtttggaactgaccgaaatctcccgggaaaatgtccctaaaagcgggaccccgcagctgcggctccccttcgccgcacggcttaatactccgatgggccctggtcgaacagtagtggttaagggggaggtcaacgcaaacgcaaagagcttcaatgtggatttgctcgccggtaaatccaaggatatcgccttacacctcaatcctcggctgaatatcaaagcttttgtccgaaatagcttcttgcaggaatcttggggggaggaagagcgaaatatcacatcatttccattttccccaggcatgtatttcgaaatgatcatttattgtgatgtccgggagttcaaggtagctgtaaacggagtgcattcgttagaatacaagcatcgctttaaggagctgtcttccatagacaccctggaaatcaacggagatatccatctcctggaggttcgtagctggtag

SEQ ID NO: 262413 - DNA, 132 bp, Artificial Sequence
  derived and/or modified sequence
atgatgctcagtcttaacaacctccagaatatcatctataaccccgtcatccccttcgtgggaacaatcccggaccagctggatcctgggacgctgatcgtaatcagagggcacgtaccatccgatgcatag

SEQ ID NO: 262414 - DNA, 954 bp, Artificial Sequence
  derived and/or modified sequence
atgatgctgagcctgaacaacctgcagaacatcatctacaaccccgtgatccccttcgtgggcaccatccccgaccagctggaccccggcaccctgatcgtgatcagaggccacgtgcccagcgacgccgacagattccaggtggacctgcagaacggcagcagcatgaagcccagagccgacgtggccttccacttcaaccccagattcaagagagccggctgcatcgtgtgcaacaccctgatcaacgagaagtggggcagagaggagatcacctacgacacccccttcaagagagagaagagcttcgagatcgtgatcatggtgctgaaggacaagttccaggtggccgtgaacggcaagcacaccctgctgtacggccacagaatcggccccgagaagatcgacaccctgggcatctacggcaaggtgaacatccacagcatcggcttcagcttcagcagcgacctgcagagcacccaggccagcagcctggagctgaccgagatcagcagagagaacgtgcccaagagcggcaccccccagctgagactgcccttcgccgccagactgaacacccccatgggccccggcagaaccgtggtggtgaagggcgaggtgaacgccaacgccaagagcttcaacgtggacctgctggccggcaagagcaaggacatcgccctgcacctgaaccccagactgaacatcaaggccttcgtgagaaacagcttcctgcaggagagctggggcgaggaggagagaaacatcaccagcttccccttcagccccggcatgtacttcgagatgatcatctactgcgacgtgagagagttcaaggtggccgtgaacggcgtgcacagcctggagtacaagcacagattcaaggagctgagcagcatcgacaccctggagatcaacggcgacatccacctgctggaggtgagaagctggtag

SEQ ID NO: 262415 - DNA, 903 bp, Artificial Sequence
  derived and/or modified sequence
atgatgctgagcctgaacaacctgcagaacatcatctacaaccccgtgatccccttcgtgggcaccatccccgaccagctggaccccggcaccctgatcgtgatcagaggccacgtgcccagcgacgccgacagattccaggtggacctgcagaacggcagcagcatgaagcccagagccgacgtggccttccacttcaaccccagattcaagagagccggctgcatcgtgtgcaacaccctgatcaacgagaagtggggcagagaggagatcacctacgacacccccttcaagagagagaagagcttcgagatcgtgatcatggtgctgaaggacaagttccaggtgcccaagagcggcaccccccagctgcccagcaacagaggcggcgacatcagcaagatcgcccccagaaccgtgtacaccaagagcaaggacagcaccgtgaaccacaccctgacctgcaccaagatcccccccatgaactacgtgagcaagagactgcccttcgccgccagactgaacacccccatgggccccggcagaaccgtggtggtgaagggcgaggtgaacgccaacgccaagagcttcaacgtggacctgctggccggcaagagcaaggacatcgccctgcacctgaaccccagactgaacatcaaggccttcgtgagaaacagcttcctgcaggagagctggggcgaggaggagagaaacatcaccagcttccccttcagccccggcatgtacttcgagatgatcatctactgcgacgtgagagagttcaaggtggccgtgaacggcgtgcacagcctggagtacaagcacagattcaaggagctgagcagcatcgacaccctggagatcaacggcgacatccacctgctggaggtgagaagctggtag

SEQ ID NO: 262416 - DNA, 507 bp, Artificial Sequence
  derived and/or modified sequence
atgatgctgagcctgaacaacctgcagaacatcatctacaaccccgtgatccccttcgtgggcaccatccccgaccagctggaccccggcaccctgatcgtgatcagaggccacgtgcccagcgacgccgacagattccaggtggacctgcagaacggcagcagcatgaagcccagagccgacgtggccttccacttcaaccccagattcaagagagccggctgcatcgtgtgcaacaccctgatcaacgagaagtggggcagagaggagatcacctacgacacccccttcaagagagagaagagcttcgagatcgtgatcatggtgctgaaggacaagttccaggtggccgtgaacggcaagcacaccctgctgtacggccacagaatcggccccgagaagatcgacaccctgggcatctacggcaaggtgaacatccacagcatcggcttcagcttcagcagcgacctgcagagcacccaggccagcagcctggagctgacctag

SEQ ID NO: 262417 - DNA, 321 bp, Artificial Sequence
  derived and/or modified sequence
atgatgctgagcctgaacaacctgcagaacatcatctacaaccccgtgatccccttcgtgggcaccatccccgaccagctggaccccggcaccctgatcgtgatcagaggccacgtgcccagcgacgccgacagattccaggtggacctgcagaacggcagcagcatgaagcccagagccgacgtggccttccacttcaaccccagattcaagagagccggctgcatcgtgtgcaacaccctgatcaacgagaagtggggcagagaggagatcacctacgacacccccttcaagagagagaagagcttcgagatcgtgtag

SEQ ID NO: 262418 - DNA, 132 bp, Artificial Sequence
  derived and/or modified sequence
atgatgctgagcctgaacaacctgcagaacatcatctacaaccccgtgatccccttcgtgggcaccatccccgaccagctggaccccggcaccctgatcgtgatcagaggccacgtgcccagcgacgcctag

SEQ ID NO: 262419 - protein, 532 aa, Artificial Sequence
  derived and/or modified sequence
MPWRRRRNRVSALEGGREEEAPPEAAAVPPALLTSPQQTEAAAERILLRGIFEIGRDSCDVVLSERALRWRPIQPERPAGDSKYDLLCKEEFIELKDIFSVKLKRRCSVKQQRSGTLLGITLFICLKKEQNKLKNSTLDLINLSEDHCDIWFRQFKKILAGFPNRPKSLKILLNPQSHKKEATQVYYEKVEPLLKLAGIKTDVTIMEYEGHALSLLKECELQGFDGVVCVGGDGSASEVAHALLLRAQKNAGMETDRILTPVRAQLPLGLIPAGSTNVLAHSLHGVPHVITATLHIIMGHVQLVDVCTFSTAGKLLRFGFSAMFGFGGRTLALAEKYRWMSPNQRRDFAVVKALAKLKAEDCEISFLPFNSSDDVQERRAQGSPKSDCNDQWQMIQGQFLNVSIMAIPCLCSVAPRGLAPNTRLNNGSMALIIARNTSRPEFIKHLKRYASVKNQFNFPFVETYTVEEVKVHPRNNTGGYNPEEEEDETASENCFPWNVDGDLMEVASEVHIRLHPRLISLYGGSMEEMIPK

SEQ ID NO: 262420 - DNA, 1599 bp, Artificial Sequence
  derived and/or modified sequence
atgccttggcgacggagacgtaatcgagtgagcgctctagagggcgggagagaggaggaagcacctcccgaggccgcagctgttccgcccgccctgcttacaagtccacagcagacagaagcagctgcagaacgcattctgcttcgggggatctttgaaatcgggcgcgattcttgcgatgtggttctctctgagcgcgcactgcgctggagacccatccaacctgagcgccctgcgggcgacagcaagtatgacttgctttgcaaggaagagttcatcgagttaaaggatatcttctccgttaagcttaagaggaggtgctctgtgaaacagcagcgatcaggcacgctgctcggtattacactattcatttgcctgaagaaagaacagaacaagctgaagaattctacgttggatttgataaacttgagcgaggaccattgcgatatatggtttagacagtttaagaagattctcgcaggctttcccaatcgaccaaagtcgttgaagattttgctgaaccctcaatcccacaagaaagaagcaacacaagtgtactacgaaaaggtcgagccactgcttaaacttgcagggatcaagaccgacgtgaccatcatggaatatgagggtcacgccctgagcctgctgaaagagtgtgagttgcagggctttgatggtgttgtgtgtgttgggggcgatgggagtgcttcagaggtggcccatgccctcctgttgcgggcccaaaaaaacgctggaatggagaccgacaggattctgacccccgtccgtgcacagctgcccctgggcctgatcccagcaggctctacgaatgttctggcacatagcctgcatggcgtaccccatgtcatcacagcgactctgcacatcatcatgggtcacgtgcaactggtggatgtttgcactttcagtacagctggcaagcttcttaggtttggtttttccgctatgtttggcttcggcggccggaccctcgctcttgctgagaaatacagatggatgtctccgaatcagagacgggattttgcagtggttaaagccctggcaaaactcaaggctgaggattgcgaaatatccttcttaccctttaacagcagcgacgatgtacaagagagaagggctcagggttcacccaagagtgactgcaacgaccagtggcagatgatacagggacagtttttgaacgtgagtataatggccattccctgtctgtgtagtgtcgcaccacggggcctggctcctaataccagacttaacaatgggagcatggcgctgatcatcgctcggaataccagtcgtcccgagttcatcaaacatcttaaacgctacgcatcagtaaaaaatcagtttaatttccccttcgtcgagacttatacagtcgaagaagtcaaggtgcaccctaggaataatacagggggctacaaccctgaggaagaagaggatgaaacggcctccgagaactgcttcccatggaatgtggatggcgatctgatggaagtggccagcgaagttcacataagattacaccctagacttatatccctgtatggggggtcaatggaagaaatgattccaaaatag

SEQ ID NO: 262421 - DNA, 1599 bp, Artificial Sequence
  derived and/or modified sequence
atgccctggaggagaagaagaaacagagtgtctgccctggagggcggccgggaggaggaggcccctcctgaggccgctgctgtgcccccagccctgctgaccagcccccagcagacagaagctgctgctgagcgcatcctgctgcggggcatctttgagatcggccgggacagctgtgatgtggtgctgtctgagcgggccctgcgctggaggcccatccagcctgagaggcctgctggggacagcaaatatgacctgctgtgcaaggaggagttcatcgagctgaaggacatcttctctgtgaagctgaagaggcgctgcagcgtgaagcagcagaggagcggcaccctgctgggcatcaccctcttcatctgcctgaagaaggagcagaacaagctgaagaacagcaccctggacctgatcaacctgtctgaggaccactgtgacatctggttccggcagttcaagaagatcctggccggcttccccaaccggcccaagagcctgaagatcctgctgaacccccagagccacaagaaggaggccacccaggtgtactatgagaaggtggagcccctgctgaagctggccggcatcaagacagatgtgaccatcatggagtatgagggccacgccctgagcctgctgaaggaatgtgagctgcagggctttgatggagtggtgtgtgtgggcggagatggcagcgccagcgaggtggcccacgccctgctgctgcgggcccagaagaatgccggcatggagacagaccgcatcctgacccctgtgcgggcccagctgcccctgggcctcatcccagctggcagcaccaacgtgctggcccacagcctgcacggcgtgccccacgtgatcacagccaccctgcacatcatcatgggccacgtgcagctggtggatgtgtgcaccttcagcacagctgggaagctgctgcgcttcggcttcagcgccatgtttggatttggaggccgcaccctggccctggccgagaagtaccgctggatgagccccaaccagaggcgggactttgctgtggtgaaggccctggccaagctgaaggccgaggactgtgagatctccttcctgcccttcaacagcagtgatgatgtgcaggagcggcgggcccagggcagccccaagagtgactgcaatgaccagtggcagatgatccagggccagttcctgaatgtgtccatcatggccatcccctgcctgtgcagcgtggccccccggggcctggcccccaacacccggctgaacaacggctccatggccctgatcatcgccaggaacaccagcaggcctgagttcatcaagcacctgaagagatatgcctctgtgaagaaccagttcaacttcccctttgtggagacctacacagtggaggaggtgaaggtgcaccccaggaacaacacaggaggctacaaccctgaggaggaggaggatgaaacagccagcgagaactgcttcccctggaatgtggatggagacctgatggaggtggccagcgaggtgcacatccggctgcaccccaggctcatcagcctgtatggaggctccatggaggagatgatccccaagtag

SEQ ID NO: 262422 - DNA, 1599 bp, Artificial Sequence
  derived and/or modified sequence
atgccctggcggcggcggcggaaccgggtgagcgccctggagggcggccgagaggaagaggctcctcccgaggcagcggcagttcctcccgccttgttgacatctcctcagcagaccgaggccgccgctgaacggatcctactgaggggaatcttcgaaatcggccgcgactcctgcgacgtcgtgctgtctgagcgtgcactgcggtggcgtccaatacagccagaacgcccagcgggtgatagcaagtatgacctgctgtgtaaagaggaatttatcgaattaaaggatatattctcagttaagcttaaacgtagatgttctgttaagcagcaaagatcaggcacattgctgggaatcactctctttatctgcctaaaaaaggaacagaacaagctgaaaaattcaactctggacctgataaatctaagcgaagaccactgtgatatctggtttcgacagttcaaaaaaatcctggcagggttcccgaatagacccaaatccctcaaaatcttattgaatccacagagccataagaaggaggccacccaggtgtattacgagaaggtggagccattactgaagctcgcaggaattaagacagatgtgacaattatggagtatgaagggcacgctcttagcctgctgaaggagtgtgagctccaaggattcgatggcgtggtgtgtgtgggtggagacggaagtgcaagcgaggtcgcgcatgctctgttgttgcgcgcacaaaagaacgctggcatggaaaccgacagaatcctcacacctgttcgtgcccagttaccactggggctgatccctgccgggagcacaaacgttcttgcccattctctgcatggtgtcccacatgtgatcaccgctaccctgcacattatcatggggcatgtgcagctcgttgacgtctgcacattctcaactgcgggaaaactcctaaggttcggattctccgcaatgtttggcttcggggggcgcactttagcactggcagagaagtatcggtggatgtcgcctaatcagcgacgggactttgccgtagtaaaagctctcgccaaattgaaagcagaagactgcgagatttcatttctcccctttaattcatccgatgatgtgcaggaacggagggcccagggcagccctaaaagtgattgtaatgaccagtggcagatgattcaaggccagtttcttaacgtgtccattatggcgatcccctgcctttgctccgttgctcccagaggcctcgcgcccaatacccggttaaacaacgggtcgatggcactaattattgcacgaaacacttctcgccccgaattcataaaacaccttaagcggtatgcatccgtgaaaaatcagtttaatttcccattcgtagagacatacacggtggaggaggttaaagtccatccgcgaaacaacaccggaggatacaatcctgaagaagaagaagatgaaactgccagcgagaattgtttcccatggaacgtcgacggggatctgatggaggtggctagtgaggttcatatccggctccacccaagactgatttctctctatgggggaagtatggaagagatgatccctaagtag

SEQ ID NO: 262423 - DNA, 1599 bp, Artificial Sequence
  derived and/or modified sequence
atgccgtggcgtcgcaggaggaaccgcgtgtccgctctggagggagggagggaggaggaagctcccccagaggcagccgcagtgccccctgccctcctgacttccccccagcaaaccgaggctgctgccgagcggatcctcctgagaggcatcttcgaaatcggtcgcgattcttgtgacgtagtcctgtccgagagggctctcagatggcgtcccattcagcctgagcggccagccggagactcaaagtatgatctcttgtgcaaggaggagttcatcgaacttaaagacattttcagcgtaaagctgaaaaggcgctgtagtgtaaagcaacagcgcagcggaactctactcgggatcactttgttcatttgcctgaagaaagagcaaaataagctaaagaactccacgttggacttaatcaacctgtctgaggatcactgcgatatttggttcaggcagtttaagaagatcctcgccggattcccaaaccgcccaaaaagcctaaaaatcctactgaatccccagagtcacaaaaaagaagccactcaggtttactacgaaaaagttgaaccactgttgaagctcgccggaattaagactgatgtcaccattatggagtatgagggccacgctctcagtctactcaaagaatgcgaactgcaggggtttgacggcgtggtctgtgtaggaggcgacggttctgccagtgaagtggcccacgccctcctgttaagagctcagaagaacgccggtatggagacagatcgcatcctgaccccggtacgggcacaactacctctcggcctgattccggctggatccacaaatgtgcttgcccactcactccatggcgtacctcacgtgatcacagccaccctgcatataatcatgggccacgtgcagttggtggatgtgtgcacgttcagcacggcagggaagctgcttaggtttggcttcagtgcaatgtttggattcgggggtcggactctggcgctggctgagaaatatagatggatgagccccaaccagagacgagactttgctgttgttaaggcactggccaagctgaaagcggaggattgcgagatctcctttttacccttcaactcctccgatgacgtccaggagcgcagggcccagggttctcccaagtccgactgtaatgaccagtggcagatgatccagggtcagtttctcaacgtgagtattatggccataccctgtttatgtagcgtggccccacgtggccttgcccctaatacacgcttaaataacgggtctatggccctcataattgcccgaaatacttctcgacccgagtttataaaacatctcaaaagatacgccagtgtcaaaaatcagttcaacttcccctttgtggaaacctacacagttgaggaagtgaaggtgcaccctcggaataacacaggaggatataacccggaggaggaggaggatgaaaccgcttctgaaaactgctttccttggaacgttgatggtgacttgatggaagtggcctctgaagttcacatacgtctgcaccccaggctgatttctctatacggaggctccatggaggaaatgattccaaaatag

SEQ ID NO: 262424 - DNA, 3208 bp, Artificial Sequence
  derived and/or modified sequence
gcagcgctggacgcggctagagctggggctgccgcgccctccacctccttctccaaaggcctccccggacccctggctcgggcccagcctgcgactccgccatgccctggaggaggcgcaggaaccgggtgagtgccctggagggcggccgggaggaagaggcgcccccggaggctgccgctgtgcctccggcgctgttaacgtccccgcagcagacggaggcggcggccgagcggattctgctccggggcatcttcgagatcgggagggacagttgtgacgtggtgctgagcgagcgagcactgcggtggcggcccattcagcccgagcgcccggcgggtgattctaagtatgacttgctatgtaaagaagaatttattgaactcaaagacatattctctgtgaaactgaaacggcgttgttctgttaaacagcagagaagtggtactttattaggtatcacactcttcatctgcttgaaaaaggaacaaaataaactaaagaattctacacttgatcttattaatttaagtgaagaccactgtgacatatggtttagacagttcaagaaaatattggcaggctttccaaacagaccgaagtcattaaaaatactccttaacccccaaagtcacaaaaaagaagctacccaggtttattatgagaaggttgaacctctgttgaagcttgcaggaataaaaactgatgtaacaataatggaatatgaagggcacgctctgtcactgcttaaggaatgtgaactccagggatttgatggtgttgtctgtgttggtggagatggatctgctagcgaagtagcccatgctttgcttctgagagctcagaagaatgctgggatggaaacagaccgaatcctgactcctgtcagagcacagcttccacttggcttaataccagcaggatctaccaatgtattggcacattctcttcatggagttcctcatgtgataactgcaacattgcacattataatggggcatgtacagctggtcgacgtctgcaccttcagcaccgctggcaagcttcttcgctttgggttctcagccatgtttggctttggtggaagaactttggctctggcagaaaaatatcgatggatgtcccctaaccaacggagagattttgctgttgttaaggcactggcaaaacttaaggcagaagactgtgaaatatcatttttaccatttaacagctctgatgatgtgcaagaaaggagggcacagggatctcccaaatctgactgtaatgatcaatggcaaatgatccagggtcagttcttgaatgtcagcattatggcaattccttgcctgtgttcagtggcacctagaggcttggcacctaataccagattaaataatggaagtatggctcttataattgcccgaaacacttctcggccagaatttataaaacacctgaaaagatatgccagtgtaaaaaatcagttcaattttccatttgttgagacttacactgttgaggaagtaaaagttcatccaaggaataatactggtggatataatccagaggaggaggaggatgaaactgcttcagaaaattgtttcccttggaatgtagatggtgacttaatggaagttgcatcagaggtccatattagattgcatccaagacttatcagtctttatggaggaagcatggaagaaatgattccaaagtaacatgtaattgtttctaaaagaaatgtacaaactagaattttaatataaagaaatgtggccatgctttaaacctgtggtccccaccctttttgggaccagtttcatggaagacaatttttccgtggatgggggaatggtttcaggatgaactgttccacctcagatcatcaggcattagattctcttgaggaacatggcactctagatccctcacataccagttcaccatatggttcgcacttctatgagaatctaatgctgctgctgatctgacagggggaggaactcagtaatgctccattgctctaacctcctgctgtgtggccaaacggatatcctaatagaaattgatgttactaacaattagcctctagggctttaaaagtcaagatgaaatatcaattcaaattctgtttttagatatcaattcaaattcttttttttacaatgtgtttattggacacacaaaaaaactttgcaaccatcataatacatcaatatttaacctagataattctgaaataatttggattctttcatttttcaggatttgagctcatcaattatgttaaatttcctatattctgttacaaatataatacagatttcataagtctgccttgattcactgctccctaatccagagcagttaaatttcaaaatcacatagttatatagcctacctgccaaaaaagaataacccatccctgtcttcttaaagtggtagggttttaaaattcatgatacaagtaacaaagtaagttgataacaaatactattttgaactgggcaaaatctagcccaatatgtaattgtgttccccttgtatctgagaggcctgtgttggacaaccatagtactctgctttcactgtgctcagataacctgaaatatatagttgtttctgagtagttctgagtaggaaagaaccaaatgtaaatttccttagagaccatcctggagaagacagttctaaatcggggcttgatttttcatctatgatcctagatgttctcctgaaagaatgactagcctttttataacgatacaaagttttttaaaaatacataaatgtcataaagtttattcctgtgtatacacactctgggttcaggaggttttgtgcttacatttcactactcaaatgccttcgcaaatctcagaacattcctcaccatcactgcaggcctgtgaacagataactttcatcaattaggatggctggctagtggcagggacttcatataaagaaatctttcccagaattgtttttccacattgccttctaatttgatcactccctataacagatgttcaaaattcggccacagctctcttatgaaggcagagtcagataaaatgatattctgcaattatctagatcataagcataaaataaatattacaaaaatgattgtatttaaagaaattttttaaaatccagaaagtcatttaaaatagaacctcatatagtatgaacaaactataaaaatattttacatttcatg

SEQ ID NO: 262425 - DNA, 1599 bp, Artificial Sequence
  derived and/or modified sequence
atgccctggagaagaagaagaaacagagtgagcgccctggagggcggcagagaggaggaggccccccccgaggccgccgccgtgccccccgccctgctgaccagcccccagcagaccgaggccgccgccgagagaatcctgctgagaggcatcttcgagatcggcagagacagctgcgacgtggtgctgagcgagagagccctgagatggagacccatccagcccgagagacccgccggcgacagcaagtacgacctgctgtgcaaggaggagttcatcgagctgaaggacatcttcagcgtgaagctgaagagaagatgcagcgtgaagcagcagagaagcggcaccctgctgggcatcaccctgttcatctgcctgaagaaggagcagaacaagctgaagaacagcaccctggacctgatcaacctgagcgaggaccactgcgacatctggttcagacagttcaagaagatcctggccggcttccccaacagacccaagagcctgaagatcctgctgaacccccagagccacaagaaggaggccacccaggtgtactacgagaaggtggagcccctgctgaagctggccggcatcaagaccgacgtgaccatcatggagtacgagggccacgccctgagcctgctgaaggagtgcgagctgcagggcttcgacggcgtggtgtgcgtgggcggcgacggcagcgccagcgaggtggcccacgccctgctgctgagagcccagaagaacgccggcatggagaccgacagaatcctgacccccgtgagagcccagctgcccctgggcctgatccccgccggcagcaccaacgtgctggcccacagcctgcacggcgtgccccacgtgatcaccgccaccctgcacatcatcatgggccacgtgcagctggtggacgtgtgcaccttcagcaccgccggcaagctgctgagattcggcttcagcgccatgttcggcttcggcggcagaaccctggccctggccgagaagtacagatggatgagccccaaccagagaagagacttcgccgtggtgaaggccctggccaagctgaaggccgaggactgcgagatcagcttcctgcccttcaacagcagcgacgacgtgcaggagagaagagcccagggcagccccaagagcgactgcaacgaccagtggcagatgatccagggccagttcctgaacgtgagcatcatggccatcccctgcctgtgcagcgtggcccccagaggcctggcccccaacaccagactgaacaacggcagcatggccctgatcatcgccagaaacaccagcagacccgagttcatcaagcacctgaagagatacgccagcgtgaagaaccagttcaacttccccttcgtggagacctacaccgtggaggaggtgaaggtgcaccccagaaacaacaccggcggctacaaccccgaggaggaggaggacgagaccgccagcgagaactgcttcccctggaacgtggacggcgacctgatggaggtggccagcgaggtgcacatcagactgcaccccagactgatcagcctgtacggcggcagcatggaggagatgatccccaagtag

SEQ ID NO: 262426 - protein, 763 aa, Artificial Sequence
  derived and/or modified sequence
MPMDLILVVWFCVCTARTVVGFGMDPDLQMDIVTELDLVNTTLGVAQVSGMHNASKAFLFQDIEREIHAAPHVSEKLIQLFRNKSEFTILATVQQKPSTSGVILSIRELEHSYFELESSGLRDEIRYHYIHNGKPRTEALPYRMADGQWHKVALSVSASHLLLHVDCNRIYERVIDPPDTNLPPGINLWLGQRNQKHGLFKGIIQDGKIIFMPNGYITQCPNLNHTCPTCSDFLSLVQGIMDLQELLAKMTAKLNYAETRLSQLENCHCEKTCQVSGLLYRDQDSWVDGDHCRNCTCKSGAVECRRMSCPPLNCSPDSLPVHIAGQCCKVCRPKCIYGGKVLAEGQRILTKSCRECRGGVLVKITEMCPPLNCSEKDHILPENQCCRVCRGHNFCAEGPKCGENSECKNWNTKATCECKSGYISVQGDSAYCEDIDECAAKMHYCHANTVCVNLPGLYRCDCVPGYIRVDDFSCTEHDECGSGQHNCDENAICTNTVQGHSCTCKPGYVGNGTICRAFCEEGCRYGGTCVAPNKCVCPSGFTGSHCEKDIDECALRTHTCWNDSACINLAGGFDCLCPSGPSCSGDCPHEGGLKHNGQVWTLKEDRCSVCSCKDGKIFCRRTACDCQNPSADLFCCPECDTRVTSQCLDQNGHKLYRSGDNWTHSCQQCRCLEGEVDCWPLTCPNLSCEYTAILEGECCPRCVSDPCLADNITYDIRKTCLDSYGVSRLSGSVWTMAGSPCTTCKCKNGRVCCSVDFECLQNN

SEQ ID NO: 262427 - DNA, 2292 bp, Artificial Sequence
  derived and/or modified sequence
atgcctatggacctgattctcgttgtttggttttgtgtgtgcaccgctagaactgtagtcggatttgggatggatccggatctccaaatggacatcgtaacggagctggaccttgtcaacacaaccttgggtgttgcccaggtgtctggaatgcataacgcctccaaggcatttctgttccaggatatcgaaagggaaatccacgctgcgccacacgtgagtgaaaagctgatccagctttttcggaataagtccgaattcacaattctagcaacagtacagcagaagccttcaacctccggggtgatcctgtctatcagagaacttgaacacagctacttcgagttggagagcagcggactcagggacgaaatcagataccattacatccataacggtaagccgcggaccgaagctctcccataccgaatggcagacgggcagtggcataaagtggctctctcagtgtcagcgtcgcacctgctacttcacgttgactgtaatcgaatctatgagagagtgatcgacccaccagacacgaacttgccaccaggtataaacttgtggctggggcagcgcaatcagaagcacggcctgtttaagggaattattcaggatgggaagatcatctttatgcctaatggttacattactcagtgccccaacctgaatcatacatgtcccacctgctcagactttttgagtttagtccagggtatcatggacttgcaggaactgttagccaagatgaccgccaaattgaattatgctgaaacacgtctctcacagctggaaaactgccattgcgagaaaacatgccaggtgagcggactactttatcgagaccaggattcctgggtggatggggaccattgtcgtaattgcacctgcaagtctggcgccgttgaatgtcggagaatgagctgccccccgttaaactgctcacccgatagcctcccagttcacattgccggccagtgttgcaaggtgtgcaggcctaagtgcatttatggcggcaaggtgctggctgaaggacagcgaattctcactaaatcctgtagggagtgtcggggcggagttttggtcaagataactgagatgtgccctcctttgaattgcagcgaaaaggaccacatcctgcccgaaaaccagtgttgcagggtgtgtcggggacacaatttttgcgcggagggcccgaagtgtggagaaaatagcgaatgcaagaattggaacacaaaagctacttgtgaatgtaaatccggctacatttcagttcagggggatagcgcgtattgcgaggatatcgacgaatgtgccgcaaagatgcactactgccatgccaacacagtatgcgtcaacctgcccgggctgtataggtgtgattgtgtgccaggatacattcgcgtggatgactttagctgcacagaacacgacgaatgtggtagcggacagcataactgcgacgaaaacgctatttgcaccaatacagtgcagggtcacagttgtacatgcaaaccaggctatgtagggaatgggacaatttgtcgggcattctgcgaggaaggctgtagatacggcggtacttgcgtggcccctaacaaatgcgtttgcccctcaggattcaccgggagtcattgtgagaaggatatagacgaatgcgcactgcggacccacacgtgctggaacgactccgcatgtattaatcttgcgggcggatttgactgcctttgtccttcggggccctcctgcagcggcgattgccctcatgaggggggccttaagcataacggacaggtttggaccttaaaggaggaccggtgttccgtttgcagctgcaaggatggaaaaattttttgtcgccgtacagcctgtgactgtcagaatccctctgccgacctcttctgctgcccagagtgcgacacaagagttacctcccagtgtcttgatcagaacggtcataaactctaccgctctggcgacaattggactcattcttgccagcaatgcaggtgtctggagggggaggtggactgttggccattgacatgccccaatttatcatgtgaatacacagccattctggagggtgaatgctgccctaggtgcgtaagtgatccttgcctcgccgacaacatcacgtacgatatccgcaaaacctgcctcgacagttacggtgtgtcacgcttgagtggaagtgtgtggacaatggccggcagtccctgcacaacatgcaaatgtaaaaatggaagggtgtgctgttctgtggatttcgagtgtctgcaaaataattag

SEQ ID NO: 262428 - DNA, 2292 bp, Artificial Sequence
  derived and/or modified sequence
atgcccatggacctgatcctggtggtgtggttctgtgtgtgcacagccaggacagtggtgggcttcggcatggaccctgacctgcagatggacatcgtgacagagctggacctggtgaacaccaccctgggcgtggcccaggtgtctggcatgcacaatgccagcaaggccttcctgttccaggacatcgagcgggagatccatgctgccccccacgtgtctgagaagctgatccagctgttcaggaacaagtctgagttcaccatcctggccaccgtgcagcagaagcccagcaccagcggggtcatcctgagcatccgggagctggagcacagctactttgagctggagagcagcggcctgagagatgagatccgctaccactacatccacaacgggaagcccaggacagaggccctgccctacaggatggctgatggccagtggcacaaggtggccctgtctgtgtctgccagccacctgctgctgcacgtggactgcaaccgcatctatgagcgggtgattgatcctccagacaccaacctgcccccaggcatcaacctgtggctgggccagaggaaccagaagcacggcctcttcaagggcatcatccaggacggcaagatcatcttcatgcccaacggctacatcacccagtgccccaacctgaaccacacctgccccacctgcagcgacttcctgagcctggtgcagggcatcatggacctgcaggagctgctggccaagatgacagccaagctgaactatgcagagacccggctgagccagctggagaactgccactgtgagaagacctgccaggtgtctggcctgctgtacagagaccaggacagctgggtggatggagaccactgcaggaactgcacctgcaagtctggagctgtggagtgcaggaggatgagctgcccccccctgaactgcagcccagacagcctgcctgtgcacatcgccggccagtgctgcaaggtgtgccggcccaagtgcatctatggaggcaaggtgctggccgagggccagaggatcctgaccaagagctgcagagaatgtcggggcggcgtgctggtgaagatcacagagatgtgcccccccctgaactgcagcgagaaggaccacatcctgcctgagaaccagtgctgccgggtgtgccggggccacaacttctgtgccgagggccccaagtgtggagaaaattctgagtgcaagaactggaacaccaaggccacctgtgagtgcaagagcggctacatctctgtgcagggcgacagcgcctactgtgaagatattgatgaatgtgccgccaagatgcactactgccacgccaacacagtgtgtgtgaacctgcccggcctgtaccgctgtgactgtgtgcccggctacatccgggtggatgacttcagctgcacagaacatgatgaatgtggcagcggccagcacaactgtgatgaaaatgccatctgcaccaacacagtgcagggccacagctgcacctgcaagccaggctacgtgggcaatggcaccatctgccgggccttctgtgaggagggctgccgctatggaggcacctgtgtggcccccaacaagtgtgtgtgccccagcggcttcaccggcagccactgtgagaaggacattgatgaatgtgccctgcggacccacacctgctggaatgacagcgcctgcatcaacctggccggcggctttgactgcctgtgccccagcggccccagctgcagcggggactgcccccatgaaggaggcctgaagcacaacggccaggtgtggaccctgaaggaggaccgctgcagcgtgtgcagctgcaaggatggcaagatcttctgcagaagaacagcctgtgactgccagaaccccagcgctgacctcttctgctgcccagaatgtgacaccagggtgaccagccagtgcctggaccagaatggccacaagctgtaccgcagcggggacaactggacccacagctgccagcagtgccgctgcctggagggggaggtggactgctggcccctgacctgccccaacctgagctgtgagtacacagccatcctggagggggagtgctgcccccgctgtgtgtctgacccctgcctggccgacaacatcacctatgacatcaggaagacctgcctggacagctatggagtgtcccggctgagcggctctgtgtggaccatggccggcagcccctgcaccacctgcaagtgcaagaatggccgggtgtgctgcagcgtggactttgagtgcctgcagaacaactag

SEQ ID NO: 262429 - DNA, 2292 bp, Artificial Sequence
  derived and/or modified sequence
atgcccatggacctgatcctggtggtgtggttctgcgtgtgcaccgcccgaacagtggtgggctttggcatggatccagacttgcaaatggacatcgtgacagagctcgacctggtgaacaccactcttggtgtggcacaggttagcgggatgcataatgcctctaaggcttttctgttccaggatatcgaacgtgagatccacgccgcacctcatgtgagtgagaagttaatccagcttttcaggaataagagcgagtttaccatcctggcaactgtccagcagaaaccatctaccagtggcgtgatcctcagtatacgagagctcgagcattcttactttgagctggagtcctctgggctgcgggatgaaattcgataccactacattcataatggcaaacctcgcactgaggccctgccttatagaatggcagatggccagtggcacaaagtggccctgagcgtctctgcctctcatttgcttctccatgtggactgcaaccgaatttatgaacgggtaatcgatcctcccgatactaatctgcccccaggaatcaacctgtggttaggccagcgcaaccagaagcacggactgttcaaaggcatcattcaggacggtaagatcatcttcatgcctaatgggtacataactcagtgcccaaatttaaatcatacctgtcctacatgctcagactttctgtctcttgtccagggaatcatggacttacaggagctgctggcgaaaatgaccgctaaactgaactacgctgaaacgaggctgagtcagctggaaaactgccactgcgaaaaaacatgccaggtgtcagggctgctatacagagatcaggactcctgggtggacggagaccattgcaggaactgtacatgtaagagcggtgctgtagaatgtagaagaatgtcgtgcccacccctgaattgtagccctgactccctgccagtgcatatcgccggccagtgctgtaaagtttgtaggccgaaatgcatttatgggggtaaggttctggcagaaggccagaggattctgactaagtcatgtcgcgaatgtaggggaggagtcctggtaaagattacggaaatgtgcccaccgctcaattgttctgagaaggaccacatactacctgaaaatcagtgctgtagagtgtgtcgcggtcacaacttttgtgctgaggggcctaagtgtggtgagaattcggagtgtaaaaattggaatacaaaagccacttgtgagtgtaaatctggctacatctccgttcaaggagacagtgcctactgcgaagacatcgatgagtgcgcagccaagatgcactattgtcatgcaaacaccgtctgtgttaacttgccaggactgtatcgctgcgactgcgtgccaggatacattcgggtagacgactttagctgtaccgagcatgatgagtgcggctcaggacagcataattgtgatgaaaacgcgatttgtaccaacactgtgcagggccactcctgcacttgcaaaccgggatacgtgggaaacggaactatttgccgagccttttgcgaagagggctgtagatacggcgggacctgtgtcgcccccaacaagtgcgtgtgtccttctgggtttacaggatcacactgtgaaaaagacatcgatgagtgcgcactgcgaacccatacttgctggaacgattcggcttgcataaatctcgctggaggatttgactgtctgtgcccaagcggcccctcatgtagcggggactgtccacatgaaggagggcttaagcataatgggcaggtttggactctgaaggaagatcgatgctctgtgtgctcatgcaaagatggaaagatcttttgtaggcgaacagcttgcgactgtcagaaccctagcgcagatctgttctgttgccccgagtgtgacaccagggtgacatctcagtgtttggaccagaacggccacaagctatatcggtctggcgacaactggactcatagctgccagcagtgcaggtgtctggagggtgaagtcgattgctggccgctcacctgccctaatctatcatgcgagtacacagcaatcctggaaggggaatgctgcccacggtgcgtaagcgatccttgccttgcggacaatatcacatacgatatccgaaagacatgccttgactcctacggggtatcacgtctctccggcagtgtctggaccatggcaggatccccatgtactacctgcaaatgtaaaaatggccgcgtctgctgtagcgtggattttgagtgcttgcagaacaactag

SEQ ID NO: 262430 - DNA, 2400 bp, Artificial Sequence
  derived and/or modified sequence
tccaggctcatttgcttccacctagcttcggtgccccctgctaggcggggaccctcgagagcgatgccgatggatttgattttagttgtgtggttctgtgtgtgcactgccaggacagtggtgggctttgggatggaccctgaccttcagatggatatcgtcaccgagcttgaccttgtgaacaccacccttggagttgctcaggtgtctggaatgcacaatgccagcaaagcatttttatttcaagacatagaaagagagatccatgcagctcctcatgtgagtgagaaattaattcagctgttccggaacaagagtgaattcaccattttggccactgtacagcagaagccatccacttcaggagtgatactgtccattcgagaactggagcacagctattttgaactggagagcagtggcctgagggatgagattcggtatcactacatacacaatgggaagccaaggacagaggcacttccttaccgcatggcagatggacaatggcacaaggttgcactgtcagttagcgcctctcatctcctgctccatgtcgactgtaacaggatttatgagcgtgtgatagaccctccagataccaaccttcccccaggaatcaatttatggcttggccagcgcaaccaaaagcatggcttattcaaagggatcatccaagatgggaagatcatctttatgccgaatggatatataacacagtgtccaaatctaaatcacacttgcccaacctgcagtgatttcttaagcctggtgcaaggaataatggatttacaagagcttttggccaagatgactgcaaaactaaattatgcagagacaagacttagtcaattggaaaactgtcattgtgagaagacttgtcaagtgagtggactgctctatcgagatcaagactcttgggtagatggtgaccattgcaggaactgcacttgcaaaagtggtgccgtggaatgccgaaggatgtcctgtccccctctcaattgctccccagactccctcccagtgcacattgctggccagtgctgtaaggtctgccgaccaaaatgtatctatggaggaaaagttcttgcagaaggccagcggattttaaccaagagctgtcgggaatgccgaggtggagttttagtaaaaattacagaaatgtgtcctcctttgaactgctcagaaaaggatcacattcttcctgagaatcagtgctgccgtgtctgtagaggtcataacttttgtgcagaaggacctaaatgtggtgaaaactcagagtgcaaaaactggaatacaaaagctacttgtgagtgcaagagtggttacatctctgtccagggagactctgcctactgtgaagatattgatgagtgtgcagctaagatgcattactgtcatgccaatactgtgtgtgtcaaccttcctgggttatatcgctgtgactgtgtcccaggatacattcgtgtggatgacttctcttgtacagaacacgatgaatgtggcagcggccagcacaactgtgatgagaatgccatctgcaccaacactgtccagggacacagctgcacctgcaaaccgggctacgtggggaacgggaccatctgcagagctttctgtgaagagggctgcagatacggtggaacgtgtgtggctcccaacaaatgtgtctgtccatctggattcacaggaagccactgcgagaaagacattgatgaatgtgccttaagaactcacacctgttggaacgattctgcctgcatcaacctggcagggggctttgactgtctctgcccctctgggccctcctgctctggtgactgtcctcatgaaggggggctgaagcacaatggccaggtgtggaccttgaaagaagacaggtgttctgtctgctcctgcaaggatggcaagatattctgccgacggacagcttgtgattgccagaatccaagtgctgacctattctgttgcccagaatgtgacaccagagtcacaagtcaatgtttagaccaaaatggtcacaagctgtatcgaagtggagacaattggacccatagctgtcagcagtgtcggtgtctggaaggagaggtagattgctggccactcacttgccccaacttgagctgtgagtatacagctatcttagaaggggaatgttgtccccgctgtgtcagtgacccctgcctagctgataacatcacctatgacatcagaaaaacttgcctggacagctatggtgtttcacggcttagtggctcagtgtggacgatggctggatctccctgcacaacctgtaaatgcaagaatggaagagtctgttgttctgtggattttgagtgtcttcaaaataattgaagtatttacagtggactcaacgcagaagaatggacgaaatgacca

SEQ ID NO: 262431 - DNA, 2292 bp, Artificial Sequence
  derived and/or modified sequence
atgccgatggacttgatcctggtcgtgtggttctgcgtttgtacggcccgtaccgtagtcggcttcgggatggacccagaccttcagatggacatcgtgacggaacttgatctggtgaacacaaccctgggagtagctcaagtgagcggaatgcacaatgcatcgaaagcctttctgtttcaggatatcgaacgcgaaatccacgcagcccctcatgtatccgaaaagttaatccagctgttccggaataagtctgagttcacaatcctcgctaccgtgcagcagaagccctccacctccggagtgatcctgagcatacgcgaactagaacactcttactttgaattggaaagcagtggactgcgcgacgaaatccggtatcactatattcacaatggtaaaccacgtactgaggccctaccgtaccggatggccgacggccagtggcacaaagttgcccttagtgtctcggccagccaccttctcctgcacgtggattgcaataggatctacgaacgagtaatagatcccccagacaccaacttaccccctgggatcaacttgtggctggggcagcggaaccaaaaacatggcctgtttaaggggataattcaggacggtaaaataattttcatgccgaatggctatatcacccagtgtccaaatctgaatcatacgtgcccaacttgctctgacttccttagccttgttcagggcattatggacctgcaggagctgctggccaagatgaccgcaaaactgaactatgccgagactaggctttcccagctcgaaaactgccattgtgagaaaacatgtcaggtgagcggccttctttaccgggatcaggattcatgggtggacggagatcactgcaggaattgtacgtgtaaaagcggcgctgttgaatgtaggcggatgtcctgcccaccactgaattgttcccctgattccttgcccgtgcacattgctgggcaatgctgtaaggtttgtagacccaagtgcatctacggaggcaaagtactggctgaaggtcagagaattctcaccaagagttgcagggaatgccgtgggggtgtgttggtgaagattacagagatgtgtccccctctcaattgctcagagaaggatcatattctcccagagaatcagtgttgccgggtctgcagggggcataatttctgtgctgaaggccctaaatgcggtgaaaattctgagtgtaaaaactggaataccaaggccacctgcgaatgcaagagcgggtatatttccgtgcaaggagattcagcttactgcgaggacatcgacgaatgcgccgctaagatgcactattgccacgccaacacagtttgtgtgaatctcccgggactttaccgttgtgactgcgttcctggctacatccgcgttgacgattttagctgcacagaacacgatgaatgtgggtctggacaacacaattgtgacgagaacgctatctgcacaaatactgtccagggacattcgtgtacctgcaagcctggctatgtgggaaacgggaccatctgccgcgctttttgtgaggaagggtgccggtatgggggaacttgcgtggctccaaataaatgtgtctgccccagtggatttaccgggtctcattgcgaaaaagatatcgatgaatgtgccctgcggacccatacgtgctggaatgacagcgcgtgcattaacctcgccggaggttttgactgtctgtgtcccagtggcccttcttgctcaggcgattgcccacatgaagggggacttaaacataacggacaggtatggacgctgaaagaagataggtgctctgtgtgttcctgcaaggatgggaagatcttctgtaggagaacagcctgtgactgccagaaccccagcgccgacctgttttgttgccccgaatgcgacacacgtgtgaccagtcagtgcctggaccagaacgggcataagctgtatagatctggtgataactggactcattcctgccagcaatgccgctgtcttgagggggaagtagattgttggccgctcacatgtcctaatttgtcttgcgaatatacagcaatcttggagggagaatgctgcccacggtgcgtgtctgacccttgcctcgccgacaacattacatacgacatccggaagacgtgtcttgattcttacggcgtgtcacggctgagcggctcagtgtggacaatggcaggtagcccctgcacaacgtgtaagtgtaagaacggccgagtgtgctgttccgtggacttcgagtgcttgcagaataactag

SEQ ID NO: 262432 - DNA, 2292 bp, Artificial Sequence
  derived and/or modified sequence
atgcccatggacctgatcctggtggtgtggttctgcgtgtgcaccgccagaaccgtggtgggcttcggcatggaccccgacctgcagatggacatcgtgaccgagctggacctggtgaacaccaccctgggcgtggcccaggtgagcggcatgcacaacgccagcaaggccttcctgttccaggacatcgagagagagatccacgccgccccccacgtgagcgagaagctgatccagctgttcagaaacaagagcgagttcaccatcctggccaccgtgcagcagaagcccagcaccagcggcgtgatcctgagcatcagagagctggagcacagctacttcgagctggagagcagcggcctgagagacgagatcagataccactacatccacaacggcaagcccagaaccgaggccctgccctacagaatggccgacggccagtggcacaaggtggccctgagcgtgagcgccagccacctgctgctgcacgtggactgcaacagaatctacgagagagtgatcgacccccccgacaccaacctgccccccggcatcaacctgtggctgggccagagaaaccagaagcacggcctgttcaagggcatcatccaggacggcaagatcatcttcatgcccaacggctacatcacccagtgccccaacctgaaccacacctgccccacctgcagcgacttcctgagcctggtgcagggcatcatggacctgcaggagctgctggccaagatgaccgccaagctgaactacgccgagaccagactgagccagctggagaactgccactgcgagaagacctgccaggtgagcggcctgctgtacagagaccaggacagctgggtggacggcgaccactgcagaaactgcacctgcaagagcggcgccgtggagtgcagaagaatgagctgcccccccctgaactgcagccccgacagcctgcccgtgcacatcgccggccagtgctgcaaggtgtgcagacccaagtgcatctacggcggcaaggtgctggccgagggccagagaatcctgaccaagagctgcagagagtgcagaggcggcgtgctggtgaagatcaccgagatgtgcccccccctgaactgcagcgagaaggaccacatcctgcccgagaaccagtgctgcagagtgtgcagaggccacaacttctgcgccgagggccccaagtgcggcgagaacagcgagtgcaagaactggaacaccaaggccacctgcgagtgcaagagcggctacatcagcgtgcagggcgacagcgcctactgcgaggacatcgacgagtgcgccgccaagatgcactactgccacgccaacaccgtgtgcgtgaacctgcccggcctgtacagatgcgactgcgtgcccggctacatcagagtggacgacttcagctgcaccgagcacgacgagtgcggcagcggccagcacaactgcgacgagaacgccatctgcaccaacaccgtgcagggccacagctgcacctgcaagcccggctacgtgggcaacggcaccatctgcagagccttctgcgaggagggctgcagatacggcggcacctgcgtggcccccaacaagtgcgtgtgccccagcggcttcaccggcagccactgcgagaaggacatcgacgagtgcgccctgagaacccacacctgctggaacgacagcgcctgcatcaacctggccggcggcttcgactgcctgtgccccagcggccccagctgcagcggcgactgcccccacgagggcggcctgaagcacaacggccaggtgtggaccctgaaggaggacagatgcagcgtgtgcagctgcaaggacggcaagatcttctgcagaagaaccgcctgcgactgccagaaccccagcgccgacctgttctgctgccccgagtgcgacaccagagtgaccagccagtgcctggaccagaacggccacaagctgtacagaagcggcgacaactggacccacagctgccagcagtgcagatgcctggagggcgaggtggactgctggcccctgacctgccccaacctgagctgcgagtacaccgccatcctggagggcgagtgctgccccagatgcgtgagcgacccctgcctggccgacaacatcacctacgacatcagaaagacctgcctggacagctacggcgtgagcagactgagcggcagcgtgtggaccatggccggcagcccctgcaccacctgcaagtgcaagaacggcagagtgtgctgcagcgtggacttcgagtgcctgcagaacaactag

SEQ ID NO: 262433 - protein, 673 aa, Artificial Sequence
  derived and/or modified sequence
MAEAPASPAPLSPLEVELDPEFEPQSRPRSCTWPLQRPELQASPAKPSGETAADSMIPEEEDDEDDEDGGGRAGSAMAIGGGGGSGTLGSGLLLEDSARVLAPGGQDPGSGPATAAGGLSGGTQALLQPQQPLPPPQPGAAGGSGQPRKCSSRRNAWGNLSYADLITRAIESSPDKRLTLSQIYEWMVRCVPYFKDKGDSNSSAGWKNSIRHNLSLHSRFMRVQNEGTGKSSWWIINPDGGKSGKAPRRRAVSMDNSNKYTKSRGRAAKKKAALQTAPESADDSPSQLSKWPGSPTSRSSDELDAWTDFRSRTNSNASTVSGRLSPIMASTELDEVQDDDAPLSPMLYSSSASLSPSVSKPCTVELPRLTDMAGTMNLNDGLTENLMDDLLDNITLPPSQPSPTGGLMQRSSSFPYTTKGSGLGSPTSSFNSTVFGPSSLNSLRQSPMQTIQENKPATFSSMSHYGNQTLQDLLTSDSLSHSDVMMTQSDPLMSQASTAVSAQNSRRNVMLRNDPMMSFAAQPNQGSLVNQNLLHHQHQTQGALGGSRALSNSVSNMGLSESSSLGSAKHQQQSPVSQSMQTLSDSLSGSSLYSTSANLPVMGHEKFPSDLDLDMFNGSLECDMESIIRSELMDADGLDFNFDSLISTQNVVGLNVGNFTGAKQASSQSWVPG

SEQ ID NO: 262434 - DNA, 7341 bp, Artificial Sequence
  derived and/or modified sequence
gcgcgaggccgtcgattcgctcgcggctccatcgcggcctggccggggggcggtgtctgctgcgccaggttcgctggccgcacgtcttcaggtcctcctgttcctgggaggcgggcgcggcaggactgggaggtggcggcagcgggcgaggactcgccgaggacggggctccggcccgggataaccaactctccttctctcttctttggtgcttccccaggcggcggcggcggcgcccgggagccggagccttcgcggcgtccacgtccctcccccgctgcaccccgccccggcgcgagaggagagcgcgagagccccagccgcgggcgggcgggcggcgaagatggcagaggcaccggcttccccggccccgctctctccgctcgaagtggagctggacccggagttcgagccccagagccgtccgcgatcctgtacgtggcccctgcaaaggccggagctccaagcgagccctgccaagccctcgggggagacggccgccgactccatgatccccgaggaggaggacgatgaagacgacgaggacggcgggggacgggccggctcggccatggcgatcggcggcggcggcgggagcggcacgctgggctccgggctgctccttgaggactcggcccgggtgctggcacccggagggcaagaccccgggtctgggccagccaccgcggcgggcgggctgagcgggggtacacaggcgctgctgcagcctcagcaaccgctgccaccgccgcagccgggggcggctgggggctccgggcagccgaggaaatgttcgtcgcggcggaacgcctggggaaacctgtcctacgcggacctgatcacccgcgccatcgagagctccccggacaaacggctcactctgtcccagatctacgagtggatggtgcgttgcgtgccctacttcaaggataagggcgacagcaacagctctgccggctggaagaactccatccggcacaacctgtcactgcatagtcgattcatgcgggtccagaatgagggaactggcaagagctcttggtggatcatcaaccctgatggggggaagagcggaaaagccccccggcggcgggctgtctccatggacaatagcaacaagtataccaagagccgtggccgcgcagccaagaagaaggcagccctgcagacagcccccgaatcagctgacgacagtccctcccagctctccaagtggcctggcagccccacgtcacgcagcagtgatgagctggatgcgtggacggacttccgttcacgcaccaattctaacgccagcacagtcagtggccgcctgtcgcccatcatggcaagcacagagttggatgaagtccaggacgatgatgcgcctctctcgcccatgctctacagcagctcagccagcctgtcaccttcagtaagcaagccgtgcacggtggaactgccacggctgactgatatggcaggcaccatgaatctgaatgatgggctgactgaaaacctcatggacgacctgctggataacatcacgctcccgccatcccagccatcgcccactgggggactcatgcagcggagctctagcttcccgtataccaccaagggctcgggcctgggctccccaaccagctcctttaacagcacggtgttcggaccttcatctctgaactccctacgccagtctcccatgcagaccatccaagagaacaagccagctaccttctcttccatgtcacactatggtaaccagacactccaggacctgctcacttcggactcacttagccacagcgatgtcatgatgacacagtcggaccccttgatgtctcaggccagcaccgctgtgtctgcccagaattcccgccggaacgtgatgcttcgcaatgatccgatgatgtcctttgctgcccagcctaaccagggaagtttggtcaatcagaacttgctccaccaccagcaccaaacccagggcgctcttggtggcagccgtgccttgtcgaattctgtcagcaacatgggcttgagtgagtccagcagccttgggtcagccaaacaccagcagcagtctcctgtcagccagtctatgcaaaccctctcggactctctctcaggctcctccttgtactcaactagtgcaaacctgcccgtcatgggccatgagaagttccccagcgacttggacctggacatgttcaatgggagcttggaatgtgacatggagtccattatccgtagtgaactcatggatgctgatgggttggattttaactttgattccctcatctccacacagaatgttgttggtttgaacgtggggaacttcactggtgctaagcaggcctcatctcagagctgggtgccaggctgaaggatcactgaggaaggggaagtgggcaaagcagaccctcaaactgacacaagacctacagagaaaaccctttgccaaatctgctctcagcaagtggacagtgataccgtttacagcttaacacctttgtgaatcccacgccattttcctaacccagcagagactgttaatggccccttaccctgggtgaagcacttacccttggaacagaactctaaaaagtatgcaaaatcttccttgtacagggtggtgagccgcctgccagtggaggacagcacccctcagcaccacccaccctcattcagagcacaccgtgagcccccgtcggccattctgtggtgttttaatattgcgatggtttatgggacgttttaagtgttgttcttgtgtttgttttcctttgactttctgagtttttcacatgcattaacttgcggtatttttctgttaaaatgttaaccgtccttcccctagcaaatttaaaaacagaaagaaaatgttgtaccagttaccattccgggttcgagcatcacaagcttttgagcgcatggaactccataaactaacaaattacataaactaaagggggattttctttcttcttttgtttggtagaaaattatccttttctaaaaactgaacaatggcacaattgtttgctatgtgcacccgtccaggacagaaccgtgcataggcaaaaggagtggagcacagcgtccggcccagtgtgtttccggttctgagtcagggtgatctgtggacgggaccccagcaccaagtctacgggtgccagatcagtagggcctgtgatttcctgtcagtgtcctcagctaatgtgaacagtgttggtctgctggttagaaactagaatattgatattttcaggaaagaaatcagctcagctctccactcattgccaaatgtcactaaagggtttagttttaaggagaaagaaaaggaaaaaaaaaaaaaacaaaaaagtcctgttttgctttgcagaacaaatgaacttacaggtgagcattaagcttgcagtgagaaatgtgcgaagagtaaaaacccaagtcaatgctgaggcagttctaacttcactgttttcctaaatacacatccttgattattttcagccttgctatataatctgatctgctagaagtgtatgagtgagaggcaatagcatacaaactgattttttaaatataagcttaggttgtaattgtacaagtgactcaatggaagtacaaaatagggcagttttaacttttttttctgcttctatggatttcattttgttgtgttttcaaaaagttatggtgctgtataggtgctttctgtttaacctggaaagtgtgattatattcgttaccttctttggtagacggaatagttgggaccacctttggtacataagaaattggtataacgatgctctgattagcacagtatatgcatacttctccaaagtgatatatgaagactcttttctttgcataaaaagcattaggcatataaatgtataaatatattttatcatgtacagtacaaaaatggaaccttatgcatgggccttaggaatacaggctagtatttcagcacagacttccctgcttgagttcttgctgatgcttgcaccgtgacagtgggcaccaacacagacgtgccacccaaccccctgcacacaccaccggccaccaggggcccccttgtgcgccttggctttataactcctctgggggtgatattggtggtgatcacagctcctagcataatgagagttccatttggtattgtcacacgtctcctgcctcgcttgggttgccatgtttgagcgatggccctgttgatttcaccctgccttttactgaatctgtaaattgttgtgcaattgtggttatagtagactgtagcacattgccttttctaaactgctacatgtttataatcttcatttttaaagtatgtgtaatttttttaagtatgtattctattcatatggtctgcttgtcagtgagccagacttgcttactatattcctttataataatgctagccacttcctggattctttagtaatgtgctgtatgcaagaactttccagtagcagtgaaggagggttgcctctccaagcttcctaagggatgctgccctgtgtggggatgcattgcagaggcactagtagcatgggggctagagtggggagcgagatgtaaaagggtggggggataggagaattccagagtgcttccagcattagggtcctgagaacttctgagttcagagaaacatgcaaagtgactaacaaaatagctacttacctttgcagttttacagaccctgggagctgctttgggagtgagaaaggcaaccctccaatgtgtttcaactttaaaatgttgaattcttttcagacatggtatctcatttattctccttttctagcgtttgttgaatttcaggcagaatgtcttacagaatgtcctagaaccagattatcatttaatctgaaacagctgaggaagggacagagaaggtacaagggcaaggcagcacaaaacagatcaggagaatgaagagggaatgctttggttttttgttttgttttgttttttctttttcaagtaactaaaacagcatctacatgtagagtgttgtggagagctgagaccagggtaaagtcaagtgcagcatcagtactgcgagacccaccagcccctggagagggtcagccgagaatctggtagtgaagcctgtctagggtcccggcaccctcaccctcagccacctgcagagaggccagggccccagagactagcctggttctgaagtgggcaggggtgctgccagagccctctgccccttatgttgagaccctgctttcaggacaggccagccgttggccaccatgtcacattctgagtgagtgtcacaggtccctaacaataattttctgatctggagcatatcagcagaatgcttagcctcaaggggcctggcagctgtaatgtttgatttatgatgagaactatccgaggccacccttggcctctaaataagctgctctagggagccgcctactttttgatgagaaattagaagagtacctaatgttgaaaacatgacatgcgctcttgggatctgctgttctctccagggctccagaacctgatacctgttaccaaagctaggaaagagctttatcacaagccttcactgtcctggcatgagaactggctgccaggctcagtgtaccccattaactgtgaatgaatctgagcttggtttcctttattgcttcctctgcaatatgattgctgaaacacattttaaaaattcagaagcttgtcactcctgttaatgggaggatcagtcacacatgtgtagtacaaggcggactttgtgtttgtttttggtgttaatttttagcattgtgtgtgttgcttccccaccctgaggagaggacaccatggcttactactcaggacaagtatgccccgctcagggtgtgatttcaggtggcttccaaacttgtacgcagtttaaagatggtggggacagactttgcctctacctagtgaaccccacttaaagaataaggagcatttgaatctcttggaaaaggccatgaagaataaagcagtcaaaaagaagtcctccatgttggtgccaaggacttgcgaggggaaataaaaatgttatccagcctgaccaacatggagaaaccccgtctccattaaaaatacaaaattagcctggcatggtggcgcatgcctgtaatcccagctactctggaggctgaggcaggagaatcgcttgaacccaggaggcggaggtcgcagtgagccgagatcatgccagtgcactccagcctgggtaacaagagtgaaactccgtgtcaaaaaaaaaaaaaaaatgttactcatcctctctgaaagcaaaaaggaaaccctaacagctctgaactctggttttatttttcttgctgtatttgggtgaacattgtatgattaggcataatgttaaaaaaaaaaatttttttttggtagaaatgcaatcaccagtaaagaggtacgaaaaagctagcctctctcagagaccggggaggcagagtactactagaggaagtgaagttctgatggaatcatgcctgtcaaatgaggtcttgaagcggatgcccaaataaaagagtatattttatctaaatcttaagtgggtaacattttatgcagtttaaatgaatggaatattttcctcttgtttagttgtatctgtttgtatttttctttgatgaatgattggtcatgaggcctcttgccacactccagaaatacgtgtgcggctgcttttaagaactatgtgtctggtcacttatttctctaaaattatctcattgcctggcaatcagtcttctcttgtatacttgtcctagcacattatgtacatgggaaatgtaaacaaatgtgaaggaggaccagaaaaattagttaatatttaaaaaaatgtattgtgcattttggcttcacatgtttaactttttttaagaaaaaagttgcatgaatggaaaaaaaaatctgtatacagtatctgtaaaaactatcttatctgtttcaattccttgctcatatcccatataatctagaactaaatatggtgtgtggccatatttaaacacctgagagtcaagcagttgagactttgatttgaagcacctcatccttctttcaatgcgaacactatcatatggcattcttactgaggattttgtctaaccatatgttgccatgaattaactctgccgcctttcttaaggatcaaaaccagtttgatttgggaatcttcccctttccaaatgaaatagagatgcagtacttaactttccttggtgtttgtagatattgccttgtgtattccacttaaaaccgtaatctagtttgtaaaagagatggtgacgcatgtaaataaagcatcagtgacactct

SEQ ID NO: 262435 - DNA, 2022 bp, Artificial Sequence
  derived and/or modified sequence
atggccgaggcccccgccagccccgcccccctgagccccctggaggtggagctggaccccgagttcgagccccagagcagacccagaagctgcacctggcccctgcagagacccgagctgcaggccagccccgccaagcccagcggcgagaccgccgccgacagcatgatccccgaggaggaggacgacgaggacgacgaggacggcggcggcagagccggcagcgccatggccatcggcggcggcggcggcagcggcaccctgggcagcggcctgctgctggaggacagcgccagagtgctggcccccggcggccaggaccccggcagcggccccgccaccgccgccggcggcctgagcggcggcacccaggccctgctgcagccccagcagcccctgccccccccccagcccggcgccgccggcggcagcggccagcccagaaagtgcagcagcagaagaaacgcctggggcaacctgagctacgccgacctgatcaccagagccatcgagagcagccccgacaagagactgaccctgagccagatctacgagtggatggtgagatgcgtgccctacttcaaggacaagggcgacagcaacagcagcgccggctggaagaacagcatcagacacaacctgagcctgcacagcagattcatgagagtgcagaacgagggcaccggcaagagcagctggtggatcatcaaccccgacggcggcaagagcggcaaggcccccagaagaagagccgtgagcatggacaacagcaacaagtacaccaagagcagaggcagagccgccaagaagaaggccgccctgcagaccgcccccgagagcgccgacgacagccccagccagctgagcaagtggcccggcagccccaccagcagaagcagcgacgagctggacgcctggaccgacttcagaagcagaaccaacagcaacgccagcaccgtgagcggcagactgagccccatcatggccagcaccgagctggacgaggtgcaggacgacgacgcccccctgagccccatgctgtacagcagcagcgccagcctgagccccagcgtgagcaagccctgcaccgtggagctgcccagactgaccgacatggccggcaccatgaacctgaacgacggcctgaccgagaacctgatggacgacctgctggacaacatcaccctgccccccagccagcccagccccaccggcggcctgatgcagagaagcagcagcttcccctacaccaccaagggcagcggcctgggcagccccaccagcagcttcaacagcaccgtgttcggccccagcagcctgaacagcctgagacagagccccatgcagaccatccaggagaacaagcccgccaccttcagcagcatgagccactacggcaaccagaccctgcaggacctgctgaccagcgacagcctgagccacagcgacgtgatgatgacccagagcgaccccctgatgagccaggccagcaccgccgtgagcgcccagaacagcagaagaaacgtgatgctgagaaacgaccccatgatgagcttcgccgcccagcccaaccagggcagcctggtgaaccagaacctgctgcaccaccagcaccagacccagggcgccctgggcggcagcagagccctgagcaacagcgtgagcaacatgggcctgagcgagagcagcagcctgggcagcgccaagcaccagcagcagagccccgtgagccagagcatgcagaccctgagcgacagcctgagcggcagcagcctgtacagcaccagcgccaacctgcccgtgatgggccacgagaagttccccagcgacctggacctggacatgttcaacggcagcctggagtgcgacatggagagcatcatcagaagcgagctgatggacgccgacggcctggacttcaacttcgacagcctgatcagcacccagaacgtggtgggcctgaacgtgggcaacttcaccggcgccaagcaggccagcagccagagctgggtgcccggctag

SEQ ID NO: 262436 - DNA, 2022 bp, Artificial Sequence
  derived and/or modified sequence
atggcagaggcgccagcatctcccgcccctcttagtcctctggaggtggagctggatcccgagttcgagccccagagccggccccgatcctgtacttggccactccagagaccagagctgcaagccagcccagcgaaaccctccggagaaacggccgctgattcaatgattcccgaagaagaggacgatgaagatgacgaggatggaggaggccgggccggctcagccatggccatcggtggaggcggcgggtccgggaccctggggtccggattactgttggaggatagcgctagagtactggcacccggcggacaagaccccggcagtggcccggcgaccgctgccgggggcctctccgggggcacccaggccctgctacaaccacagcaacccttacctcctccccagccaggagccgcgggggggtctggccagccgaggaagtgcagtagccgaaggaacgcatgggggaatctttcttacgccgaccttatcactagggcaatagagtcaagtcctgacaagcggttaaccctatcccagatatatgagtggatggtccgctgcgtgccttattttaaagataaaggcgattctaattccagcgctggatggaagaacagcatccggcacaatttgtcattacactcccggtttatgcgtgtgcagaacgaagggactggaaagagctcctggtggatcatcaacccggacggtggaaaatctggcaaggccccccgacgccgggccgtttccatggacaacagcaataagtacacaaagtctcgaggcagagccgccaaaaagaaggccgccttgcaaacggctccagaatctgccgatgatagcccctctcaactctccaagtggcccggctctccgacctcccgctcctccgatgagcttgacgcatggacagacttccggtcaaggacaaattccaatgcgtcaaccgtgtccggtcgtctttccccaataatggcgagcacagaactcgacgaggtgcaagacgacgatgcgccattaagccccatgctgtacagttccagcgcaagtttatccccttcagttagtaaaccgtgtacggtggagctgccgcgcttaacggatatggctggcactatgaatctgaatgatggcctcaccgaaaacttaatggatgacctattagacaatatcaccctgcctccgagccaacctagccctactggcgggctcatgcagcggtcaagcagctttccttacactaccaagggttctggtctgggctcacccacttcatccttcaactctaccgtgtttgggcccagcagcctgaacagcttgcgccagagccctatgcaaaccatccaggagaacaaaccagccactttcagttccatgtctcattatggtaatcagacactgcaggatttgctgaccagtgattccctctcacacagcgacgtgatgatgactcagtccgaccctctcatgtcccaggcatctaccgccgtcagcgcccagaattcccgcaggaatgtgatgctgcgcaatgatccgatgatgtccttcgccgcccagccaaaccagggcagcctcgttaaccagaaccttttacaccaccagcaccagacacagggggccttaggaggctctcgagcactcagtaactccgtatccaatatgggactctcagaatcttcgtctctgggctccgcgaagcaccaacagcagagccccgtgtcgcagagtatgcagacacttagcgattccttaagtgggagttcactgtactccacatctgcaaaccttccagtcatgggccatgagaaattcccctcagacctcgacctggatatgttcaacggttctctggaatgtgatatggaatccataataaggagtgaactcatggacgccgacggcttagatttcaattttgacagtctgatctctacacaaaatgtggtggggctcaacgtcggaaacttcactggcgctaaacaggcctcatcacagtcctgggtgccaggctag

SEQ ID NO: 262437 - DNA, 2022 bp, Artificial Sequence
  derived and/or modified sequence
atggctgaagcccccgccagtcctgctcccctctctcccctggaggtagaactggaccctgagttcgaacctcagagtagaccacgatcgtgcacctggccactgcaacggccagagctgcaggccagtcctgccaagccatcaggggaaaccgcagcggactctatgatccccgaggaagaagacgatgaagacgacgaggacggcggaggcagggccgggtcagccatggcgattgggggtggaggcggcagtggtactcttggcagcggcctccttttggaggatagtgctagagtgctggccccagggggccaggatcccggatctggacctgctactgctgccggcggcctctcgggtgggacacaggccctgctacagcctcagcagcctctacccccaccgcagccaggtgcagcaggcgggtcgggacagccacgcaaatgctctagcagacggaatgcttggggcaacctgagctacgcggacctcataaccagggccatcgaatcctctcccgataagaggctaacgctgagccaaatttacgagtggatggtgaggtgtgtgccatacttcaaggataagggagacagcaactcttcggctggctggaaaaatagtattcgacacaatctctcactacactcaagattcatgcgcgtgcagaacgaggggacggggaagagctcctggtggatcattaaccccgatggaggaaaaagcgggaaagcccccagacgaagggcagtgagtatggacaatagcaacaagtacacaaagagccgagggagagcagccaagaaaaaggccgctcttcagacagcacccgaatctgctgacgacagtccttcacagttgtccaaatggcccggcagccccacatctcgctccagcgacgaactggacgcttggacagactttcggtcacgtacgaactccaatgcatctacagtaagtggaagactgagcccgatcatggcctcaaccgaattggatgaagtacaagatgatgatgctccccttagtccaatgctgtatagttcatctgcctcactttcaccgagtgtctccaaaccatgcaccgtggaactcccacgcttgactgacatggctggtacgatgaatctgaatgacgggctcaccgaaaatttgatggacgaccttttggacaacatcacgctcccaccttcacaaccatcccctacgggcggacttatgcaaaggtcctcatccttcccctacacaacaaaagggtccggtctcggctcacccacatcttctttcaactccactgtgttcggtccctcttcattgaatagcctgagacagagccctatgcagacaatccaggaaaacaagccagccaccttctcttcgatgagccattatggaaaccaaaccttgcaggatctcttgacctcagatagtttgagtcacagcgatgtcatgatgactcagtcagaccccctgatgtctcaggcttcaacggcagttagtgcccagaacagtcgtaggaacgtcatgctgagaaatgacccaatgatgtcattcgctgctcagcctaaccaggggtcattagtgaaccagaatttactccaccaccaacaccagacacaaggtgccctcggtggaagtcgcgctctttcaaactccgttagcaatatgggactttctgagagcagcagcctcgggtcagctaaacatcagcagcaatctcctgtctcccaatcaatgcagacgttgtctgacagcctatcgggttccagcctgtattctacctccgccaatttgccagtgatgggccatgagaaattcccttctgatctggacttagatatgtttaacggctctctcgaatgcgacatggagtctatcatcaggagcgaacttatggacgcagacgggcttgattttaactttgatagtcttatctctacgcagaatgtcgtagggctgaacgtgggaaatttcaccggcgcgaagcaggctagtagccagtcttgggtgcctggctag

SEQ ID NO: 262438 - DNA, 7308 bp, Artificial Sequence
  derived and/or modified sequence
gggaggaggaggaatgtggaaggtggcggcgcgcgagctgacaggcggttcctcgggcgggctgcggcgacggcccgagcgcttctccttcgccgaggttgcgcgccccctcctcgccgtgccccgggcccgcgcgggatcgtgcgtcgtcccgccgcgtccctgaagggaaggaagcgaggcggcggcggcggcgcccgggagccggagccttcgcggcgtccacgtccctcccccgctgcaccccgccccggcgcgagaggagagcgcgagagccccagccgcgggcgggcgggcggcgaagatggcagaggcaccggcttccccggccccgctctctccgctcgaagtggagctggacccggagttcgagccccagagccgtccgcgatcctgtacgtggcccctgcaaaggccggagctccaagcgagccctgccaagccctcgggggagacggccgccgactccatgatccccgaggaggaggacgatgaagacgacgaggacggcgggggacgggccggctcggccatggcgatcggcggcggcggcgggagcggcacgctgggctccgggctgctccttgaggactcggcccgggtgctggcacccggagggcaagaccccgggtctgggccagccaccgcggcgggcgggctgagcgggggtacacaggcgctgctgcagcctcagcaaccgctgccaccgccgcagccgggggcggctgggggctccgggcagccgaggaaatgttcgtcgcggcggaacgcctggggaaacctgtcctacgcggacctgatcacccgcgccatcgagagctccccggacaaacggctcactctgtcccagatctacgagtggatggtgcgttgcgtgccctacttcaaggataagggcgacagcaacagctctgccggctggaagaactccatccggcacaacctgtcactgcatagtcgattcatgcgggtccagaatgagggaactggcaagagctcttggtggatcatcaaccctgatggggggaagagcggaaaagccccccggcggcgggctgtctccatggacaatagcaacaagtataccaagagccgtggccgcgcagccaagaagaaggcagccctgcagacagcccccgaatcagctgacgacagtccctcccagctctccaagtggcctggcagccccacgtcacgcagcagtgatgagctggatgcgtggacggacttccgttcacgcaccaattctaacgccagcacagtcagtggccgcctgtcgcccatcatggcaagcacagagttggatgaagtccaggacgatgatgcgcctctctcgcccatgctctacagcagctcagccagcctgtcaccttcagtaagcaagccgtgcacggtggaactgccacggctgactgatatggcaggcaccatgaatctgaatgatgggctgactgaaaacctcatggacgacctgctggataacatcacgctcccgccatcccagccatcgcccactgggggactcatgcagcggagctctagcttcccgtataccaccaagggctcgggcctgggctccccaaccagctcctttaacagcacggtgttcggaccttcatctctgaactccctacgccagtctcccatgcagaccatccaagagaacaagccagctaccttctcttccatgtcacactatggtaaccagacactccaggacctgctcacttcggactcacttagccacagcgatgtcatgatgacacagtcggaccccttgatgtctcaggccagcaccgctgtgtctgcccagaattcccgccggaacgtgatgcttcgcaatgatccgatgatgtcctttgctgcccagcctaaccagggaagtttggtcaatcagaacttgctccaccaccagcaccaaacccagggcgctcttggtggcagccgtgccttgtcgaattctgtcagcaacatgggcttgagtgagtccagcagccttgggtcagccaaacaccagcagcagtctcctgtcagccagtctatgcaaaccctctcggactctctctcaggctcctccttgtactcaactagtgcaaacctgcccgtcatgggccatgagaagttccccagcgacttggacctggacatgttcaatgggagcttggaatgtgacatggagtccattatccgtagtgaactcatggatgctgatgggttggattttaactttgattccctcatctccacacagaatgttgttggtttgaacgtggggaacttcactggtgctaagcaggcctcatctcagagctgggtgccaggctgaaggatcactgaggaaggggaagtgggcaaagcagaccctcaaactgacacaagacctacagagaaaaccctttgccaaatctgctctcagcaagtggacagtgataccgtttacagcttaacacctttgtgaatcccacgccattttcctaacccagcagagactgttaatggccccttaccctgggtgaagcacttacccttggaacagaactctaaaaagtatgcaaaatcttccttgtacagggtggtgagccgcctgccagtggaggacagcacccctcagcaccacccaccctcattcagagcacaccgtgagcccccgtcggccattctgtggtgttttaatattgcgatggtttatgggacgttttaagtgttgttcttgtgtttgttttcctttgactttctgagtttttcacatgcattaacttgcggtatttttctgttaaaatgttaaccgtccttcccctagcaaatttaaaaacagaaagaaaatgttgtaccagttaccattccgggttcgagcatcacaagcttttgagcgcatggaactccataaactaacaaattacataaactaaagggggattttctttcttcttttgtttggtagaaaattatccttttctaaaaactgaacaatggcacaattgtttgctatgtgcacccgtccaggacagaaccgtgcataggcaaaaggagtggagcacagcgtccggcccagtgtgtttccggttctgagtcagggtgatctgtggacgggaccccagcaccaagtctacgggtgccagatcagtagggcctgtgatttcctgtcagtgtcctcagctaatgtgaacagtgttggtctgctggttagaaactagaatattgatattttcaggaaagaaatcagctcagctctccactcattgccaaatgtcactaaagggtttagttttaaggagaaagaaaaggaaaaaaaaaaaaaacaaaaaagtcctgttttgctttgcagaacaaatgaacttacaggtgagcattaagcttgcagtgagaaatgtgcgaagagtaaaaacccaagtcaatgctgaggcagttctaacttcactgttttcctaaatacacatccttgattattttcagccttgctatataatctgatctgctagaagtgtatgagtgagaggcaatagcatacaaactgattttttaaatataagcttaggttgtaattgtacaagtgactcaatggaagtacaaaatagggcagttttaacttttttttctgcttctatggatttcattttgttgtgttttcaaaaagttatggtgctgtataggtgctttctgtttaacctggaaagtgtgattatattcgttaccttctttggtagacggaatagttgggaccacctttggtacataagaaattggtataacgatgctctgattagcacagtatatgcatacttctccaaagtgatatatgaagactcttttctttgcataaaaagcattaggcatataaatgtataaatatattttatcatgtacagtacaaaaatggaaccttatgcatgggccttaggaatacaggctagtatttcagcacagacttccctgcttgagttcttgctgatgcttgcaccgtgacagtgggcaccaacacagacgtgccacccaaccccctgcacacaccaccggccaccaggggcccccttgtgcgccttggctttataactcctctgggggtgatattggtggtgatcacagctcctagcataatgagagttccatttggtattgtcacacgtctcctgcctcgcttgggttgccatgtttgagcgatggccctgttgatttcaccctgccttttactgaatctgtaaattgttgtgcaattgtggttatagtagactgtagcacattgccttttctaaactgctacatgtttataatcttcatttttaaagtatgtgtaatttttttaagtatgtattctattcatatggtctgcttgtcagtgagccagacttgcttactatattcctttataataatgctagccacttcctggattctttagtaatgtgctgtatgcaagaactttccagtagcagtgaaggagggttgcctctccaagcttcctaagggatgctgccctgtgtggggatgcattgcagaggcactagtagcatgggggctagagtggggagcgagatgtaaaagggtggggggataggagaattccagagtgcttccagcattagggtcctgagaacttctgagttcagagaaacatgcaaagtgactaacaaaatagctacttacctttgcagttttacagaccctgggagctgctttgggagtgagaaaggcaaccctccaatgtgtttcaactttaaaatgttgaattcttttcagacatggtatctcatttattctccttttctagcgtttgttgaatttcaggcagaatgtcttacagaatgtcctagaaccagattatcatttaatctgaaacagctgaggaagggacagagaaggtacaagggcaaggcagcacaaaacagatcaggagaatgaagagggaatgctttggttttttgttttgttttgttttttctttttcaagtaactaaaacagcatctacatgtagagtgttgtggagagctgagaccagggtaaagtcaagtgcagcatcagtactgcgagacccaccagcccctggagagggtcagccgagaatctggtagtgaagcctgtctagggtcccggcaccctcaccctcagccacctgcagagaggccagggccccagagactagcctggttctgaagtgggcaggggtgctgccagagccctctgccccttatgttgagaccctgctttcaggacaggccagccgttggccaccatgtcacattctgagtgagtgtcacaggtccctaacaataattttctgatctggagcatatcagcagaatgcttagcctcaaggggcctggcagctgtaatgtttgatttatgatgagaactatccgaggccacccttggcctctaaataagctgctctagggagccgcctactttttgatgagaaattagaagagtacctaatgttgaaaacatgacatgcgctcttgggatctgctgttctctccagggctccagaacctgatacctgttaccaaagctaggaaagagctttatcacaagccttcactgtcctggcatgagaactggctgccaggctcagtgtaccccattaactgtgaatgaatctgagcttggtttcctttattgcttcctctgcaatatgattgctgaaacacattttaaaaattcagaagcttgtcactcctgttaatgggaggatcagtcacacatgtgtagtacaaggcggactttgtgtttgtttttggtgttaatttttagcattgtgtgtgttgcttccccaccctgaggagaggacaccatggcttactactcaggacaagtatgccccgctcagggtgtgatttcaggtggcttccaaacttgtacgcagtttaaagatggtggggacagactttgcctctacctagtgaaccccacttaaagaataaggagcatttgaatctcttggaaaaggccatgaagaataaagcagtcaaaaagaagtcctccatgttggtgccaaggacttgcgaggggaaataaaaatgttatccagcctgaccaacatggagaaaccccgtctccattaaaaatacaaaattagcctggcatggtggcgcatgcctgtaatcccagctactctggaggctgaggcaggagaatcgcttgaacccaggaggcggaggtcgcagtgagccgagatcatgccagtgcactccagcctgggtaacaagagtgaaactccgtgtcaaaaaaaaaaaaaaaatgttactcatcctctctgaaagcaaaaaggaaaccctaacagctctgaactctggttttatttttcttgctgtatttgggtgaacattgtatgattaggcataatgttaaaaaaaaaaatttttttttggtagaaatgcaatcaccagtaaagaggtacgaaaaagctagcctctctcagagaccggggaggcagagtactactagaggaagtgaagttctgatggaatcatgcctgtcaaatgaggtcttgaagcggatgcccaaataaaagagtatattttatctaaatcttaagtgggtaacattttatgcagtttaaatgaatggaatattttcctcttgtttagttgtatctgtttgtatttttctttgatgaatgattggtcatgaggcctcttgccacactccagaaatacgtgtgcggctgcttttaagaactatgtgtctggtcacttatttctctaaaattatctcattgcctggcaatcagtcttctcttgtatacttgtcctagcacattatgtacatgggaaatgtaaacaaatgtgaaggaggaccagaaaaattagttaatatttaaaaaaatgtattgtgcattttggcttcacatgtttaactttttttaagaaaaaagttgcatgaatggaaaaaaaaatctgtatacagtatctgtaaaaactatcttatctgtttcaattccttgctcatatcccatataatctagaactaaatatggtgtgtggccatatttaaacacctgagagtcaagcagttgagactttgatttgaagcacctcatccttctttcaatgcgaacactatcatatggcattcttactgaggattttgtctaaccatatgttgccatgaattaactctgccgcctttcttaaggatcaaaaccagtttgatttgggaatcttcccctttccaaatgaaatagagatgcagtacttaactttccttggtgtttgtagatattgccttgtgtattccacttaaaaccgtaatctagtttgtaaaagagatggtgacgcatgtaaataaagcatcagtgacactctatctta

SEQ ID NO: 262439 - DNA, 2022 bp, Artificial Sequence
  derived and/or modified sequence
atggccgaggccccagccagccctgcccccctgagccccctggaggtggagctggaccctgagtttgagccccagagccggcccaggagctgcacctggcccctgcagaggcctgagctgcaggccagccctgccaagcccagcggggagacagctgctgacagcatgatccctgaggaggaggatgatgaagatgatgaagatggcggcggccgggccggcagcgccatggccatcggcggcggcggcggcagcggcaccctgggcagcggcctgctgctggaggacagcgcccgggtgctggcccctgggggccaggaccccggcagcggccctgccacagctgctgggggcctgagcggcggcacccaggccctgctgcagccccagcagcccctgcccccaccccagcccggggctgctgggggcagcggccagcccaggaagtgcagcagcagaagaaatgcctggggcaacctgtcctatgctgacctgatcacccgggccatcgagagcagcccagacaagaggctgaccctgagccagatctatgagtggatggtgcgctgtgtgccctacttcaaggacaagggggacagcaacagcagcgctggctggaagaacagcatccgccacaacctgagcctgcacagccgcttcatgagggtgcagaatgaaggcaccgggaagagctcctggtggatcatcaacccagatggcggcaagagcggcaaggcccccaggagaagagctgtgtccatggacaacagcaacaagtacaccaagagccggggccgggccgccaagaagaaggccgccctgcagacagcccctgagagcgcagatgacagccccagccagctgagcaagtggccaggcagccccaccagccgcagcagtgatgagctggatgcctggacagacttccgcagcaggaccaacagcaatgccagcacagtgtctggccgcctgagccccatcatggccagcacagagctggatgaggtgcaggatgatgatgcccccctgagccccatgctgtacagcagcagcgccagcctgagccccagcgtgtccaagccctgcaccgtggagctgccccggctgacagacatggccggcaccatgaacctgaatgatggcctgacagagaacctgatggatgacctgctggacaacatcaccctgccccccagccagcccagccccaccggcggcctgatgcagaggagcagcagcttcccctacaccaccaagggcagcggcctgggcagccccaccagcagcttcaacagcacagtgtttggccccagcagcctgaacagcctgcggcagagccccatgcagaccatccaggagaacaagccagccaccttcagctccatgagccactacggcaaccagaccctgcaggacctgctgaccagtgacagcctgagccacagtgatgtgatgatgacccagagcgaccccctgatgagccaggccagcacagctgtgtctgcccagaacagcagaagaaatgtgatgctgagaaatgaccccatgatgagctttgctgcccagcccaaccagggcagcctggtgaaccagaacctgctgcaccaccagcaccagacccagggcgccctgggcggcagccgggccctgagcaacagcgtgagcaacatgggcctgtctgagagcagcagcctgggcagcgccaagcaccagcagcagagccctgtgtcccagagcatgcagaccctgagtgacagcctgagcggcagcagcctgtacagcaccagcgccaacctgcctgtgatgggccacgagaagttccccagcgacctggacctggacatgtttaatggcagcctggagtgtgacatggagagcatcatccgctctgagctgatggatgctgatggcctggacttcaactttgacagcctcatcagcacccagaatgtggtgggcctgaatgtgggcaacttcaccggggccaagcaggccagcagccagagctgggtgcccggctag

SEQ ID NO: 262440 - DNA, 2022 bp, Artificial Sequence
  derived and/or modified sequence
atggccgaggcccccgccagccccgcccccctgagccccctggaggttgaattagatcctgaattcgagccgcagagtaggccaaggagctgcacttggcctctccaacgtcctgagctgcaagcctctccagccaaacccagcggtgagacggccgcagattccatgattcccgaggaggaggacgatgaggatgacgaggacgggggcggcagggccggtagcgcaatggcaattgggggcgggggtggttccggtaccttaggcagtggcctgctcctcgaagacagcgcaagagtgctggccccagggggacaggacccaggaagtggtccagccaccgccgccggagggctgagcggggggacgcaagcgctgcttcagccacagcagcccctaccgccccctcagcctggcgccgccggtggatctgggcaaccacggaaatgctcctcacgcagaaatgcttggggaaatttgtcatatgctgacttgattacccgggccattgagagcagccccgataaaagattaactctcagtcagatatacgaatggatggtgaggtgtgtgccatactttaaggataaaggcgacagtaacagttcagccggttggaagaatagcattcgccacaacctgtccctacactcacgttttatgcgcgttcaaaacgaaggaactggaaagtcctcatggtggattattaatccagacggcggaaaaagtggcaaagctccacgtcggcgggccgtgtctatggacaactccaataaatatacgaagagtcgggggcgtgctgcaaagaaaaaggcggcattgcagacagctcccgaaagcgctgacgactctcctagccagctgtcaaaatggcctgggtctcccactagcaggtctagcgatgagttagacgcttggacagacttccggagccgaacaaattctaacgcatctaccgtatcaggaagattgtctccaataatggcttccacagagctggatgaggtgcaggatgacgacgccccactgtcaccaatgctgtactcaagctctgcttctttatccccaagcgtgtctaagccatgcacagtggaactgccaagacttactgatatggccggtacaatgaacctgaacgatggtctgacagagaatctaatggacgacctgttggataatattaccttgcccccctcacagccctctcctactggcgggctgatgcagcggtctagtagcttcccctacaccactaagggtagtggactcggaagcccgacaagcagcttcaactctacggtctttggcccctcttctttgaacagcttgaggcagtcaccgatgcagacaatccaggagaataagccagcaacattctccagcatgtcgcactatggcaaccaaacactgcaagacctgctgaccagtgacagtctaagtcattcagatgttatgatgacccagtccgaccccctaatgtcacaggcctcaacagccgtatctgctcagaacagtcggagaaacgtaatgcttaggaatgatcctatgatgtcttttgctgcgcaacccaatcagggatctctggttaatcaaaacctgctgcaccatcagcaccaaactcagggcgccctgggaggcagtcgggcactgtccaactccgtctcgaacatggggctttctgagtcatccagtctgggatccgcaaaacaccagcagcagtcacccgtgagccaatctatgcagacattgtcggatagcctcagcggtagttcgctttacagtacttctgcgaatctgcctgttatgggacacgagaaattcccatcagacttggatttagatatgtttaacggtagcctggagtgcgatatggagtctattatcaggtctgaactaatggatgccgacggactagatttcaatttcgacagcctgatcagcacacagaacgtggtgggcctgaacgtgggaaattttactggcgccaaacaggcttcatcccagtcctgggtgccaggttag

SEQ ID NO: 262441 - DNA, 2022 bp, Artificial Sequence
  derived and/or modified sequence
atggccgaggcccccgccagccccgcccccctgagccccctggaggtggagctggatcctgaattcgagccccagagcaggcccagatcatgcacctggcccctccagcgccccgaactgcaggcctcacccgccaagccaagcggtgagaccgccgccgacagtatgatacccgaggaagaagacgatgaggatgatgaagacggtggaggacgggcaggctccgctatggccatcggtggtggggggggttcaggaacactggggagtggcctcctgttggaagactctgcccgagtgcttgcaccgggaggacaagacccaggcagtgggcccgcaaccgcagctgggggtctctcggggggcacccaggccctcctgcagccgcagcaacccttgcctcccccacagcccggagcggcgggaggctctgggcagccacgaaagtgcagctctaggcgtaacgcatggggcaatctcagctatgctgaccttatcacgagagctatcgagtcctctcccgacaaacgcctgactctttcccagatctatgaatggatggtgaggtgtgtcccttacttcaaggataaaggcgactctaactcaagcgcaggctggaagaacagcattcgacacaacctctcactgcacagtcggtttatgagggtgcagaacgaaggcacaggcaagagttcctggtggattatcaatcctgatggcggaaaaagcggcaaggcacctagacgtcgggccgtgtcaatggataactctaacaagtacaccaagagtcgcggaagagctgccaagaagaaggcagctttgcagaccgctcccgaaagcgctgacgactctcccagccagctctcaaagtggccaggatctccaacatcccgaagtagtgatgagctcgacgcctggacggactttcgatcacggaccaacagtaacgcgtcaactgtctcaggaagactttcccctatcatggcctctaccgagttggatgaagtccaggacgatgatgcgccattgtctccaatgttatactcctccagtgccagtttgtccccatcagtgtctaagccatgcaccgttgaactgcccaggctcaccgatatggcggggaccatgaacttaaatgacggtttgaccgagaacctcatggatgacttgcttgataatattacactgccacccagccaacctagccctacgggaggtcttatgcagagaagcagctcatttccgtacacgacaaagggaagcggactcggctctcccacctcatcctttaattccacggtcttcggcccttcttctctgaactctttgcgccaatccccaatgcaaactattcaggagaacaaacctgcaacgttcagcagcatgtctcactatggcaaccagactctgcaggatttgttaacatccgattcgttatcccacagcgacgtgatgatgacgcagagcgaccccttgatgtctcaagcgtctaccgccgtctctgcacagaattcaagaagaaacgtgatgctgcggaacgatccgatgatgagcttcgccgcccaaccaaaccagggatccttggtcaaccagaacctactgcatcaccagcatcaaacccaaggggccttaggagggtctcgtgcactgagtaatagtgtgtccaatatgggattatccgagagctctagcctgggttcagccaagcatcagcagcagtctcctgtgagccagtcaatgcagacactgtcagattctctgtctgggagctccttatacagcaccagtgctaacctgccagtgatgggccatgaaaagtttccttcagatctggatctggacatgtttaacgggtctcttgagtgtgacatggagtctatcatccggtctgagctgatggacgcggatggactggacttcaatttcgactctttgatttccacgcagaacgtggtcgggttgaatgtcggtaactttacaggcgcaaagcaagcttccagccaatcctgggtgcccgggtag

SEQ ID NO: 262442 - DNA, 2022 bp, Artificial Sequence
  derived and/or modified sequence
atggccgaggcccctgcatctcctgctcctctttccccactcgaagttgagctggaccctgagttcgagccacagtccagacctagaagttgtacctggcccctacagaggcctgaattacaggcctctccagcaaaacccagcggggaaaccgctgccgacagcatgattcccgaagaggaggacgatgaagatgatgaagacggcggaggcagggccggaagtgctatggccattggcggtgggggaggcagcggcactctggggagtggactgttactggaggatagcgccagggtgttagcgccagggggacaagaccctgggtcaggaccagctactgcagctggtggtctgtcagggggtacacaagccctcctgcagcctcaacaaccactaccaccaccacaaccaggagctgctggagggagcggccagccgcgtaagtgctcttcccgcagaaacgcttggggcaatctgtcttacgcagatctgatcactagagcgatagagtcatcaccagataaacgcctgacgctcagtcagatttatgagtggatggtgagatgcgtaccctactttaaggacaaaggtgatagtaattccagcgcgggttggaaaaattccataagacacaatctgagtttgcatagcaggttcatgcgggtgcaaaacgagggtacaggtaagtcatcttggtggatcattaatcccgacgggggtaaatctggaaaagccccaaggaggcgcgctgttagcatggacaacagcaataaatacaccaagtcccggggacgggctgccaaaaagaaagccgcattgcaaacagccccagaatccgcagacgatagccccagtcagctgtctaaatggccgggatcacctacctcccgatcatctgatgagctggacgcctggaccgatttccggtcccgaactaactcaaacgccagtactgtttccggtcgattaagcccgatcatggcttctactgagctagatgaagtgcaagacgacgatgccccactttctccaatgttgtactcgtcatctgcttccctgtcaccatccgtctcaaagccttgcaccgttgagctgccaagactcacagatatggccggaacgatgaacctgaacgacggcttgacggaaaatctcatggatgatctcctggacaatatcacactcccgccttcacaaccaagccccaccggagggctgatgcaacgctcttcttctttcccatacaccacaaagggatcaggcctagggtccccgactagttccttcaatagtacagtatttggcccatccagcctgaatagcttgagacagagtcccatgcagactattcaggagaataagcccgctacgttttcttctatgagtcattatggaaaccagacactccaagaccttttgacatctgattcactctcccattcagacgtaatgatgacccaatccgacccactgatgtcgcaagcctccactgccgtatccgcacaaaacagtagacgcaatgttatgctgaggaatgaccccatgatgagtttcgcagcccagcccaatcaggggtcgctggtgaatcaaaatctgctgcatcaccaacatcagacccagggtgcacttgggggtagccgcgctttgtcaaattcagtgtccaatatgggactttctgagtcttccagtttggggagcgctaaacatcaacagcagagccctgttagtcagtctatgcagactctgtccgactcccttagcggctcaagcctgtattcgacatcagccaatctgccagtaatggggcacgagaaattcccatctgatttggacttagatatgttcaacggctctttggagtgcgacatggaatcgataatacgctcagaactgatggatgccgatggcttggattttaattttgattcccttatcagcacgcagaatgtggttgggctgaatgttggaaactttactggtgccaaacaggcttcttcccagagctgggtgccagggtag

SEQ ID NO: 262443 - DNA, 2022 bp, Artificial Sequence
  derived and/or modified sequence
atggcagaggccccagcttcacccgcacctctgagcccactagaggtcgagctggaccccgaattcgaaccacagagtcgcccacgatcttgcacctggcctctgcagcgcccagagctgcaggcatcacctgccaagccaagcggggagacagcagctgactccatgattcctgaggaggaagacgacgaggatgatgaggacggcggaggaagagcaggtagtgcaatggctatcggtgggggagggggatcaggaacgctcgggtcgggcctcctccttgaggactccgcacgtgtgctggcacctggaggacaggatccaggctcagggccagccacagccgcaggtgggctttcagggggtacccaggctctgctgcaaccacagcagcctctgcctcccccacagcccggagctgcaggagggtcaggccagcctcggaagtgtagttcccgcaggaacgcatggggcaatttgtcctatgcagatttaatcactcgggctattgagtcgtccccagacaaaagactcacattgagccagatttacgaatggatggtgcgatgcgtgccctactttaaagataagggcgacagcaattcttctgccggatggaagaattcaatcagacataatctgagcctgcactcacgttttatgcgggtgcagaatgagggcactggcaagtcaagctggtggattattaatccggatgggggaaagtccgggaaggctcctaggcgcagagcagtctccatggacaattctaacaagtacactaagagccgcggtcgcgctgccaagaagaaagcagcgttacagacggcaccagaatctgccgatgatagtcctagccaactgagcaagtggcccggttcaccgaccagcagatcttcggatgagctggacgcatggaccgatttcaggtctcgtaccaacagtaacgcctctaccgtttccggacgactgtcgccaatcatggcatccacagaactggatgaagtccaggatgacgatgctcccctgtctcccatgctttattcctcctctgctagcttgtccccttctgtgtctaagccctgtacggtggagctccctcggctcactgacatggcgggaaccatgaaccttaacgatggcctcacagaaaaccttatggatgaccttcttgacaatatcacactacctccatctcaaccaagcccaactggcggactcatgcagaggtcttcttctttcccatataccacaaagggttccggcctggggtccccgaccagttcctttaatagtacagtttttgggccatcctcccttaactctttacgacaatcccctatgcagaccattcaggagaacaaaccagcaactttttcctccatgagccactacggaaaccaaactctgcaggacttactgacgtccgactccctgtctcactctgacgtaatgatgactcagtctgatccactcatgtcacaggcgagcacagccgtgtctgcccagaattccaggcgcaatgtgatgctgcggaatgatcccatgatgagcttcgctgctcaacctaaccaaggatcactcgtaaaccagaaccttctacatcaccagcaccaaacccagggagctcttggtggctcacgagctttgtctaattcggtctccaatatgggcctcagtgagtcctctagcttgggcagcgccaagcatcagcagcagagcccagttagccaatcgatgcagacattgtcagactcacttagcggctcctccctgtactccacctcggccaatctgccggtgatggggcatgaaaagtttcccagcgacctcgatctggacatgttcaacggcagcctggaatgtgacatggaatctataatcaggtctgaactgatggacgctgacgggctcgacttcaattttgactccttgataagtacccagaacgtggtgggcctcaacgttggtaactttacaggcgctaaacaggcatctagccagtcctgggtgcccggttag

SEQ ID NO: 262444 - protein, 426 aa, Artificial Sequence
  derived and/or modified sequence
MARRTEPPDGGWGWVVVLSAFFQSALVFGVLRSFGVFFVEFVAAFEEQAARVSWIASIGIAVQQFGSPVGSALSTKFGPRPVVMTGGILAALGMLLASFATSLTHLYLSIGLLSGSGWALTFAPTLACLSCYFSRRRSLATGLALTGVGLSSFTFAPFFQWLLSHYAWRGSLLLVSALSLHLVACGALLRPPSLAEDPAVGGPRAQLTSLLHHGPFLRYTVALTLINTGYFIPYLHLVAHLQDLDWDPLPAAFLLSVVAISDLVGRVVSGWLGDAVPGPVTRLLMLWTTLTGVSLALFPVAQAPTALVALAVAYGFTSGALAPLAFSVLPELIGTRRIYCGLGLLQMIESIGGLLGPPLSGYLRDVTGNYTASFVVAGAFLLSGSGILLTLPHFFCFSTTTSGPQDLVTEALDTKVPLPKEGLEED

SEQ ID NO: 262445 - DNA, 1281 bp, Artificial Sequence
  derived and/or modified sequence
atggccagaagaaccgagccccccgacggcggctggggctgggtggtggtgctgagcgccttcttccagagcgccctggtgttcggcgtgctgagaagcttcggcgtgttcttcgtggagttcgtggccgccttcgaggagcaggccgccagagtgagctggatcgccagcatcggcatcgccgtgcagcagttcggcagccccgtgggcagcgccctgagcaccaagttcggccccagacccgtggtgatgaccggcggcatcctggccgccctgggcatgctgctggccagcttcgccaccagcctgacccacctgtacctgagcatcggcctgctgagcggcagcggctgggccctgaccttcgcccccaccctggcctgcctgagctgctacttcagcagaagaagaagcctggccaccggcctggccctgaccggcgtgggcctgagcagcttcaccttcgcccccttcttccagtggctgctgagccactacgcctggagaggcagcctgctgctggtgagcgccctgagcctgcacctggtggcctgcggcgccctgctgagaccccccagcctggccgaggaccccgccgtgggcggccccagagcccagctgaccagcctgctgcaccacggccccttcctgagatacaccgtggccctgaccctgatcaacaccggctacttcatcccctacctgcacctggtggcccacctgcaggacctggactgggaccccctgcccgccgccttcctgctgagcgtggtggccatcagcgacctggtgggcagagtggtgagcggctggctgggcgacgccgtgcccggccccgtgaccagactgctgatgctgtggaccaccctgaccggcgtgagcctggccctgttccccgtggcccaggcccccaccgccctggtggccctggccgtggcctacggcttcaccagcggcgccctggcccccctggccttcagcgtgctgcccgagctgatcggcaccagaagaatctactgcggcctgggcctgctgcagatgatcgagagcatcggcggcctgctgggcccccccctgagcggctacctgagagacgtgaccggcaactacaccgccagcttcgtggtggccggcgccttcctgctgagcggcagcggcatcctgctgaccctgccccacttcttctgcttcagcaccaccaccagcggcccccaggacctggtgaccgaggccctggacaccaaggtgcccctgcccaaggagggcctggaggaggactag

SEQ ID NO: 262446 - DNA, 1281 bp, Artificial Sequence
  derived and/or modified sequence
atggctaggaggaccgagccaccagacgggggttggggatgggtcgttgtgttgtcagcgtttttccagtctgccctggtcttcggggtgctccgcagcttcggtgttttcttcgtggagtttgttgccgctttcgaagagcaagcggcgcgcgtgtcatggatcgcatctatcggcatcgcagtgcagcagtttggatcaccggtgggcagcgccctgtcaacaaagttcggacccagaccagtcgttatgacaggagggatcctcgctgctctaggtatgctccttgccagttttgccacaagtctgacccacctgtatctcagcataggcctgttgtctggctcgggatgggccttgaccttcgctcccactcttgcttgcttatcctgttacttctcccgccgaagaagtctcgccaccgggctcgctcttacaggcgttgggctttctagctttacgtttgcccccttctttcagtggctgctgtcgcattacgcgtggcgaggctccctgttgctggtgtcagccctgtcgcttcaccttgtggcatgcggcgcactgctgaggcctccgagccttgccgaagaccctgctgtgggcggcccaagggcccagctaactagcctgctgcatcacgggcctttcctgagatatacagtggcgttgacactcataaacacaggctacttcatcccatacctgcacttagtggcccatctccaggacttagattgggatcctctccccgccgcattcttgctgagcgtagtggctatcagcgatcttgttggtcgtgtggtttcaggctggttaggggatgctgtccctgggcccgtgaccaggctgttgatgctgtggacaactctgactggagtcagcctagccctcttcccagttgctcaggccccaaccgcattagtggctctcgctgtggcctacgggtttacctctggagcccttgcacctcttgctttctcagtgttgccggagctgattggcacccggcgaatctactgcgggttgggacttttacagatgatcgaatctatcggcgggttgttgggacccccactgtctggctacctgcgagacgtcaccggaaattacactgccagctttgtggtcgcaggcgccttcttgttaagtggcagtgggatactgctgacactcccacactttttttgcttctctacgactacatctgggccacaagacctggtgacagaggccctggacacaaaggtccccctgcctaaagaaggccttgaagaagactag

SEQ ID NO: 262447 - DNA, 1281 bp, Artificial Sequence
  derived and/or modified sequence
atggccaggagaacagagcccccagatggcggctggggctgggtggtggtgctgagcgccttcttccagagcgccctggtgtttggagtgctgcggagctttggagtcttctttgtggagtttgtggccgcctttgaggagcaggccgcccgggtgtcctggatcgccagcatcggcattgctgtgcagcagtttggcagccctgtgggcagcgccctgagcaccaagtttggccccaggcctgtggtgatgactggaggcatcctggccgccctgggcatgctgctggccagctttgccaccagcctgacccacctgtacctgagcatcggcctgctgagcggcagcggctgggccctgacctttgcccccaccctggcctgcctgagctgctacttcagcagaagaagaagcctggccaccggcctggccctgactggagtgggcctgagcagcttcacctttgcccccttcttccagtggctgctgagccactacgcctggaggggcagcctgctgctggtgtctgccctgagcctgcacctggtggcctgtggggccctgctgcggccccccagcctggccgaggaccctgctgtgggcggcccccgggcccagctgaccagcctgctgcaccacggccccttcctgcgctacacagtggccctgaccctcatcaacacaggctacttcatcccctacctgcacctggtggcccacctgcaggacctggactgggaccccctgcctgctgccttcctgctgtctgtggtggccatcagtgacctggtgggccgggtggtgtctggctggctgggagatgctgtgcccggccctgtgacccggctgctgatgctgtggaccaccctgactggagtgtccctggccctcttccctgtggcccaggcccccacagccctggtggccctggccgtggcctacggcttcaccagcggggccctggcccccctggccttctctgtgctgcctgagctgattggcacccggcgcatctactgcggcctgggcctgctgcagatgattgagagcattggaggcctgctgggcccccccctgagcggctacctgagagatgtgactggaaactacacagccagctttgtggtggccggggccttcctgctgagcggcagcggcatcctgctgaccctgccccacttcttctgcttcagcaccaccaccagcggcccccaggacctggtgacagaggccctggacaccaaggtgcccctgcccaaggagggcctggaggaggactag

SEQ ID NO: 262448 - DNA, 1281 bp, Artificial Sequence
  derived and/or modified sequence
atggcccggcggaccgagccccccgacggcggctggggctgggtggttgtgctgagtgccttctttcagagcgcactggttttcggggtgcttaggagctttggggtgtttttcgtagagtttgtcgctgcctttgaagagcaggcggccagggtctcttggattgcttccatcggcatcgctgtccagcagtttggcagccctgttgggagcgccctctctactaaatttggacctaggccagtggtcatgacaggcggcatcttagccgccctgggtatgctgctagccagctttgcaacatccttgactcacctctatctctccatcggcctcctaagtggcagtggctgggcattgacttttgctcctactctggcttgtctgtcttgctacttttctagacgtcgctccctcgccacagggctggcactgactggagtgggcctgagcagtttcacatttgcaccattcttccagtggctgttatcccactacgcatggagaggatcacttcttcttgtgagtgcactcagcttgcacctcgtggcgtgcggagctttgctccgcccaccttctcttgccgaggaccctgctgttggtgggcccagggcacagctgaccagtctgcttcaccatggccctttcctgcggtatacagtggccctcacgctcattaacaccggttactttatcccctatctgcacctggtagcccatctacaggacttggattgggacccactgccagctgcattcctactatccgtagtggcaatctcagatctcgtgggccgagtggtatccgggtggctgggagacgctgttcccgggcccgtgacacgccttctgatgctgtggacaacactgactggcgtttctctcgcgctatttccagtcgcgcaggccccgacagccttagtggccctggctgtcgcctacggctttacaagcggagctttggctcctttggcattctctgtcctaccagaacttatcgggacccggcggatctattgcggtttgggcctcctccagatgatagagagcatcggcggacttctgggtccaccgttgagcgggtacctcagggacgtgaccggtaactatactgcctctttcgtggtggctggtgcattcctgctcagtggtagcggtatcctactgacgttgccgcacttcttctgcttttccacgacaactagcgggccccaggatttagtcaccgaagcactcgacaccaaagtgcctctcccaaaggaggggcttgaggaggattag

SEQ ID NO: 262449 - DNA, 1281 bp, Artificial Sequence
  derived and/or modified sequence
atggctcgtcgtacagaacctcccgatggcggttggggctgggtggttgtgctttctgctttcttccagagtgccctagtgttcggcgtccttcggagcttcggagtgtttttcgtggaattcgtggctgccttcgaggaacaggccgctcgagtatcatggattgcctccattggcatcgccgttcagcaattcggaagcccagtgggctcggctctgagtaccaaattcggccctaggcctgtggtcatgaccgggggaatccttgcagcgctgggtatgcttctggcctcattcgccactagcctcacccatctttatttgtcaatcggcctactgtccggaagcggatgggccctgacttttgctccgacactagcctgcctgagttgctacttctcccgtaggagaagcctggcgacaggactggctttgaccggggtcggcctctcgtccttcacatttgcccctttctttcagtggctcctgtcccattacgcatggcgagggtcccttcttcttgtgagcgccctttcactccaccttgtagcttgtggagccctgctgcgtccccctagcctggcagaagacccggctgtcgggggaccacgtgctcagctaacatccttgcttcatcacgggccattcttgcgctacacagtagctttaacactgatcaacacagggtacttcatcccctacctgcatctcgtcgctcaccttcaggatctggactgggacccactgcctgcggctttcctgctttcggtggttgctatctccgacctagtagggagagtcgtcagcggttggctgggcgatgcagttcccggacctgtgacccggctgctcatgctgtggacaaccctgaccggagtgtcacttgccctgtttcctgtggcccaggcccctacagcacttgtggccctagctgttgcttacggatttacgtctggagcccttgcgccactggcgttttcagtgctcccagagctgatcggcacgagaagaatttattgcggcttagggcttctgcagatgattgaaagcatcgggggattattgggaccacctctgagcggctacctgagagatgtaaccggcaactatacagccagttttgtagtggcaggcgcattcttactatcaggatcaggcatccttctgacattgccacatttcttttgcttttccaccactacctcaggtccccaagaccttgtgaccgaggccctggatacaaaggtcccactgccaaaagagggactggaggaggattag

SEQ ID NO: 262450 - DNA, 1663 bp, Artificial Sequence
  derived and/or modified sequence
tctggcccggccagcgcgggccaggtcttcagtcctatatcgccccgccttgggaaaaggtgcaggggcctctcgccgcctcgtcgggcccttcctctctacctgcctctccaacccctctcggccccgagccacccggcagcgggggtgggtgtgcagaggtgcggcgtccagaacccggctcctgcagaggctctgggtggcagcagccctgttaccgcttagatggcgcgcaggacagagccccccgacgggggctggggatgggtggtggtgctctcagcgttcttccagtcggcgcttgtgtttggggtgctccgctcctttggggtcttcttcgtggagtttgtggcggcgtttgaggagcaggcagcgcgcgtctcctggatcgcctccataggaatcgcggtgcagcagtttgggagcccggtaggcagtgccctgagcacgaagttcgggcccaggcccgtggtgatgactggaggcatcttggctgcgctggggatgctgctcgcctcttttgctacttccttgacccacctatacctgagtattgggttgctgtcaggctctggctgggctttgaccttcgctccgaccctggcctgcctgtcctgttatttctctcgccgacgatccctggccaccgggctggcactgacaggcgtgggcctctcctccttcacatttgccccctttttccagtggctgctcagccactacgcctggagggggtccctgctgctggtgtctgccctctccctccacctagtggcctgtggtgctctcctccgcccaccctccctggctgaggaccctgctgtgggtggtcccagggcccaactcacctctctcctccatcatggccccttcctccgttacactgttgccctcaccctgatcaacactggctacttcattccctacctccacctggtggcccatctccaggacctggattgggacccactacctgctgccttcctactctcagttgttgctatttctgacctcgtggggcgtgtggtctccggatggctgggagatgcagtcccagggcctgtgacacgactcctgatgctctggaccaccttgactggggtgtcactagccctgttccctgtagctcaggctcccacagccctggtggctctggctgtggcctacggcttcacatcaggggctctggccccactggccttctccgtgctgcctgaactaatagggactagaaggatttactgtggcctgggactgttgcagatgatagagagcatcggggggctgctggggcctcctctctcaggctacctccgggatgtgacaggcaactacacggcttcttttgtggtggctggggccttccttctttcagggagtggcattctcctcaccctgccccacttcttctgcttctcaactactacctccgggccccaggaccttgtaacagaagcactagatactaaagttcccctacccaaggaggggctggaagaggactgaactccacagagtcaggcccagaaagccaaagcttgacagctccaggtcttctcttgccacgtcttggtctccacagaaccacagtgccttaagattcttgatctgcctccccctagagcaggcctggggctcctgcaatgtgtgtgccaaccctttg

SEQ ID NO: 262451 - protein, 484 aa, Artificial Sequence
  derived and/or modified sequence
MELGPEPPHRRRLLFACSPPPASQPVVKALFGASAAGGLSPVTNLTVTMDQLQGLGSDYEQPLEVKNNSNLQRMGSSESTDSGFCLDSPGPLDSKENLENPMRRIHSLPQKLLGCSPALKRSHSDSLDHDIFQLIDPDENKENLSSNERDSSEPGNFIPLFTPQSPVTATLSDEDDGFVDLLDGENLKNEEETPSCMASLWTAPLVMRTTNLDNRCKLFDSPSLCSSSTRSVLKRPERSQEESPPGSTKRRKSMSGASPKESTNPEKAHETLHQSLSLASSPKGTIENILDNDPRDLIGDFSKGYLFHTVAGKHQDLKYISPEIMASVLNGKFANLIKEFVIIDCRYPYEYEGGHIKGAVNLHMEEEVEDFLLKKPIVPTDGKRVIVVFHCEFSSERGPRMCRYVRERDRLGNEYPKLHYPELYVLKGGYKEFFMKCQSYCEPPSYRPMHHEDFKEDLKKFRTKSRTWAGEKSKREMYSRLKKL

SEQ ID NO: 262452 - DNA, 1455 bp, Artificial Sequence
  derived and/or modified sequence
atggagctgggtcccgagcctccgcaccgaagaaggctgctgtttgcgtgttcgcctccacccgctagccagccagtggtgaaagctctgtttggcgcttctgccgcgggtggtctgtcaccggtcaccaatcttacagtcactatggatcagctgcaagggctgggatctgactatgagcaacccctcgaggtgaaaaataactccaacctgcagaggatggggtcttccgagtctactgacagcggcttctgcctggactctcctggtcctctggattctaaagaaaacctggagaatccgatgagaagaatccacagtctgccacaaaagttgctgggatgttcgcccgccttgaagaggagccactcagactcgcttgaccacgatattttccagctgatcgaccctgacgagaacaaggaaaatctgagctccaatgagagagactcctcagaaccaggcaatttcatcccactatttacccctcaaagcccagtaacagccacacttagtgatgaagatgatggcttcgtggacctgttggacggtgaaaatttgaaaaatgaggaggagaccccgtcttgcatggcaagcttatggactgctcctcttgtgatgaggacaacaaacctggataatcggtgtaaacttttcgatagcccatccctttgctcttctagtactaggagcgtgctaaagcggcccgaaagaagccaggaggaatcccccccgggctctactaagcggcggaagtcaatgtccggcgctagccctaaagagagtacaaaccctgagaaagctcatgaaacactgcatcagagtctgtccctcgcctccagtcctaaggggacgattgagaacatcctcgacaacgatccgcgcgatcttatcggtgacttcagcaaaggctatcttttccatactgttgccgggaagcaccaggatttaaaatatatcagcccagagattatggcatcagtgctgaacgggaaatttgctaaccttattaaggagttcgttattattgattgtcggtatccttacgaatacgagggaggacacataaaaggcgctgtaaatctccacatggaagaggaggtggaagattttctgttaaaaaagcccattgtacccaccgacgggaaaagagtgatcgtcgtctttcattgtgaattcagttctgagcgcggccctagaatgtgtcgttatgttagagaaagggataggttgggcaacgagtatccgaaattgcactaccctgagttatacgtgcttaaagggggttataaagaattctttatgaagtgccaatcctactgcgagccaccttcctacagacctatgcatcatgaggattttaaagaagacttgaagaagtttcggaccaagtcaagaacttgggccggtgaaaagtcaaaacgggagatgtacagtcggttaaaaaagctctag

SEQ ID NO: 262453 - DNA, 1455 bp, Artificial Sequence
  derived and/or modified sequence
atggagctgggccctgagcccccccacagaagaaggctgctgtttgcctgcagccccccaccagccagccagcctgtggtgaaggccctgtttggagccagcgctgctgggggcctgagccctgtgaccaacctgactgtgaccatggaccagctgcagggcctgggcagtgactatgagcagcccctggaggtgaagaacaacagcaacctgcagaggatgggcagcagcgagagcacagacagcggcttctgcctggacagccctggccccctggacagcaaggagaacctggagaaccccatgaggcgcatccacagcctgccccagaagctgctgggctgcagccctgccctgaagaggagccacagcgacagcctggaccatgacatcttccagctgattgatcctgatgagaacaaggagaacctgagcagcaatgaaagagacagcagcgagcccggcaacttcatccccctcttcaccccccagagccctgtgacagccaccctgagtgatgaagatgatggctttgtggacctgctggatggagagaacctgaagaatgaggaggagacccccagctgcatggccagcctgtggacagcccccctggtgatgaggaccaccaacctggacaaccgctgcaagctgtttgacagccccagcctgtgcagcagcagcaccaggtctgtgctgaagaggcctgagaggagccaggaggagagccccccaggcagcaccaagaggaggaagtccatgtctggggccagccccaaggagagcaccaaccctgagaaggcccacgagaccctgcaccagagcctgagcctggccagcagccccaagggcaccatcgagaacatcctggacaatgacccccgggacctgattggagacttcagcaagggctacctgttccacacagtggccggcaagcaccaggacctgaagtacatcagccctgagatcatggcctctgtgctgaatggcaagtttgccaacctgatcaaggagtttgtgatcatcgactgccgctacccctatgaatatgaaggaggccacatcaagggagctgtgaacctgcacatggaggaggaggtggaggacttcctgctgaagaagcccatcgtgcccacagatggcaagagggtcatcgtggtgttccactgtgagttcagcagcgagcggggccccaggatgtgccgctacgtgcgggagcgggaccggctgggcaatgagtaccccaagctgcactacccagagctgtatgtgctgaagggcggctacaaggagttcttcatgaagtgccagagctactgtgagcccccatcctaccggcccatgcaccacgaggacttcaaggaggacctgaagaagttccgcaccaagagcaggacctgggccggggagaagagcaagcgggagatgtacagccggctgaagaagctgtag

SEQ ID NO: 262454 - DNA, 1455 bp, Artificial Sequence
  derived and/or modified sequence
atggagctgggccccgagcccccccaccggcggcggctgctgttcgcctgctccccaccacccgcgagtcaacccgtggttaaggcactttttggcgcgagcgcagcgggcggattgtcccctgtgacgaacttgacggtcaccatggaccagttgcaggggttggggtcagattatgagcaaccactggaagtcaagaataatagtaacctccagaggatgggaagcagtgagtctacagactccggcttctgcttggacagcccagggccactcgactccaaggagaacctggaaaatccaatgaggcggattcactccctaccccaaaaacttctgggctgttctcccgcgctgaaaagaagccattcagatagcctggaccatgatatattccagctaattgatcccgatgaaaacaaggagaacttgagctccaacgaaagggacagctctgaacccggcaatttcatcccactgttcacaccccaatcccccgtgaccgccacactcagcgacgaggacgacgggtttgtcgacctgctcgacggggagaatctcaagaacgaggaggaaaccccaagttgcatggcctccttgtggaccgccccactggtgatgcggacaactaacctggacaatagatgcaaattgttcgatagtccgagcctgtgctcgagctcaacccggagcgtcctgaaacgacccgaaaggtcccaggaagagagtccacctgggagcacaaagcgacgcaagagtatgtctggagcctcccccaaagagtctacaaatccagagaaggcccatgagacacttcatcagtcactgtcgctggctagttcccctaagggaacaatagagaacatattagataatgatcccagagacctgatcggggatttcagcaaagggtatctcttccacacagtcgctggaaaacaccaggacttgaaatacatttcaccggaaattatggcctcagtgctcaacggcaaatttgccaacctgatcaaagagtttgtcattatagactgccggtacccctacgaatacgaaggagggcatatcaagggggctgttaatctgcatatggaggaagaagttgaggacttcctgttaaagaagcctattgttcctacggatgggaaacgagttatcgtagtgttccactgcgaattcagctcagagcggggtccacgtatgtgtcgatatgttcgagagagggatagactcggcaatgaatatcctaaactccactatccggaactttatgtcctgaaaggtggatacaaagagttctttatgaagtgccagagctactgtgaacccccctcctaccggcccatgcatcatgaagacttcaaagaagacttaaagaaattccgaaccaaatctcgcacgtgggcaggagagaaatcaaagagggagatgtactcccgccttaagaagctgtag

SEQ ID NO: 262455 - DNA, 1455 bp, Artificial Sequence
  derived and/or modified sequence
atggagcttggtcctgaacctcctcaccgcaggagactgcttttcgcctgtagcccacctccagcttctcagcccgtggtgaaggctcttttcggagccagcgccgcaggcggactatcccctgttactaatctgacagtgacaatggatcaattgcaagggctcgggtctgattacgagcagcctctagaagtgaaaaacaacagcaacctccagcgaatggggagcagcgagagcacagattccgggttttgcctggattcacccggacctctcgatagtaaggaaaacctggagaatcctatgcggagaattcacagtcttcctcaaaagctgttgggctgcagccccgctctgaagcgtagtcattcagattcattggaccacgacatttttcagctgattgatccggatgagaacaaagagaacctctcctcgaacgaacgggatagcagcgagccgggaaactttatcccgctgtttaccccgcagagtcctgtaacggcaacactgagtgatgaagacgacggttttgtggacttgcttgacggggaaaacttaaagaacgaagaggaaacgcctagttgcatggccagcctgtggactgctcccctggtgatgcgcacgactaatttagacaacagatgcaagctgttcgactctccctctctgtgctctagctctacccgctcggtgctgaaaaggcccgagcggagccaggaggaaagccccccaggctctacaaaacgtcgcaagagcatgtccggcgctagccctaaggagagcactaatcctgagaaggcgcacgagacactccaccaaagcctcagtctcgcttcttcacccaaagggaccatcgaaaacatcttggacaacgaccccagagacctcatcggagactttagcaaaggatacctgtttcacactgtggcgggaaaacatcaggatctaaagtacattagcccagagatcatggcaagcgtgttgaacggcaaattcgcgaatttgattaaagagttcgtaattatcgattgtcgatacccttatgagtatgagggtggccacatcaagggcgctgtcaatcttcacatggaggaagaagtggaggattttttgctcaaaaaaccaatcgtgccaactgacggaaaacgggtgattgttgtgtttcattgcgagttcagtagtgaaaggggccctaggatgtgtaggtacgtgagggaaagggaccggctgggcaacgaatatccaaagctacactacccggagctgtacgtattgaaagggggatataaggagtttttcatgaaatgtcagagctattgcgagcccccttcttatcgccctatgcaccacgaagattttaaagaggatctgaaaaaattcagaaccaagtccaggacgtgggcaggagaaaagagtaaacgggaaatgtactctcgactcaaaaaactttag

SEQ ID NO: 262456 - DNA, 3663 bp, Artificial Sequence
  derived and/or modified sequence
gtcggcttggttttctgctacccggagctgggcaagcgggtgggagaacagcgaagacagcgtgagcctgggccgttgcctcgaggctctcgcccggcttctcttgccgacccgccacgtttgtttggatttaatcttcaggttgccggcgcccgcccgcccgctggcctcgcggtgtgagagggaagcacccgtgcctgtggctggtggctggcgcctggagggtccgcacacccgcccggccgcgccgcttgcccgcggcagccgcgtccctgaaccgcggagtcgtgtttgtgtttgacccgcgggcgccggtggcgcgcggccgaggccggtgtcggcggggcggggcggtcgcggcggaggcagaggaagagggagcgggagctctgcgaggccgggcgccgccatggaactgggcccggagcccccgcaccgccgccgcctgctcttcgcctgcagcccccctcccgcgtcgcagcccgtcgtgaaggcgctatttggcgcttcagccgccgggggactgtcgcctgtcaccaacctgaccgtcactatggaccagctgcagggtctgggcagtgattatgagcaaccactggaggtgaagaacaacagtaatctgcagagaatgggctcctccgagtcaacagattcaggtttctgtctagattctcctgggccattggacagtaaagaaaaccttgaaaatcctatgagaagaatacattccctacctcagaagctgttgggatgtagtccagctctgaagaggagccattctgattctcttgaccatgacatctttcagctcatcgacccagatgagaacaaggaaaatctttcctcaaatgaaagagatagcagtgaaccagggaatttcattcctctttttacaccccagtcacctgtgacagccactttgtctgatgaggatgatggcttcgtggaccttctcgatggagagaatctgaagaatgaggaggagaccccctcgtgcatggcaagcctctggacagctcctctcgtcatgagaactacaaaccttgacaaccgatgcaagctgtttgactccccttccctgtgtagctccagcactcggtcagtgttgaagagaccagaacgatctcaagaggagtctccacctggaagtacaaagaggaggaagagcatgtctggggccagccccaaagagtcaactaatccagagaaggcccatgagactcttcatcagtctttatccctggcatcttcccccaaaggaaccattgagaacattttggacaatgacccaagggaccttataggagacttctccaagggttatctctttcatacagttgctgggaaacatcaggatttaaaatacatctctccagaaattatggcatctgttttgaatggcaagtttgccaacctcattaaagagtttgttatcatcgactgtcgatacccatatgaatacgagggaggccacatcaagggtgcagtgaacttgcacatggaagaagaggttgaagacttcttattgaagaagcccattgtacctactgatggcaagcgtgtcattgttgtgtttcactgcgagttttcttctgagagaggtccccgcatgtgccggtatgtgagagagagagatcgcctgggtaatgaataccccaaactccactaccctgagctgtatgtcctgaaggggggatacaaggagttctttatgaaatgccagtcttactgtgagccccctagctaccggcccatgcaccacgaggactttaaagaagacctgaagaagttccgcaccaagagccggacctgggcaggggagaagagcaagagggagatgtacagtcgtctgaagaagctctgagggcggcaggaccagccagcagcagcccaagcttccctccatccccctttaccctctttgctgcagagaaacttaagcaaaggggacagctgtgtgacatttggagagggggcctgggacttccatgccttaaacctacctcccacactcccaaggttggagcccagggcatcttgctggctacgcctcttctgtccctgttagacgtcctccgtccatatcagaactgtgccacaatgcagttctgagcaccgtgtcaagctgctctgagccacagtgggatgaaccagccggggccttatcgggctccagccatctcatgaggggagaggagacggaggggagtagagaagttacacagaaatgctgctggccaaatagcaaagacaacctgggaaggaaaggtctttgtgggataatccatatgtttaatttattcaacttcatcaatcactttattttatttttttttctaactcctggagacttattttactgcttcattaggttgaaatactgccattctaggtagggttttattatcccagggactacctcggcttttaatttaaaaaaaaaaaagaagtgggtaagaaaatgcaaacctgttataagttatcggacagaaagctaggtgctctgtcacccccaggaggcgctgtggtactggggctgctgctatttaagccaagaactgaggtcctggtgagagcgttggacccaggcttggctgcctgacataagctaaatctcccagacccaccactggctaccgatatctatttggtgggaggtgtggccctgttcttcctcaccccagttccatgacattggctggtataggagccacagtcaggaaagcacttgaggcagcatctgttgggccacccccggctcagtgctggaatgttgcagtgtaggtttcccagggaaggggggtgggggtaggtgggctccacaggatgggggaggagcatgtccactgagtatcttccttatgttgctgtgatattgatagcttttattttctaatttttaaaaaatggtcatattatgagtcaaagagtatcaaatcagtgttggatggaccacccaagggtgaggagaggggctggaagccctgggcattaggagaagggagtgggtgctggcatggacatgactggatagaattttctcaggagggagcttggtggattttgaaggtaaaactttctgggtttatcatgttttaattttagagacagggagtgatgaatcatcaccggttgtccccttatctaactccataaaagtgggaatttcaaaagaacacctcatccaaggagctggggcagacttcattgattctagagagacctgtttcagtgcctactcatccctgccctctggtgccagcctccttaccatcacggcttcactgaggtgtaggtgggtttttcttaaacaggagacagtctctcccctcttacctcaacttcttggggtgggaatcagtgatactggagatggctagttgctgtgttacgggtttgagttacatttggctataaaacaatcttgttgggaaaaatgtgggggagaggacttcttcctacacgcgcattgagacagattccaactggttaatgatattgtttgtaagaaagagattctgttggttgactgcctaaagagaaaggtgggatggccttcagattataccagcttagctagcattactaaccaactgttggaagctctgaaaataaaagatcttgaacccatgctctctgcctagttcttgatggatttaagga

SEQ ID NO: 262457 - DNA, 1455 bp, Artificial Sequence
  derived and/or modified sequence
atggagctgggccccgagcccccccacagaagaagactgctgttcgcctgcagccccccccccgccagccagcccgtggtgaaggccctgttcggcgccagcgccgccggcggcctgagccccgtgaccaacctgaccgtgaccatggaccagctgcagggcctgggcagcgactacgagcagcccctggaggtgaagaacaacagcaacctgcagagaatgggcagcagcgagagcaccgacagcggcttctgcctggacagccccggccccctggacagcaaggagaacctggagaaccccatgagaagaatccacagcctgccccagaagctgctgggctgcagccccgccctgaagagaagccacagcgacagcctggaccacgacatcttccagctgatcgaccccgacgagaacaaggagaacctgagcagcaacgagagagacagcagcgagcccggcaacttcatccccctgttcaccccccagagccccgtgaccgccaccctgagcgacgaggacgacggcttcgtggacctgctggacggcgagaacctgaagaacgaggaggagacccccagctgcatggccagcctgtggaccgcccccctggtgatgagaaccaccaacctggacaacagatgcaagctgttcgacagccccagcctgtgcagcagcagcaccagaagcgtgctgaagagacccgagagaagccaggaggagagcccccccggcagcaccaagagaagaaagagcatgagcggcgccagccccaaggagagcaccaaccccgagaaggcccacgagaccctgcaccagagcctgagcctggccagcagccccaagggcaccatcgagaacatcctggacaacgaccccagagacctgatcggcgacttcagcaagggctacctgttccacaccgtggccggcaagcaccaggacctgaagtacatcagccccgagatcatggccagcgtgctgaacggcaagttcgccaacctgatcaaggagttcgtgatcatcgactgcagatacccctacgagtacgagggcggccacatcaagggcgccgtgaacctgcacatggaggaggaggtggaggacttcctgctgaagaagcccatcgtgcccaccgacggcaagagagtgatcgtggtgttccactgcgagttcagcagcgagagaggccccagaatgtgcagatacgtgagagagagagacagactgggcaacgagtaccccaagctgcactaccccgagctgtacgtgctgaagggcggctacaaggagttcttcatgaagtgccagagctactgcgagccccccagctacagacccatgcaccacgaggacttcaaggaggacctgaagaagttcagaaccaagagcagaacctgggccggcgagaagagcaagagagagatgtacagcagactgaagaagctgtag

SEQ ID NO: 262458 - protein, 612 aa, Artificial Sequence
  derived and/or modified sequence
MKATWIRLLKRAKGGRLKNSDICGSADSYTSRPSDSDVSLEEDREAVRREAERQAQAQLEKAKTKPVAFAVRTNVSYSAAHEDDVPVPGMAISFEAKDFLHVKEKFNNDWWIGRLVKEGCEIGFIPSPVKLENMRLQHEQRAKQGKFYSSKSGGNSSSSLGDIVPSSRKSTPPSSAIDIDATGLDAEENDIPANHRSPKPSANSVTSPHSKEKRMPFFKKTEHTPPYDVVPSMRPVVLVGPSLKGYEVTDMMQKALFDFLKHRFEGRISITRVTADISLAKRSVLNNPSKHAIIERSNTRSSLAEVQSEIERIFELARTLQLVVLDADTINHPAQLSKTSLAPIIVYVKISSPKVLQRLIKSRGKSQAKHLNVQMVAADKLAQCPPELFDVILDENQLEDACEHLADYLEAYWKATHPPSSSLPNPLLSRTLATSSLPLSPTLASNSQGSQGDQRTDRSAPIRSASQAEEEPSVEPVKKSQHRSSSSAPHHNHRSGTSRGLSRQETFDSETQESRDSAYVEPKEDYSHDHVDHYASHRDHNHRDETHGSSDHRHRESRHRSRDVDREQDHNECNKQRSRHKSKDRYCEKDGEVISKKRNEAGEWNRDVYIRQ

SEQ ID NO: 262459 - DNA, 1839 bp, Artificial Sequence
  derived and/or modified sequence
atgaaagcaacatggattcggttgttaaagagagctaaagggggccgcttaaagaactctgatatctgtgggtccgctgactcttacacaagtaggccgagtgattcagacgtctcgctggaggaggacagggaggcagtgcgacgcgaggcagaaagacaggcccaggctcagcttgagaaggctaaaaccaagcccgtggcgtttgctgtacgcacgaacgtatcgtattctgccgcccatgaagatgacgtcccggtgcccggcatggcgatctcatttgaggctaaggattttctgcatgtgaaagagaaattcaacaatgactggtggatcggccgccttgtgaaggaagggtgtgaaattgggtttatcccctctcctgtgaagctcgaaaatatgcggcttcagcacgagcaaagagctaagcaggggaagttctattcttcaaaaagcggtggaaattcctcatctagcctgggggatatcgtgcccagctctcgcaagtcaaccccccctagctcagctatcgacatagatgctaccgggttggacgccgaagaaaacgacatccctgccaatcaccgatcacctaagccatccgccaactcagtcacctctcctcattcaaaagaaaaacgaatgccctttttcaaaaaaactgagcacacacccccatatgatgtggtgccatccatgcgtccagtcgtacttgtcggcccatcgctaaaggggtacgaagttaccgacatgatgcagaaagccctttttgatttcctaaaacatcgctttgaagggcgtattagcatcaccagagtgaccgcggatatctccctggccaagcgttcagttctgaataatccctcaaaacacgcgattatcgagaggagtaacacgaggagctcgttagcggaggtgcaatcagagatcgagcgtatcttcgaactcgcgcggaccttacaattagtggtgctcgacgccgacaccataaaccacccagcccaattgagtaagactagcctcgcccccattatcgtgtatgtgaaaatcagcagccctaaggttctgcagcggctgattaaatctcggggcaaaagccaggccaaacacctaaatgtccagatggttgcggccgataaactggcacaatgcccaccagaattgtttgacgtgattcttgacgaaaaccagttagaggatgcgtgtgaacacctcgccgactatctcgaagcttactggaaagccacacacccaccgagcagttctcttcccaatcccttgctgagccggacactggccacaagctcactgcccctgagcccaacactcgcctcaaatagtcaggggagtcagggtgatcaacgcacagacagaagtgcgccaattcgctccgctagccaagctgaggaggaaccctctgtggagccagtaaagaagtcccagcatcgctcctcgtcaagtgctccacaccataatcatcgatcagggactagcagaggtctgagccggcaggaaacattcgacagcgagacacaggaaagccgtgatagcgcttacgtcgaacctaaagaggattactcccacgatcacgtcgatcattacgctagtcaccgagaccacaatcacagggacgaaacacacggttctagcgaccaccgacaccgagaaagtagacaccggagccgtgacgtggatagagaacaggatcacaatgagtgtaataagcagcgctctcgccataagtcaaaggaccgttactgcgagaaggacggggaggtgatttccaaaaagcgcaacgaagcgggggagtggaatcgggacgtgtacatcagacaatag

SEQ ID NO: 262460 - DNA, 1839 bp, Artificial Sequence
  derived and/or modified sequence
atgaaggccacctggatccggctgctgaagagggccaagggcggccgcctgaagaacagcgacatctgtggcagcgctgacagctacaccagccggcccagcgacagtgatgtgtccctggaggaggaccgggaggccgtgcggcgggaggccgagcggcaggcccaggcccagctggagaaggccaagaccaagcctgtggcctttgctgtgaggaccaacgtgtcctacagcgctgcccatgaagatgatgtgcctgtgcccggcatggccatcagctttgaggccaaggacttcctgcacgtgaaggagaagttcaacaatgactggtggattggccgcctggtgaaggagggctgtgagatcggcttcatccccagccctgtgaagctggagaacatgaggctgcagcacgagcagagggccaagcagggcaagttctacagcagcaagagcggcggcaacagcagcagcagcctgggggacatcgtgcccagcagcaggaagagcaccccacccagcagcgccattgatattgatgccaccggcctggatgctgaggagaatgacatcccagccaaccacaggagccccaagcccagcgccaacagcgtgaccagcccccacagcaaggagaagaggatgcccttcttcaagaagacagagcacaccccaccctatgatgtggtgcccagcatgaggcctgtggtgctggtgggccccagcctgaagggctatgaggtgacagacatgatgcagaaggccctgtttgacttcctgaagcacagatttgagggccgcatcagcatcaccagggtgacagctgacatcagcctggccaagaggtctgtgctgaacaaccccagcaagcacgccatcatcgagaggagcaacaccaggagcagcctggccgaggtgcagagcgagattgaaagaatttttgagctggcccggaccctgcagctggtggtgctggatgctgacaccatcaaccacccagcccagctgagcaagaccagcctggcccccatcatcgtgtatgtgaagatcagcagccccaaggtgctgcagaggctcatcaagagccggggcaagagccaggccaagcacctgaatgtgcagatggtggccgctgacaagctggcccagtgccccccagagctgtttgatgtgatcctggatgagaaccagctggaggatgcctgtgagcacctggccgactacctggaggcctactggaaggccacccacccccccagcagcagcctgcccaaccccctgctgagcaggaccctggccaccagcagcctgcccctgagccccaccctggccagcaacagccagggcagccagggcgaccagaggacagacagaagtgcccccatccgcagcgccagccaggccgaggaggagcccagcgtggagcctgtgaagaagagccagcacaggagcagcagcagcgccccccaccacaaccacaggagcggcaccagccggggcctgagccggcaggagacctttgattctgagacccaggagagccgggacagcgcctacgtggagcccaaggaggactacagccatgaccacgtggaccactacgccagccaccgggaccacaaccacagagatgagacccacggcagcagtgaccaccgccaccgggagagccgccacaggagcagagatgtggaccgggagcaggaccacaatgaatgcaacaagcagaggagccgccacaagagcaaggaccgctactgtgagaaggatggagaggtgatcagcaagaagagaaatgaagctggggagtggaacagagatgtgtacatccggcagtag

SEQ ID NO: 262461 - DNA, 1839 bp, Artificial Sequence
  derived and/or modified sequence
atgaaggccacctggatccggctgctgaagcgggccaagggcggcaggctgaaaaacagtgatatatgcggaagtgctgatagctacacatccaggccgagcgactcagacgtgtctctggaggaggaccgtgaagccgtacggcgcgaggcggagaggcaggcccaggcccagttggagaaggccaagaccaaacccgtcgctttcgccgttcggaccaatgtatcctacagtgctgctcacgaagatgacgttccagtgcctggcatggcaatcagttttgaggcgaaagacttccttcacgtcaaagaaaagtttaataatgattggtggattgggcgactggtaaaagaagggtgcgagatcggcttcatcccctcccctgttaagctggagaatatgcgcttacagcatgagcagcgggccaagcagggaaaattttactcttcaaagagcggaggcaattccagttctagccttggggacatcgtcccctcttcaaggaaatctacaccgccgtcttccgcgatcgatatcgatgcgaccggcctggatgcagaggaaaacgatattcctgctaaccacaggtcccccaaaccatccgcaaatagcgtcaccagccctcatagcaaggagaagaggatgcctttcttcaaaaaaactgaacacacacctccttatgatgtggttccctccatgaggcctgtggtgctggtcggtcctagcctgaaaggatacgaggtgaccgacatgatgcagaaagctctcttcgattttttaaagcaccgatttgaaggcagaatctcaattactagagtgacagccgatatttctttagccaagaggtccgtgttgaataacccttccaaacatgcgatcattgaacgtagcaacacgcgatcatctcttgctgaagtgcagagcgaaattgagcggatattcgagctcgccaggaccctgcagctagtggttctggacgcggacacaattaaccatcccgcgcaactctccaaaacaagcctcgcacctatcatcgtatatgtaaagatcagttctcccaaagtccttcaacgcctgataaaaagtcgggggaaatcacaggcaaagcacttgaacgtgcagatggtcgccgccgataagctggcccagtgcccgcccgagttatttgacgttatactcgatgagaatcagcttgaggatgcatgtgaacacctggctgactatcttgaggcatactggaaagccacacaccccccaagtagctccctaccgaatcctcttctcagcaggaccttggccacctcgtccttgccgctgtccccaacactcgcgtctaattcccaaggatcccagggagatcagcgcacggatcgcagcgccccaattcggtccgcctcccaggctgaagaggagccttctgtggaacctgtaaaaaagtcccagcacaggagcagttccagtgcaccccaccacaaccataggagcgggacatcccggggattgtccaggcaggagacatttgattcagagacacaagagagtcgagattcggcatatgtcgaacctaaggaggactatagccacgatcatgtcgaccattacgcatcccatcgcgatcacaatcatagggacgaaactcatggatcctcggatcatcgacatcgggagtcccgccatcgcagtagagacgttgatagggagcaggatcataacgagtgcaacaagcaacggagccgccacaaaagtaaagaccgctactgcgagaaggatggagaagtaatctccaaaaaacgtaatgaagctggcgagtggaaccgagacgtctacattcgccagtag

SEQ ID NO: 262462 - DNA, 1839 bp, Artificial Sequence
  derived and/or modified sequence
atgaaggcgacatggatcagactgttgaagagggccaagggtggcagacttaaaaacagtgacatctgcgggagtgctgatagctacacttccaggccgtctgattcagatgtgagcctggaggaagatcgggaggccgttcgtcgagaggccgagaggcaggctcaggcccagctagaaaaagcgaagacaaagcccgtagcatttgctgtgcgcacaaacgtttcttactccgcagcccacgaagatgatgtgccagtgcccggaatggccatttcatttgaggctaaggactttctgcacgtgaaggagaaatttaataacgattggtggatcggtcgactggtgaaggaggggtgcgagatcgggtttatcccatcccctgtaaagctggagaatatgaggctacagcatgaacagagagccaaacagggcaaattctactctagtaaaagtgggggaaactcatcctcgtcgttgggcgacattgttccatcctcccgcaaatctactcctcctagttcggccatcgatatcgacgccactggtctggacgcagaagaaaatgatataccggctaaccacagatctcctaaaccttctgcaaattccgtgacctcgccccattctaaagaaaagcgcatgcccttctttaaaaagactgagcacactcccccatacgacgtggttccctcaatgaggcccgttgtgttagtcggcccatccctgaagggttacgaagttactgacatgatgcagaaggcgctgttcgactttctgaagcaccgttttgagggaaggatctccataactcgggtcacggcagacatctccctggccaaacgctccgtactgaataaccccagtaaacatgcaatcatagagaggagcaataccagatcaagcttagccgaagtccagtctgagatcgagcggatcttcgagttagcgagaacactgcagttggtcgtactggacgctgacaccattaaccaccctgcccagttatctaaaacttccctggcgccaatcatagtgtacgttaaaatttccagtcccaaggttctccagcgtttaatcaaatccagaggcaagtcacaagctaagcacctgaacgttcagatggtagctgccgacaagctcgcacagtgtcctcccgaactttttgatgtgattctggacgagaaccaactggaagatgcatgtgagcacctggccgattacctggaagcctactggaaggcaacacatccgccttcaagctcgctgcctaatccactgcttagtcgtaccctcgccaccagtagtcttccactttcacctactttagcaagtaacagccagggctcccaaggcgatcaaagaacagaccgatctgcacctattcgaagcgcctcccaggctgaagaagagccaagtgtcgagccagtgaaaaagtcccagcaccgctcatctagctccgctcctcaccataaccaccggtcaggcacctcgagaggtcttagcagacaggaaacatttgatagcgagactcaagaatctcgggattctgcatacgtagagccaaaagaagactacagccatgatcatgttgatcactatgcatcccatagggaccacaatcaccgtgatgagacacacggcagttctgatcaccgccaccgcgagtcccggcatcgatcacgcgacgtggacagagagcaggatcataacgaatgtaataaacagagaagccggcacaagagcaaggatagatattgcgagaaggacggcgaagtaatttccaaaaagcgaaacgaggctggtgaatggaacagagacgtttacatccgtcagtag

SEQ ID NO: 262463 - DNA, 3461 bp, Artificial Sequence
  derived and/or modified sequence
gtgtgttttcagcccctcctggaatgggaaaataagaatctccctggatgggagtcctctggggcagggagtgaaagccccggaggcagaaagggacggagaacaggggcttgcccagagcatggataggaaaggagctggggttctccggggctcagcgcgcactgagaacctgtgcccggggctgcagctgcggacgataaaggcgctgtctggctcatgaaggccacctggatcaggcttctgaaaagagccaagggaggaaggctgaagaattctgatatctgtggttcggcagactcctacactagccgtccatccgattccgatgtatctctggaggaggaccgggaggcagtgcgcagagaagcggagcggcaggcccaggcacagttggaaaaagcaaagacaaagcccgttgcatttgcggttcggacaaatgtcagctacagtgcggcccatgaagatgatgttccagtgcctggcatggccatctcattcgaagcaaaagattttctgcatgttaaggaaaaatttaacaatgactggtggatagggcgattggtaaaagaaggctgtgaaatcggattcattccaagcccagtcaaactagaaaacatgaggctgcagcatgaacagagagccaagcaagggaaattctactccagtaaatcaggaggaaattcatcatccagtttgggtgacatagtacctagttccagaaaatcaacacctccatcatctgctatagacatagatgctactggcttagatgcagaagaaaatgatattccagcaaaccaccgctcccctaaacccagtgcaaacagtgtaacgtcaccccactccaaagagaaaagaatgcccttctttaagaagacagagcacactcctccgtatgatgtggtaccttccatgcgaccagtggtcctagtgggcccttctctgaagggctacgaggtcacagatatgatgcaaaaagcgctgtttgattttttaaaacacagatttgaagggcggatatccatcacaagggtcaccgctgacatctcgcttgccaaacgctcggtattaaacaatcccagtaagcacgcaataatagaaagatccaacacaaggtcaagcttagcggaagttcagagtgaaatcgaaaggatttttgaacttgcaagaacattgcagttggtggtccttgacgcggatacaattaatcatccagctcaactcagtaaaacctccttggcccctattatagtatatgtaaagatttcttctcctaaggttttacaaaggttaataaaatctcgagggaaatctcaagctaaacacctcaacgtccagatggtagcagctgataaactggctcagtgtcctccagagctgttcgatgtgatcttggatgagaaccagcttgaggatgcctgtgagcaccttgccgactatctggaggcctactggaaggccacccatcctcccagcagtagcctccccaaccctctccttagccgtacattagccacttcaagtctgcctcttagccccaccctagcctctaattcacagggttctcaaggtgatcagaggactgatcgctccgctcctatccgttctgcttcccaagctgaagaagaacctagtgtggaaccagtcaagaaatcccagcaccgctcttcctcctcagccccacaccacaaccatcgcagtgggacaagtcgcggcctctccaggcaagagacatttgactcggaaacccaggagagtcgagactctgcctacgtagagccaaaggaagattattcccatgaccacgtggaccactatgcctcacaccgtgaccacaaccacagagacgagacccacgggagcagtgaccacagacacagggagtcccggcaccgttcccgggacgtggatcgagagcaggaccacaacgagtgcaacaagcagcgcagccgtcataaatccaaggatcgctactgtgaaaaggatggagaagtgatatcaaaaaaacggaatgaggctggggagtggaacagggatgtttacatccgccaatgagttttgcccgtttgtgtttttttttttttttttttgaagtcttgtataactaacagcatccccaaaacaaagtctttggggtctacactgcaatcatatgtgatctgtcttgtaatattttgtattattgctgttgcttgaatagcaatagcatggatagagtattgagatactttttcttttgtaagtgctacataaattggcctggtatggctgcagtcctccggttgcatactggactcttcaaaaactgttttgggtagctgccacttgaacaaaatctgttgccacccaggtgatgttagtgttttaagaaatgtagttgatgtatccaacaagccagaatcagcacagataaaaagtggaatttcttgtttctccagatttttaatacgttaatacgcaggcatctgatttgcatattcattcatggaccactgtttcttgcttgtacctctggctgactaaatttggggacagattcagtcttgccttacacaaaggggatcataaagttagaatctattttctatgtactagtactgtgtactgtatagacagtttgtaaatgttatttctgcaaacaaacaccttcttattatatatataatatatatatatatcagtttgatcacactattttagagtcttaatgccaagtcagcagatttgctttatgaattacagggactagaaatgcccacattcaggaaatttgtaataacattgtctagacacctatcctcattctagtagaaagtgtgtacatactgtaaatatgtgtgattgcttgacttgaaaaggtttgaattctgaatgttataccatccttgtaagtaagtttgtaatttccaccataaattatggtaaatataaaactccagaggttgttctactccatacagttcacactgattgtgacacattcttagtagctagtgtctgttctagtcactgcactggagtctacgagccggaactcgctatatgcacgtgtgtgtgtccgtatgtaagaaagtgtgcaccgagtgactgaatggttgagatgaattggaatgctgaagactaacgaagaaactagagactgatatcgagcattctgcccacctcgctctgtatttaattaattgtgctatatgttgctttaacaacccattgagcagtcagggaatgtgagtaagcttgctgccaaaggtaactaggaaagcattcatctgctgcctccttgtttttgctcctagagagtgaaaatacaggcaattttactgtgagtgtttcactggaaatgtacaatctttgtgtgttagagtatttgttttagtaagaaatgtttacacagcttgtggaattatttcgtgggaaaataaatttttataacttctcccacttcaatttctaacctt

SEQ ID NO: 262464 - DNA, 1839 bp, Artificial Sequence
  derived and/or modified sequence
atgaaggccacctggatcagactgctgaagagagccaagggcggcagactgaagaacagcgacatctgcggcagcgccgacagctacaccagcagacccagcgacagcgacgtgagcctggaggaggacagagaggccgtgagaagagaggccgagagacaggcccaggcccagctggagaaggccaagaccaagcccgtggccttcgccgtgagaaccaacgtgagctacagcgccgcccacgaggacgacgtgcccgtgcccggcatggccatcagcttcgaggccaaggacttcctgcacgtgaaggagaagttcaacaacgactggtggatcggcagactggtgaaggagggctgcgagatcggcttcatccccagccccgtgaagctggagaacatgagactgcagcacgagcagagagccaagcagggcaagttctacagcagcaagagcggcggcaacagcagcagcagcctgggcgacatcgtgcccagcagcagaaagagcaccccccccagcagcgccatcgacatcgacgccaccggcctggacgccgaggagaacgacatccccgccaaccacagaagccccaagcccagcgccaacagcgtgaccagcccccacagcaaggagaagagaatgcccttcttcaagaagaccgagcacacccccccctacgacgtggtgcccagcatgagacccgtggtgctggtgggccccagcctgaagggctacgaggtgaccgacatgatgcagaaggccctgttcgacttcctgaagcacagattcgagggcagaatcagcatcaccagagtgaccgccgacatcagcctggccaagagaagcgtgctgaacaaccccagcaagcacgccatcatcgagagaagcaacaccagaagcagcctggccgaggtgcagagcgagatcgagagaatcttcgagctggccagaaccctgcagctggtggtgctggacgccgacaccatcaaccaccccgcccagctgagcaagaccagcctggcccccatcatcgtgtacgtgaagatcagcagccccaaggtgctgcagagactgatcaagagcagaggcaagagccaggccaagcacctgaacgtgcagatggtggccgccgacaagctggcccagtgcccccccgagctgttcgacgtgatcctggacgagaaccagctggaggacgcctgcgagcacctggccgactacctggaggcctactggaaggccacccacccccccagcagcagcctgcccaaccccctgctgagcagaaccctggccaccagcagcctgcccctgagccccaccctggccagcaacagccagggcagccagggcgaccagagaaccgacagaagcgcccccatcagaagcgccagccaggccgaggaggagcccagcgtggagcccgtgaagaagagccagcacagaagcagcagcagcgccccccaccacaaccacagaagcggcaccagcagaggcctgagcagacaggagaccttcgacagcgagacccaggagagcagagacagcgcctacgtggagcccaaggaggactacagccacgaccacgtggaccactacgccagccacagagaccacaaccacagagacgagacccacggcagcagcgaccacagacacagagagagcagacacagaagcagagacgtggacagagagcaggaccacaacgagtgcaacaagcagagaagcagacacaagagcaaggacagatactgcgagaaggacggcgaggtgatcagcaagaagagaaacgaggccggcgagtggaacagagacgtgtacatcagacagtag

SEQ ID NO: 262465 - protein, 632 aa, Artificial Sequence
  derived and/or modified sequence
MNQGSGLDLLKISYGKGARRKNRFKGSDGSTSSDTTSNSFVRQGSADSYTSRPSDSDVSLEEDREAVRREAERQAQAQLEKAKTKPVAFAVRTNVSYSAAHEDDVPVPGMAISFEAKDFLHVKEKFNNDWWIGRLVKEGCEIGFIPSPVKLENMRLQHEQRAKQGKFYSSKSGGNSSSSLGDIVPSSRKSTPPSSAIDIDATGLDAEENDIPANHRSPKPSANSVTSPHSKEKRMPFFKKTEHTPPYDVVPSMRPVVLVGPSLKGYEVTDMMQKALFDFLKHRFEGRISITRVTADISLAKRSVLNNPSKHAIIERSNTRSSLAEVQSEIERIFELARTLQLVVLDADTINHPAQLSKTSLAPIIVYVKISSPKVLQRLIKSRGKSQAKHLNVQMVAADKLAQCPPELFDVILDENQLEDACEHLADYLEAYWKATHPPSSSLPNPLLSRTLATSSLPLSPTLASNSQGSQGDQRTDRSAPIRSASQAEEEPSVEPVKKSQHRSSSSAPHHNHRSGTSRGLSRQETFDSETQESRDSAYVEPKEDYSHDHVDHYASHRDHNHRDETHGSSDHRHRESRHRSRDVDREQDHNECNKQRSRHKSKDRYCEKDGEVISKKRNEAGEWNRDVYIRQ

SEQ ID NO: 262466 - DNA, 1899 bp, Artificial Sequence
  derived and/or modified sequence
atgaatcagggatcaggattggatctcctcaaaatttcttacggaaaaggagcacgaagaaagaatcgattcaagggctctgatggatcgaccagttccgatacaacttcaaattcatttgtgcggcagggatccgcagatagctacacatctcgcccttcagactctgatgtttcactggaggaggacagagaggccgtccgccgcgaagccgagcgccaagcccaggcacaactcgagaaggccaaaaccaaacccgtagcatttgctgttagaactaatgtttcatattccgcagcacacgaggacgacgtgccagtgccggggatggcaattagctttgaggcaaaagatttcctgcatgtcaaagagaaatttaataatgattggtggatcggaagacttgtcaaagaaggctgcgaaattggttttattcccagcccggtcaagcttgagaacatgcggctacagcatgagcagagggccaaacagggcaagttttactcttccaaaagcggaggcaactcttccagcagcctcggtgacatcgtgccaagctctcgtaagagcacaccgccctcaagcgctatcgacattgatgctactggccttgatgcggaagaaaatgatatacccgccaaccatcggagcccaaagcccagcgctaacagtgtcaccagccctcacagcaaggagaaacggatgccgttcttcaagaaaacagagcacactccaccttacgatgtggtaccaagcatgagacctgttgtactggtgggaccttcgctgaaggggtacgaggtgaccgatatgatgcagaaagctctttttgactttcttaaacacagattcgaagggcgcatcagtattactagggtaaccgctgacattagcctggccaagcgaagcgtcctgaacaacccttctaagcatgcgatcattgagagatccaacacacgttcgtccttggcagaggtgcagagtgagattgaacggatttttgaactggcaagaacactccagttagtggtcttagatgcggacaccataaatcacccagcccaattatctaagacatcgctagcgcccattatcgtgtatgtcaaaatctcttcacctaaggtgctgcagaggcttattaagtcccgaggaaagtctcaggccaagcacctcaatgtgcaaatggtcgccgccgacaaattggcccagtgccctcccgaattatttgatgtgattctggatgagaatcagctggaggacgcttgtgaacacctggccgactatctcgaggcgtactggaaggcaacgcatcccccttcgtcgtcgctgcctaaccccttgctgagcaggaccctcgccacatcctcattacccctgtccccaactctggccagcaactcacagggctctcagggagaccagcgaactgacaggtctgccccaattagatcagccagccaggccgaggaggaaccctcagttgagccagtaaaaaagagtcaacaccggtcttcctctagtgcccctcatcacaatcacagaagcggcacttctaggggactgagtcgccaggaaactttcgactctgagactcaggagtccagagacagtgcctacgtagaacctaaagaagattacagccatgaccacgtggatcactatgcgtcacacagagatcataaccaccgcgatgaaacgcacgggtcatccgaccaccgccacagagaaagtcgtcatcgttcaagagatgtcgatagagaacaggaccataatgaatgcaataaacagcggtctcgacataagtccaaggatcgctattgcgaaaaggatggcgaagtgatctctaaaaaaaggaatgaggcaggcgagtggaacagggacgtttatatccgccagtag

SEQ ID NO: 262467 - DNA, 1899 bp, Artificial Sequence
  derived and/or modified sequence
atgaaccagggcagcggcctggacctgctgaagatctcctatggcaagggggcccggaggaagaaccgcttcaagggcagtgatggcagcaccagcagtgacaccaccagcaacagctttgtgcggcagggcagcgctgacagctacaccagccggcccagcgacagtgatgtgtccctggaggaggaccgggaggccgtgcggcgggaggccgagcggcaggcccaggcccagctggagaaggccaagaccaagcctgtggcctttgctgtgaggaccaacgtgtcctacagcgctgcccatgaagatgatgtgcctgtgcccggcatggccatcagctttgaggccaaggacttcctgcacgtgaaggagaagttcaacaatgactggtggattggccgcctggtgaaggagggctgtgagatcggcttcatccccagccctgtgaagctggagaacatgaggctgcagcacgagcagagggccaagcagggcaagttctacagcagcaagagcggcggcaacagcagcagcagcctgggggacatcgtgcccagcagcaggaagagcaccccacccagcagcgccattgatattgatgccaccggcctggatgctgaggagaatgacatcccagccaaccacaggagccccaagcccagcgccaacagcgtgaccagcccccacagcaaggagaagaggatgcccttcttcaagaagacagagcacaccccaccctatgatgtggtgcccagcatgaggcctgtggtgctggtgggccccagcctgaagggctatgaggtgacagacatgatgcagaaggccctgtttgacttcctgaagcacagatttgagggccgcatcagcatcaccagggtgacagctgacatcagcctggccaagaggtctgtgctgaacaaccccagcaagcacgccatcatcgagaggagcaacaccaggagcagcctggccgaggtgcagagcgagattgaaagaatttttgagctggcccggaccctgcagctggtggtgctggatgctgacaccatcaaccacccagcccagctgagcaagaccagcctggcccccatcatcgtgtatgtgaagatcagcagccccaaggtgctgcagaggctcatcaagagccggggcaagagccaggccaagcacctgaatgtgcagatggtggccgctgacaagctggcccagtgccccccagagctgtttgatgtgatcctggatgagaaccagctggaggatgcctgtgagcacctggccgactacctggaggcctactggaaggccacccacccccccagcagcagcctgcccaaccccctgctgagcaggaccctggccaccagcagcctgcccctgagccccaccctggccagcaacagccagggcagccagggcgaccagaggacagacagaagtgcccccatccgcagcgccagccaggccgaggaggagcccagcgtggagcctgtgaagaagagccagcacaggagcagcagcagcgccccccaccacaaccacaggagcggcaccagccggggcctgagccggcaggagacctttgattctgagacccaggagagccgggacagcgcctacgtggagcccaaggaggactacagccatgaccacgtggaccactacgccagccaccgggaccacaaccacagagatgagacccacggcagcagtgaccaccgccaccgggagagccgccacaggagcagagatgtggaccgggagcaggaccacaatgaatgcaacaagcagaggagccgccacaagagcaaggaccgctactgtgagaaggatggagaggtgatcagcaagaagagaaatgaagctggggagtggaacagagatgtgtacatccggcagtag

SEQ ID NO: 262468 - DNA, 1899 bp, Artificial Sequence
  derived and/or modified sequence
atgaaccagggcagcggcctggacctgctgaagatcagctacggcaagggggcaaggagaaaaaatcggttcaaaggcagcgatggctccacaagctctgacactacaagtaacagttttgttcggcagggaagcgccgactcttatacctctaggccatccgactctgatgtgagtctggaagaggatagagaagctgtcagaagggaggcggagagacaagcacaggcccaactcgaaaaagccaagacgaaacctgttgccttcgcagtgcgaactaacgtgagctattccgccgctcatgaagatgacgtgcctgtgcctgggatggctatctcctttgaggcaaaagactttctgcacgtcaaggagaaatttaataacgactggtggataggtcgcctcgttaaggagggatgcgagattggttttatcccatctcccgtgaagcttgagaatatgagattacagcacgaacagcgggctaagcagggtaagttttattcaagtaaatcaggagggaacagttcttcctctctgggagatatcgtcccatcgtccagaaaaagcacgccacccagttccgctatagatatcgacgctaccggccttgatgccgaggagaatgatatacccgctaaccacagaagccccaaacctagtgccaacagcgtcacctctccacatagcaaggaaaagaggatgcctttctttaagaagacagagcacacacccccatatgatgtcgtgccatctatgcgccctgtggtactcgtggggccatctctcaagggatacgaggtgacagatatgatgcagaaggccctgttcgacttcttgaaacacagattcgagggcagaatatccatcacaagagtgacagcagacatctcgctggctaagcgctcagtgctgaacaatccctcaaagcacgccatcatagagagaagtaacacccggtccagcctcgccgaggtccagtccgaaattgaacgaattttcgaattggcccgcaccctgcagctcgtcgttttggacgcagataccattaatcatcctgcccagctgtctaagacctccctcgctccaatcatcgtttatgtcaagatctcttcccccaaggtgctgcaacgacttatcaagagtcgagggaagagccaggcgaaacacttgaacgtccagatggtcgccgccgacaagctggcgcagtgccccccggagctttttgacgtgattctcgacgagaaccagctcgaggacgcgtgcgagcacctggcagactacttagaggcctactggaaggcgactcacccaccgtcttccagcttgccgaaccctctgctatcgagaacgcttgctacatcttccttgcccttatctcctacactggccagcaattcccaaggctctcagggggaccagcgcacggatcgtagtgcaccaatacgctctgccagccaggccgaagaggaaccctctgttgaacctgtcaaaaagtcgcaacatagatcctccagtagcgcaccacatcacaaccacagaagtgggacgtctcgtggcttatcgagacaggaaacctttgactcggagacacaagagagccgggattctgcctatgtggagccgaaggaggattattctcacgaccacgtcgatcattacgccagtcacagagaccacaaccaccgagatgagacacacggtagctccgatcaccggcatagagagagtagacaccgcagccgggatgttgatcgggagcaggaccataacgagtgcaacaagcagcgtagcaggcataagtctaaagaccgctactgcgaaaaggacggcgaagtgatttctaaaaagcggaatgaggctggggaatggaatcgggacgtgtacatacgccagtag

SEQ ID NO: 262469 - DNA, 1899 bp, Artificial Sequence
  derived and/or modified sequence
atgaaccaaggcagcggtcttgacttattaaagatctcttatggcaaaggagcaaggcgcaaaaatcggttcaaggggtccgatggatcgactagcagtgatacgacttccaactcatttgtccgtcagggcagcgccgacagctacactagcaggccctctgacagtgacgtgtctctggaagaagatcgggaggcggtcaggagagaggcagagcgtcaggcccaggctcaactcgagaaagcaaaaaccaagcctgtcgccttcgctgtgaggacgaatgtgtcttatagtgcagcccatgaggatgatgtgcccgtgcccggaatggccatctctttcgaggctaaggatttcctccacgtgaaggagaagttcaacaatgattggtggatcgggagactcgttaaagaaggctgtgagattgggttcattcccagtcctgtgaaattagagaacatgaggcttcagcatgaacagagagccaaacaaggcaagttttactcaagcaagagtggcggaaactccagtagcagtctgggagatatcgttccatcctccagaaagtcaacaccccctagttcagcgatagatatcgacgctactggcttagacgccgaggagaatgatattcccgctaatcacaggtcgcccaaaccatcagcgaattcggtgacttccccgcactccaaagaaaaaaggatgccattcttcaaaaagaccgagcacacaccaccctacgatgtcgtgccttccatgcggcctgtggtgctggtcggcccttccctgaaagggtatgaagtcaccgatatgatgcagaaagccttatttgacttcctgaagcaccgattcgagggaagaatctccatcacgcgggtcacagccgatatatcactcgccaagcgttctgtcttgaataaccccagcaagcacgctatcatcgaacgctccaatacccgcagctccctggccgaggtacagtccgaaattgagaggattttcgaactcgctcggaccctgcagctcgtggtgctggatgcggacaccattaatcacccagcgcagctgtctaaaactagtctggctcctatcatcgtgtatgtgaagatcagcagtcccaaagtattgcaaaggctcattaaaagtcgcggtaaaagccaagccaaacacctgaatgtgcagatggtggccgcagacaagctggcccagtgtcctcccgagctattcgatgtaatccttgacgaaaatcagctcgaggacgcctgcgagcatctggccgactacctcgaagcctattggaaagccacacaccctccttcctcaagtctccctaatcctctgctgagccgtacacttgccactagcagtcttcctctaagcccgacactggcctctaacagccaaggaagccagggggatcaacgcacggacagaagcgcgccaattcgatccgcatcccaggctgaggaagaaccctccgttgaacctgtaaaaaagtcacagcaccggagttcctcttccgccccacaccacaaccaccgcagcgggacttcccgaggtctcagccggcaggagactttcgactcggagacacaggagtcacgcgattccgcttatgtcgaacccaaggaggattacagccacgaccacgtagaccattatgcgtcacaccgggaccataaccatcgggacgaaacccacggcagttctgaccaccggcacagggagagccgccacagaagccgcgacgtggatagggagcaggatcacaacgagtgcaacaaacagcggagtagacacaaaagtaaggataggtactgcgaaaaagatggcgaggtcatttctaaaaaaagaaacgaagctggcgaatggaacagagatgtgtatataaggcagtag

SEQ ID NO: 262470 - DNA, 3524 bp, Artificial Sequence
  derived and/or modified sequence
cacctcctcccctcgtcgcctgcccaccctctgctcctctcctggcgccggggaccctgcccctttgcgccttttcctggctctgcctcggcttccatttttctctgcttccgaaaagccagtggggaagggcgggggagacctgccagtcctcccagacttctcccgggttgctccagctggccctcctcgccccttcccgggagaggcacatggagagacatgaatcaggggagtggactggacctgctgaagatctcatatggaaaaggagccagaaggaaaaacagatttaaaggatctgatggaagcacgtcatctgatactacctcaaatagttttgttcgccagggttcggcagactcctacactagccgtccatccgattccgatgtatctctggaggaggaccgggaggcagtgcgcagagaagcggagcggcaggcccaggcacagttggaaaaagcaaagacaaagcccgttgcatttgcggttcggacaaatgtcagctacagtgcggcccatgaagatgatgttccagtgcctggcatggccatctcattcgaagcaaaagattttctgcatgttaaggaaaaatttaacaatgactggtggatagggcgattggtaaaagaaggctgtgaaatcggattcattccaagcccagtcaaactagaaaacatgaggctgcagcatgaacagagagccaagcaagggaaattctactccagtaaatcaggaggaaattcatcatccagtttgggtgacatagtacctagttccagaaaatcaacacctccatcatctgctatagacatagatgctactggcttagatgcagaagaaaatgatattccagcaaaccaccgctcccctaaacccagtgcaaacagtgtaacgtcaccccactccaaagagaaaagaatgcccttctttaagaagacagagcacactcctccgtatgatgtggtaccttccatgcgaccagtggtcctagtgggcccttctctgaagggctacgaggtcacagatatgatgcaaaaagcgctgtttgattttttaaaacacagatttgaagggcggatatccatcacaagggtcaccgctgacatctcgcttgccaaacgctcggtattaaacaatcccagtaagcacgcaataatagaaagatccaacacaaggtcaagcttagcggaagttcagagtgaaatcgaaaggatttttgaacttgcaagaacattgcagttggtggtccttgacgcggatacaattaatcatccagctcaactcagtaaaacctccttggcccctattatagtatatgtaaagatttcttctcctaaggttttacaaaggttaataaaatctcgagggaaatctcaagctaaacacctcaacgtccagatggtagcagctgataaactggctcagtgtcctccagagctgttcgatgtgatcttggatgagaaccagcttgaggatgcctgtgagcaccttgccgactatctggaggcctactggaaggccacccatcctcccagcagtagcctccccaaccctctccttagccgtacattagccacttcaagtctgcctcttagccccaccctagcctctaattcacagggttctcaaggtgatcagaggactgatcgctccgctcctatccgttctgcttcccaagctgaagaagaacctagtgtggaaccagtcaagaaatcccagcaccgctcttcctcctcagccccacaccacaaccatcgcagtgggacaagtcgcggcctctccaggcaagagacatttgactcggaaacccaggagagtcgagactctgcctacgtagagccaaaggaagattattcccatgaccacgtggaccactatgcctcacaccgtgaccacaaccacagagacgagacccacgggagcagtgaccacagacacagggagtcccggcaccgttcccgggacgtggatcgagagcaggaccacaacgagtgcaacaagcagcgcagccgtcataaatccaaggatcgctactgtgaaaaggatggagaagtgatatcaaaaaaacggaatgaggctggggagtggaacagggatgtttacatccgccaatgagttttgcccgtttgtgtttttttttttttttttttgaagtcttgtataactaacagcatccccaaaacaaagtctttggggtctacactgcaatcatatgtgatctgtcttgtaatattttgtattattgctgttgcttgaatagcaatagcatggatagagtattgagatactttttcttttgtaagtgctacataaattggcctggtatggctgcagtcctccggttgcatactggactcttcaaaaactgttttgggtagctgccacttgaacaaaatctgttgccacccaggtgatgttagtgttttaagaaatgtagttgatgtatccaacaagccagaatcagcacagataaaaagtggaatttcttgtttctccagatttttaatacgttaatacgcaggcatctgatttgcatattcattcatggaccactgtttcttgcttgtacctctggctgactaaatttggggacagattcagtcttgccttacacaaaggggatcataaagttagaatctattttctatgtactagtactgtgtactgtatagacagtttgtaaatgttatttctgcaaacaaacaccttcttattatatatataatatatatatatatcagtttgatcacactattttagagtcttaatgccaagtcagcagatttgctttatgaattacagggactagaaatgcccacattcaggaaatttgtaataacattgtctagacacctatcctcattctagtagaaagtgtgtacatactgtaaatatgtgtgattgcttgacttgaaaaggtttgaattctgaatgttataccatccttgtaagtaagtttgtaatttccaccataaattatggtaaatataaaactccagaggttgttctactccatacagttcacactgattgtgacacattcttagtagctagtgtctgttctagtcactgcactggagtctacgagccggaactcgctatatgcacgtgtgtgtgtccgtatgtaagaaagtgtgcaccgagtgactgaatggttgagatgaattggaatgctgaagactaacgaagaaactagagactgatatcgagcattctgcccacctcgctctgtatttaattaattgtgctatatgttgctttaacaacccattgagcagtcagggaatgtgagtaagcttgctgccaaaggtaactaggaaagcattcatctgctgcctccttgtttttgctcctagagagtgaaaatacaggcaattttactgtgagtgtttcactggaaatgtacaatctttgtgtgttagagtatttgttttagtaagaaatgtttacacagcttgtggaattatttcgtgggaaaataaatttttataacttctcccacttcaatttctaacctt

SEQ ID NO: 262471 - DNA, 1899 bp, Artificial Sequence
  derived and/or modified sequence
atgaaccagggcagcggcctggacctgctgaagatcagctacggcaagggcgccagaagaaagaacagattcaagggcagcgacggcagcaccagcagcgacaccaccagcaacagcttcgtgagacagggcagcgccgacagctacaccagcagacccagcgacagcgacgtgagcctggaggaggacagagaggccgtgagaagagaggccgagagacaggcccaggcccagctggagaaggccaagaccaagcccgtggccttcgccgtgagaaccaacgtgagctacagcgccgcccacgaggacgacgtgcccgtgcccggcatggccatcagcttcgaggccaaggacttcctgcacgtgaaggagaagttcaacaacgactggtggatcggcagactggtgaaggagggctgcgagatcggcttcatccccagccccgtgaagctggagaacatgagactgcagcacgagcagagagccaagcagggcaagttctacagcagcaagagcggcggcaacagcagcagcagcctgggcgacatcgtgcccagcagcagaaagagcaccccccccagcagcgccatcgacatcgacgccaccggcctggacgccgaggagaacgacatccccgccaaccacagaagccccaagcccagcgccaacagcgtgaccagcccccacagcaaggagaagagaatgcccttcttcaagaagaccgagcacacccccccctacgacgtggtgcccagcatgagacccgtggtgctggtgggccccagcctgaagggctacgaggtgaccgacatgatgcagaaggccctgttcgacttcctgaagcacagattcgagggcagaatcagcatcaccagagtgaccgccgacatcagcctggccaagagaagcgtgctgaacaaccccagcaagcacgccatcatcgagagaagcaacaccagaagcagcctggccgaggtgcagagcgagatcgagagaatcttcgagctggccagaaccctgcagctggtggtgctggacgccgacaccatcaaccaccccgcccagctgagcaagaccagcctggcccccatcatcgtgtacgtgaagatcagcagccccaaggtgctgcagagactgatcaagagcagaggcaagagccaggccaagcacctgaacgtgcagatggtggccgccgacaagctggcccagtgcccccccgagctgttcgacgtgatcctggacgagaaccagctggaggacgcctgcgagcacctggccgactacctggaggcctactggaaggccacccacccccccagcagcagcctgcccaaccccctgctgagcagaaccctggccaccagcagcctgcccctgagccccaccctggccagcaacagccagggcagccagggcgaccagagaaccgacagaagcgcccccatcagaagcgccagccaggccgaggaggagcccagcgtggagcccgtgaagaagagccagcacagaagcagcagcagcgccccccaccacaaccacagaagcggcaccagcagaggcctgagcagacaggagaccttcgacagcgagacccaggagagcagagacagcgcctacgtggagcccaaggaggactacagccacgaccacgtggaccactacgccagccacagagaccacaaccacagagacgagacccacggcagcagcgaccacagacacagagagagcagacacagaagcagagacgtggacagagagcaggaccacaacgagtgcaacaagcagagaagcagacacaagagcaaggacagatactgcgagaaggacggcgaggtgatcagcaagaagagaaacgaggccggcgagtggaacagagacgtgtacatcagacagtag

SEQ ID NO: 262472 - protein, 608 aa, Artificial Sequence
  derived and/or modified sequence
MNQGSGLDLLKISYGKGARRKNRFKGSDGSTSSDTTSNSFVRQGSADSYTSRPSDSDVSLEEDREAVRREAERQAQAQLEKAKTKPVAFAVRTNVSYSAAHEDDVPVPGMAISFEAKDFLHVKEKFNNDWWIGRLVKEGCEIGFIPSPVKLENMRLQHEQRAKQGKFYSSKSGGNSSSSLGDIVPSSRKSTPPSSGAKSADEQDQWKTAGLFWRFTTEHTPPYDVVPSMRPVVLVGPSLKGYEVTDMMQKALFDFLKHRFEGRISITRVTADISLAKRSVLNNPSKHAIIERSNTRSSLAEVQSEIERIFELARTLQLVVLDADTINHPAQLSKTSLAPIIVYVKISSPKVLQRLIKSRGKSQAKHLNVQMVAADKLAQCPPELFDVILDENQLEDACEHLADYLEAYWKATHPPSSSLPNPLLSRTLATSSLPLSPTLASNSQGSQGDQRTDRSAPIRSASQAEEEPSVEPVKKSQHRSSSSAPHHNHRSGTSRGLSRQETFDSETQESRDSAYVEPKEDYSHDHVDHYASHRDHNHRDETHGSSDHRHRESRHRSRDVDREQDHNECNKQRSRHKSKDRYCEKDGEVISKKRNEAGEWNRDVYIRQ

SEQ ID NO: 262473 - DNA, 1827 bp, Artificial Sequence
  derived and/or modified sequence
atgaaccaggggagcggcttagacttacttaagatctcctatggcaagggcgctcgccgcaaaaatcggttcaaaggatctgatgggagcacttcttccgacaccacgagtaactcctttgtgcggcaggggtccgcggattcctatactagtagaccatcagacagcgatgtctctctggaggaggacagggaggctgtgagacgcgaagcagagaggcaggcacaggcccagttagaaaaagctaaaactaagcctgtggccttcgcggtgagaacaaacgtttcctactctgccgcccacgaggacgatgtgcctgtgcctggcatggcgattagcttcgaagcaaaggacttcttacacgtgaaggaaaagttcaacaacgactggtggatcggtaggctggtgaaggaaggttgcgaaatcgggttcatcccttctccagtgaaattggagaacatgcgtttacagcacgagcagagagcaaaacaaggtaagttctacagcagtaaatctggtggcaactcaagctccagcctaggcgatattgtcccttcctcccgcaaatccaccccgccatcatccggcgctaaaagtgctgatgagcaagaccaatggaagaccgccgggctcttctggcggtttacaactgagcacacccccccttatgacgtagtgccaagtatgagacccgtggtccttgtgggcccctcactgaagggttatgaggtaacagatatgatgcagaaggcactgtttgactttttaaaacacaggtttgaggggcgtatctccataacgcgagtcactgctgacatcagtctcgctaagaggagcgtgctcaacaatccctccaagcacgccatcattgagagatcaaacaccaggtcttccctggccgaggtccaatccgaaattgaaaggatctttgaactagcacgcaccctccagttggttgtgctggacgctgatacgattaatcatccagcccaactgtcgaagacttcactggccccaattatcgtgtacgtgaagatatcttccccgaaagtgctccagcggctgatcaagtccagaggtaagagccaagccaagcatctaaatgtccaaatggtggcagctgacaagctggctcagtgcccaccagagctgttcgatgtcattctggacgagaatcagttggaggacgcctgcgaacacctcgcagactatctcgaggcttactggaaggcaacgcatccgccttcttcctcactgcctaaccctctgttatcgagaacgctcgctacatcaagtctcccactctctcctacactggccagtaatagccaaggaagccagggcgatcagcggaccgaccgcagtgctcccatcagatccgcttcccaggccgaagaggagccatctgtagagcctgtcaagaaatcacagcataggtcttcatctagcgccccccaccacaaccatcggagcggaacatccagggggctatctagacaggaaacctttgactcggaaactcaggaaagtagggattcagcgtacgtcgaacccaaagaggattattctcacgaccatgtggaccattacgctagtcatcgggatcataatcatcgggacgagacccatggaagctccgatcaccgccatcgcgagtcgcgacaccggagcagagatgtggatcgtgagcaggatcacaacgagtgtaacaaacagcgttcacggcataagtctaaggatcgatactgtgaaaaggatggcgaggtgatcagcaaaaagagaaatgaagctggagaatggaatagagatgtatatataaggcagtag

SEQ ID NO: 262474 - DNA, 1827 bp, Artificial Sequence
  derived and/or modified sequence
atgaaccagggcagcggcctggacctgctgaagatctcctatggcaagggggcccggaggaagaaccgcttcaagggcagtgatggcagcaccagcagtgacaccaccagcaacagctttgtgcggcagggcagcgctgacagctacaccagccggcccagcgacagtgatgtgtccctggaggaggaccgggaggccgtgcggcgggaggccgagcggcaggcccaggcccagctggagaaggccaagaccaagcctgtggcctttgctgtgaggaccaacgtgtcctacagcgctgcccatgaagatgatgtgcctgtgcccggcatggccatcagctttgaggccaaggacttcctgcacgtgaaggagaagttcaacaatgactggtggattggccgcctggtgaaggagggctgtgagatcggcttcatccccagccctgtgaagctggagaacatgaggctgcagcacgagcagagggccaagcagggcaagttctacagcagcaagagcggcggcaacagcagcagcagcctgggggacatcgtgcccagcagcaggaagagcaccccacccagcagcggggccaagtctgcagatgagcaggaccagtggaagacagctggcctcttctggaggttcaccacagagcacaccccaccctatgatgtggtgcccagcatgaggcctgtggtgctggtgggccccagcctgaagggctatgaggtgacagacatgatgcagaaggccctgtttgacttcctgaagcacagatttgagggccgcatcagcatcaccagggtgacagctgacatcagcctggccaagaggtctgtgctgaacaaccccagcaagcacgccatcatcgagaggagcaacaccaggagcagcctggccgaggtgcagagcgagattgaaagaatttttgagctggcccggaccctgcagctggtggtgctggatgctgacaccatcaaccacccagcccagctgagcaagaccagcctggcccccatcatcgtgtatgtgaagatcagcagccccaaggtgctgcagaggctcatcaagagccggggcaagagccaggccaagcacctgaatgtgcagatggtggccgctgacaagctggcccagtgccccccagagctgtttgatgtgatcctggatgagaaccagctggaggatgcctgtgagcacctggccgactacctggaggcctactggaaggccacccacccccccagcagcagcctgcccaaccccctgctgagcaggaccctggccaccagcagcctgcccctgagccccaccctggccagcaacagccagggcagccagggcgaccagaggacagacagaagtgcccccatccgcagcgccagccaggccgaggaggagcccagcgtggagcctgtgaagaagagccagcacaggagcagcagcagcgccccccaccacaaccacaggagcggcaccagccggggcctgagccggcaggagacctttgattctgagacccaggagagccgggacagcgcctacgtggagcccaaggaggactacagccatgaccacgtggaccactacgccagccaccgggaccacaaccacagagatgagacccacggcagcagtgaccaccgccaccgggagagccgccacaggagcagagatgtggaccgggagcaggaccacaatgaatgcaacaagcagaggagccgccacaagagcaaggaccgctactgtgagaaggatggagaggtgatcagcaagaagagaaatgaagctggggagtggaacagagatgtgtacatccggcagtag

SEQ ID NO: 262475 - DNA, 1827 bp, Artificial Sequence
  derived and/or modified sequence
atgaaccagggcagcggcctggacctgctgaagatcagctacggcaaaggcgctaggcgtaaaaacagattcaagggatccgatggcagcacaagcagcgacaccaccagtaattcctttgttagacaaggttcagctgactcctatacctctcggcctagcgattctgatgtcagccttgaggaagatcgtgaggcggtgagacgtgaagccgagagacaagcccaagctcaactcgagaaagctaaaactaagccagtagcgtttgccgtacggactaacgtgtcctatagcgccgcccatgaggacgacgtgccggtgcctggaatggctataagctttgaagccaaggacttcttacacgttaaagagaagttcaataatgattggtggattggacggcttgtgaaggagggctgtgagatcgggtttatacccagtcccgtgaaactggaaaatatgcgactgcagcacgagcagagggcaaaacagggcaaattttactccagtaagagtggcggcaatagtagcagcagcttaggcgatatcgttccttcttcaaggaaatctaccccaccttcttctggggctaagtccgctgacgagcaggaccagtggaagacggctggtcttttctggaggttcactaccgagcacacgccaccttacgatgtggtgccatccatgcggcctgtcgtgctagttggccccagccttaagggctacgaagtgactgacatgatgcagaaagctctgtttgactttttgaaacacaggttcgagggcagaatttcaatcacgcgggttaccgccgatatctctctggccaagagatcagttctgaacaacccttctaaacacgccataattgagcgaagtaatactcggtcatcactggccgaggtacaatccgaaatcgaacggatctttgagctcgcccgcacactgcagttagtggtgctcgacgctgatactattaaccatcccgcgcagctatctaaaacctcgttggcccccattattgtctacgtgaagatctcttcccctaaagtgttacagagattaatcaagagcaggggcaaatctcaagccaagcacctcaatgtgcagatggtagcggcagataagctggcacagtgtccccctgaattgttcgacgtgatactagacgaaaatcagctggaggacgcttgcgagcacctggcagactatctggaggcttattggaaggccacccacccacccagttcctctctccccaaccctctgttgtcccgtactttggccacttctagccttccacttagtccaacactcgcaagcaacagccagggctcccaaggagatcagcggaccgaccgctcagccccaatccgcagcgcaagtcaggccgaggaggaaccttccgtcgagcccgtgaaaaaatcccagcaccgatcctccagctcagcaccgcatcataaccacaggagtggtacgagtcggggcttgtcacgacaggaaacattcgatagtgagactcaggagtcccgcgactccgcctacgtggagcctaaagaggactacagccacgaccacgttgatcattacgcctcacaccgcgaccacaatcaccgggatgagacccacgggtcctcagaccaccgccatcgggaatccaggcatagatcaagagatgtcgaccgcgaacaagaccataatgagtgcaataagcaacggagtagacacaaatctaaggatagatactgcgagaaagacggcgaggtgatttccaagaagaggaacgaagctggggagtggaaccgcgatgtatatatccgccagtag

SEQ ID NO: 262476 - DNA, 1827 bp, Artificial Sequence
  derived and/or modified sequence
atgaatcagggatcagggctcgacctgctgaagatatcctatggtaaaggcgctaggagaaaaaatcgctttaaggggtccgacggatctacctcttccgacactaccagtaattcttttgttagacagggctctgccgacagctacacctctcgtccaagcgacagtgatgtcagcctggaggaagaccgagaggccgtgagacgagaggccgagagacaggctcaggcacaactagagaaggctaaaacaaagccggtcgcttttgccgtgcgcacaaatgtgtcctattccgccgcacatgaggacgatgtgcccgtgcccggtatggccatatcctttgaggcaaaggacttcctgcacgtgaaagaaaagttcaacaatgactggtggataggccgactcgtgaaggaaggttgtgaaatcggatttataccaagccctgtcaagttggagaacatgcgcttgcagcatgagcagcgggctaagcagggaaagttctacagttcgaaatccggcggaaatagttcttcttccctgggcgatatcgtccccagcagccggaagtctacaccacccagcagtggggctaagtctgcggacgaacaggatcaatggaagacagctggattgttctggcgctttaccaccgaacacactccaccttacgatgtcgtcccttctatgcgccctgtcgtgctggtcggcccttccctgaaaggctatgaggttacagatatgatgcagaaagcactgttcgacttcctcaagcatcgctttgaggggcgtataagcattacaagagtaaccgccgacatatctctggccaaacgatctgtgttgaacaatccgtccaaacatgccattattgaaaggagtaatacccgaagttctctagcagaggtccagagcgagattgaacgcatcttcgagttggccaggaccctgcagctggtggtccttgatgcagataccattaatcatccagcacagctgagcaagacttcattagcgccaattatcgtgtacgtgaagatatcgagccccaaggtactgcagcggctgatcaagtctagaggaaaaagccaagcaaagcatctgaatgtgcagatggtggctgccgacaaactagcccagtgtccacccgagctttttgatgtcattctggacgagaaccagcttgaagacgcttgcgaacacctcgcggactacctggaagcctactggaaagcgactcatccaccctcatcctctctgcccaatcctcttctgtccagaaccctggctacctcatctctgcccctcagccctacattagctagtaatagccagggcagccagggcgatcagcggacggacagatctgctcctataagaagcgcttctcaggccgaagaggaaccgtccgtggaacctgtgaaaaaatctcagcatcgctccagctctagcgccccacatcacaaccatcgtagcggcacttccagaggattgagtcgccaggagacatttgacagcgaaactcaagaaagcagagatagtgcctacgttgaacccaaagaggattatagccatgaccacgttgaccactacgcttctcaccgcgaccataatcatcgggatgagacccatggatccagtgatcacaggcacagagagtctcgtcataggagccgagacgtggaccgtgagcaggatcacaatgaatgcaacaagcagcgttcccggcataaatccaaagaccggtactgcgagaaagacggagaagtcatctcaaaaaagaggaatgaggctggcgagtggaatcgggatgtatatatcaggcagtag

SEQ ID NO: 262477 - DNA, 1827 bp, Artificial Sequence
  derived and/or modified sequence
atgaatcaggggagtggactggacctgctgaagatctcatatggaaaaggagccagaaggaaaaacagatttaaaggatctgatggaagcacgtcatctgatactacctcaaatagttttgttcgccagggttcggcagactcctacactagccgtccatccgattccgatgtatctctggaggaggaccgggaggcagtgcgcagagaagcggagcggcaggcccaggcacagttggaaaaagcaaagacaaagcccgttgcatttgcggttcggacaaatgtcagctacagtgcggcccatgaagatgatgttccagtgcctggcatggccatctcattcgaagcaaaagattttctgcatgttaaggaaaaatttaacaatgactggtggatagggcgattggtaaaagaaggctgtgaaatcggattcattccaagcccagtcaaactagaaaacatgaggctgcagcatgaacagagagccaagcaagggaaattctactccagtaaatcaggaggaaattcatcatccagtttgggtgacatagtacctagttccagaaaatcaacacctccatcatctggtgcaaaatctgcagatgaacaagaccagtggaaaactgcaggcttgttttggcggtttactacagagcacactcctccgtatgatgtggtaccttccatgcgaccagtggtcctagtgggcccttctctgaagggctacgaggtcacagatatgatgcaaaaagcgctgtttgattttttaaaacacagatttgaagggcggatatccatcacaagggtcaccgctgacatctcgcttgccaaacgctcggtattaaacaatcccagtaagcacgcaataatagaaagatccaacacaaggtcaagcttagcggaagttcagagtgaaatcgaaaggatttttgaacttgcaagaacattgcagttggtggtccttgacgcggatacaattaatcatccagctcaactcagtaaaacctccttggcccctattatagtatatgtaaagatttcttctcctaaggttttacaaaggttaataaaatctcgagggaaatctcaagctaaacacctcaacgtccagatggtagcagctgataaactggctcagtgtcctccagagctgttcgatgtgatcttggatgagaaccagcttgaggatgcctgtgagcaccttgccgactatctggaggcctactggaaggccacccatcctcccagcagtagcctccccaaccctctccttagccgtacattagccacttcaagtctgcctcttagccccaccctagcctctaattcacagggttctcaaggtgatcagaggactgatcgctccgctcctatccgttctgcttcccaagctgaagaagaacctagtgtggaaccagtcaagaaatcccagcaccgctcttcctcctcagccccacaccacaaccatcgcagtgggacaagtcgcggcctctccaggcaagagacatttgactcggaaacccaggagagtcgagactctgcctacgtagagccaaaggaagattattcccatgaccacgtggaccactatgcctcacaccgtgaccacaaccacagagacgagacccacgggagcagtgaccacagacacagggagtcccggcaccgttcccgggacgtggatcgagagcaggaccacaacgagtgcaacaagcagcgcagccgtcataaatccaaggatcgctactgtgaaaaggatggagaagtgatatcaaaaaaacggaatgaggctggggagtggaacagggatgtttacatccgccaatga

SEQ ID NO: 262478 - DNA, 1827 bp, Artificial Sequence
  derived and/or modified sequence
atgaaccagggcagcggcctggacctgctgaagatcagctacggcaagggcgccagaagaaagaacagattcaagggcagcgacggcagcaccagcagcgacaccaccagcaacagcttcgtgagacagggcagcgccgacagctacaccagcagacccagcgacagcgacgtgagcctggaggaggacagagaggccgtgagaagagaggccgagagacaggcccaggcccagctggagaaggccaagaccaagcccgtggccttcgccgtgagaaccaacgtgagctacagcgccgcccacgaggacgacgtgcccgtgcccggcatggccatcagcttcgaggccaaggacttcctgcacgtgaaggagaagttcaacaacgactggtggatcggcagactggtgaaggagggctgcgagatcggcttcatccccagccccgtgaagctggagaacatgagactgcagcacgagcagagagccaagcagggcaagttctacagcagcaagagcggcggcaacagcagcagcagcctgggcgacatcgtgcccagcagcagaaagagcaccccccccagcagcggcgccaagagcgccgacgagcaggaccagtggaagaccgccggcctgttctggagattcaccaccgagcacacccccccctacgacgtggtgcccagcatgagacccgtggtgctggtgggccccagcctgaagggctacgaggtgaccgacatgatgcagaaggccctgttcgacttcctgaagcacagattcgagggcagaatcagcatcaccagagtgaccgccgacatcagcctggccaagagaagcgtgctgaacaaccccagcaagcacgccatcatcgagagaagcaacaccagaagcagcctggccgaggtgcagagcgagatcgagagaatcttcgagctggccagaaccctgcagctggtggtgctggacgccgacaccatcaaccaccccgcccagctgagcaagaccagcctggcccccatcatcgtgtacgtgaagatcagcagccccaaggtgctgcagagactgatcaagagcagaggcaagagccaggccaagcacctgaacgtgcagatggtggccgccgacaagctggcccagtgcccccccgagctgttcgacgtgatcctggacgagaaccagctggaggacgcctgcgagcacctggccgactacctggaggcctactggaaggccacccacccccccagcagcagcctgcccaaccccctgctgagcagaaccctggccaccagcagcctgcccctgagccccaccctggccagcaacagccagggcagccagggcgaccagagaaccgacagaagcgcccccatcagaagcgccagccaggccgaggaggagcccagcgtggagcccgtgaagaagagccagcacagaagcagcagcagcgccccccaccacaaccacagaagcggcaccagcagaggcctgagcagacaggagaccttcgacagcgagacccaggagagcagagacagcgcctacgtggagcccaaggaggactacagccacgaccacgtggaccactacgccagccacagagaccacaaccacagagacgagacccacggcagcagcgaccacagacacagagagagcagacacagaagcagagacgtggacagagagcaggaccacaacgagtgcaacaagcagagaagcagacacaagagcaaggacagatactgcgagaaggacggcgaggtgatcagcaagaagagaaacgaggccggcgagtggaacagagacgtgtacatcagacagtag

SEQ ID NO: 262479 - protein, 400 aa, Artificial Sequence
  derived and/or modified sequence
MGVSELIVSTAVLGVLFSLLGAQPLLVVGFSGPLLVFEEAFFKFCRAQDLEYLTGRVWVGLWLVVFVLALVAAEGSFLVRYISPFTQEIFAFLISLIFIYETFYKLYKVFTEHPLLPFYPPEPGGVPGCWSGAKWQLPPTEGPPSPRNQPNTALLSLILMLGTFFIAFFLRKFRNSRFLGGKARRIIGDFGIPISILVMVLVDYSITDTYTQKLTVPTGLSVTSPDKRSWFIPPLGSARPFPPWMMVAAAVPALLVLILIFMETQITALIVSQKARRLLKGSGFHLDLLLIGSLGGLCGLFGLPWLTAATVRSVTHVNALTVMRTAIAPGDKPQIQEVREQRVTGVLIASLVGLSIVMGAVLRRIPLAVLFGIFLYMGVTSLSGIQLSQRLLLILMPAKH

SEQ ID NO: 262480 - DNA, 82 bp, Artificial Sequence
  derived and/or modified sequence
attgaatgggctagaatggaatcatctttgaacggaatcaaagggaatcatcatcgaatggaatcgaatggaaatgtcaacg

SEQ ID NO: 262481 - protein, 910 aa, Artificial Sequence
  derived and/or modified sequence
MGTPRAQHPPPPQLLFLILLSCPWIQGLPLKEEEILPEPGSETPTVASEALAELLHGALLRRGPEMGYLPGSDRDPTLATPPAGQTLAVPSLPRATEPGTGPLTTAVTPNGVRGAGPTAPELLTPPPGTTAPPPPSPASPGPPLGPEGGEEETTTTIITTTTVTTTVTSPVLCNNNISEGEGYVESPDLGSPVSRTLGLLDCTYSIHVYPGYGIEIQVQTLNLSQEEELLVLAGGGSPGLAPRLLANSSMLGEGQVLRSPTNRLLLHFQSPRVPRGGGFRIHYQAYLLSCGFPPRPAHGDVSVTDLHPGGTATFHCDSGYQLQGEETLICLNGTRPSWNGETPSCMASCGGTIHNATLGRIVSPEPGGAVGPNLTCRWVIEAAEGRRLHLHFERVSLDEDNDRLMVRSGGSPLSPVIYDSDMDDVPERGLISDAQSLYVELLSETPANPLLLSLRFEAFEEDRCFAPFLAHGNVTTTDPEYRPGALATFSCLPGYALEPPGPPNAIECVDPTEPHWNDTEPACKAMCGGELSEPAGVVLSPDWPQSYSPGQDCVWGVHVQEEKRILLQVEILNVREGDMLTLFDGDGPSARVLAQLRGPQPRRRLLSSGPDLTLQFQAPPGPPNPGLGQGFVLHFKEVPRNDTCPELPPPEWGWRTASHGDLIRGTVLTYQCEPGYELLGSDILTCQWDLSWSAAPPACQKIMTCADPGEIANGHRTASDAGFPVGSHVQYRCLPGYSLEGAAMLTCYSRDTGTPKWSDRVPKCALKYEPCLNPGVPENGYQTLYKHHYQAGESLRFFCYEGFELIGEVTITCVPGHPSQWTSQPPLCKVTQTTDPSRQLEGGNLALAILLPLGLVIVLGSGVYIYYTKLQGKSLFGFSGSHSYSPITVESDFSNPLYEAGDTREYEVSI

SEQ ID NO: 262482 - DNA, 2733 bp, Artificial Sequence
  derived and/or modified sequence
atgggcacccccagagcccagcaccccccccccccccagctgctgttcctgatcctgctgagctgcccctggatccagggcctgcccctgaaggaggaggagatcctgcccgagcccggcagcgagacccccaccgtggccagcgaggccctggccgagctgctgcacggcgccctgctgagaagaggccccgagatgggctacctgcccggcagcgacagagaccccaccctggccaccccccccgccggccagaccctggccgtgcccagcctgcccagagccaccgagcccggcaccggccccctgaccaccgccgtgacccccaacggcgtgagaggcgccggccccaccgcccccgagctgctgacccccccccccggcaccaccgccccccccccccccagccccgccagccccggcccccccctgggccccgagggcggcgaggaggagaccaccaccaccatcatcaccaccaccaccgtgaccaccaccgtgaccagccccgtgctgtgcaacaacaacatcagcgagggcgagggctacgtggagagccccgacctgggcagccccgtgagcagaaccctgggcctgctggactgcacctacagcatccacgtgtaccccggctacggcatcgagatccaggtgcagaccctgaacctgagccaggaggaggagctgctggtgctggccggcggcggcagccccggcctggcccccagactgctggccaacagcagcatgctgggcgagggccaggtgctgagaagccccaccaacagactgctgctgcacttccagagccccagagtgcccagaggcggcggcttcagaatccactaccaggcctacctgctgagctgcggcttcccccccagacccgcccacggcgacgtgagcgtgaccgacctgcaccccggcggcaccgccaccttccactgcgacagcggctaccagctgcagggcgaggagaccctgatctgcctgaacggcaccagacccagctggaacggcgagacccccagctgcatggccagctgcggcggcaccatccacaacgccaccctgggcagaatcgtgagccccgagcccggcggcgccgtgggccccaacctgacctgcagatgggtgatcgaggccgccgagggcagaagactgcacctgcacttcgagagagtgagcctggacgaggacaacgacagactgatggtgagaagcggcggcagccccctgagccccgtgatctacgacagcgacatggacgacgtgcccgagagaggcctgatcagcgacgcccagagcctgtacgtggagctgctgagcgagacccccgccaaccccctgctgctgagcctgagattcgaggccttcgaggaggacagatgcttcgcccccttcctggcccacggcaacgtgaccaccaccgaccccgagtacagacccggcgccctggccaccttcagctgcctgcccggctacgccctggagccccccggcccccccaacgccatcgagtgcgtggaccccaccgagccccactggaacgacaccgagcccgcctgcaaggccatgtgcggcggcgagctgagcgagcccgccggcgtggtgctgagccccgactggccccagagctacagccccggccaggactgcgtgtggggcgtgcacgtgcaggaggagaagagaatcctgctgcaggtggagatcctgaacgtgagagagggcgacatgctgaccctgttcgacggcgacggccccagcgccagagtgctggcccagctgagaggcccccagcccagaagaagactgctgagcagcggccccgacctgaccctgcagttccaggccccccccggcccccccaaccccggcctgggccagggcttcgtgctgcacttcaaggaggtgcccagaaacgacacctgccccgagctgcccccccccgagtggggctggagaaccgccagccacggcgacctgatcagaggcaccgtgctgacctaccagtgcgagcccggctacgagctgctgggcagcgacatcctgacctgccagtgggacctgagctggagcgccgccccccccgcctgccagaagatcatgacctgcgccgaccccggcgagatcgccaacggccacagaaccgccagcgacgccggcttccccgtgggcagccacgtgcagtacagatgcctgcccggctacagcctggagggcgccgccatgctgacctgctacagcagagacaccggcacccccaagtggagcgacagagtgcccaagtgcgccctgaagtacgagccctgcctgaaccccggcgtgcccgagaacggctaccagaccctgtacaagcaccactaccaggccggcgagagcctgagattcttctgctacgagggcttcgagctgatcggcgaggtgaccatcacctgcgtgcccggccaccccagccagtggaccagccagccccccctgtgcaaggtgacccagaccaccgaccccagcagacagctggagggcggcaacctggccctggccatcctgctgcccctgggcctggtgatcgtgctgggcagcggcgtgtacatctactacaccaagctgcagggcaagagcctgttcggcttcagcggcagccacagctacagccccatcaccgtggagagcgacttcagcaaccccctgtacgaggccggcgacaccagagagtacgaggtgagcatctag

SEQ ID NO: 262483 - DNA, 2733 bp, Artificial Sequence
  derived and/or modified sequence
atgggaactcccagggcccagcatccgccccccccccagctgctctttttgatcctgctctcctgcccgtggattcagggcctcccactgaaggaggaagagatccttccggagcctggctccgaaacacccaccgtcgcctcagaggccctcgctgagctgttacacggtgccctcctgcggcgaggacccgagatggggtaccttcctgggagtgatcgggaccccaccttagccacaccgcctgcggggcagactctggctgtcccgtcattaccacgggctacggagcccggaaccggacctctcactaccgcagtgacccctaacggggtgaggggcgccggcccgaccgcgcccgaacttttaactcccccgcctgggaccactgcaccgcctccacccagcccggccagtcctgggccccctcttgggcctgagggcggagaggaggaaacgacgaccaccatcataactaccacaactgtgactacgactgtgacaagtcctgttctgtgtaacaacaatatatctgagggcgaagggtatgtcgaatcccctgatctcggtagtccagttagcaggactctcggtcttctggactgtacttactctatccatgtgtatcccgggtacggaattgaaatccaagtacagaccctgaacctctcacaagaggaggaacttctagtactcgcaggggggggcagtcctggtctggcaccccggctgctggcaaacagtagtatgctcggagagggccaagttctgaggtctccgactaacagactgctcctgcactttcagagccctcgcgttccccggggcggtggatttaggattcattatcaggcttatctcctttcatgtggatttccccccagacctgcccacggggacgtgagcgtgactgacctgcaccccggcggcaccgcgactttccactgcgacagtggataccagctccaaggtgaggagaccctcatctgtcttaatgggactcggccctcttggaacggcgagacaccttcatgtatggcaagctgtggtggcactatccacaacgccaccctgggaaggatcgtatcaccggagccgggtggcgcagtcggtcccaacctgacctgtagatgggtgatagaggccgcagagggacggcggttacacttgcacttcgaaagggtaagccttgacgaggacaatgatcggcttatggttcggtccggcggctctccactctccccggtgatctacgacagcgacatggatgacgtgcccgaaaggggactcatttccgacgcccagtccctgtatgtggagctgttgtcggaaactcccgccaaccccttgctgctgtccctgcgctttgaggcattcgaggaagatcggtgttttgcaccattcctggcccatggcaatgtaaccaccacagatccagaatatcgaccaggagccctggcaacgttcagttgcctgccgggctacgcgctggagcctcccggtccaccaaatgcaatcgagtgtgtcgatcctacagaaccccactggaacgatacagagcccgcctgcaaagcgatgtgcgggggggagctctctgagcccgcaggtgtcgtgttatctcccgactggccacagagctactcgcctggccaagattgcgtttggggtgtgcatgtgcaagaagagaaacgcatcctcctccaggtggagattctgaatgtacgagaaggtgatatgttaacgcttttcgatggcgatgggccttccgcgcgcgtgttagcgcagcttaggggaccacagcctcggcgtaggctgctgtcctctggccctgatctgacccttcaattccaagctccaccaggaccccctaaccccggactcggacagggctttgttctgcatttcaaagaggtacctcggaacgacacatgtcctgagcttcctccacctgagtggggatggagaaccgcctcacacggtgatcttataaggggcaccgtccttacttatcagtgcgagcccgggtatgagctcctcggtagcgacatcctgacctgtcagtgggatctaagctggagtgccgcgccccctgcatgtcaaaaaatcatgacttgtgctgacccaggcgagatcgctaatggacaccgaacagcatctgacgctggattcccagtaggatcccacgtgcaataccgttgcctgcctggctacagcctggaaggggccgcaatgttgacttgttatagcagggacactggtacgcctaaatggagtgatagagtgccaaaatgcgcgcttaaatatgagccatgtttgaatcctggcgtacctgaaaatggctaccaaactctctacaaacatcattaccaggctggagagagtctacgtttcttttgttacgagggcttcgagttaataggggaagttacaattacttgtgttccaggccatccttctcagtggacgtctcagccacctctctgtaaggtgacccagactacagacccctcccgacagctagaaggaggtaacctggcactggccatcctcttgcccctggggctggtcattgtgctgggatctggggtatatatttattataccaaactgcagggtaaatcgctattcggcttctcaggctcacatagttacagtcccataaccgtcgagagtgacttttccaatcccctgtacgaagcgggagacacccgcgagtacgaggtgagtatctag

SEQ ID NO: 262484 - DNA, 2733 bp, Artificial Sequence
  derived and/or modified sequence
atgggcaccccccgggcccagcaccccccaccaccccagctgctcttcctgatcctgctgagctgcccctggatccagggcctgcccctgaaggaggaggagatcctgcctgagcccggcagcgagacccccaccgtggccagcgaggccctggccgagctgctgcacggggccctgctgcggcggggccctgagatgggctacctgcccggcagtgaccgggaccccaccctggccaccccacctgctggccagaccctggccgtgcccagcctgccccgggccacagagcccggcaccggccccctgaccacagctgtgacccccaacggggtgagaggagctggccccacagcccctgagctgctgaccccacctcctggcaccacagcccctcctccacccagccctgccagccctggcccccccctgggccctgagggcggggaggaggagaccaccaccaccatcatcaccaccaccaccgtgaccaccaccgtgaccagccctgtgctgtgcaacaacaacatcagcgagggggagggctacgtggagagcccagacctgggcagccctgtgtccaggaccctgggcctgctggactgcacctacagcatccacgtgtacccaggctacggcatcgagatccaggtgcagaccctgaacctgagccaggaggaggagctgctggtgctggccggcggcggcagccctggcctggccccccggctgctggccaacagctccatgctgggggagggccaggtgctgcggagccccaccaaccggctgctgctgcacttccagagcccccgggtgccccggggcggcggcttccgcatccactaccaggcctacctgctgagctgtggcttcccccccaggcctgcccatggagatgtgtctgtgacagacctgcaccctgggggcacagccaccttccactgtgacagcggctaccagctgcagggcgaggagaccctcatctgcctgaatggcacccggcccagctggaatggagagacccccagctgcatggccagctgtggcggcaccatccacaatgccaccctgggcagaattgtgtccccagagcccggcggcgctgtgggccccaacctgacctgccgctgggtgattgaggccgctgagggccggcggctgcacctgcactttgagcgggtgtccctggatgaagataatgaccggctgatggtgcgcagcggcggcagccccctgagccctgtgatctatgacagcgacatggatgatgtgcctgagcggggcctcatcagtgatgcccagagcctgtatgtggagctgctgtctgagaccccagccaaccccctgctgctgagcctgcgctttgaggcctttgaagaagatcgctgctttgcccccttcctggcccatggaaatgtgaccaccacagatcctgagtacagacctggggccctggccaccttcagctgcctgcccggctacgccctggagcccccaggccccccaaatgccattgaatgtgtggaccccacagagccccactggaatgacacagagcccgcctgcaaggccatgtgtggcggggagctgtctgagcctgctggggtggtgctgagcccagactggccccagagctacagccctggccaggactgtgtgtggggcgtgcacgtgcaggaggagaagaggatcctgctgcaggtggagatcctgaatgtgcgggagggggacatgctgaccctgtttgatggagatggccccagcgcccgggtgctggcccagctgcggggcccccagccccggcggcggctgctgagcagcggccctgacctgaccctgcagttccaggcccctcctggcccccccaaccctggcctgggccagggctttgtgctgcacttcaaggaggtgcccagaaatgacacctgcccagagctgcccccacctgagtggggctggaggacagccagccatggagacctgatccggggcaccgtgctgacctaccagtgtgagcccggctatgagctgctgggcagtgacatcctgacctgccagtgggacctgtcctggagcgctgcccccccagcctgccagaagatcatgacctgtgccgaccccggggagatcgccaacggccacaggacagccagtgatgctggcttccctgtgggcagccacgtgcagtaccgctgcctgcccggctacagcctggagggcgccgccatgctgacctgctacagccgggacaccggcacccccaagtggagcgacagagtgcccaagtgtgccctgaagtatgagccctgcctgaaccctggggtgcctgaaaatggctaccagaccctgtacaagcaccactaccaggccggggagagcctgcgcttcttctgctatgagggctttgagctgattggagaggtgaccatcacctgtgtgcccggccaccccagccagtggaccagccagccccccctgtgcaaggtgacccagaccacagaccccagccggcagctggagggcggcaacctggccctggccatcctgctgcccctgggcctggtgattgtgctgggcagcggcgtgtacatctactacaccaagctgcagggcaagagcctgtttggcttcagcggcagccacagctacagccccatcaccgtggagagtgacttcagcaaccccctgtatgaggccggggacacccgggagtatgaggtgtccatctag

SEQ ID NO: 262485 - DNA, 2733 bp, Artificial Sequence
  derived and/or modified sequence
atgggcaccccccgggcccagcaccccccccccccccagctgctgtttttgatcttactttcttgtccttggattcaggggctgccacttaaggaagaagaaatcctgcctgagcccggcagcgagacacccaccgtagcaagcgaagctctggccgagttgctgcatggagcccttcttaggcgcgggcccgagatgggctatttgccggggtctgatcgcgatccaaccctcgcaacacctcccgctggtcaaacgctggccgtcccatcactccccagagcaacggagcccggcaccggccccttgactacggcagtgacacctaatggcgtcagaggggctggccccactgcgcctgagttactgaccccgccccctgggacaaccgcgccccccccaccctcaccagcgtcaccaggcccccctctgggccctgaggggggcgaagaggaaacgactactacaataattactaccaccacagtgacgactacagtaacatcacccgtactctgcaacaataacatatcggaaggggaggggtatgtggagagtcctgacctgggcagccccgtcagccggactcttggcttgttagattgtacttactccatccatgtctacccgggttacggaatcgagatccaggtccagaccctcaacctgagccaggaggaggaactgcttgtgctcgcaggcggcggatccccagggttggccccaagactgctcgccaatagttccatgcttggagaaggacaggtgctaagaagcccaaccaatcggctcttactgcatttccagtccccacgtgtcccccgcgggggtggattcagaatccattatcaggcatacctgctgtcctgcggcttccccccccggcctgcacacggggacgtgagcgtcaccgatttgcaccccggagggactgcaacattccactgcgactcaggttatcagctgcaaggcgaagagactctgatctgcttgaatggtacgaggccgtcctggaacggagaaaccccttcctgtatggcaagttgcgggggcaccatccataatgcgacactggggagaatagtgagtcctgagccaggaggtgccgtgggccctaatttaacctgcagatgggttattgaggctgccgagggcagacggctccaccttcactttgagagggtgtcccttgacgaggacaacgatcgccttatggtccgaagcggaggttctcctctgtctccggtgatttacgatagcgatatggacgacgtgccagagagagggctgatatctgacgctcaatccctctacgttgaactgctttctgagacccccgccaatcccctcctgttgtctttgcggtttgaggcattcgaggaagatcgctgcttcgcccccttccttgcccacggcaatgtgaccacgaccgatccagagtaccggcccggcgccctggccacctttagttgtttgcccggctatgccctggaaccgcccggcccgcctaatgctattgaatgtgtcgaccccaccgagccacattggaatgacactgaacccgcctgtaaagccatgtgcggcggcgagttatccgagccggcaggtgtggtgcttagcccggattggccccagtcctattcacccggccaggattgcgtgtggggcgtgcatgtgcaggaggagaaaaggatactattgcaggtagaaatcctgaacgtgcgggagggggacatgctcactttattcgacggtgatggcccaagcgcgcgcgtactcgcacagttacgcggtccccaacccaggcgccggcttctgtccagcggtcccgacttaaccctgcaattccaggccccacctggccccccgaacccagggctgggacagggatttgtccttcacttcaaagaagttccccgcaacgatacctgccctgagctcccgcctccagaatggggatggcgaacagcaagccatggcgacctcatcagaggcacggttctcacgtaccagtgtgagcccgggtatgagttactggggagcgacattttgacctgtcaatgggatctttcctggtcagccgccccgccagcctgccaaaagatcatgacctgcgctgaccctggcgagatcgccaacggacacagaacggcctctgatgccgggtttcccgtgggttctcatgtgcagtatcgctgcttacctggttactctctcgagggcgcagcaatgctaacatgctatagccgagacactgggactccgaaatggtcagatagagtgcccaaatgtgctctcaaatacgagccgtgtttgaatcctggggtgcctgagaacggataccagacgctgtacaaacaccactaccaagccggcgagagcctgaggttcttctgctatgagggttttgaattgattggcgaagtgacgattacctgtgtcccaggccacccttctcagtggactagccagcctcccctgtgtaaggtcacccagaccaccgaccccagtagacagctggagggcggcaatctggccctggcaatcctcctacctctgggcctcgtgattgttctgggatccggcgtgtatatttattacacaaaattgcagggaaaaagtctgtttggattctctggttcccactcatattcaccaatcaccgtggaatccgatttcagcaaccctctgtacgaggcaggtgacaccagagaatatgaggtgtctatctag

SEQ ID NO: 262486 - DNA, 2733 bp, Artificial Sequence
  derived and/or modified sequence
atgggaacaccacgtgctcaacacccccctcctccccaactgttatttctgattctgctgagctgcccatggatacaggggctgcctctgaaggaagaagagatcctgcccgagccagggtcagaaacacccactgttgcctccgaggcactggccgaactcctgcatggcgcactgctcaggcggggaccagagatggggtacctgcctggctccgatcgagaccccaccttggctacaccacctgccggtcagacactagcagtgcccagcctgcctcgggcaaccgaaccaggcaccggtcctctgactactgcagtcacccccaatggggtgcgaggggctggacccactgcccctgaactcttaactccaccccctgggacaacggctcccccacccccatcccccgcttccccagggcctccgctggggccagaagggggagaagaagagaccacaacaactatcatcaccactacaaccgtgaccaccactgtgaccagcccagttctgtgcaataataacatttccgagggagagggttacgttgagtcccctgacctgggcagtcctgtctctaggaccctcggactgttagattgtacatattctattcatgtatacccgggatacggcattgagatacaggtgcagacgctcaacttgtctcaagaagaggaactgctggtcttggctggcggagggagtccagggcttgccccacgcctcttggcaaactcaagcatgttaggggaaggccaggtgctgcgtagtcccacaaaccgactactgctccatttccagtctcccagagtcccgcgtgggggtggctttcggattcactaccaggcgtacttactgtcctgcggctttcccccacggccagcacatggcgacgtgagtgtaaccgatttgcatcctgggggaacagcgactttccactgcgactcaggctaccaactccagggagaagagacactcatctgtctgaatggaacccgtccatcttggaatggagaaacaccttcatgtatggcatcttgcggaggcaccatccataacgctactttaggacggattgtgtccccagagcccggaggtgcagttggtcctaatctgacctgtagatgggtcattgaggcagcggaaggccgaaggctccatctgcactttgagagggtttccctcgatgaagataatgatcgactcatggtgcggagcggcggtagtcccctgtctccagttatatacgacagcgatatggacgatgtccctgagaggggacttatctctgacgcgcagtcactttacgtagagctcctcagcgagacccccgctaacccactacttctctctctgcgctttgaagcctttgaggaagaccggtgttttgcacctttcctggcccatgggaatgtgaccaccacggaccctgagtacagaccaggcgcactcgctacattcagctgtcttcccggatacgcattggagccgccaggcccaccaaacgctatcgaatgcgtcgatccaaccgagccccactggaacgacacggagcccgcatgcaaggctatgtgcggaggagagctgagcgagccggcaggtgtcgtgctctcgccagattggcctcagtcgtatagtcccggacaggattgtgtatggggagtgcacgttcaggaagagaagcgcatcctgctgcaggtggagatcctgaatgtgcgggagggggacatgctgacactgttcgatggagacggtccctctgccagggtcctggctcagctgagaggccctcagcctagaagacgcctgctgtcctccggacctgacctgacattgcaatttcaggctccccctgggccacctaaccccggactgggacagggatttgtgctccactttaaagaggtccccagaaacgatacctgccccgagctccctccgccagagtggggctggcggaccgcatctcatggcgacttaatccggggaacagtgctcacttaccaatgtgagccaggctatgagttgctgggaagtgatatcctgacttgtcaatgggatctgtcgtggagcgcggcaccaccggcttgccagaagatcatgacctgtgctgaccccggagagatcgccaacggtcaccgcacagcctctgacgctggctttccagtgggatcacacgtccagtatcggtgccttccgggttacagcctggaaggggcagccatgctgacgtgttatagcagggacactggcacacctaaatggagtgaccgggtccctaagtgtgccctgaagtacgaaccatgcctgaacccaggtgtgcccgagaacggctaccagacgctctataagcaccactaccaagccggagaaagcctccgcttcttctgctacgaagggttcgagctgatcggcgaagtgactatcacctgtgtacctggacacccatcacaatggacctcgcaacccccactgtgcaaggttactcagacaaccgatccttcccgtcagctagaaggcggtaatctggcccttgcaattctattgccactcgggctcgtcattgttctcggcagcggggtgtacatctactacacaaagctgcaaggaaaatcactgtttggcttttccggttcacattcctactcccccataaccgttgaatcagacttttccaaccctctctatgaggctggagacacccgggaatacgaagtcagcatctag

SEQ ID NO: 262487 - DNA, 3491 bp, Artificial Sequence
  derived and/or modified sequence
ggagactgagcaaaggggggtgggctccaggcgacccctagcccaattctgcccctccatcccaaggggcagagaaattgtctttctttgctgactcctacgaggaaaaaaaaaaaaaaaaaaaaaacaattaaagggaaagataaacggagacggaggaaaggtggcagccagattacttagagaggcacagaggagagagatcggggtgagtcgccatggggactcccagggcccagcacccgccgcctccccagctgctgttcctaattctgctgagctgtccctggatccagggtctgcccctgaaggaggaggagatattgccagagcctggaagtgagacccccacggtggcctctgaggccctggctgaactgcttcatggggccctgctgaggaggggcccagagatgggctacctgccaggatctgatcgggaccccacgctagccacccctccggccggccagactctcgcagtgccctccctgccacgggccactgagccggggacagggcctctgacaacagccgtcacccctaacggggtcaggggggcaggccccactgcgccagaactgctgaccccgcccccaggaaccacagccccacccccacccagccctgcctccccagggcctccccttgggcctgagggaggagaggaggagacgacgaccaccatcatcaccacgacaactgttaccactacggtgaccagcccagttctgtgtaataacaacatctccgagggcgaagggtatgtggagtctccagatctggggagccccgtcagccgcaccctggggctcctggactgcacttacagcatccatgtctaccctggctacggcattgagatccaggtgcagacgctgaacctgtcacaggaagaggagctcctggtgctggctggtgggggatccccaggcctggccccccgactcctggccaactcatccatgcttggagaaggacaagtccttcggagcccaaccaaccggctgcttctgcacttccagagcccacgggtcccaaggggcggtggcttcaggatccactatcaggcctacctcctgagctgtggcttccctccccggccggcccatggggacgtgagtgtgacggacctgcaccctgggggcactgccacctttcactgtgattcgggctaccagctgcagggagaggagaccctcatctgcctcaatggcacccggccatcctggaacggtgaaacccccagctgcatggcatcctgtggtggcaccatccacaatgccaccctgggccgcatcgtgtccccagagcctgggggagccgtagggcccaacctcacctgccgttgggtcattgaagcagctgaggggcgccggctgcacctgcactttgaaagggtctcgctggatgaggacaatgaccggctgatggtgcgctcagggggcagccccctatcccccgtgatctatgattcggacatggacgatgtccccgagcggggtctcatcagtgacgcccagtccctctacgtggagctgctgtcagagacacctgccaatcccctgctgttaagccttcgatttgaagcctttgaggaggatcgctgcttcgcccccttcctggcacatggaaatgtcactaccacggaccctgagtatcgcccaggggcactggcaaccttctcgtgcctcccaggatatgccctggagccccctgggccccccaatgccatcgaatgtgtggatcccacagaaccccactggaacgacacagagccggcctgcaaagccatgtgtggaggggagctgtcggaaccagctggcgtggtcctctctcccgactggccccagagctatagcccgggccaagactgcgtgtggggcgtgcacgtccaggaagagaagcgcatcttgctccaagttgagatattgaatgtgcgggaaggggacatgctgacgctgttcgacggggacggtcccagcgcccgagtcttggcccagctgcggggacctcagccgcgccgccgccttctctcctctgggcccgacctcacactgcagtttcaggcaccgcccgggcccccaaatccaggcctgggccagggcttcgtattgcacttcaaagaggtcccgaggaacgacacgtgccccgagctgccacctccggagtggggctggagaacggcatcccacggggacctgatccggggcacggtgctcacctaccagtgcgagcctggctacgagctgctaggctccgacattctcacttgccagtgggacctgtcttggagcgccgcgccgcccgcctgccaaaagatcatgacttgtgctgaccctggcgagattgccaacgggcaccgcaccgcctcggacgccggcttccccgttggctcccacgtccagtaccgctgcctgccagggtacagcctcgagggggcagccatgctcacctgctacagccgggacacaggcacacccaagtggagcgatagggtccccaaatgcgccttgaagtacgagccgtgcctgaacccgggggttcccgagaatggctaccagacgctgtacaagcaccactaccaggcgggcgagtctctgcgcttcttctgctatgagggctttgagcttatcggcgaggtcaccatcacctgtgtgcccggccacccctcccagtggaccagccagcccccactctgcaaagtgacccagaccacagatccatcacggcagctggaaggggggaacctggccctggccatcctgctgcctctaggcttggtcattgtcctcggcagtggcgtttacatctactacaccaagcttcagggaaagtcccttttcggcttctcgggctcccactcctacagccccatcaccgtggagtcggacttcagcaacccgctgtatgaagctggggatacgcgggagtatgaagtttccatctgaaccccaagactacagctgcaggacccaggacgcccctcccctcctcattcgggcagagggaaatacgggacccggtctctgcctcctggctgccctcctccctggctgtgtaaatagtctccctatcccacgagggggctttgatggccctggagatcctacagtaaataaaccagcatcctgccgcccaaagccgcctcttctcagttgccaaacgaggggcctgccccccgccctaccggcttttggattctgggaggggaactctgcctccctgcaaatcttgcagcccctcctgcccagggcacccctcaaggactgcccccgatagctctactgttcccttggccacgaaggtgcccccctcccagatgccctggccctaggcctgactccggccaggagggtcagaagaaggacaaaggggagagctgggacaaggccttgcccccttcctgccatctccccaacccacagtctctccacctttgcttctgaattcttgtttttgagcaataaacagaaaatcgccacttgtaa

SEQ ID NO: 262488 - protein, 353 aa, Artificial Sequence
  derived and/or modified sequence
MAAELAMGAELPSSPLAIEYVNDFDLMKFEVKKEPPEAERFCHRLPPGSLSSTPLSTPCSSVPSSPSFCAPSPGTGGGGGAGGGGGSSQAGGAPGPPSGGPGAVGGTSGKPALEDLYWMSGYQHHLNPEALNLTPEDAVEALIGSGHHGAHHGAHHPAAAAAYEAFRGPGFAGGGGADDMGAGHHHGAHHAAHHHHAAHHHHHHHHHHGGAGHGGGAGHHVRLEERFSDDQLVSMSVRELNRQLRGFSKEEVIRLKQKRRTLKNRGYAQSCRFKRVQQRHILESEKCQLQSQVEQLKLEVGRLAKERDLYKEKYEKLAGRGGPGSAGGAGFPREPSPPQAGPGGAKGTADFFL

SEQ ID NO: 262489 - DNA, 371 bp, Artificial Sequence
  derived and/or modified sequence
gcgcctgcccacctgccaccgactgctggaacccagccagtgggagggcctggcccaccagagtcctgctccctcactcctcgccccgccccctgtcccagagtcccacctgggggctctctccacccttctcagagttccagtttcaaccagagttccaaccaatgggctccatcctctggattctggccaatgaaatatctccctggcagggtcctcttcttttcccagagctccaccccaaccaggagctctagttaatggagagctcccagcacactcggagcttgtgctttgtctccacgcaaagcgataaataaaagcattggtggcctttggtctttgaataaagcctgagtaggaagtctaga

SEQ ID NO: 262490 - DNA, 1062 bp, Artificial Sequence
  derived and/or modified sequence
atggccgccgagctggccatgggcgccgagctgcccagcagccccctggccatcgagtacgtgaacgacttcgacctgatgaagttcgaggtgaagaaggagccccccgaggccgagagattctgccacagactgccccccggcagcctgagcagcacccccctgagcaccccctgcagcagcgtgcccagcagccccagcttctgcgcccccagccccggcaccggcggcggcggcggcgccggcggcggcggcggcagcagccaggccggcggcgcccccggcccccccagcggcggccccggcgccgtgggcggcaccagcggcaagcccgccctggaggacctgtactggatgagcggctaccagcaccacctgaaccccgaggccctgaacctgacccccgaggacgccgtggaggccctgatcggcagcggccaccacggcgcccaccacggcgcccaccaccccgccgccgccgccgcctacgaggccttcagaggccccggcttcgccggcggcggcggcgccgacgacatgggcgccggccaccaccacggcgcccaccacgccgcccaccaccaccacgccgcccaccaccaccaccaccaccaccaccaccacggcggcgccggccacggcggcggcgccggccaccacgtgagactggaggagagattcagcgacgaccagctggtgagcatgagcgtgagagagctgaacagacagctgagaggcttcagcaaggaggaggtgatcagactgaagcagaagagaagaaccctgaagaacagaggctacgcccagagctgcagattcaagagagtgcagcagagacacatcctggagagcgagaagtgccagctgcagagccaggtggagcagctgaagctggaggtgggcagactggccaaggagagagacctgtacaaggagaagtacgagaagctggccggcagaggcggccccggcagcgccggcggcgccggcttccccagagagcccagccccccccaggccggccccggcggcgccaagggcaccgccgacttcttcctgtag

SEQ ID NO: 262491 - DNA, 1062 bp, Artificial Sequence
  derived and/or modified sequence
atggcggcagaattggcgatgggtgcagagctgcctagtagccccctcgcaattgaatacgtgaatgatttcgacttgatgaagtttgaggtgaaaaaagagccaccagaagctgaacggttctgccaccgcttgccaccaggtagcctgtcaagtacaccactatcgaccccctgtagttcggtcccttcatccccctccttctgcgcaccctctcccggcacagggggggggggaggagctggcggaggcggcggaagttctcaggccggcggtgcaccaggacctcctagcggggggccaggcgccgtgggcggaacttctggcaagcctgcactggaggacttgtactggatgtccgggtatcagcatcacctgaaccccgaggctctgaacctgacgcctgaagatgcggtggaggcactgatcggatccgggcaccatggagctcatcatggcgcacaccatcctgcagccgccgccgcatatgaagccttccggggccccggtttcgcaggaggaggaggagctgacgacatgggcgccggacaccatcacggcgcccatcatgccgctcaccatcaccatgccgctcaccatcaccatcatcaccaccaccatcatggcggagccgggcacgggggcggcgccggccaccacgttaggctggaagagcgcttcagtgatgatcaactcgtttccatgtctgtccgggagctgaaccgacagctgaggggattttccaaggaggaggtaattaggctcaaacagaaacgacggaccctcaaaaatcggggatacgcacagtcatgccgattcaagcgagtgcagcagagacacattttagaatcagagaaatgccaattacagtcccaggtagagcagctcaaattagaagtgggtcgtctcgccaaagagcgagatttgtacaaggaaaaatacgagaaactggctggtagagggggccctggcagcgccggcggcgccggcttcccaagagagccatctcctcctcaggctgggccagggggggccaagggaaccgccgacttttttctgtag

SEQ ID NO: 262492 - DNA, 1062 bp, Artificial Sequence
  derived and/or modified sequence
atggctgctgagctggccatgggcgctgagctgcccagcagccccctggccatcgagtatgtgaatgactttgacctgatgaagtttgaggtgaagaaggagcccccagaggccgagcgcttctgccaccggctgcccccaggcagcctgagcagcacccccctgagcaccccctgcagctctgtgcccagcagccccagcttctgtgcccccagccctggcactggaggcggcggcggggccggcggcggcggcggcagcagccaggccggcggggcccctggcccccccagcggcggccctggagctgtgggcggcaccagcggcaagccagccctggaggacctgtactggatgagcggctaccagcaccacctgaaccctgaggccctgaacctgaccccagaagatgctgtggaggccctgattggcagcggccaccacggggcccaccacggggcccaccaccctgctgctgctgctgcctatgaggccttccggggccctggctttgctgggggcggcggcgcagatgacatgggcgccggccaccaccacggggcccaccacgccgcccaccaccaccacgccgcccaccaccaccaccaccaccaccaccaccacggcggggccggccatggaggaggagctggccaccacgtgcggctggaggagcgcttcagtgatgaccagctggtgtccatgtctgtgcgggagctgaaccggcagctgcggggcttcagcaaggaggaggtgatccggctgaagcagaagaggaggaccctgaagaacagaggctacgcccagagctgccgcttcaagagggtgcagcagaggcacatcctggagagcgagaagtgccagctgcagagccaggtggagcagctgaagctggaggtgggccgcctggccaaggagcgggacctgtacaaggagaagtatgagaagctggccggccggggcggccctggcagcgctgggggcgccggcttcccccgggagcccagccccccccaggccggccctgggggcgccaagggcacagctgacttcttcctgtag

SEQ ID NO: 262493 - DNA, 1062 bp, Artificial Sequence
  derived and/or modified sequence
atggccgccgagctggccatgggcgccgagctgcccagcagccccctggccatagaatacgtgaacgattttgacttaatgaagttcgaagtgaaaaaggagcccccagaggctgaaaggttttgccatcggttacccccaggtagtttgtccagtactcctctgtcaactccatgttccagtgtcccctctagtcctagtttctgcgctccctcccctggtaccggaggcggcggcggggctggtgggggcgggggcagctcacaggctgggggggcccccggccccccttcgggcggcccaggcgcagtcggaggaactagtggtaaacctgctctcgaggatctgtattggatgtccgggtaccagcaccaccttaatccagaagccctgaacctcacaccagaagacgccgtcgaagccttaatcggtagtggccatcacggagcacaccacggagcccatcatcctgccgcagcagccgcttatgaagcgttccgcggccctggctttgctggaggcgggggagctgacgatatgggcgctggccatcaccacggcgcccatcatgcagcgcatcaccaccacgctgcccatcaccaccatcatcatcaccatcaccacgggggagccgggcatggcgggggagccggacaccacgtccgtttagaggagagattctccgacgatcagttggtttcaatgtctgtgcgggagctgaatcggcaactgcgcgggttcagcaaggaggaggttatccggctaaaacaaaaaaggcgcaccctgaagaaccgcggctacgcccaatcctgcagattcaaacgtgtccagcagcggcatatcctagagtccgaaaagtgtcagctccaatctcaagtggagcagctgaagcttgaggtcgggaggctggccaaggagcgtgatctgtataaggaaaaatacgagaaacttgcaggccgaggggggcccggaagcgctggaggagcggggtttccaagagaaccaagcccaccccaggctggtccaggcggggccaaggggactgccgattttttcctttag

SEQ ID NO: 262494 - DNA, 1062 bp, Artificial Sequence
  derived and/or modified sequence
atggcagcggagctggcgatgggcgctgagctgccctcatcccctttggccatcgagtatgtaaacgattttgacctgatgaagtttgaagtcaagaaagagccaccggaagccgagagattctgccacaggttaccaccagggagtctttcatcaaccccgctcagcactccctgtagctcagttccatcttcaccgtccttctgtgccccatcccccggtaccggcggtggcggaggcgctggcggagggggaggctctagccaggccggtggcgcaccgggtccaccaagcggcggacctggggctgttggtggtacctctggcaagccggctctcgaggatctttattggatgagcggctatcagcaccatttaaacccggaggctttgaatctgacacccgaagatgccgttgaggcgttgatcgggagcggccaccacggggctcatcacggggctcaccacccagccgctgccgcagcctacgaggctttcagggggcctggcttcgccggagggggaggagctgacgatatgggggcagggcatcaccacggagcacatcatgcggctcaccatcaccatgccgcacaccatcaccaccaccatcaccaccatcacgggggtgctggacacgggggtggggctggccaccacgtaaggctggaggaacgtttcagcgatgatcaactggtgtctatgtcagtccgggagctaaataggcaactgcgcggtttctccaaggaagaagtcatccggctgaagcagaaaagacgtacactgaaaaatcggggatatgcacagtcctgtcggttcaagcgtgtgcagcagcgacatatcctcgaatctgagaagtgccagctgcagtcccaagttgagcagctgaagctggaggtgggcagactggctaaggagagggacctgtacaaggagaagtatgagaagctcgccggaaggggagggcctggcagcgccggaggtgcgggattcccacgagagcctagtcctccccaggccggtcctggtggcgctaaaggaacagccgatttttttctctag

SEQ ID NO: 262495 - DNA, 2347 bp, Artificial Sequence
  derived and/or modified sequence
atggccgcggagctggcgatgggcgccgagctgcccagcagcccgctggccatcgagtacgtcaacgacttcgacctgatgaagttcgaggtgaagaaggagcctcccgaggccgagcgcttctgccaccgcctgccgccaggctcgctgtcctcgacgccgctcagcacgccctgctcctccgtgccctcctcgcccagcttctgcgcgcccagcccgggcaccggcggcggcggcggcgcggggggcggcggcggctcgtctcaggccgggggcgcccccgggccgccgagcgggggccccggcgccgtcgggggcacctcggggaagccggcgctggaggatctgtactggatgagcggctaccagcatcacctcaaccccgaggcgctcaacctgacgcccgaggacgcggtggaggcgctcatcggcagcggccaccacggcgcgcaccacggcgcgcaccacccggcggccgccgcagcctacgaggctttccgcggcccgggcttcgcgggcggcggcggagcggacgacatgggcgccggccaccaccacggcgcgcaccacgccgcccaccatcaccacgccgcccaccaccaccaccaccaccaccaccaccatggcggcgcgggacacggcggtggcgcgggccaccacgtgcgcctggaggagcgcttctccgacgaccagctggtgtccatgtcggtgcgcgagctgaaccggcagctccgcggcttcagcaaggaggaggtcatccggctcaagcagaagcggcgcacgctcaagaaccgcggctacgcgcagtcctgccgcttcaagcgggtgcagcagcggcacattctggagagcgagaagtgccaactccagagccaggtggagcagctgaagctggaggtggggcgcctggccaaagagcgggacctgtacaaggagaaatacgagaagctggcgggccggggcggccccgggagcgcgggcggggccggtttcccgcgggagccttcgccgccgcaggccggtcccggcggggccaagggcacggccgacttcttcctgtaggcgccggaccccgagcccgcgccgccgtcgccggggacaagttcgcgcaggcctctcggggcctcggctcggactccgcggtacaggacgtggacaccaggcccggcccggccgtgctggccccggtgccaagtctgcgggcgcggggctggaggccccttcgctcccggtccccgttcgcgcgcgtcggcccgggtcgccgtcctgaggttgagcggagaacggtgatttctaaggaaacttgagccaggtctaacttctttccaagcgtccgcttgtacatacgttgaacgtggttctccgttcccaccttcgccctgccagcctagagggaccgcgctgccgtcccttcccgggtggcccctgcctgcccccgccctccttcgttctcttctcagcctccctttccttgccttttttaacttcccctccccgttttaaaatcggtcttattttcgaagtatttataattattatgcttggtgattagaaaagaaaaccttggaggaagccccttctttccccagccggggtccgccctcagtcgcgagtcacagcatgagtcgctcgccaggaggggcccggcccctgcctgccccctccccgcttgcccccgaccctgctaccggcgttccttggaggtcgaagccagggacgtcacccgtgctgtgtccaggcctgctgtcctactatgctcaaccgggggtggggggaggggggtgagtcctgtgctcagtcgggtgggggctggcccggatcccgagctgctgtctctctatgcaccagaacatatctgtaactcctggggaaatacatcttgttttaaccttcaagagaagtgaaagaaaaaagtaatgcacagtatttctagcagaaaatttttttttttaagaggaggcttgggccagagccttctggcatggggcgggtggagaaagtgtttttattttaatttaaattgtgtttcgttttgtttgtggaatctttctttaatgcttcgtcgctctttggactagccgggagagagggcgaggaggcgggtgctccaggccctgtaggctgggccaggcgcctgggggatctgcccgttttcggaggccctcaggggccatcagtgggattccagccgctccacacccctcccctgagcactcggagtggaaggcgcgccgactcgttgaaagttttgttgtgtagttggttttcgttgagttcttttttcatttgctacgaaactgagaaaaagaaaaaaatacacaaaataaatctgttcagatccaagtca

SEQ ID NO: 262496 - protein, 606 aa, Artificial Sequence
  derived and/or modified sequence
MLDRRLIAPQTKYIIPGGSADSYTSRPSDSDVSLEEDREAVRREAERQAQAQLEKAKTKPVAFAVRTNVSYSAAHEDDVPVPGMAISFEAKDFLHVKEKFNNDWWIGRLVKEGCEIGFIPSPVKLENMRLQHEQRAKQGKFYSSKSGGNSSSSLGDIVPSSRKSTPPSSAIDIDATGLDAEENDIPANHRSPKPSANSVTSPHSKEKRMPFFKKTEHTPPYDVVPSMRPVVLVGPSLKGYEVTDMMQKALFDFLKHRFEGRISITRVTADISLAKRSVLNNPSKHAIIERSNTRSSLAEVQSEIERIFELARTLQLVVLDADTINHPAQLSKTSLAPIIVYVKISSPKVLQRLIKSRGKSQAKHLNVQMVAADKLAQCPPELFDVILDENQLEDACEHLADYLEAYWKATHPPSSSLPNPLLSRTLATSSLPLSPTLASNSQGSQGDQRTDRSAPIRSASQAEEEPSVEPVKKSQHRSSSSAPHHNHRSGTSRGLSRQETFDSETQESRDSAYVEPKEDYSHDHVDHYASHRDHNHRDETHGSSDHRHRESRHRSRDVDREQDHNECNKQRSRHKSKDRYCEKDGEVISKKRNEAGEWNRDVYIRQ

SEQ ID NO: 262497 - DNA, 1821 bp, Artificial Sequence
  derived and/or modified sequence
atgttggacagacgactgattgccccgcagacaaagtacatcattccaggaggttccgcagactcttatacaagcaggccttctgatagcgacgtttcccttgaagaggaccgcgaggcggtgcgacgcgaggccgaacgccaggcacaggcacagttggaaaaggctaagacaaaacctgtagcctttgccgtccgcacaaacgtttcctactccgccgcccatgaggatgatgtgcccgtgcccgggatggccatttcgttcgaggcgaaggatttcctgcacgtgaaggagaagtttaacaatgattggtggatcggccggctggttaaggagggatgcgaaatcggatttataccaagccctgtgaaattggagaatatgcgtctgcaacatgaacagagagctaagcagggcaagttttattctagcaaatctggaggcaatagctcttcttccctgggcgacattgtaccttccagccggaagtcgacacccccaagttccgctattgatattgacgcaaccgggctggacgctgaagagaatgacatccctgcaaatcaccgtagcccaaaaccttcggcaaatagtgtgaccagcccccacagcaaagagaaaagaatgcctttttttaaaaaaacagagcacactccgccttacgatgtggtcccatctatgcggcctgtcgtgcttgttggccctagccttaagggctacgaggtgaccgacatgatgcagaaagctttgttcgacttcctgaaacatagattcgagggccgcatttcgatcacccgagttacggccgacatctcattagccaaaaggtctgtgcttaataatcctagcaagcacgctatcatcgaaagaagcaatacacgtagcagtcttgcagaagtgcagagtgaaattgaaagaattttcgagttagccaggacattgcagctggtggtgttggacgccgacaccataaatcatcctgcccagttgtccaaaacgagcctggcacccataatagtgtatgtcaaaatctcttctccaaaggtgctccagcgacttattaagtctcgaggcaagagccaggcgaaacacctgaatgtgcaaatggtggccgctgataaactcgcgcagtgtccacccgaactatttgacgtgatcctagatgagaaccagctggaagacgcatgcgagcatttggccgattatctggaggcatattggaaggccacacatcccccctcatcctcccttcctaatcctctgctgtctcggacactggcgactagctccctgcctctcagcccgactctcgcctccaattcccaaggcagccagggcgaccagcgtacagatcgcagcgcacctatccgatccgcatcccaagctgaggaggagccttcagtcgaaccggtcaaaaagagtcagcaccgatccagcagtagcgcaccgcaccacaaccaccgaagtggaactagccggggactgtcaaggcaggagacattcgactccgaaacgcaagagtcacgtgattcagcgtacgtcgaaccaaaggaggattatagccacgatcatgtggatcactacgcttcacaccgggaccataaccacagggacgagacgcacgggtccagtgatcatcggcatcgagagagcaggcataggagtagggacgtcgatagagaacaggatcacaatgagtgtaacaagcagcgttctaggcataagagtaaggaccgctactgtgagaaggatggggaggtaatctctaaaaagagaaatgaagccggagaatggaatcgcgacgtctatattagacagtag

SEQ ID NO: 262498 - DNA, 1821 bp, Artificial Sequence
  derived and/or modified sequence
atgctggaccggcggctgattgccccccagaccaagtacatcatccctgggggcagcgctgacagctacaccagccggcccagcgacagtgatgtgtccctggaggaggaccgggaggccgtgcggcgggaggccgagcggcaggcccaggcccagctggagaaggccaagaccaagcctgtggcctttgctgtgaggaccaacgtgtcctacagcgctgcccatgaagatgatgtgcctgtgcccggcatggccatcagctttgaggccaaggacttcctgcacgtgaaggagaagttcaacaatgactggtggattggccgcctggtgaaggagggctgtgagatcggcttcatccccagccctgtgaagctggagaacatgaggctgcagcacgagcagagggccaagcagggcaagttctacagcagcaagagcggcggcaacagcagcagcagcctgggggacatcgtgcccagcagcaggaagagcaccccacccagcagcgccattgatattgatgccaccggcctggatgctgaggagaatgacatcccagccaaccacaggagccccaagcccagcgccaacagcgtgaccagcccccacagcaaggagaagaggatgcccttcttcaagaagacagagcacaccccaccctatgatgtggtgcccagcatgaggcctgtggtgctggtgggccccagcctgaagggctatgaggtgacagacatgatgcagaaggccctgtttgacttcctgaagcacagatttgagggccgcatcagcatcaccagggtgacagctgacatcagcctggccaagaggtctgtgctgaacaaccccagcaagcacgccatcatcgagaggagcaacaccaggagcagcctggccgaggtgcagagcgagattgaaagaatttttgagctggcccggaccctgcagctggtggtgctggatgctgacaccatcaaccacccagcccagctgagcaagaccagcctggcccccatcatcgtgtatgtgaagatcagcagccccaaggtgctgcagaggctcatcaagagccggggcaagagccaggccaagcacctgaatgtgcagatggtggccgctgacaagctggcccagtgccccccagagctgtttgatgtgatcctggatgagaaccagctggaggatgcctgtgagcacctggccgactacctggaggcctactggaaggccacccacccccccagcagcagcctgcccaaccccctgctgagcaggaccctggccaccagcagcctgcccctgagccccaccctggccagcaacagccagggcagccagggcgaccagaggacagacagaagtgcccccatccgcagcgccagccaggccgaggaggagcccagcgtggagcctgtgaagaagagccagcacaggagcagcagcagcgccccccaccacaaccacaggagcggcaccagccggggcctgagccggcaggagacctttgattctgagacccaggagagccgggacagcgcctacgtggagcccaaggaggactacagccatgaccacgtggaccactacgccagccaccgggaccacaaccacagagatgagacccacggcagcagtgaccaccgccaccgggagagccgccacaggagcagagatgtggaccgggagcaggaccacaatgaatgcaacaagcagaggagccgccacaagagcaaggaccgctactgtgagaaggatggagaggtgatcagcaagaagagaaatgaagctggggagtggaacagagatgtgtacatccggcagtag

SEQ ID NO: 262499 - DNA, 1821 bp, Artificial Sequence
  derived and/or modified sequence
atgctggaccggcggctgatcgccccccagaccaagtacatcatccccggtggatccgccgatagctacacgagtcgaccctctgatagcgacgtatccctggaggaggaccgtgaggccgtgcgtagggaagctgaaagacaggctcaggctcagctggaaaaggctaaaaccaagcccgtcgcattcgctgtccgtacaaacgtctcttacagcgctgctcacgaggacgacgtgcccgtacctggtatggccatcagtttcgaggccaaagatttcctccacgttaaggagaagttcaacaacgactggtggattgggcgactggtgaaagagggttgtgaaatcggcttcattccatccccagtgaagttagagaacatgagattgcagcatgagcaacgcgccaaacagggcaaattttattcatccaagagcggcggaaacagcagtagctctctgggtgacatcgttccaagcagtcgcaagtctacgccgcctagttctgccattgatatagatgccaccggcctcgatgcggaagagaacgacatcccagcgaaccacaggtctcccaaacccagcgcaaatagtgtcacctcacctcactcgaaagagaaaaggatgcccttttttaagaagaccgaacatactcctccatatgacgtggtacccagcatgcgcccagttgtgttggtgggcccaagcctaaagggctatgaagtaacagacatgatgcagaaggccctgtttgacttcctgaaacatagatttgaggggaggatctcgattaccagagtcactgccgatatctcgttagcgaaacgatctgtacttaataacccaagcaagcatgccattattgagagatcaaacacacgcagcagcctcgccgaagtccagtctgaaattgagcggattttcgagctagcccgaactctccaacttgtcgtgctcgacgctgacacaataaatcatccggcccagctttctaaaacaagcctcgcccctattatcgtttatgtcaagatctccagtccaaaggtgctgcagaggctgatcaagtcccggggaaaaagccaggccaagcacttgaatgtgcaaatggtggcggccgataagctggctcagtgtcctcccgagctgtttgacgtcattctggacgagaatcagttagaagatgcctgcgagcatttggctgattatctggaggcctactggaaagctacgcatccaccctctagctccctgccgaacccactattaagtaggactctggcaacgtcatcactgccgctgtccccaactctggccagtaacagtcagggatcccagggggatcagcggactgatcggtccgcgcctatccgtagtgcgagtcaggccgaagaggagccttcagttgaacctgtaaagaagtcgcagcacagatcttcttcttctgctccccatcacaaccaccgatccggcacaagtcgggggctgtcgcgccaggaaacatttgatagcgagacacaagagtccagagattccgcttatgttgagcccaaggaggattactctcatgatcatgtggaccactacgcttcccatcgcgaccataatcatcgtgacgagacacacgggagctcagaccaccgccatcgggagtctcggcatcgatctcgcgacgtggaccgggagcaggaccacaacgagtgcaataagcagcgatcccgacacaagtcaaaggatcgttattgtgagaaagatggagaagttatctctaaaaagaggaacgaggctggcgaatggaatagggacgtctacatacgtcagtag

SEQ ID NO: 262500 - DNA, 1821 bp, Artificial Sequence
  derived and/or modified sequence
atgttagacagaaggctaatcgctccgcaaactaagtatattattcccggtgggtccgctgacagctacacatctcggccatcggactccgatgtgtccctggaggaggatagagaggccgtgcgcagagaagccgaaaggcaggcccaggcccagctcgaaaaggcgaagacaaaacccgtggccttcgcagtccgtacgaacgtttcatacagtgccgctcacgaggacgacgtcccagttcccggaatggccatcagtttcgaagcaaaggactttctccatgtaaaagaaaagttcaacaatgactggtggattggccgtctcgtgaaagaaggatgtgagatcggttttattccctcacccgtgaagctcgagaacatgcgcctgcagcacgagcagcgcgcaaaacaggggaaattttatagcagtaagagcggcggaaactccagctcatcactcggggatatcgttccctcatcaagaaaatctaccccaccctcaagtgcaatcgacatcgatgccaccggccttgacgcagaggagaatgatattcccgctaatcaccggtctccaaaaccaagcgccaacagcgtcactagtccgcactcaaaagaaaaaaggatgcctttcttcaagaagaccgaacacacacctccctatgatgtagtgccttccatgcggccagtggtgctggtgggcccaagcctgaaaggctacgaggttactgacatgatgcagaaagcactattcgacttcctcaaacacagatttgagggccgtattagcataactcgtgtgaccgccgatatttccctggctaaaaggtctgttctaaacaatccatccaaacatgcaatcatcgagaggtccaatactcggtcttccctggctgaagtccagtcagaaattgagcgaatcttcgaactcgccaggacattgcaactagtggtgttagacgctgacacgattaaccatcctgctcagttgagcaagacttctcttgcacccatcatcgtttacgtgaaaatatcaagccctaaggtgctgcagcgactgatcaaatctcggggtaagagccaagcaaagcacttgaacgtgcagatggtggctgctgacaagttagctcagtgtcccccagaattgtttgacgtaatactggatgaaaaccagctggaggacgcatgtgagcatctcgctgattacctcgaggcatattggaaagccactcatccaccgagctcatccctgccaaatcccctcctttcccgaaccttagccactagctctctgcctctgtctcctacccttgccagtaattcacagggcagtcagggagatcagcggaccgatcgatccgcccctatccggagcgcttctcaggccgaagaagaaccctctgttgagccggtcaaaaaaagtcagcatcgctcgtccagcagcgcccctcaccacaaccataggtcagggacatcacgcggactctctcggcaagagaccttcgattccgagacccaggagtcccgggatagcgcatacgtcgagcctaaagaggactactcccacgaccacgtcgatcattatgcatctcaccgcgaccacaaccacagggacgagacccacgggtcttcggaccatcggcatagggaaagccgtcatcgctctagagatgttgatcgtgagcaagatcacaatgaatgcaacaagcagcgatctaggcacaagtccaaagacaggtattgtgaaaaggacggcgaggtgatcagtaagaaaagaaacgaagccggtgagtggaaccgggacgtgtatatacggcagtag

SEQ ID NO: 262501 - DNA, 3396 bp, Artificial Sequence
  derived and/or modified sequence
ttgtgatccgacgaactttagaaagtcacactaactaagactacacaccccaagccagcaagaaaaaggaaagcagttgctatgctgttcagcaaagcaagacttggctgccttttagctagtcctgaattcttgctcctgtgaagaaaattcctgctggagtgctgggcgcacttggaattggtctagcatgcttgacagacgccttatagctcctcaaactaaatacattattcctgggggttcggcagactcctacactagccgtccatccgattccgatgtatctctggaggaggaccgggaggcagtgcgcagagaagcggagcggcaggcccaggcacagttggaaaaagcaaagacaaagcccgttgcatttgcggttcggacaaatgtcagctacagtgcggcccatgaagatgatgttccagtgcctggcatggccatctcattcgaagcaaaagattttctgcatgttaaggaaaaatttaacaatgactggtggatagggcgattggtaaaagaaggctgtgaaatcggattcattccaagcccagtcaaactagaaaacatgaggctgcagcatgaacagagagccaagcaagggaaattctactccagtaaatcaggaggaaattcatcatccagtttgggtgacatagtacctagttccagaaaatcaacacctccatcatctgctatagacatagatgctactggcttagatgcagaagaaaatgatattccagcaaaccaccgctcccctaaacccagtgcaaacagtgtaacgtcaccccactccaaagagaaaagaatgcccttctttaagaagacagagcacactcctccgtatgatgtggtaccttccatgcgaccagtggtcctagtgggcccttctctgaagggctacgaggtcacagatatgatgcaaaaagcgctgtttgattttttaaaacacagatttgaagggcggatatccatcacaagggtcaccgctgacatctcgcttgccaaacgctcggtattaaacaatcccagtaagcacgcaataatagaaagatccaacacaaggtcaagcttagcggaagttcagagtgaaatcgaaaggatttttgaacttgcaagaacattgcagttggtggtccttgacgcggatacaattaatcatccagctcaactcagtaaaacctccttggcccctattatagtatatgtaaagatttcttctcctaaggttttacaaaggttaataaaatctcgagggaaatctcaagctaaacacctcaacgtccagatggtagcagctgataaactggctcagtgtcctccagagctgttcgatgtgatcttggatgagaaccagcttgaggatgcctgtgagcaccttgccgactatctggaggcctactggaaggccacccatcctcccagcagtagcctccccaaccctctccttagccgtacattagccacttcaagtctgcctcttagccccaccctagcctctaattcacagggttctcaaggtgatcagaggactgatcgctccgctcctatccgttctgcttcccaagctgaagaagaacctagtgtggaaccagtcaagaaatcccagcaccgctcttcctcctcagccccacaccacaaccatcgcagtgggacaagtcgcggcctctccaggcaagagacatttgactcggaaacccaggagagtcgagactctgcctacgtagagccaaaggaagattattcccatgaccacgtggaccactatgcctcacaccgtgaccacaaccacagagacgagacccacgggagcagtgaccacagacacagggagtcccggcaccgttcccgggacgtggatcgagagcaggaccacaacgagtgcaacaagcagcgcagccgtcataaatccaaggatcgctactgtgaaaaggatggagaagtgatatcaaaaaaacggaatgaggctggggagtggaacagggatgtttacatccgccaatgagttttgcccgtttgtgtttttttttttttttttttgaagtcttgtataactaacagcatccccaaaacaaagtctttggggtctacactgcaatcatatgtgatctgtcttgtaatattttgtattattgctgttgcttgaatagcaatagcatggatagagtattgagatactttttcttttgtaagtgctacataaattggcctggtatggctgcagtcctccggttgcatactggactcttcaaaaactgttttgggtagctgccacttgaacaaaatctgttgccacccaggtgatgttagtgttttaagaaatgtagttgatgtatccaacaagccagaatcagcacagataaaaagtggaatttcttgtttctccagatttttaatacgttaatacgcaggcatctgatttgcatattcattcatggaccactgtttcttgcttgtacctctggctgactaaatttggggacagattcagtcttgccttacacaaaggggatcataaagttagaatctattttctatgtactagtactgtgtactgtatagacagtttgtaaatgttatttctgcaaacaaacaccttcttattatatatataatatatatatatatcagtttgatcacactattttagagtcttaatgccaagtcagcagatttgctttatgaattacagggactagaaatgcccacattcaggaaatttgtaataacattgtctagacacctatcctcattctagtagaaagtgtgtacatactgtaaatatgtgtgattgcttgacttgaaaaggtttgaattctgaatgttataccatccttgtaagtaagtttgtaatttccaccataaattatggtaaatataaaactccagaggttgttctactccatacagttcacactgattgtgacacattcttagtagctagtgtctgttctagtcactgcactggagtctacgagccggaactcgctatatgcacgtgtgtgtgtccgtatgtaagaaagtgtgcaccgagtgactgaatggttgagatgaattggaatgctgaagactaacgaagaaactagagactgatatcgagcattctgcccacctcgctctgtatttaattaattgtgctatatgttgctttaacaacccattgagcagtcagggaatgtgagtaagcttgctgccaaaggtaactaggaaagcattcatctgctgcctccttgtttttgctcctagagagtgaaaatacaggcaattttactgtgagtgtttcactggaaatgtacaatctttgtgtgttagagtatttgttttagtaagaaatgtttacacagcttgtggaattatttcgtgggaaaataaatttttataacttctccc

SEQ ID NO: 262502 - DNA, 1821 bp, Artificial Sequence
  derived and/or modified sequence
atgctggacagaagactgatcgccccccagaccaagtacatcatccccggcggcagcgccgacagctacaccagcagacccagcgacagcgacgtgagcctggaggaggacagagaggccgtgagaagagaggccgagagacaggcccaggcccagctggagaaggccaagaccaagcccgtggccttcgccgtgagaaccaacgtgagctacagcgccgcccacgaggacgacgtgcccgtgcccggcatggccatcagcttcgaggccaaggacttcctgcacgtgaaggagaagttcaacaacgactggtggatcggcagactggtgaaggagggctgcgagatcggcttcatccccagccccgtgaagctggagaacatgagactgcagcacgagcagagagccaagcagggcaagttctacagcagcaagagcggcggcaacagcagcagcagcctgggcgacatcgtgcccagcagcagaaagagcaccccccccagcagcgccatcgacatcgacgccaccggcctggacgccgaggagaacgacatccccgccaaccacagaagccccaagcccagcgccaacagcgtgaccagcccccacagcaaggagaagagaatgcccttcttcaagaagaccgagcacacccccccctacgacgtggtgcccagcatgagacccgtggtgctggtgggccccagcctgaagggctacgaggtgaccgacatgatgcagaaggccctgttcgacttcctgaagcacagattcgagggcagaatcagcatcaccagagtgaccgccgacatcagcctggccaagagaagcgtgctgaacaaccccagcaagcacgccatcatcgagagaagcaacaccagaagcagcctggccgaggtgcagagcgagatcgagagaatcttcgagctggccagaaccctgcagctggtggtgctggacgccgacaccatcaaccaccccgcccagctgagcaagaccagcctggcccccatcatcgtgtacgtgaagatcagcagccccaaggtgctgcagagactgatcaagagcagaggcaagagccaggccaagcacctgaacgtgcagatggtggccgccgacaagctggcccagtgcccccccgagctgttcgacgtgatcctggacgagaaccagctggaggacgcctgcgagcacctggccgactacctggaggcctactggaaggccacccacccccccagcagcagcctgcccaaccccctgctgagcagaaccctggccaccagcagcctgcccctgagccccaccctggccagcaacagccagggcagccagggcgaccagagaaccgacagaagcgcccccatcagaagcgccagccaggccgaggaggagcccagcgtggagcccgtgaagaagagccagcacagaagcagcagcagcgccccccaccacaaccacagaagcggcaccagcagaggcctgagcagacaggagaccttcgacagcgagacccaggagagcagagacagcgcctacgtggagcccaaggaggactacagccacgaccacgtggaccactacgccagccacagagaccacaaccacagagacgagacccacggcagcagcgaccacagacacagagagagcagacacagaagcagagacgtggacagagagcaggaccacaacgagtgcaacaagcagagaagcagacacaagagcaaggacagatactgcgagaaggacggcgaggtgatcagcaagaagagaaacgaggccggcgagtggaacagagacgtgtacatcagacagtag

SEQ ID NO: 262503 - protein, 278 aa, Artificial Sequence
  derived and/or modified sequence
MEENMEEGQTQKGCFECCIKCLGGIPYASLIATILLYAGVALFCGCGHEALSGTVNILQTYFEMARTAGDTLDVFTMIDIFKYVIYGIAAAFFVYGILLMVEGFFTTGAIKDLYGDFKITTCGRCVSAWFIMLTYLFMLAWLGVTAFTSLPVYMYFNLWTICRNTTLVEGANLCLDLRQFGIVTIGEEKKICTVSENFLRMCESTELNMTFHLFIVALAGAGAAVIAMVHYLMVLSANWAYVKDACRMQKYEDIKSKEEQELHDIHSTRSKERLNAYT

SEQ ID NO: 262504 - protein, 129 aa, Artificial Sequence
  derived and/or modified sequence
MEENMEEGQTQKGCFECCIKCLGGIPYASLIATILLYAGVALFCGCGHEALSGTVNILQTYFEMARTAGDTLDVFTMIDIFKYVIYGIAAAFFVYGILLMVEGFFTTGAIKDLYGDFKITTCGRCVSAW

SEQ ID NO: 262505 - DNA, 837 bp, Artificial Sequence
  derived and/or modified sequence
atggaggagaacatggaggagggccagacccagaagggctgcttcgagtgctgcatcaagtgcctgggcggcatcccctacgccagcctgatcgccaccatcctgctgtacgccggcgtggccctgttctgcggctgcggccacgaggccctgagcggcaccgtgaacatcctgcagacctacttcgagatggccagaaccgccggcgacaccctggacgtgttcaccatgatcgacatcttcaagtacgtgatctacggcatcgccgccgccttcttcgtgtacggcatcctgctgatggtggagggcttcttcaccaccggcgccatcaaggacctgtacggcgacttcaagatcaccacctgcggcagatgcgtgagcgcctggttcatcatgctgacctacctgttcatgctggcctggctgggcgtgaccgccttcaccagcctgcccgtgtacatgtacttcaacctgtggaccatctgcagaaacaccaccctggtggagggcgccaacctgtgcctggacctgagacagttcggcatcgtgaccatcggcgaggagaagaagatctgcaccgtgagcgagaacttcctgagaatgtgcgagagcaccgagctgaacatgaccttccacctgttcatcgtggccctggccggcgccggcgccgccgtgatcgccatggtgcactacctgatggtgctgagcgccaactgggcctacgtgaaggacgcctgcagaatgcagaagtacgaggacatcaagagcaaggaggagcaggagctgcacgacatccacagcaccagaagcaaggagagactgaacgcctacacctag

SEQ ID NO: 262506 - DNA, 33 bp, Artificial Sequence
  derived and/or modified sequence
atggaggagaacatggaggagggccagacctag

SEQ ID NO: 262507 - DNA, 390 bp, Artificial Sequence
  derived and/or modified sequence
atggaggagaacatggaggagggccagacccagaagggctgcttcgagtgctgcatcaagtgcctgggcggcatcccctacgccagcctgatcgccaccatcctgctgtacgccggcgtggccctgttctgcggctgcggccacgaggccctgagcggcaccgtgaacatcctgcagacctacttcgagatggccagaaccgccggcgacaccctggacgtgttcaccatgatcgacatcttcaagtacgtgatctacggcatcgccgccgccttcttcgtgtacggcatcctgctgatggtggagggcttcttcaccaccggcgccatcaaggacctgtacggcgacttcaagatcaccacctgcggcagatgcgtgagcgcctggtag

SEQ ID NO: 262508 - DNA, 837 bp, Artificial Sequence
  derived and/or modified sequence
atggaagaaaacatggaagagggacaaacacaaaaggggtgcttcgagtgttgtattaaatgcctcggagggatcccatacgcgagtctgattgctaccatccttttatacgccggggtagccttattctgcgggtgcggacacgaggccttgtccggaacggtaaatatcctccagacatatttcgaaatggcccggaccgccggtgacacactcgacgtgtttactatgatagacatatttaagtacgttatatatggcatagccgcagctttcttcgtgtacggcattctgctgatggtggagggattctttaccacaggtgccattaaggatttgtacggagacttcaagatcaccacctgcgggcggtgcgtctccgcttggtttattatgctgacctacttatttatgcttgcctggctcggagttacagctttcacgtccttgccagtttatatgtatttcaacctctggaccatatgcaggaacactactctggttgagggcgccaatctgtgtctggatctcagacaattcggcattgtgactataggagaagagaagaagatctgtaccgtgagtgaaaactttctaagaatgtgtgagtccaccgaacttaacatgacgtttcacctgttcattgtagcgctcgctggagctggtgctgccgtgatcgccatggttcactacctgatggtgctttctgcaaattgggcctacgttaaggatgcctgtcgaatgcagaagtatgaagacattaaaagtaaggaggaacaagagcttcacgatattcactccaccagatccaaagagcggctgaatgcctacacttag

SEQ ID NO: 262509 - DNA, 837 bp, Artificial Sequence
  derived and/or modified sequence
atggaggaaaacatggaagagggacagacccagaagggatgttttgagtgttgcattaagtgtttgggcggcatcccatatgcctccctgatcgccaccatactcttgtacgccggcgtggccctattctgcggatgtgggcatgaggcgttatcgggtaccgtgaatatcctgcagacctacttcgagatggcgcgtaccgctggagacacgttggacgttttcactatgattgacatcttcaagtacgtgatctatgggatcgcagccgctttttttgtttatggcattttactcatggtcgagggattttttactaccggtgccatcaaggacctttatggtgactttaagatcacaacatgcgggcgctgcgtcagtgcttggttcatcatgctgacctacctctttatgctggcctggttaggcgttacagcattcacctccctgcccgtatacatgtacttcaatttgtggacaatttgccggaataccactttagttgaaggcgctaatttgtgtctggatctgaggcaatttggaatagtgacaataggggaagagaagaagatttgcacggtctccgagaactttctgaggatgtgtgaaagtaccgaactgaacatgacttttcacctttttattgtggcacttgccggcgcgggagcagctgtgattgctatggtccactatctgatggtgttgtccgctaactgggcctacgtcaaggacgcctgccgcatgcagaaatatgaagacatcaagtccaaggaagagcaagagctgcatgatattcattcgacgcgctccaaggagcgactgaacgcctacacttag

SEQ ID NO: 262510 - DNA, 33 bp, Artificial Sequence
  derived and/or modified sequence
atggaagagaacatggaggagggccagacatag

SEQ ID NO: 262511 - DNA, 390 bp, Artificial Sequence
  derived and/or modified sequence
atggaagaaaacatggaagagggacagacacaaaagggatgcttcgaatgctgcataaaatgtctgggagggataccttacgcgtcattgattgcaacaattttactctatgcgggtgttgccctcttttgcggatgtggacatgaagccctctccgggaccgtcaatatccttcaaacatactttgaaatggcccggacagccggcgacactttggatgttttcactatgatcgatatattcaagtacgttatatatggcattgccgccgcatttttcgtttacggaatcctcctcatggtagagggcttcttcactacaggtgccataaaagatctgtacggcgatttcaagataacgacctgtgggcgctgcgtgtccgcttggtag

SEQ ID NO: 262512 - DNA, 2854 bp, Artificial Sequence
  derived and/or modified sequence
gagaagcaggacctcgggccatggattctactgaagaaaggtagccatggaagagaatatggaagagggacagacacaaaaagggtgttttgaatgctgtatcaaatgcctggggggcattccctatgcctctctgattgccaccatcctgctctatgcgggtgttgccctgttctgtggctgcggtcatgaagcgctttctggaactgtcaacattctgcaaacctactttgagatggcaagaactgctggagacacactggatgtttttaccatgattgacatctttaagtatgtgatctacggcatcgcagctgcgttctttgtgtatggcattttgctgatggtggaaggtttcttcacaactggggccatcaaagatctctatggggatttcaaaatcaccacttgtggcagatgtgtgagcgcttggttcattatgctgacatatcttttcatgttggcctggctgggagtcacggctttcacctcactgccagtttacatgtacttcaatctgtggaccatctgccggaacaccacattagtggagggagcaaatctctgcttggaccttcgtcagtttggaattgtgacaattggagaggaaaagaaaatttgtactgtctctgagaatttcttgaggatgtgcgaatctactgagctgaacatgaccttccacttgtttattgtggcacttgctggagctggggcagcagtcattgctatggttcactaccttatggttctgtctgccaactgggcctatgtgaaagacgcctgccggatgcagaagtatgaagacatcaagtcgaaggaagagcaagagcttcatgacatccactctactcgctccaaagagcggctcaatgcatacacataaatgcatcttcctgttctttctaccatttgaatgcattggtgtttaactaagggccatccaaccatccaacctttaaaaaacaaaacgaaagtgcttctcatcaatgatatgtaaggtgacttatgaatcacctgagtacaattctttgttgtttagcacttaaatttcccaatttattaaattgatgtaaatcagatcttttctacaagctcctatccagccttttttttgaaatttctcaaactcatttactagttctgtaaaatcaaagatactaacattgtcaaatgcaaagatttgtttgatttttaaccacttcccatgtgttatacataacaccttttgcattatttcttatgttttgaaaagaaaatagctttttatactttttagttttgatttcggtaactagtttaactacaggtaaccttcaaagggaccattgtacattatgaacaatagatagagattacatcttgatgactcttgaaatatggaaattttgtctgaagatcagtggccatattactgtaggccctggttcatgttttcatcaatctaaggtgcaatttctaaatttgtaagagtaggtttaaaaaaaaaagtgcttcttatctttgttaacattgtacttttccttgatgttcttaaaaggtatttccctcagattactcatgtttatgttgtgagcatgtagaaacagtaatgctaatgcatggctagttgcctttttaagattgtgacaccaggcttaccttttaaagtttagtatatagagacaattttaatggaaataactactgtagactattgaagaatgatctctttgtgatttaagaagtggctggattggaacttttaatatgctaatgtggaaaattaattacctttatgaaggtggtttattacaaataagcacactaacccctcggaagttgttttacctactttaaaagttttaatggattgcacctctgtaaactattcctaaaatgtgtatgatatatttgaaaaggcttccattaatataatagctttgcttgcagccttccaatctatgttggtttacctgtagtgttttataaagtgtggtcagaggcccctatagaatgtattgtttgaaagtgtagtgatatatttgtgtttttatttcaagtaagtcattttaaccgaatgttcattcatattcatttataaaaagtacctgtatcaaaggaattttaacaaagagcaatcagtattattggaccaaatttggtgtttgttttcaccttgacgctcttcttttcattatttctaatgctacaagaatgctgtaaagtgtcttctaaaatgatgtagcctgacaagacatttttttcagtgtataaaactaggtagtattgtgcactgatttgaccattgtgaaatcctttctcagtgtaactgcatttctaataaaaatttattgagtgaaacaatctttgtacaatgactagtcatgcatcatcagtaattttacaagttcttgtagtaggtagggggtactactagggatatctgtggcatgattatgcattccgtagtattatttaattaatttggggttcattttgcttccttttctttatgcttagattatcttactggttcaacatttttctgatatatgcagtattacagatattcagcaaaagtattaatgggcttctttaaattctatattatagtatttcagttccgtgtcttaacagtttgtgataatttctaaaactgtcttttcaacttatgtaatgatgttgacacttttggcttttatttctggtattagagtttgtattttcacagagtgctttgtagcaggcattacaattaatctgttttgtacataaatgtgccaacagcttgatggtggcgtttttgaaatgtagaacagagtgcttgcaaaatgtaataaatacacttgtgtactttgtgtacttattattagct

SEQ ID NO: 262513 - DNA, 2821 bp, Artificial Sequence
  derived and/or modified sequence
actctggaatgaaggggggaattacgggttggtggtcggcttcatgttaggaggacacccctccatctgttcacagctcagcctgtttccaatttaaagcccagatttcaatacaaacctcaatttcttttccccattttaaatgcaaagcaagacttgtgaatcatagtgtctctgctcctgggattcagaccaaatttccccccaaaattctcaggctatttgtttgaatacctgcttacagtggtacacaatgggcagctttgagaagaaaaattgataatcttcacggaagagtaatttgaatgaaattacacttgacagcctgtctccaagcaaacaagaggaacgagggagcctgagctaagctctgaggacttgcccaagccactgctgttggagcttcccaggaaaaaaaaaaaaaaaaaaaaaaaaaaaaaaaaaaaaaaacccccagtttttccaacatctaattgagcttttgattaattccgtgtaccagattctactgaagaaaggtagccatggaagagaatatggaagagggacagacacaaaaagggtgttttgaatgctgtatcaaatgcctggggggcattccctatgcctctctgattgccaccatcctgctctatgcgggtgttgccctgttctgtggctgcggtcatgaagcgctttctggaactgtcaacattctgcaaacctactttgagatggcaagaactgctggagacacactggatgtttttaccatgattgacatctttaagtatgtgatctacggcatcgcagctgcgttctttgtgtatggcattttgctgatggtggaaggtttcttcacaactggggccatcaaagatctctatggggatttcaaaatcaccacttgtggcagatgtgtgagcgcttggttcattatgctgacatatcttttcatgttggcctggctgggagtcacggctttcacctcactgccagtttacatgtacttcaatctgtggaccatctgccggaacaccacattagtggagggagcaaatctctgcttggaccttcgtcagtttggaattgtgacaattggagaggaaaagaaaatttgtactgtctctgagaatttcttgaggatgtgcgaatctactgagctgaacatgaccttccacttgtttattgtggcacttgctggagctggggcagcagtcattgctatggttcactaccttatggttctgtctgccaactgggcctatgtgaaagacgcctgccggatgcagaagtatgaagacatcaagtcgaaggaagagcaagagcttcatgacatccactctactcgctccaaagagcggctcaatgcatacacataaatgcatcttcctgttctttctaccatttgaatgcattggtgtttaactaagggccatccaaccatccaacctttaaaaaacaaaacgaaagtgcttctcatcaatgatatgtaaggtgacttatgaatcacctgagtacaattctttgttgtttagcacttaaatttcccaatttattaaattgatgtaaatcagatcttttctacaagctcctatccagccttttttttgaaatttctcaaactcatttactagttctgtaaaatcaaagatactaacattgtcaaatgcaaagatttgtttgatttttaaccacttcccatgtgttatacataacaccttttgcattatttcttatgttttgaaaagaaaatagctttttatactttttagttttgatttcggtaactagtttaactacaggtaaccttcaaagggaccattgtacattatgaacaatagatagagattacatcttgatgactcttgaaatatggaaattttgtctgaagatcagtggccatattactgtaggccctggttcatgttttcatcaatctaaggtgcaatttctaaatttgtaagagtaggtttaaaaaaaaaagtgcttcttatctttgttaacattgtacttttccttgatgttcttaaaaggtatttccctcagattactcatgtttatgttgtgagcatgtagaaacagtaatgctaatgcatggctagttgcctttttaagattgtgacaccaggcttaccttttaaagtttagtatatagagacaattttaatggaaataactactgtagactattgaagaatgatctctttgtgatttaagaagtggctggattggaacttttaatatgctaatgtggaaaattaattacctttatgaaggtggtttattacaaataagcacactaacccctcggaagttgttttacctactttaaaagttttaatggattgcacctctgtaaactattcctaaaatgtgtatgatatatttgaaaaggcttccattaatataatagctttgcttgcagccttccaatctatgttggtttacctgtagtgttttataaagtgtggtcagaggcccctatagaatgtattgtttgaaagtgtagtgatatatttgtgtttttatttcaagtaagtcattttaaccgaatgttcattcatattcatttataaaaagtacctgtatcaaaggaattttaacaaagagcaatcagtattattggaccaaatttggtgtttgttttcaccttgacgctcttcttttcattatttctaatgctacaagaatgctgtaaagtgtcttctaaaatgatgtagcctgacaagacatttttttcagtgtataaaactaggtagtattgtgcactgatttgaccattgtgaaatcctttctcagtgtaactgcatttctaataaaaatttattgagtgaaacaa

SEQ ID NO: 262514 - DNA, 734 bp, Artificial Sequence
  derived and/or modified sequence
agcaggtgttctgtaagacagaccaggaagaggtagtaaggcagccagaaagctaccatggtacaccagagaagccaaattattcttgaggtacccactgagcttgtcagctgcaatggctaagagtggctgataatgttccttacttctgtagctgagatttcccaacttaatttgggttctcatcagggtagaattccatccaagtcaatcgcagcatctgcacccacagctctgagaagggaaagatgtgcttggtggtggccccaagtttgcagtatcggattggactcattagaattacaaggaaatgaaataaagaaagattctactgaagaaaggtagccatggaagagaatatggaagagggacagacacaaaaagggtgttttgaatgctgtatcaaatgcctggggggcattccctatgcctctctgattgccaccatcctgctctatgcgggtgttgccctgttctgtggctgcggtcatgaagcgctttctggaactgtcaacattctgcaaacctactttgagatggcaagaactgctggagacacactggatgtttttaccatgattgacatctttaagtatgtgatctacggcatcgcagctgcgttctttgtgtatggcattttgctgatggtggaaggtttcttcacaactggggccatcaaagatctctatggggatttcaaaatcaccacttgtggcagatgtgtgagcgcttgg

SEQ ID NO: 262515 - DNA, 837 bp, Artificial Sequence
  derived and/or modified sequence
atggaggagaacatggaggagggccagacccagaagggctgctttgagtgctgcatcaagtgcctgggcggcatcccctatgccagcctgattgccaccatcctgctgtatgctggggtggccctcttctgtggctgcggccacgaggccctgagcggcaccgtgaacatcctgcagacctactttgagatggccaggacagctggggacaccctggatgtgttcaccatgattgacatcttcaagtatgtgatctacggcattgctgctgccttctttgtgtatggcatcctgctgatggtggagggcttcttcaccactggagccatcaaggacctgtatggagacttcaagatcaccacctgtggccgctgtgtgtctgcctggttcatcatgctgacctacctgttcatgctggcctggctgggcgtgacagccttcaccagcctgcctgtgtacatgtacttcaacctgtggaccatctgcaggaacaccaccctggtggagggcgccaacctgtgcctggacctgcggcagtttggcatcgtgaccatcggggaggagaagaagatctgcaccgtgtctgagaacttcctgaggatgtgtgagagcacagagctgaacatgaccttccacctgttcatcgtggccctggccggggccggggccgccgtcatcgccatggtgcactacctgatggtgctgagcgccaactgggcctacgtgaaggatgcctgcaggatgcagaagtatgaggacatcaagagcaaggaggagcaggagctgcatgacatccacagcaccaggagcaaggagcggctgaatgcctacacctag

SEQ ID NO: 262516 - DNA, 390 bp, Artificial Sequence
  derived and/or modified sequence
atggaggagaacatggaggagggccagacccagaagggctgctttgagtgctgcatcaagtgcctgggcggcatcccctatgccagcctgattgccaccatcctgctgtatgctggggtggccctcttctgtggctgcggccacgaggccctgagcggcaccgtgaacatcctgcagacctactttgagatggccaggacagctggggacaccctggatgtgttcaccatgattgacatcttcaagtatgtgatctacggcattgctgctgccttctttgtgtatggcatcctgctgatggtggagggcttcttcaccactggagccatcaaggacctgtatggagacttcaagatcaccacctgtggccgctgtgtgtctgcctggtag

SEQ ID NO: 262517 - DNA, 837 bp, Artificial Sequence
  derived and/or modified sequence
atggaggagaacatggaggagggccagacccagaagggctgcttcgagtgctgtatcaaatgccttggaggaattccatacgcttcgctgattgccaccatcctgctgtacgctggcgtggcgctgttctgcggatgcgggcatgaagccctgagcggaaccgttaatatacttcagacgtacttcgagatggccaggaccgccggcgacaccttggacgtgtttactatgatcgacatattcaaatacgtcatctacggaatcgcggctgctttctttgtgtacgggattctcttaatggtggaagggttttttaccacgggcgctattaaggatctgtacggcgatttcaaaatcaccacttgcggacgctgtgtgagcgcatggttcatcatgctgacctacctgttcatgctcgcctggctcggcgtaactgcattcacttctttacccgtatatatgtacttcaacctgtggactatttgccgaaacacgactctggtcgagggcgcaaatttgtgcctcgatctaaggcagttcgggattgtaacgattggtgaggaaaagaagatttgcacagtttcagaaaactttttaaggatgtgcgagagcactgagctcaacatgacctttcatctcttcatcgttgcgttggcgggagctggagcggcagttatcgcgatggtacactatcttatggttctgtcagctaactgggcttacgtgaaggatgcctgtaggatgcagaagtacgaagacattaagagcaaggaagaacaggagctccatgatatacacagtacacgcagcaaggaacgtttaaacgcatatacctag

SEQ ID NO: 262518 - DNA, 837 bp, Artificial Sequence
  derived and/or modified sequence
atggaggagaacatggaggagggccagacccagaagggctgcttcgaatgttgtattaaatgtctcggcggcataccttacgccagcttgatcgctactattctgttgtacgccggcgtggcgctattctgcggatgcggccacgaagctctttccggaacagtgaatatcctacagacatatttcgaaatggcaagaactgctggagacactctggacgtcttcacaatgatcgatatttttaagtacgtcatatacggaatcgctgcggcttttttcgtgtacgggatattattgatggtggagggcttctttaccaccggtgccatcaaggatctctacggggacttcaagattaccacctgcggccggtgcgtctccgcctggttcatcatgctaacctacctttttatgctggcttggctaggtgtaaccgctttcacgtctctaccggtgtacatgtatttcaatttatggactatctgtcgtaatacgaccttggtagaaggggcaaatctctgcctggatttgcgtcaatttggtattgtgacaatcggcgaagagaagaagatctgcaccgtatcggagaacttcctccgcatgtgcgagagcacagaactgaatatgaccttccatctatttatagtggccctggcaggggccggcgcagccgtgatcgccatggttcactacctgatggtactatccgctaactgggcctatgtcaaggatgcttgtaggatgcagaaatatgaggacatcaagagtaaggaagagcaggagttgcatgacatccactcaactagatccaaggagcgcttaaacgcgtacacatag

SEQ ID NO: 262519 - DNA, 390 bp, Artificial Sequence
  derived and/or modified sequence
atggaggagaacatggaggagggccagacccagaagggctgcttcgagtgctgcatcaagtgcctgggcggaattccctatgcctccttaattgccaccatccttttatatgccggagtagcgcttttttgcgggtgcggtcacgaggcgctgtccggtactgtgaatatcctgcagacttacttcgaaatggccaggacagcaggcgacactctggacgtctttaccatgattgatatctttaagtatgtcatttatggtattgcagcagccttttttgtctacggcattctgcttatggtggagggcttcttcacaactggggctattaaggatttgtatggcgattttaagatcactacttgtggtaggtgcgtgtctgcttggtag

SEQ ID NO: 262520 - DNA, 837 bp, Artificial Sequence
  derived and/or modified sequence
atggaggaaaacatggaagagggccagacccagaaaggatgctttgaatgctgtatcaagtgtctgggagggatcccctacgccagcttgattgcaacaattctcctgtatgcaggggtggctctgttttgcggatgtggccatgaggcgctgtcaggcaccgtcaatatcctccagacatacttcgagatggcgaggactgctggtgataccttagatgtgttcacgatgatcgacatcttcaagtacgtcatttacggaatcgcagcggctttcttcgtgtatggaatcctcttaatggtagaggggttcttcacaacaggggctattaaggacctatacggcgatttcaagattacaacttgtggacgctgtgtatccgcctggttcataatgctcacttatctgttcatgttggcgtggctgggagtgacagcttttacaagcttgcccgtgtatatgtattttaacctctggaccatatgccgaaatacgactctcgtggagggagctaacctatgtcttgatctgcggcagtttggcatagtaacaatcggggaagagaaaaagatttgtacagtatccgaaaacttcctcagaatgtgcgaatccactgaactgaatatgaccttccacctattcatcgtggccttagccggagcaggcgcagccgtgatcgcaatggtccattatctcatggtactgtcggccaattgggcttacgtgaaggatgcctgcaggatgcagaagtacgaagatatcaaaagcaaggaggagcaagaactgcacgatatacactccacacgatccaaggagaggttgaacgcttacacctag

SEQ ID NO: 262521 - DNA, 837 bp, Artificial Sequence
  derived and/or modified sequence
atggaggagaatatggaggagggccagactcagaaaggatgcttcgagtgctgtatcaagtgtctcggtggcatcccatacgcctccctgattgcaaccattctcttgtacgcaggagtggccctgttttgcggctgcggacacgaagctctcagtgggacagtaaatattctgcagacctattttgagatggcacggaccgccggtgatactctggatgtgttcactatgatcgatattttcaagtacgtcatctacggtatcgctgccgcatttttcgtgtacgggatcctgttaatggtggagggcttctttaccactggagctatcaaggatctgtacggggattttaaaatcaccacatgcggcagatgcgtgtccgcttggtttatcatgctgacataccttttcatgctagcctggttgggggtcacagccttcacaagtctccccgtatacatgtacttcaatctctggaccatttgcagaaacaccactcttgtggagggggctaatctctgtttggatctacgccagtttggtatcgtgactattggggaggagaaaaaaatatgcaccgtatctgaaaattttcttcggatgtgtgagtctaccgagcttaatatgacctttcatctgtttatagttgccctcgccggtgctggagccgctgtcatcgcaatggtgcactatttgatggtgttaagtgctaactgggcttatgtgaaagacgcatgtcggatgcagaagtacgaggatatcaagtcaaaagaagaacaggagctacacgacattcactccacccgatctaaggagcggctcaatgcatatacatag

SEQ ID NO: 262522 - DNA, 33 bp, Artificial Sequence
  derived and/or modified sequence
atggaagaaaatatggaagaagggcagacgtag

SEQ ID NO: 262523 - DNA, 390 bp, Artificial Sequence
  derived and/or modified sequence
atggaggaaaatatggaggaagggcagacacaaaagggttgtttcgagtgctgtattaaatgtctgggaggtatcccctacgctagtctgattgccaccattctgctgtacgctggcgtggctctgttttgtggatgtggtcacgaagccctctcaggaacagtaaatattctccagacttactttgagatggctcgcacggccggagacacgttggatgtcttcaccatgatcgacattttcaaatacgtcatctacggcatagccgctgccttcttcgtatacggaatcctcctaatggtggagggatttttcaccacaggagcaatcaaggatctgtatggggactttaagattaccacctgtgggaggtgcgtgtctgcctggtag

SEQ ID NO: 262524 - protein, 267 aa, Artificial Sequence
  derived and/or modified sequence
MGCFECCIKCLGGIPYASLIATILLYAGVALFCGCGHEALSGTVNILQTYFEMARTAGDTLDVFTMIDIFKYVIYGIAAAFFVYGILLMVEGFFTTGAIKDLYGDFKITTCGRCVSAWFIMLTYLFMLAWLGVTAFTSLPVYMYFNLWTICRNTTLVEGANLCLDLRQFGIVTIGEEKKICTVSENFLRMCESTELNMTFHLFIVALAGAGAAVIAMVHYLMVLSANWAYVKDACRMQKYEDIKSKEEQELHDIHSTRSKERLNAYT

SEQ ID NO: 262525 - DNA, 804 bp, Artificial Sequence
  derived and/or modified sequence
atgggctgcttcgagtgctgcatcaagtgcctgggcggcatcccctacgccagcctgatcgccaccatcctgctgtacgccggcgtggccctgttctgcggctgcggccacgaggccctgagcggcaccgtgaacatcctgcagacctacttcgagatggccagaaccgccggcgacaccctggacgtgttcaccatgatcgacatcttcaagtacgtgatctacggcatcgccgccgccttcttcgtgtacggcatcctgctgatggtggagggcttcttcaccaccggcgccatcaaggacctgtacggcgacttcaagatcaccacctgcggcagatgcgtgagcgcctggttcatcatgctgacctacctgttcatgctggcctggctgggcgtgaccgccttcaccagcctgcccgtgtacatgtacttcaacctgtggaccatctgcagaaacaccaccctggtggagggcgccaacctgtgcctggacctgagacagttcggcatcgtgaccatcggcgaggagaagaagatctgcaccgtgagcgagaacttcctgagaatgtgcgagagcaccgagctgaacatgaccttccacctgttcatcgtggccctggccggcgccggcgccgccgtgatcgccatggtgcactacctgatggtgctgagcgccaactgggcctacgtgaaggacgcctgcagaatgcagaagtacgaggacatcaagagcaaggaggagcaggagctgcacgacatccacagcaccagaagcaaggagagactgaacgcctacacctag

SEQ ID NO: 262526 - DNA, 804 bp, Artificial Sequence
  derived and/or modified sequence
atggggtgcttcgagtgctgtattaagtgccttgggggtatcccctacgcttctttgatcgctacaatccttctgtacgctggggtggcgctcttctgcggctgtggacatgaagccctgtccggaaccgtcaatattctccagacctacttcgaaatggctcgcactgccggcgacacactggacgtctttaccatgatcgacatcttcaaatacgtaatctacgggattgctgctgcctttttcgtgtatggaatcctgctaatggtggagggatttttcacaacaggtgccatcaaggacttgtatggtgatttcaagattacaacttgcggaaggtgtgtatccgcttggtttatcatgctgacatatctgtttatgctcgcctggctgggtgtgactgccttcacaagccttcctgtgtacatgtacttcaatctctggacgatctgccgaaacacaactcttgttgagggtgccaatttgtgtcttgatcttaggcaattcgggattgttacaattggcgaagaaaaaaagatctgtaccgtgagtgaaaacttcttgagaatgtgcgaaagcactgagcttaacatgacatttcacctgttcatcgtggcactggccggggcaggggcggctgtgattgccatggtgcattatctcatggtcctgtccgcaaattgggcatacgtgaaggacgcttgtcgcatgcagaagtacgaggatataaagtcaaaagaagagcaggagctccacgacatccattctacaaggtccaaagagcgtctcaacgcctacacatag

SEQ ID NO: 262527 - DNA, 2614 bp, Artificial Sequence
  derived and/or modified sequence
gggtgctgagacaacgtgtgtgtctgtaatgtgcattcaatgtatttaggagagagactttgcacgtgtctctaatgaaagtgaaagggggcagggtgggggcctctggggaggagacccacagtgaaggggaggaaaacgggcttctcgcagaggaggcaggtggaaagagggaggggtctgtgcgcccgcagagtcgccaggcgccctgcgagttgtctccgctgggaggggcgaggctgtcacttgccagggcgcgaggagcctcagcgcggcttggagaacttggccccgcgcagcgtctggtcactcgctctcctctggggactgcagagaagcaggacctcgggccatggggtgttttgaatgctgtatcaaatgcctggggggcattccctatgcctctctgattgccaccatcctgctctatgcgggtgttgccctgttctgtggctgcggtcatgaagcgctttctggaactgtcaacattctgcaaacctactttgagatggcaagaactgctggagacacactggatgtttttaccatgattgacatctttaagtatgtgatctacggcatcgcagctgcgttctttgtgtatggcattttgctgatggtggaaggtttcttcacaactggggccatcaaagatctctatggggatttcaaaatcaccacttgtggcagatgtgtgagcgcttggttcattatgctgacatatcttttcatgttggcctggctgggagtcacggctttcacctcactgccagtttacatgtacttcaatctgtggaccatctgccggaacaccacattagtggagggagcaaatctctgcttggaccttcgtcagtttggaattgtgacaattggagaggaaaagaaaatttgtactgtctctgagaatttcttgaggatgtgcgaatctactgagctgaacatgaccttccacttgtttattgtggcacttgctggagctggggcagcagtcattgctatggttcactaccttatggttctgtctgccaactgggcctatgtgaaagacgcctgccggatgcagaagtatgaagacatcaagtcgaaggaagagcaagagcttcatgacatccactctactcgctccaaagagcggctcaatgcatacacataaatgcatcttcctgttctttctaccatttgaatgcattggtgtttaactaagggccatccaaccatccaacctttaaaaaacaaaacgaaagtgcttctcatcaatgatatgtaaggtgacttatgaatcacctgagtacaattctttgttgtttagcacttaaatttcccaatttattaaattgatgtaaatcagatcttttctacaagctcctatccagccttttttttgaaatttctcaaactcatttactagttctgtaaaatcaaagatactaacattgtcaaatgcaaagatttgtttgatttttaaccacttcccatgtgttatacataacaccttttgcattatttcttatgttttgaaaagaaaatagctttttatactttttagttttgatttcggtaactagtttaactacaggtaaccttcaaagggaccattgtacattatgaacaatagatagagattacatcttgatgactcttgaaatatggaaattttgtctgaagatcagtggccatattactgtaggccctggttcatgttttcatcaatctaaggtgcaatttctaaatttgtaagagtaggtttaaaaaaaaaagtgcttcttatctttgttaacattgtacttttccttgatgttcttaaaaggtatttccctcagattactcatgtttatgttgtgagcatgtagaaacagtaatgctaatgcatggctagttgcctttttaagattgtgacaccaggcttaccttttaaagtttagtatatagagacaattttaatggaaataactactgtagactattgaagaatgatctctttgtgatttaagaagtggctggattggaacttttaatatgctaatgtggaaaattaattacctttatgaaggtggtttattacaaataagcacactaacccctcggaagttgttttacctactttaaaagttttaatggattgcacctctgtaaactattcctaaaatgtgtatgatatatttgaaaaggcttccattaatataatagctttgcttgcagccttccaatctatgttggtttacctgtagtgttttataaagtgtggtcagaggcccctatagaatgtattgtttgaaagtgtagtgatatatttgtgtttttatttcaagtaagtcattttaaccgaatgttcattcatattcatttataaaaagtacctgtatcaaaggaattttaacaaagagcaatcagtattattggaccaaatttggtgtttgttttcaccttgacgctcttcttttcattatttctaatgctacaagaatgctgtaaagtgtcttctaaaatgatgtagcctgacaagacatttttttcagtgtataaaactaggtagtattgtgcactgatttgaccattgtgaaatcctttctcagtgtaactgcatttctaataaaaatttattgagtgaaac

SEQ ID NO: 262528 - DNA, 804 bp, Artificial Sequence
  derived and/or modified sequence
atgggctgctttgagtgctgcatcaagtgcctgggcggcatcccctatgccagcctcatcgccaccatcctgctgtatgccggcgtggccctcttctgtggctgcggccacgaggccctgtctggaacagtgaacatcctgcagacctactttgagatggccaggacagctggggacaccctggatgtgttcaccatgattgacatcttcaagtatgtgatctatggaattgctgctgccttctttgtgtatggcatcctgctgatggtggagggcttcttcaccaccggggccatcaaggacctgtatggagacttcaagatcaccacctgtggccgctgtgtgtctgcctggttcatcatgctgacctacctgttcatgctggcctggctgggcgtgacagccttcaccagcctgcctgtgtacatgtacttcaacctgtggaccatctgcaggaacaccaccctggtggagggcgccaacctgtgcctggacctgcggcagtttggaattgtgaccatcggggaggagaagaagatctgcaccgtgtctgagaacttcctgaggatgtgtgagagcacagagctgaacatgaccttccacctgttcatcgtggccctggccggggccggggctgctgtgattgccatggtgcactacctgatggtgctgagcgccaactgggcctacgtgaaggatgcctgcaggatgcagaagtatgaggacatcaagagcaaggaggagcaggagctgcatgacatccacagcaccaggagcaaggagcggctgaatgcctacacctag

SEQ ID NO: 262529 - DNA, 804 bp, Artificial Sequence
  derived and/or modified sequence
atgggctgcttcgagtgctgcatcaagtgcctgggcggcatcccctacgcatcgctgattgcgaccatcttgctctacgccggggtggctctgttctgcggctgcgggcacgaggccctgtctggtacggtcaatatcctgcaaacctatttcgaaatggcgcgcacagccggcgatacattagatgtgttcaccatgattgatatctttaagtacgtgatctatggcatcgccgccgcttttttcgtttacggtattctgttaatggtcgagggatttttcaccaccggggcaataaaagacctgtatggtgattttaaaatcacaacgtgcggtaggtgcgtcagcgcttggttcataatgctgacatacctgttcatgcttgcctggctgggagtaacggccttcacgagcctgccagtatatatgtactttaacctgtggacaatctgccgcaatacgactcttgtggaaggggcaaacctatgcctcgacctccgccagttcgggatcgtcaccatcggcgaggaaaaaaaaatctgcaccgtgagcgagaatttcctgcgaatgtgtgaatctaccgaactgaatatgacctttcacctctttatcgtggccctggcaggcgccggcgctgctgtgatcgccatggtgcattacttgatggtgctctcagcaaattgggcgtacgtcaaggacgcatgtagaatgcagaagtatgaggatatcaaatccaaagaagagcaggaattgcacgacatccactccactagaagtaaagaaaggctgaacgcctacacttag

SEQ ID NO: 262530 - DNA, 804 bp, Artificial Sequence
  derived and/or modified sequence
atgggatgttttgagtgctgtataaaatgtctcgggggaatcccatatgcctccttgatagctactatcttgctctatgcaggggttgctctgttttgcgggtgcggtcacgaagccctgagcggcacagtgaacatcctccaaacctactttgagatggccagaaccgcaggagacaccctggatgtgttcacaatgatcgatatctttaaatacgtgatctatggcatcgccgcagccttttttgtgtacggaatcctgttgatggtagaaggcttttttacaacgggtgctatcaaagacctatatggggacttcaaaatcaccacctgcggcagatgcgtctccgcgtggttcattatgttgacatatctgtttatgttggcctggctgggggttactgcgttcactagcctccccgtgtacatgtacttcaatctgtggaccatttgccgcaataccactctcgtagagggagcgaacttgtgtctggacctccgccagtttggaattgtgacaatcggggaagaaaagaagatctgtactgtgtcggaaaacttcctgcgtatgtgcgagagcaccgaactgaacatgacctttcacttattcatcgtagctctggccggagctggggcagccgtgatcgcaatggtccattacctgatggtactgtctgccaattgggcctacgtcaaggatgcatgtaggatgcagaagtatgaggacattaagtcaaaagaggagcaagagttacatgacatccactcaacccgcagtaaggaacgcctcaatgcctatacttag

SEQ ID NO: 262531 - DNA, 1014 bp, Artificial Sequence
  derived and/or modified sequence
atgagattcgacaccctgtgggagaacaagctgatgcagagcagagccgtggacggcttccacagcgaggagcagcagctgctgctgcaggtgcagcagcagcaccagccccagcagcagcagcaccaccaccaccaccaccaccagcaggcccagccccagcagaccgtgccccagcaggcccagacccagcaggtgctgatccccgccagccagcaggccaccgccccccaggtgatcgtgcccgacagcaagctgatccagcacatgaacgccagcaacatgagcgccgccgccaccgccgccaccctggccctgcccgccggcgtgacccccgtgcagcagatcctgaccaacagcggccagctgctgcaggtggtgagagccgccaacggcgcccagtacatcttccagccccagcagagcgtggtgctgcagcagcaggtgatcccccagatgcagcccggcggcgtgcaggcccccgtgatccagcaggtgctggcccccctgcccggcggcatcagcccccagaccggcgtgatcatccagccccagcagatcctgttcaccggcaacaagacccaggtgatccccaccaccgtggccgcccccacccccgcccaggcccagatcaccgccaccggccagcagcagccccaggcccagcccgcccagacccaggcccccctggtgctgcaggtggacggcaccggcgacaccagcagcgaggaggacgaggacgaggaggaggactacgacgacgacgaggaggaggacaaggagaaggacggcgccgaggacggccaggtggaggaggagcccctgaacagcgaggacgacgtgagcgacgaggagggccaggagctgttcgacaccgagaacgtggtggtgtgccagtacgacaagatccacagaagcaagaacaagtggaagttccacctgaaggacggcatcatgaacctgaacggcagagactacatcttcagcaaggccatcggcgacgccgagtggtag

SEQ ID NO: 262532 - DNA, 1014 bp, Artificial Sequence
  derived and/or modified sequence
atggagctgaagaccctgtgggagaacaagctgatgcagagcagagccgtggacggcttccacagcgaggagcagcagctgctgctgcaggtgcagcagcagcaccagccccagcagcagcagcaccaccaccaccaccaccaccagcaggcccagccccagcagaccgtgccccagcaggcccagacccagcaggtgctgatccccgccagccagcaggccaccgccccccaggtgatcgtgcccgacagcaagctgatccagcacatgaacgccagcaacatgagcgccgccgccaccgccgccaccctggccctgcccgccggcgtgacccccgtgcagcagatcctgaccaacagcggccagctgctgcaggtggtgagagccgccaacggcgcccagtacatcttccagccccagcagagcgtggtgctgcagcagcaggtgatcccccagatgcagcccggcggcgtgcaggcccccgtgatccagcaggtgctggcccccctgcccggcggcatcagcccccagaccggcgtgatcatccagccccagcagatcctgttcaccggcaacaagacccaggtgatccccaccaccgtggccgcccccacccccgcccaggcccagatcaccgccaccggccagcagcagccccaggcccagcccgcccagacccaggcccccctggtgctgcaggtggacggcaccggcgacaccagcagcgaggaggacgaggacgaggaggaggactacgacgacgacgaggaggaggacaaggagaaggacggcgccgaggacggccaggtggaggaggagcccctgaacagcgaggacgacgtgagcgacgaggagggccaggagctgttcgacaccgagaacgtggtggtgtgccagtacgacaagatccacagaagcaagaacaagtggaagttccacctgaaggacggcatcatgaacctgaacggcagagactacatcttcagcaaggccatcggcgacgccgagtggtag

SEQ ID NO: 262533 - DNA, 1187 bp, Artificial Sequence
  derived and/or modified sequence
atgaggtttgatactttatgggaaaacaaactaatgcagtccagggcagtagatggatttcattcagaagagcagcagcttctactgcaagttcaacagcagcatcaaccccagcagcagcagcatcaccaccatcaccatcatcagcaagctcagcctcagcagacagtacctcagcaagcgcagacccagcaggttcttattcctgcatcacagcaagccacagcaccacaagttattgttccagattctaagttgatacagcatatgaatgcatcaaacatgagtgctgctgctacagctgctaccttagcactccctgcaggtgtgactcctgttcagcagatattaacaaattcaggccagcttcttcaggtggtcagagcagccaatggtgcccaatatatctttcagcctcagcagtcagtggttctacaacaacaggttataccacaaatgcagcctggtggagtacaagctcctgttatacagcaggtgctggctcctcttcctggagggatttcaccacagacaggtgtcatcatccagcctcagcaaatcttatttacaggaaataagactcaagttatacctacgacagtggcagcacctacaccagcccaagcacagataactgcaactggccagcagcaaccgcaggcccagcctgctcaaacacaagctccattggtcttacaagttgatggaactggggatacatcatctgaagaagatgaagatgaagaagaagactatgatgatgatgaggaggaagacaaagagaaagatggagctgaagatgggcaggtggaagaagagcccctcaatagtgaagatgatgtgagtgatgaggaaggacaggaactctttgacacagaaaatgttgttgtatgccaatatgataagatacacagaagtaaaaacaaatggaaatttcatctcaaggatggcattatgaatcttaatggaagagattatatattttccaaagccattggagatgcagaatggtgaagagttgctttttttcttttataaataaaagaaacttaaaaaaaatgtaaagcggacagtttgaaacttggggcatatgccaaccaaaacttcgtttctgcatgtcagaaaagtgcagtagaagcaaagctactggaacaaagatagaccttgacaacatagacactacttac

SEQ ID NO: 262534 - DNA, 1014 bp, Artificial Sequence
  derived and/or modified sequence
atgagatttgataccctgtgggagaacaagctgatgcagagtcgcgccgtggacgggttccacagcgaggagcaacagttgctgctacaggtgcagcaacagcatcagccacagcagcagcaacaccatcatcatcatcatcaccagcaggctcagcctcaacagacagtgcctcagcaggctcagacccagcaggtgctgatcccagcatcacaacaggcgaccgcgcctcaggttattgtgcctgattctaagctgatccaacacatgaatgcttcgaatatgagcgccgccgccacagcggctactcttgctctgcctgctggggtcacacccgtgcagcagattctgacaaattcagggcagctcctgcaggtcgtgcgcgccgccaatggcgcgcagtacatatttcagccccagcaatcagtggtcctacagcagcaggtgataccccagatgcaacctggcggagtgcaggcgcctgttatccagcaggtattggcccccctgccaggcggtatctcaccgcagacaggcgtgattattcagccacagcagatcctctttaccgggaataagacacaggtgattccaaccacagtcgcagctccgacccctgcgcaagctcagatcacggcgactggccagcaacagccgcaggcacagccggcgcagacgcaggcacctcttgtactccaggttgacggcacgggagatacgtctagtgaggaagacgaggacgaagaagaagattatgacgatgatgaggaagaggataaggaaaaggatggagcagaagacggccaggtagaagaggaacctctcaacagtgaagacgacgtgagtgatgaagaagggcaagaactttttgacaccgaaaatgtggtcgtctgccagtatgataagatccataggtccaaaaacaaatggaagtttcacctgaaggatggaatcatgaacctgaatggacgggattacatttttagtaaggctataggagacgctgagtggtag

SEQ ID NO: 262535 - DNA, 1014 bp, Artificial Sequence
  derived and/or modified sequence
atggaattgaagaccctgtgggaaaacaaacttatgcagtccagggcagttgatggctttcactccgaagagcagcagctgctgcttcaggtgcagcagcagcaccagccccagcagcagcagcatcatcatcatcaccaccaccagcaagcccagcctcagcagaccgttccccagcaggctcagacgcaacaggtcctgatcccggctagtcagcaggcaaccgcccctcaggtgatcgtaccagactctaaactcattcaacacatgaacgctagcaacatgagtgcagccgcaacagcagccactctcgcgcttccggccggggttacgcccgtccagcaaatcctcacaaactccggtcagcttctgcaagtcgttcgggcagccaatggagcccaatacatcttccagcctcagcagtccgttgtgctccagcagcaagtcattcctcagatgcagccagggggcgtccaggcacctgttatccaacaggtgttagctccgttacccggaggtatttcaccccagaccggggtgataatccagcctcaacagattcttttcactggaaacaagacccaggtgattccgaccaccgtcgcagccccaacccccgcccaggcacagatcacagcgacaggccaacagcaaccacaggcacagcccgctcaaacccaggcccctctggtccttcaggtcgatgggacgggagacaccagctccgaggaggacgaagacgaggaagaggactatgatgatgacgaggaggaagacaaggagaaagacggggcagaggatggccaggtagaggaagaacccctgaacagcgaggatgacgtttctgatgaagagggacaggaattgtttgatactgaaaacgtcgtcgtctgtcaatacgacaaaatccaccggtccaaaaacaaatggaaattccatctgaaggacgggataatgaatctgaatgggcgcgattacattttcagcaaggcaatcggcgatgccgaatggtag

SEQ ID NO: 262536 - DNA, 1014 bp, Artificial Sequence
  derived and/or modified sequence
atgagatttgacaccctgtgggagaacaagctgatgcagagcagagctgtggatggcttccacagcgaggagcagcagctgctgctgcaggtgcagcagcagcaccagccccagcagcagcagcaccaccaccaccaccaccaccagcaggcccagccccagcagacagtgccccagcaggcccagacccagcaggtgctgatcccagccagccagcaggccacagccccccaggtgattgtgcctgacagcaagctgatccagcacatgaatgccagcaacatgtctgctgctgccacagctgccaccctggccctgcctgctggggtgacccctgtgcagcagatcctgaccaacagcggccagctgctgcaggtggtgcgggccgccaatggagcccagtacatcttccagccccagcagagcgtggtgctgcagcagcaggtgatcccccagatgcagcctggaggagtgcaggcccctgtgatccagcaggtgctggcccccctgcccggcggcatcagcccccagacaggagtcatcatccagccccagcagatcctcttcaccggcaacaagacccaggtgatccccaccaccgtggccgcccccaccccagcccaggcccagatcacagccaccggccagcagcagccccaggcccagcctgcccagacccaggcccccctggtgctgcaggtggatggcactggagacaccagcagcgaggaggatgaagatgaggaggaggactatgatgatgatgaggaggaggacaaggagaaggatggagcagaagatggccaggtggaggaggagcccctgaacagtgaagatgatgtgtctgatgaggagggccaggagctgtttgacacagaaaatgtggtggtgtgccagtatgacaagatccacaggagcaagaacaagtggaagttccacctgaaggatggcatcatgaacctgaatggccgggactacatcttcagcaaggccatcggagatgctgagtggtag

SEQ ID NO: 262537 - DNA, 1014 bp, Artificial Sequence
  derived and/or modified sequence
atggagctgaagaccctgtgggagaacaagctgatgcagagcagagctgtggatggcttccacagcgaggagcagcagctgctgctgcaggtgcagcagcagcaccagccccagcagcagcagcaccaccaccaccaccaccaccagcaggcccagccccagcagacagtgccccagcaggcccagacccagcaggtgctgatcccagccagccagcaggccacagccccccaggtgattgtgcctgacagcaagctgatccagcacatgaatgccagcaacatgtctgctgctgccacagctgccaccctggccctgcctgctggggtgacccctgtgcagcagatcctgaccaacagcggccagctgctgcaggtggtgcgggccgccaatggagcccagtacatcttccagccccagcagagcgtggtgctgcagcagcaggtgatcccccagatgcagcctggaggagtgcaggcccctgtgatccagcaggtgctggcccccctgcccggcggcatcagcccccagacaggagtcatcatccagccccagcagatcctcttcaccggcaacaagacccaggtgatccccaccaccgtggccgcccccaccccagcccaggcccagatcacagccaccggccagcagcagccccaggcccagcctgcccagacccaggcccccctggtgctgcaggtggatggcactggagacaccagcagcgaggaggatgaagatgaggaggaggactatgatgatgatgaggaggaggacaaggagaaggatggagcagaagatggccaggtggaggaggagcccctgaacagtgaagatgatgtgtctgatgaggagggccaggagctgtttgacacagaaaatgtggtggtgtgccagtatgacaagatccacaggagcaagaacaagtggaagttccacctgaaggatggcatcatgaacctgaatggccgggactacatcttcagcaaggccatcggagatgctgagtggtag

SEQ ID NO: 262538 - DNA, 1014 bp, Artificial Sequence
  derived and/or modified sequence
atgcggttcgacaccctgtgggagaacaagctgatgcagagccgggccgtggacggctttcactctgaagagcagcagttactgctacaggtccagcagcagcaccaaccccagcagcagcagcaccaccatcaccaccaccaccagcaggcccagccccaacagactgtcccccagcaggcacagacccagcaggtgttaattcccgcatctcagcaggctaccgccccacaggtaatcgtcccagacagcaaattaattcagcatatgaacgccagtaacatgtctgcagcagccactgcagctacattggcgttacctgccggggtaacaccagtgcagcaaattctgacaaatagcgggcagctcctccaggtggtgcgcgctgcgaatggcgcccagtacatcttccagccgcagcagtctgtcgtgctgcagcagcaggtgatcccgcaaatgcagccaggaggtgtccaagcgcccgtaatacaacaggtcctcgcaccgttacctggaggcatatcaccccagactggggtgattattcagccacagcagattctgtttaccggcaataaaacgcaggtgatcccaacaaccgtggccgccccgacccccgcacaagcacaaattacggccacaggacagcagcaacctcaggcccagcctgcccagactcaggcccctctcgtcctccaggtggacgggaccggtgacacatccagtgaggaggacgaagatgaagaggaagactatgacgatgatgaagaggaagataaagaaaaagacggagccgaggacggacaagtggaagaggaaccacttaatagtgaagacgacgtgagtgacgaggaagggcaggaactgtttgatactgaaaatgtggttgtatgccagtacgacaaaatacaccgaagtaagaacaagtggaaatttcatttaaaagacggaataatgaatctgaatgggagggactatatcttctctaaagcaattggggacgcagaatggtag

SEQ ID NO: 262539 - DNA, 1014 bp, Artificial Sequence
  derived and/or modified sequence
atggagctgaagaccctgtgggagaacaagctgatgcagagccgggctgttgatggattccattctgaggaacagcagctgcttctgcaggtgcagcagcagcatcagccacagcaacagcagcatcaccaccaccaccaccaccagcaggcgcagccccagcagacagtaccacaacaggcacaaacacagcaagtcctcattcccgccagtcaacaagccacggcaccccaggttattgtgcctgactctaagttgatccaacatatgaacgcaagtaatatgtccgcagccgctaccgccgctaccctggccctgccagccggggtgactcccgtgcagcagattctgaccaactccgggcagttgctccaggtggtgcgggccgctaatggtgcccagtatatcttccagccacagcaatccgtggttctgcagcagcaggtgattccccagatgcagccaggcggggtgcaggcgccagtaattcagcaagtcctcgcccccttaccaggcggcatttccccccagaccggcgtgataattcagcctcagcagatcttattcaccggcaacaaaacacaggtgattccgactactgtcgcagcaccaactcctgcccaggcccagataactgccactgggcagcagcagccccaggctcaacctgcccagacacaagctccactagtactccaagtcgatggaaccggggatacaagctccgaggaggacgaggacgaggaggaagactacgatgatgatgaggaggaggataaggagaaggacggtgcagaggatggccaagtcgaggaggaacccttgaactctgaagacgatgtttccgatgaggagggccaggaactgttcgataccgagaatgtagtagtgtgccagtatgataaaatccataggtccaagaacaaatggaaatttcacctgaaggacggaattatgaacctcaatggccgcgactatatatttagtaaggcaataggagatgccgagtggtag

SEQ ID NO: 262540 - DNA, 1014 bp, Artificial Sequence
  derived and/or modified sequence
atgcggtttgacactctgtgggagaataaactgatgcagagtagggccgtggacggctttcactcagaagagcagcagctgttgcttcaggtgcagcagcagcaccaacctcagcaacaacagcaccatcaccatcatcatcatcaacaggcgcagccccagcagacagtgccccagcaggctcaaacgcaacaggttctgatcccagccagccagcaagccacagccccacaggtaatcgtcccagatagtaaactaatacagcatatgaacgcgagtaatatgtctgcagcggcaaccgccgctacacttgccttacccgcaggagtgacaccggtacagcagatcctgactaacagtggacagctgctgcaagtggtccgggctgcaaacggggctcagtacatcttccagccacagcagagtgttgttctgcaacagcaggttattccccaaatgcagccaggcggagtccaggcccctgttatacagcaggtgcttgcccctctacctggcggtatcagtcctcaaaccggcgtcatcattcagcctcagcaaatcctgttcaccggcaataaaactcaggtaatcccaactaccgtggctgccccaactccagcgcaggcacagattaccgccactggtcagcagcaaccacaggcccagcccgctcagacccaagcgccacttgtgcttcaggtcgacggtacaggggatacctcatccgaggaggatgaggacgaggaggaggattatgacgacgatgaggaagaggacaaagaaaaggacggtgcagaggacgggcaggtcgaagaggaaccgctcaatagcgaagatgacgtatcggatgaggagggacaagaactgtttgacaccgagaacgttgtcgtgtgccagtacgacaagatccaccgctccaagaacaagtggaagtttcacctgaaggacggtatcatgaacctcaacggacgtgactatatcttctctaaggctatcggagacgctgagtggtag

SEQ ID NO: 262541 - DNA, 1014 bp, Artificial Sequence
  derived and/or modified sequence
atggagttgaagaccctgtgggagaataagctcatgcagtcccgtgcagtagacggcttccactctgaggaacagcagctgttactccaggtccagcagcagcaccaaccccagcagcagcagcatcaccatcatcaccatcaccagcaggcccagccgcaacaaaccgtgcctcagcaagcccagacacagcaggtgcttataccagcttcgcagcaggccacggcgcctcaggtaattgtgccagacagtaagctcatccagcacatgaacgctagtaacatgagcgccgcagctaccgccgctactctagccctgccagctggagtgaccccggtccaacaaattctgacaaactcaggtcaactcctacaggttgtgagagctgcaaatggggctcaatatatttttcagccacagcagagtgtggttctgcagcagcaggtgatacctcagatgcagcccggaggagtgcaggcccctgtgatccaacaggtcttagcaccactgccaggcggaatctccccacagaccggggtcattattcagccccaacagatattgtttaccggaaataaaacccaggtcattcccactacagtggccgctcccacacccgcacaggcgcagattacagcaaccgggcagcagcagccccaggcccaacctgcccagactcaggcacccctggtcctgcaggtagacgggacaggagacacttccagcgaggaggacgaggacgaggaggaggactatgatgacgatgaagaggaggacaaggaaaaggacggggctgaagacgggcaggtggaggaggaacccttgaactccgaggacgatgtctctgacgaggaggggcaagagctgtttgacaccgaaaatgtggtggtgtgccagtatgataagattcaccggtccaaaaacaagtggaaatttcatctcaaggacgggattatgaatctgaatggccgtgattacatattttccaaagccattggagacgctgaatggtag

SEQ ID NO: 262542 - protein, 660 aa, Artificial Sequence
  derived and/or modified sequence
MVQRDMSKSPPTAAAAVAQEIQMELLENVAPAGALGAAAQSYGKGARRKNRFKGSDGSTSSDTTSNSFVRQGSADSYTSRPSDSDVSLEEDREAVRREAERQAQAQLEKAKTKPVAFAVRTNVSYSAAHEDDVPVPGMAISFEAKDFLHVKEKFNNDWWIGRLVKEGCEIGFIPSPVKLENMRLQHEQRAKQGKFYSSKSGGNSSSSLGDIVPSSRKSTPPSSAIDIDATGLDAEENDIPANHRSPKPSANSVTSPHSKEKRMPFFKKTEHTPPYDVVPSMRPVVLVGPSLKGYEVTDMMQKALFDFLKHRFEGRISITRVTADISLAKRSVLNNPSKHAIIERSNTRSSLAEVQSEIERIFELARTLQLVVLDADTINHPAQLSKTSLAPIIVYVKISSPKVLQRLIKSRGKSQAKHLNVQMVAADKLAQCPPELFDVILDENQLEDACEHLADYLEAYWKATHPPSSSLPNPLLSRTLATSSLPLSPTLASNSQGSQGDQRTDRSAPIRSASQAEEEPSVEPVKKSQHRSSSSAPHHNHRSGTSRGLSRQETFDSETQESRDSAYVEPKEDYSHDHVDHYASHRDHNHRDETHGSSDHRHRESRHRSRDVDREQDHNECNKQRSRHKSKDRYCEKDGEVISKKRNEAGEWNRDVYIRQ

SEQ ID NO: 262543 - DNA, 1983 bp, Artificial Sequence
  derived and/or modified sequence
atggtgcagagagatatgtccaaatccccaccaacagccgccgccgcagttgcccaggagattcagatggaactgctggaaaacgtggcaccagctggcgccctgggcgcagccgctcagagctacggcaagggggccaggaggaagaaccgcttcaaaggaagcgatggctcaacctcaagcgacacaacatccaattcttttgtcagacagggaagcgcagacagctacaccagtcggcccagtgactccgacgtttccctggaggaggaccgggaggccgtccgacgggaagctgagaggcaggctcaggcccagcttgaaaaggcaaagactaagccagttgccttcgctgtccgtacaaatgtcagctacagcgcagcccacgaagacgatgtacccgtgccaggcatggcgatttcctttgaagccaaagacttcctccacgttaaggagaaatttaataacgactggtggatcggaaggttagttaaagagggctgtgagatagggttcatacccagccctgttaagctggaaaacatgaggctgcagcatgagcagcgcgccaaacaggggaagttctacagcagcaaaagtggcggcaacagctccagctccctcggagatatcgtgccaagctcccgcaagtcaacccccccatcgtctgccatcgacattgacgctactggcctggatgcagaagaaaatgacatacctgccaatcaccggagccctaagccttcagctaacagtgtaacatctcctcactcaaaagagaagcgcatgcctttttttaagaagactgaacataccccgccatacgatgttgtgccgagtatgcgcccagtagtccttgtgggcccatccttaaaggggtatgaagttactgatatgatgcaaaaagctctattcgatttcctcaagcaccgcttcgaaggccggatctcaataaccagagttaccgcggatatctctctggccaaaaggagcgtgttgaacaacccttccaagcatgcaattattgaaagaagcaatacaagaagttccctcgccgaggtacaaagtgaaatcgaacgcattttcgagctcgccagaacactgcagcttgtggtgctggatgcggatacaatcaaccacccagcacaacttagtaaaacttctctggcgccaattatagtgtatgtgaaaattagctcccctaaggtcctccagaggctgatcaagtcccggggtaagtctcaggcaaaacatctgaacgtgcagatggtggccgccgacaaactggcacagtgcccacctgaactgtttgatgtgattcttgatgaaaaccaactggaggacgcgtgtgagcacttggctgattatctggaggcttactggaaagctacccatcctccctcctcctctcttccaaatcctctgttgtctaggaccttggctacctcctctctgccgctgtctcccacactggctagtaattcgcagggtagccaaggcgatcagcgcactgataggtctgccccgattagatccgcatcccaagccgaggaggaaccaagtgtggaaccagtgaaaaagtcccagcataggtcttcgagttccgctccccatcacaaccacaggagcgggacctcacgaggtctgagtaggcaggagaccttcgatagtgaaacgcaggagtccagggactccgcttacgtggagcctaaagaggactacagccatgatcatgtcgatcactacgcatcccacagagaccacaatcatcgcgatgaaactcatggctcatcagatcaccggcatagggagtctcgtcaccgctccagggatgtggatagagaacaggatcacaacgaatgtaacaagcagagatctcgtcataaaagcaaagatcgatattgcgaaaaggacggagaggttatttccaagaagcggaacgaagccggcgagtggaaccgtgacgtgtacatccgccaatag

SEQ ID NO: 262544 - DNA, 1983 bp, Artificial Sequence
  derived and/or modified sequence
atggtgcagagggacatgagcaagagccccccaacagctgctgctgctgtggcccaggagatccagatggagctgctggagaatgtggccccagctggggccctgggcgccgccgcccagagctatggcaagggggcccggaggaagaaccgcttcaagggcagtgatggcagcaccagcagtgacaccaccagcaacagctttgtgcggcagggcagcgctgacagctacaccagccggcccagcgacagtgatgtgtccctggaggaggaccgggaggccgtgcggcgggaggccgagcggcaggcccaggcccagctggagaaggccaagaccaagcctgtggcctttgctgtgaggaccaacgtgtcctacagcgctgcccatgaagatgatgtgcctgtgcccggcatggccatcagctttgaggccaaggacttcctgcacgtgaaggagaagttcaacaatgactggtggattggccgcctggtgaaggagggctgtgagatcggcttcatccccagccctgtgaagctggagaacatgaggctgcagcacgagcagagggccaagcagggcaagttctacagcagcaagagcggcggcaacagcagcagcagcctgggggacatcgtgcccagcagcaggaagagcaccccacccagcagcgccattgatattgatgccaccggcctggatgctgaggagaatgacatcccagccaaccacaggagccccaagcccagcgccaacagcgtgaccagcccccacagcaaggagaagaggatgcccttcttcaagaagacagagcacaccccaccctatgatgtggtgcccagcatgaggcctgtggtgctggtgggccccagcctgaagggctatgaggtgacagacatgatgcagaaggccctgtttgacttcctgaagcacagatttgagggccgcatcagcatcaccagggtgacagctgacatcagcctggccaagaggtctgtgctgaacaaccccagcaagcacgccatcatcgagaggagcaacaccaggagcagcctggccgaggtgcagagcgagattgaaagaatttttgagctggcccggaccctgcagctggtggtgctggatgctgacaccatcaaccacccagcccagctgagcaagaccagcctggcccccatcatcgtgtatgtgaagatcagcagccccaaggtgctgcagaggctcatcaagagccggggcaagagccaggccaagcacctgaatgtgcagatggtggccgctgacaagctggcccagtgccccccagagctgtttgatgtgatcctggatgagaaccagctggaggatgcctgtgagcacctggccgactacctggaggcctactggaaggccacccacccccccagcagcagcctgcccaaccccctgctgagcaggaccctggccaccagcagcctgcccctgagccccaccctggccagcaacagccagggcagccagggcgaccagaggacagacagaagtgcccccatccgcagcgccagccaggccgaggaggagcccagcgtggagcctgtgaagaagagccagcacaggagcagcagcagcgccccccaccacaaccacaggagcggcaccagccggggcctgagccggcaggagacctttgattctgagacccaggagagccgggacagcgcctacgtggagcccaaggaggactacagccatgaccacgtggaccactacgccagccaccgggaccacaaccacagagatgagacccacggcagcagtgaccaccgccaccgggagagccgccacaggagcagagatgtggaccgggagcaggaccacaatgaatgcaacaagcagaggagccgccacaagagcaaggaccgctactgtgagaaggatggagaggtgatcagcaagaagagaaatgaagctggggagtggaacagagatgtgtacatccggcagtag

SEQ ID NO: 262545 - DNA, 1983 bp, Artificial Sequence
  derived and/or modified sequence
atggtgcagcgggacatgagcaagagcccccccaccgccgccgccgccgtggcacaggaaattcagatggagcttctggagaacgttgccccggccggagctctgggagctgccgcacaaagttatgggaaaggcgctcgacgcaagaaccggtttaagggcagcgatgggtcaacatcttcagataccacgagcaacagtttcgtgagacagggatccgcagatagctacacttcaaggccatcggattcggatgtgagcctcgaggaagaccgagaggctgtgagacgcgaagcagaaagacaggcacaggcccaactcgagaaggccaaaacgaaacccgtcgcgttcgcagtgcggacaaacgtgagctatagcgctgctcatgaggacgacgttcccgttccagggatggctatcagcttcgaggctaaggacttcttacacgtgaaagagaaatttaataacgactggtggattggccgactggttaaagagggctgtgagattggtttcatcccaagcccagtcaaactggagaatatgcgtctccagcatgagcagagagctaagcaaggcaagttctactcgtccaaatccggagggaactcctcaagttccctgggggacatagtacctagttctcgcaaaagtactcccccctcctcggcgatcgatatcgacgccaccggactggacgcagaagaaaatgatatccccgccaatcatcgcagccctaaaccatccgccaactccgtcacctcacctcatagcaaagagaagcgcatgccgtttttcaaaaaaaccgaacatacgcctccctatgacgttgtgccctccatgcggcctgtagtactggtgggtccaagcctcaaggggtatgaagtcacagatatgatgcagaaagccttgttcgactttcttaaacatcgttttgagggaagaatatcgatcacgcgggtaacggctgacatcagtttagctaagcgcagcgtcttgaataatccaagtaagcacgcgattatcgagcggtccaacactagaagcagtctagccgaagtgcaatctgagatagaacggatctttgagttggcccgcacgctgcagcttgtcgtgctcgatgcagatactattaatcaccccgcacagctgagtaagacctcattagccccaatcatcgtctatgtcaagatctcttcaccaaaagtcttgcaaaggctgattaaaagccggggcaagtcccaggccaaacacctcaatgtccagatggtcgccgccgataagctggctcagtgtccacccgaactgttcgacgtgatcctggacgaaaaccagctcgaggatgcctgtgagcacctggcagattacctggaggcctactggaaggcaacacaccctcccagctctagcctgcctaacccactgctaagcaggacattagcaacttcctccctgcctctctcgccgacactggcgtctaattctcaagggtcacagggagatcagagaactgaccggagcgctcccattaggtcagccagccaggctgaagaagaacctagtgtagagcccgtgaagaaatctcagcatcggagcagctcatctgctccccatcacaatcaccgctccggaacttctagggggctctctcgccaggagactttcgatagtgaaacacaggaatctcgcgacagcgcttatgtggaaccaaaggaggactattcccatgaccacgtcgaccactatgcatcccaccgcgatcacaaccatagagatgagacacacggatcctccgaccatcggcatcgggaaagtagacataggtctagagatgtcgatagggaacaggatcacaacgagtgtaataagcagcgaagccgacataagtctaaggaccgctactgtgaaaaggacggcgaagtgatttcaaaaaagaggaatgaggccggcgagtggaacagggacgtgtacatcagacaatag

SEQ ID NO: 262546 - DNA, 1983 bp, Artificial Sequence
  derived and/or modified sequence
atggtgcagagggacatgagtaaatccccccctacagctgccgctgccgtagcccaggaaattcaaatggaactcctggaaaacgtagctcccgctggagctctcggcgctgccgctcagtcctacggaaagggggctaggcggaaaaatcgcttcaagggctccgacggctccacctctagtgataccacttctaacagctttgtcaggcagggatcagccgatagctacacgtctcgcccaagcgattctgatgttagtttagaagaagaccgcgaggcagtgagacgggaagcagagcgacaggcacaggcacagctcgaaaaggccaagacaaaacccgtcgcttttgccgtccgaacgaacgtgagctactcagccgcacatgaggacgatgtgccagtccccggaatggccatttcctttgaggcaaaggacttcctacatgtgaaagagaagttcaacaatgactggtggatcggcagacttgtgaaggaaggttgtgagataggcttcatcccaagtcctgttaagctcgaaaatatgaggctccagcatgaacagcgagccaaacaagggaaattctatagcagtaagtccggaggaaactcctcctcctccctgggcgatatagtgccttcatctcgcaaatctacccctccctcaagcgctatagacatcgacgcgaccggcctcgatgctgaggagaatgacatccctgctaaccaccgttcgcctaaaccctcagccaactcagtgacgagtccccactcaaaggagaagcgcatgccattctttaagaagaccgagcatacacctccctacgatgtcgttcccagcatgagaccagtcgtcttggtgggtccaagcctaaaggggtatgaagtcaccgatatgatgcaaaaggcattatttgactttctgaaacatagattcgaaggcagaattagcataacaagggttaccgctgacatttcccttgccaagagatcagtcctaaataacccatcgaaacacgcaatcatcgaacgatctaacacaaggagttcgctcgccgaagtgcaatctgaaatagaaagaatcttcgaactcgcgagaacactccagctagtggtgttggatgctgacacgattaaccacccggcacagctttctaagacctctttggcgcctataattgtgtatgtcaaaatctctagcccgaaagttcttcagcggctgatcaagtcccgtggcaagagccaggcgaaacacttaaacgtccagatggtcgccgcagacaaactggctcagtgtcccccagagctctttgacgtcattctggacgagaatcaactggaggacgcatgtgaacacctcgcagactacttggaggcctactggaaagccacacacccaccttcctccagcctgcccaaccctctcctgtcacggacactcgcaacatcctccctgccgctgtctcctactctagcaagcaactcacagggctcccagggtgaccagcgcactgaccgctccgccccaataagaagtgcctcacaagccgaggaggagccttctgtggaacccgtaaaaaagagccagcatcgcagttcctcctcagcccctcaccataatcatagaagcggcacaagtaggggtctgagcagacaagaaacgtttgactccgagacccaggagtctagggattcagcctatgtcgaacctaaggaagattattctcacgatcacgttgatcattatgcctcccacagagatcacaaccacagggacgagactcatggcagctcagatcatcgacacagggaatctcgtcacaggtcgcgggacgtcgatagggaacaggatcacaatgaatgcaataaacagcggagccggcataaatccaaggatcggtactgtgagaaggatggagaggtgatatcaaagaaaagaaacgaagccggagaatggaatcgggacgtgtatatccggcaatag

SEQ ID NO: 262547 - DNA, 3446 bp, Artificial Sequence
  derived and/or modified sequence
gaggaggaggggacccgccgccgggggctggctgcttcgctccgagccgacttttcgccaatggtccaaagggacatgtccaagtcgcctcccacagcggcggcggcggtggcgcaggagatccagatggaactgctagagaacgtggctcccgcgggggcgctcggagccgccgcacagtcatatggaaaaggagccagaaggaaaaacagatttaaaggatctgatggaagcacgtcatctgatactacctcaaatagttttgttcgccagggttcggcagactcctacactagccgtccatccgattccgatgtatctctggaggaggaccgggaggcagtgcgcagagaagcggagcggcaggcccaggcacagttggaaaaagcaaagacaaagcccgttgcatttgcggttcggacaaatgtcagctacagtgcggcccatgaagatgatgttccagtgcctggcatggccatctcattcgaagcaaaagattttctgcatgttaaggaaaaatttaacaatgactggtggatagggcgattggtaaaagaaggctgtgaaatcggattcattccaagcccagtcaaactagaaaacatgaggctgcagcatgaacagagagccaagcaagggaaattctactccagtaaatcaggaggaaattcatcatccagtttgggtgacatagtacctagttccagaaaatcaacacctccatcatctgctatagacatagatgctactggcttagatgcagaagaaaatgatattccagcaaaccaccgctcccctaaacccagtgcaaacagtgtaacgtcaccccactccaaagagaaaagaatgcccttctttaagaagacagagcacactcctccgtatgatgtggtaccttccatgcgaccagtggtcctagtgggcccttctctgaagggctacgaggtcacagatatgatgcaaaaagcgctgtttgattttttaaaacacagatttgaagggcggatatccatcacaagggtcaccgctgacatctcgcttgccaaacgctcggtattaaacaatcccagtaagcacgcaataatagaaagatccaacacaaggtcaagcttagcggaagttcagagtgaaatcgaaaggatttttgaacttgcaagaacattgcagttggtggtccttgacgcggatacaattaatcatccagctcaactcagtaaaacctccttggcccctattatagtatatgtaaagatttcttctcctaaggttttacaaaggttaataaaatctcgagggaaatctcaagctaaacacctcaacgtccagatggtagcagctgataaactggctcagtgtcctccagagctgttcgatgtgatcttggatgagaaccagcttgaggatgcctgtgagcaccttgccgactatctggaggcctactggaaggccacccatcctcccagcagtagcctccccaaccctctccttagccgtacattagccacttcaagtctgcctcttagccccaccctagcctctaattcacagggttctcaaggtgatcagaggactgatcgctccgctcctatccgttctgcttcccaagctgaagaagaacctagtgtggaaccagtcaagaaatcccagcaccgctcttcctcctcagccccacaccacaaccatcgcagtgggacaagtcgcggcctctccaggcaagagacatttgactcggaaacccaggagagtcgagactctgcctacgtagagccaaaggaagattattcccatgaccacgtggaccactatgcctcacaccgtgaccacaaccacagagacgagacccacgggagcagtgaccacagacacagggagtcccggcaccgttcccgggacgtggatcgagagcaggaccacaacgagtgcaacaagcagcgcagccgtcataaatccaaggatcgctactgtgaaaaggatggagaagtgatatcaaaaaaacggaatgaggctggggagtggaacagggatgtttacatccgccaatgagttttgcccgtttgtgtttttttttttttttttttgaagtcttgtataactaacagcatccccaaaacaaagtctttggggtctacactgcaatcatatgtgatctgtcttgtaatattttgtattattgctgttgcttgaatagcaatagcatggatagagtattgagatactttttcttttgtaagtgctacataaattggcctggtatggctgcagtcctccggttgcatactggactcttcaaaaactgttttgggtagctgccacttgaacaaaatctgttgccacccaggtgatgttagtgttttaagaaatgtagttgatgtatccaacaagccagaatcagcacagataaaaagtggaatttcttgtttctccagatttttaatacgttaatacgcaggcatctgatttgcatattcattcatggaccactgtttcttgcttgtacctctggctgactaaatttggggacagattcagtcttgccttacacaaaggggatcataaagttagaatctattttctatgtactagtactgtgtactgtatagacagtttgtaaatgttatttctgcaaacaaacaccttcttattatatatataatatatatatatatcagtttgatcacactattttagagtcttaatgccaagtcagcagatttgctttatgaattacagggactagaaatgcccacattcaggaaatttgtaataacattgtctagacacctatcctcattctagtagaaagtgtgtacatactgtaaatatgtgtgattgcttgacttgaaaaggtttgaattctgaatgttataccatccttgtaagtaagtttgtaatttccaccataaattatggtaaatataaaactccagaggttgttctactccatacagttcacactgattgtgacacattcttagtagctagtgtctgttctagtcactgcactggagtctacgagccggaactcgctatatgcacgtgtgtgtgtccgtatgtaagaaagtgtgcaccgagtgactgaatggttgagatgaattggaatgctgaagactaacgaagaaactagagactgatatcgagcattctgcccacctcgctctgtatttaattaattgtgctatatgttgctttaacaacccattgagcagtcagggaatgtgagtaagcttgctgccaaaggtaactaggaaagcattcatctgctgcctccttgtttttgctcctagagagtgaaaatacaggcaattttactgtgagtgtttcactggaaatgtacaatctttgtgtgttagagtatttgttttagtaagaaatgtttacacagcttgtggaattatttcgtgggaaaataaatttttataacttctcccacttcaatttctaacctt

SEQ ID NO: 262548 - DNA, 1983 bp, Artificial Sequence
  derived and/or modified sequence
atggtgcagagagacatgagcaagagcccccccaccgccgccgccgccgtggcccaggagatccagatggagctgctggagaacgtggcccccgccggcgccctgggcgccgccgcccagagctacggcaagggcgccagaagaaagaacagattcaagggcagcgacggcagcaccagcagcgacaccaccagcaacagcttcgtgagacagggcagcgccgacagctacaccagcagacccagcgacagcgacgtgagcctggaggaggacagagaggccgtgagaagagaggccgagagacaggcccaggcccagctggagaaggccaagaccaagcccgtggccttcgccgtgagaaccaacgtgagctacagcgccgcccacgaggacgacgtgcccgtgcccggcatggccatcagcttcgaggccaaggacttcctgcacgtgaaggagaagttcaacaacgactggtggatcggcagactggtgaaggagggctgcgagatcggcttcatccccagccccgtgaagctggagaacatgagactgcagcacgagcagagagccaagcagggcaagttctacagcagcaagagcggcggcaacagcagcagcagcctgggcgacatcgtgcccagcagcagaaagagcaccccccccagcagcgccatcgacatcgacgccaccggcctggacgccgaggagaacgacatccccgccaaccacagaagccccaagcccagcgccaacagcgtgaccagcccccacagcaaggagaagagaatgcccttcttcaagaagaccgagcacacccccccctacgacgtggtgcccagcatgagacccgtggtgctggtgggccccagcctgaagggctacgaggtgaccgacatgatgcagaaggccctgttcgacttcctgaagcacagattcgagggcagaatcagcatcaccagagtgaccgccgacatcagcctggccaagagaagcgtgctgaacaaccccagcaagcacgccatcatcgagagaagcaacaccagaagcagcctggccgaggtgcagagcgagatcgagagaatcttcgagctggccagaaccctgcagctggtggtgctggacgccgacaccatcaaccaccccgcccagctgagcaagaccagcctggcccccatcatcgtgtacgtgaagatcagcagccccaaggtgctgcagagactgatcaagagcagaggcaagagccaggccaagcacctgaacgtgcagatggtggccgccgacaagctggcccagtgcccccccgagctgttcgacgtgatcctggacgagaaccagctggaggacgcctgcgagcacctggccgactacctggaggcctactggaaggccacccacccccccagcagcagcctgcccaaccccctgctgagcagaaccctggccaccagcagcctgcccctgagccccaccctggccagcaacagccagggcagccagggcgaccagagaaccgacagaagcgcccccatcagaagcgccagccaggccgaggaggagcccagcgtggagcccgtgaagaagagccagcacagaagcagcagcagcgccccccaccacaaccacagaagcggcaccagcagaggcctgagcagacaggagaccttcgacagcgagacccaggagagcagagacagcgcctacgtggagcccaaggaggactacagccacgaccacgtggaccactacgccagccacagagaccacaaccacagagacgagacccacggcagcagcgaccacagacacagagagagcagacacagaagcagagacgtggacagagagcaggaccacaacgagtgcaacaagcagagaagcagacacaagagcaaggacagatactgcgagaaggacggcgaggtgatcagcaagaagagaaacgaggccggcgagtggaacagagacgtgtacatcagacagtag

SEQ ID NO: 262549 - protein, 636 aa, Artificial Sequence
  derived and/or modified sequence
MVQRDMSKSPPTAAAAVAQEIQMELLENVAPAGALGAAAQSYGKGARRKNRFKGSDGSTSSDTTSNSFVRQGSADSYTSRPSDSDVSLEEDREAVRREAERQAQAQLEKAKTKPVAFAVRTNVSYSAAHEDDVPVPGMAISFEAKDFLHVKEKFNNDWWIGRLVKEGCEIGFIPSPVKLENMRLQHEQRAKQGKFYSSKSGGNSSSSLGDIVPSSRKSTPPSSGAKSADEQDQWKTAGLFWRFTTEHTPPYDVVPSMRPVVLVGPSLKGYEVTDMMQKALFDFLKHRFEGRISITRVTADISLAKRSVLNNPSKHAIIERSNTRSSLAEVQSEIERIFELARTLQLVVLDADTINHPAQLSKTSLAPIIVYVKISSPKVLQRLIKSRGKSQAKHLNVQMVAADKLAQCPPELFDVILDENQLEDACEHLADYLEAYWKATHPPSSSLPNPLLSRTLATSSLPLSPTLASNSQGSQGDQRTDRSAPIRSASQAEEEPSVEPVKKSQHRSSSSAPHHNHRSGTSRGLSRQETFDSETQESRDSAYVEPKEDYSHDHVDHYASHRDHNHRDETHGSSDHRHRESRHRSRDVDREQDHNECNKQRSRHKSKDRYCEKDGEVISKKRNEAGEWNRDVYIRQ

SEQ ID NO: 262550 - DNA, 1911 bp, Artificial Sequence
  derived and/or modified sequence
atggtgcaaagagatatgagcaaaagtccccccacagccgcagctgccgtggcccaggaaatccaaatggagctcttagaaaatgtggcacccgccggcgccctgggggcggccgctcagagctacggcaagggagctagaagaaagaatcggtttaaagggagtgatggatccacttcttccgacactacatcaaattccttcgttcggcaggggtccgccgatagctacacttcgcgacctagcgatagtgacgtgtctctagaagaggaccgtgaagcagttagacgggaagccgaaagacaggcccaggcacagctggagaaagctaaaactaaacccgtggcattcgctgtgcgcacaaatgtttcctatagtgccgcccacgaagacgatgtgccagtgccaggaatggccatctctttcgaggctaaggattttctccatgttaaagagaagttcaataatgattggtggatcggacgactggttaaggaggggtgcgaaatcggtttcatcccctcccccgttaagcttgagaatatgagacttcagcatgagcagcgggccaagcagggtaagttttactccagcaaatcaggagggaactcctccagctctctcggtgatatcgttccgagcagtcgcaagtcgactccaccctcttctggtgccaagagcgctgatgaacaagaccaatggaagacggcagggctcttctggagattcaccacagagcacaccccaccctatgatgtggtgccctccatgcgacctgtggtgctcgtggggccatcccttaaggggtatgaggtgaccgacatgatgcagaaagcccttttcgacttcttaaaacaccggttcgagggtcggatatctatcactagggttactgccgatatttctctggcaaagagatcagttttgaacaatcctagtaagcatgcaattatcgagagatctaatacacgttcaagtcttgccgaagtacagtccgaaatcgagcgtatttttgagcttgcaagaactctgcaattggttgttctggatgcggacacaattaaccatcccgcccaactctctaaaacctctctggctcctatcattgtgtatgtgaagatctctagccccaaagtcctgcagcgactcattaaatcaaggggcaagtctcaggccaagcatctcaacgtccaaatggtagctgcggacaagctcgctcagtgtccccccgagctgtttgacgtcatcctcgacgaaaatcagctggaagacgcttgtgaacacctggctgactatctggaggcatattggaaagccactcacccaccttcttcctctcttcctaaccctttgctttctagaactttggcgactagcagcctacccctgtcccccacactggcatcaaatagtcaagggtctcagggggatcaaagaactgatcggtccgctcccatccgctctgcctctcaggcggaagaagaaccttctgtggagccagtgaaaaaaagtcagcacagatcttccagctcagccccacaccataatcaccgctccggaactagtcggggtttgagcaggcaggagacttttgatagcgagacacaggagtcccgtgacagtgcctacgtggaaccgaaagaagactacagtcacgatcatgtcgaccactatgcatctcatcgcgaccacaatcaccgggacgagacccacggctcaagcgaccacagacatagggagtcacgtcaccgttcgcgtgacgtggatcgcgagcaggatcacaatgaatgcaacaaacaacggtctaggcataaatccaaggacagatactgcgagaaagatggcgaagtgatctccaagaagcgcaacgaagccggcgaatggaaccgggatgtatacatccggcaatag

SEQ ID NO: 262551 - DNA, 1911 bp, Artificial Sequence
  derived and/or modified sequence
atggtgcagagggacatgagcaagagccccccaacagctgctgctgctgtggcccaggagatccagatggagctgctggagaatgtggccccagctggggccctgggcgccgccgcccagagctatggcaagggggcccggaggaagaaccgcttcaagggcagtgatggcagcaccagcagtgacaccaccagcaacagctttgtgcggcagggcagcgctgacagctacaccagccggcccagcgacagtgatgtgtccctggaggaggaccgggaggccgtgcggcgggaggccgagcggcaggcccaggcccagctggagaaggccaagaccaagcctgtggcctttgctgtgaggaccaacgtgtcctacagcgctgcccatgaagatgatgtgcctgtgcccggcatggccatcagctttgaggccaaggacttcctgcacgtgaaggagaagttcaacaatgactggtggattggccgcctggtgaaggagggctgtgagatcggcttcatccccagccctgtgaagctggagaacatgaggctgcagcacgagcagagggccaagcagggcaagttctacagcagcaagagcggcggcaacagcagcagcagcctgggggacatcgtgcccagcagcaggaagagcaccccacccagcagcggggccaagtctgcagatgagcaggaccagtggaagacagctggcctcttctggaggttcaccacagagcacaccccaccctatgatgtggtgcccagcatgaggcctgtggtgctggtgggccccagcctgaagggctatgaggtgacagacatgatgcagaaggccctgtttgacttcctgaagcacagatttgagggccgcatcagcatcaccagggtgacagctgacatcagcctggccaagaggtctgtgctgaacaaccccagcaagcacgccatcatcgagaggagcaacaccaggagcagcctggccgaggtgcagagcgagattgaaagaatttttgagctggcccggaccctgcagctggtggtgctggatgctgacaccatcaaccacccagcccagctgagcaagaccagcctggcccccatcatcgtgtatgtgaagatcagcagccccaaggtgctgcagaggctcatcaagagccggggcaagagccaggccaagcacctgaatgtgcagatggtggccgctgacaagctggcccagtgccccccagagctgtttgatgtgatcctggatgagaaccagctggaggatgcctgtgagcacctggccgactacctggaggcctactggaaggccacccacccccccagcagcagcctgcccaaccccctgctgagcaggaccctggccaccagcagcctgcccctgagccccaccctggccagcaacagccagggcagccagggcgaccagaggacagacagaagtgcccccatccgcagcgccagccaggccgaggaggagcccagcgtggagcctgtgaagaagagccagcacaggagcagcagcagcgccccccaccacaaccacaggagcggcaccagccggggcctgagccggcaggagacctttgattctgagacccaggagagccgggacagcgcctacgtggagcccaaggaggactacagccatgaccacgtggaccactacgccagccaccgggaccacaaccacagagatgagacccacggcagcagtgaccaccgccaccgggagagccgccacaggagcagagatgtggaccgggagcaggaccacaatgaatgcaacaagcagaggagccgccacaagagcaaggaccgctactgtgagaaggatggagaggtgatcagcaagaagagaaatgaagctggggagtggaacagagatgtgtacatccggcagtag

SEQ ID NO: 262552 - DNA, 1911 bp, Artificial Sequence
  derived and/or modified sequence
atggtgcagcgggacatgagcaagagcccccccaccgccgccgccgccgttgcgcaagagatccaaatggagctcttggaaaatgtcgcaccagctggagccttgggtgcagctgcacagagctacggcaagggtgcgagaaggaagaaccgtttcaaagggagtgacggctcaactagctccgacaccacctcaaatagctttgtgaggcaggggagtgccgacagctataccagcaggccaagcgattcagatgtctccctggaagaagatcgtgaagccgtaaggcgagaggcagaacgccaggcacaggcacaactagagaaggcaaagacaaagccagtcgcctttgccgtgcgcacgaatgtgtcttactccgccgcccatgaggatgacgtcccagtccctggtatggccatttctttcgaggctaaagacttcctgcatgttaaagagaaatttaataacgattggtggatcggcaggctggtcaaagaaggttgcgagattgggttcatcccgtctcctgtgaagctagaaaacatgagactgcaacacgagcagcgtgccaagcagggcaaattctatagttccaagagcggggggaatagtagctcatcattgggggacatcgtgccttcatctagaaagagcacacccccctcttctggcgctaagtctgctgatgaacaggaccaatggaaaactgcgggacttttctggcgtttcactactgagcacaccccaccctatgatgtggttccgtcgatgcggcccgtagtgcttgttgggccttctctcaaggggtacgaggttaccgatatgatgcaaaaggccctgtttgatttcttgaagcacagattcgagggaagaattagcattaccagagtcacagcggacatttccctcgctaagcgctccgtgctgaacaatcccagcaaacatgccatcattgaacgtagtaatacccgctcctccctggctgaggtgcaatccgaaattgagaggatattcgagcttgctcgtaccctgcagctggtggtgctggacgctgataccatcaaccaccctgctcaactgtctaagaccagtttagctcccattatcgtctacgtgaagatttcaagtcctaaggtcctacagcggttgataaagtccagaggcaagtcccaggccaagcatctcaacgtgcagatggtggccgctgataagttggctcagtgcccacctgagctgtttgatgtgatcctcgacgaaaaccagctggaagacgcctgcgagcacctcgctgactatttggaagcttactggaaagcaacgcacccccccagttctagtctgccaaacccactcctctcacgtacactcgccacctcaagcctgcctttatccccaacattggcatccaactcacagggatcacagggggatcagagaactgacaggtctgcaccaattcgttccgcgagccaggcagaggaagagcccagcgttgagcctgtcaagaaatctcagcaccgatcttctagctccgcccctcaccataaccatagatccggcacttcccggggtctgtccagacaggagacattcgactcagaaacgcaagagagccgggactccgcatacgtggagcccaaagaggattactctcatgaccacgtcgaccattacgcctctcaccgggaccacaatcaccgggatgaaacacatggctcgagcgaccatcggcaccgggagtcgcggcataggtcgagggatgtggacagagaacaggatcataatgagtgcaacaaacagagaagtagacacaaaagtaaggatcgttactgcgagaaggacggtgaagttattagcaagaaaagaaacgaagccggcgagtggaaccgggatgtatatattcgtcaatag

SEQ ID NO: 262553 - DNA, 1911 bp, Artificial Sequence
  derived and/or modified sequence
atggtgcagagagacatgtctaaatccccgccaacggcagccgcagcagtggcgcaagagatacaaatggagctgctggaaaatgtggccccagcaggagctcttggggcagccgctcaaagttacggaaagggcgcacggcgaaagaacaggttcaagggttccgacggctctacctcctccgataccacaagtaactccttcgtacgccagggcagcgctgactcttatacttctcgcccatccgactctgacgtcagtttggaagaggacagggaggccgtccgaagggaagccgagcgccaggcccaggcccagctggagaaggctaagacaaagcccgttgcctttgccgtgcgcacaaacgtgagttacagcgcagctcatgaagatgacgtaccagtgcctggtatggcgatctctttcgaggccaaagacttcctgcacgttaaagagaagtttaacaatgactggtggattgggagactggttaaagagggttgcgagataggcttcatcccaagtcctgtgaagctcgaaaacatgagactgcagcacgagcagcgagccaagcagggaaaattctactccagcaaatccggcggtaatagttcttcctccctgggggatatagtcccttcctcacggaagagcacgcctccttctagcggcgctaaatcggccgatgaacaggatcagtggaagaccgcaggcctcttctggcggtttacaacagagcacactccaccttacgatgtcgtaccctctatgagaccagtcgtccttgtggggcctagcctgaaaggctatgaggtcacagacatgatgcagaaggccctattcgacttcttgaagcataggtttgaaggcaggatatccattacccgagtgaccgcagatatttcactcgcaaagcggagtgtgttgaataaccctagtaaacacgcgattatcgagcgaagcaacacaaggtcctctctagccgaggttcagtcagagattgagcgcatcttcgaactagcccgaactttacagctcgtggtactggacgccgacacaatcaatcatccggcacagttgagtaagacatccctggcccctatcatcgtatatgttaagatttcctcacctaaggtactgcagaggctgataaagtcacggggtaagtcccaggccaaacacctgaatgtccaaatggtggctgcagataaactggcacagtgcccaccggaactcttcgatgtgattctggacgaaaaccagttagaggacgcctgtgaacatttggccgactatctagaagcctactggaaggctacccatccgccatcgagctcccttcccaatcctctgctatcacggaccctggcaactagcagtctccctctttctcccacactggccagcaactcccaaggcagccagggagatcaacgaacagatagatccgcacctattcggtctgccagtcaagccgaggaggagccgagcgtggagccggtgaaaaagtcccaacatcggtcgagctcaagtgccccacaccataatcatagatccggaacctccagagggctttcccgtcaggagacgtttgactcagagacccaggagagcagggactctgcgtacgtagagccgaaagaggactactctcacgaccatgtagaccactacgccagtcacagggatcacaatcatcgtgacgagacacacgggtcctctgaccaccggcatcgcgaatctaggcacaggagccgtgacgtggacagagagcaagaccataatgaatgcaataagcagcgaagtcggcacaaatccaaagatcggtactgtgagaaagacggggaagttatatctaaaaaaaggaatgaagccggtgaatggaacagagacgtgtatatcaggcaatag

SEQ ID NO: 262554 - DNA, 1911 bp, Artificial Sequence
  derived and/or modified sequence
atggtccaaagggacatgtccaagtcgcctcccacagcggcggcggcggtggcgcaggagatccagatggaactgctagagaacgtggctcccgcgggggcgctcggagccgccgcacagtcatatggaaaaggagccagaaggaaaaacagatttaaaggatctgatggaagcacgtcatctgatactacctcaaatagttttgttcgccagggttcggcagactcctacactagccgtccatccgattccgatgtatctctggaggaggaccgggaggcagtgcgcagagaagcggagcggcaggcccaggcacagttggaaaaagcaaagacaaagcccgttgcatttgcggttcggacaaatgtcagctacagtgcggcccatgaagatgatgttccagtgcctggcatggccatctcattcgaagcaaaagattttctgcatgttaaggaaaaatttaacaatgactggtggatagggcgattggtaaaagaaggctgtgaaatcggattcattccaagcccagtcaaactagaaaacatgaggctgcagcatgaacagagagccaagcaagggaaattctactccagtaaatcaggaggaaattcatcatccagtttgggtgacatagtacctagttccagaaaatcaacacctccatcatctggtgcaaaatctgcagatgaacaagaccagtggaaaactgcaggcttgttttggcggtttactacagagcacactcctccgtatgatgtggtaccttccatgcgaccagtggtcctagtgggcccttctctgaagggctacgaggtcacagatatgatgcaaaaagcgctgtttgattttttaaaacacagatttgaagggcggatatccatcacaagggtcaccgctgacatctcgcttgccaaacgctcggtattaaacaatcccagtaagcacgcaataatagaaagatccaacacaaggtcaagcttagcggaagttcagagtgaaatcgaaaggatttttgaacttgcaagaacattgcagttggtggtccttgacgcggatacaattaatcatccagctcaactcagtaaaacctccttggcccctattatagtatatgtaaagatttcttctcctaaggttttacaaaggttaataaaatctcgagggaaatctcaagctaaacacctcaacgtccagatggtagcagctgataaactggctcagtgtcctccagagctgttcgatgtgatcttggatgagaaccagcttgaggatgcctgtgagcaccttgccgactatctggaggcctactggaaggccacccatcctcccagcagtagcctccccaaccctctccttagccgtacattagccacttcaagtctgcctcttagccccaccctagcctctaattcacagggttctcaaggtgatcagaggactgatcgctccgctcctatccgttctgcttcccaagctgaagaagaacctagtgtggaaccagtcaagaaatcccagcaccgctcttcctcctcagccccacaccacaaccatcgcagtgggacaagtcgcggcctctccaggcaagagacatttgactcggaaacccaggagagtcgagactctgcctacgtagagccaaaggaagattattcccatgaccacgtggaccactatgcctcacaccgtgaccacaaccacagagacgagacccacgggagcagtgaccacagacacagggagtcccggcaccgttcccgggacgtggatcgagagcaggaccacaacgagtgcaacaagcagcgcagccgtcataaatccaaggatcgctactgtgaaaaggatggagaagtgatatcaaaaaaacggaatgaggctggggagtggaacagggatgtttacatccgccaatga

SEQ ID NO: 262555 - DNA, 1911 bp, Artificial Sequence
  derived and/or modified sequence
atggtgcagagagacatgagcaagagcccccccaccgccgccgccgccgtggcccaggagatccagatggagctgctggagaacgtggcccccgccggcgccctgggcgccgccgcccagagctacggcaagggcgccagaagaaagaacagattcaagggcagcgacggcagcaccagcagcgacaccaccagcaacagcttcgtgagacagggcagcgccgacagctacaccagcagacccagcgacagcgacgtgagcctggaggaggacagagaggccgtgagaagagaggccgagagacaggcccaggcccagctggagaaggccaagaccaagcccgtggccttcgccgtgagaaccaacgtgagctacagcgccgcccacgaggacgacgtgcccgtgcccggcatggccatcagcttcgaggccaaggacttcctgcacgtgaaggagaagttcaacaacgactggtggatcggcagactggtgaaggagggctgcgagatcggcttcatccccagccccgtgaagctggagaacatgagactgcagcacgagcagagagccaagcagggcaagttctacagcagcaagagcggcggcaacagcagcagcagcctgggcgacatcgtgcccagcagcagaaagagcaccccccccagcagcggcgccaagagcgccgacgagcaggaccagtggaagaccgccggcctgttctggagattcaccaccgagcacacccccccctacgacgtggtgcccagcatgagacccgtggtgctggtgggccccagcctgaagggctacgaggtgaccgacatgatgcagaaggccctgttcgacttcctgaagcacagattcgagggcagaatcagcatcaccagagtgaccgccgacatcagcctggccaagagaagcgtgctgaacaaccccagcaagcacgccatcatcgagagaagcaacaccagaagcagcctggccgaggtgcagagcgagatcgagagaatcttcgagctggccagaaccctgcagctggtggtgctggacgccgacaccatcaaccaccccgcccagctgagcaagaccagcctggcccccatcatcgtgtacgtgaagatcagcagccccaaggtgctgcagagactgatcaagagcagaggcaagagccaggccaagcacctgaacgtgcagatggtggccgccgacaagctggcccagtgcccccccgagctgttcgacgtgatcctggacgagaaccagctggaggacgcctgcgagcacctggccgactacctggaggcctactggaaggccacccacccccccagcagcagcctgcccaaccccctgctgagcagaaccctggccaccagcagcctgcccctgagccccaccctggccagcaacagccagggcagccagggcgaccagagaaccgacagaagcgcccccatcagaagcgccagccaggccgaggaggagcccagcgtggagcccgtgaagaagagccagcacagaagcagcagcagcgccccccaccacaaccacagaagcggcaccagcagaggcctgagcagacaggagaccttcgacagcgagacccaggagagcagagacagcgcctacgtggagcccaaggaggactacagccacgaccacgtggaccactacgccagccacagagaccacaaccacagagacgagacccacggcagcagcgaccacagacacagagagagcagacacagaagcagagacgtggacagagagcaggaccacaacgagtgcaacaagcagagaagcagacacaagagcaaggacagatactgcgagaaggacggcgaggtgatcagcaagaagagaaacgaggccggcgagtggaacagagacgtgtacatcagacagtag

SEQ ID NO: 262556 - protein, 232 aa, Artificial Sequence
  derived and/or modified sequence
MSEEVTYADLQFQNSSEMEKIPEIGKFGEKVHVTLKIEMKKMNKLQNISEELQRNISLQLMSNMNISNKIRNLSTTLQTIATKLCRELYSKEQEHKCKPCPRRWIWHKDSCYFLSDDVQTWQESKMACAAQNASLLKINNKNALEFIKSQSRSYDYWLGLSPEEDSTRGMRVDNIINSSAWVIRNAPDLNNMYCGYINRLYVQYYHCTYKKRMICEKMANPVQLGSTYFREA

SEQ ID NO: 262557 - protein, 87 aa, Artificial Sequence
  derived and/or modified sequence
HKCKPCPRRWIWHKDSCYFLSDDVQTWQESKMACAAQNASLLKINNKNIFSVIKKKTEKFFWLGLSWDSSGRSWFWEDGSVPSPSLY

SEQ ID NO: 262558 - DNA, 699 bp, Artificial Sequence
  derived and/or modified sequence
atgtcagaggaggtgacttatgccgatctgcagttccagaactcgtccgaaatggagaagattcctgaaatcggcaagttcggcgagaaggtgcacgttacgctgaagatcgaaatgaaaaaaatgaacaagctccagaacatctccgaagaactgcagagaaacatttccctgcagctcatgtcgaatatgaatatcagcaataagataaggaatctgtcaacaacactgcagactatcgctactaaactgtgccgagaactgtactctaaagagcaggaacataaatgcaagccgtgccctcgcaggtggatttggcacaaggattcctgctacttcctgtcagacgacgtccagacctggcaggaaagtaagatggcctgcgctgcccagaatgcttccctgctgaaaattaataataaaaacgccctggagtttatcaagtcccagagccgcagttacgattattggctgggactcagccctgaagaggactcaacacgcgggatgcgagttgacaacatcatcaactcaagcgcatgggttatccggaacgctcctgatctgaataacatgtactgcggatatattaaccgtttatacgtgcagtattaccattgcacatacaagaagcgaatgatttgcgagaaaatggccaaccccgtccaactaggctctacctacttccgggaggcatag

SEQ ID NO: 262559 - DNA, 699 bp, Artificial Sequence
  derived and/or modified sequence
atgtctgaggaggtgacctacgccgacctgcagttccagaacagcagcgagatggagaagatccctgagatcggcaagtttggagagaaggtgcacgtgaccctgaagattgagatgaagaagatgaacaagctgcagaacatcagcgaggagctgcagaggaacatcagcctgcagctgatgagcaacatgaacatcagcaacaagatccggaacctgagcaccaccctgcagaccatcgccaccaagctgtgccgggagctgtacagcaaggagcaggagcacaagtgcaagccctgcccccggcgctggatctggcacaaggacagctgctacttcctgagtgatgatgtgcagacctggcaggagagcaagatggcctgtgccgcccagaatgccagcctgctgaagatcaacaacaagaatgccctggagttcatcaagagccagagccgctcctatgactactggctgggcctgagccctgaggaggacagcacccggggcatgagggtggacaacatcatcaacagcagcgcctgggtgatcagaaatgccccagacctgaacaacatgtactgcggctacatcaaccggctgtatgtgcagtactaccactgcacctacaagaagaggatgatctgtgagaagatggccaaccctgtgcagctgggcagcacctacttccgggaggcctag

SEQ ID NO: 262560 - DNA, 699 bp, Artificial Sequence
  derived and/or modified sequence
atgagcgaggaggtgacctacgccgacctgcagttccagaacagctctgagatggaaaagattccagaaattgggaagttcggagaaaaagtacacgttaccctgaagatcgagatgaaaaaaatgaacaaactgcagaatatttctgaagagctacagcggaatatctccctgcagctcatgtctaacatgaatatctctaacaagattcgaaacctgtctactactctacagacaatagcgacaaagctttgtcgagagctgtactcaaaagagcaggaacataaatgtaaaccatgccccaggcggtggatctggcataaggattcgtgctactttctgagtgacgacgtgcagacttggcaggagagtaaaatggcctgcgccgcccagaatgcttctctccttaaaattaacaataaaaacgcattggaattcataaaatcccaatcacggtcctacgactattggcttggactgtcgccggaagaggatagcactaggggaatgagggtagacaacataatcaactcctcagcctgggtcattaggaacgccccagatctcaacaacatgtactgtggatacatcaatcggttgtacgtgcagtactatcactgcacctacaagaaacgcatgatttgtgaaaaaatggctaacccggttcagctaggcagtacctatttccgcgaggcttag

SEQ ID NO: 262561 - DNA, 699 bp, Artificial Sequence
  derived and/or modified sequence
atgtctgaagaggtcacatacgccgatctgcagttccagaactcgagcgagatggagaaaattcccgagatcggcaagttcggggagaaagtgcacgtgactctcaagatagagatgaagaagatgaataagctgcaaaatatctcagaggagctgcaaagaaatatttctctacagctaatgagtaacatgaatatctctaataaaattagaaatctgtccacaactctccagaccatagccaccaaactttgccgcgagttatatagtaaagaacaggagcacaaatgcaaaccatgccctcgccgttggatctggcataaggattcatgctacttcctgagtgatgatgttcagacgtggcaggaatccaaaatggcttgcgcagcccagaatgcttcccttctcaagattaacaacaaaaacgctctcgagtttatcaagagtcaatcgcgttcatatgattattggctcggcctgtcacccgaagaagactctacacgaggcatgcgggtcgataacatcatcaacagcagtgcgtgggttataaggaacgcccctgaccttaataacatgtactgtggctacatcaatcggctctacgtgcagtattaccattgcacatacaaaaagcgcatgatctgtgaaaagatggccaacccagttcagcttggctctacatattttcgtgaggcttag

SEQ ID NO: 262562 - DNA, 699 bp, Artificial Sequence
  derived and/or modified sequence
atgtctgaagaagttacttatgcagatcttcaattccagaactccagtgagatggaaaaaatcccagaaattggcaaatttggggaaaaagttcacgtaactttgaagatagaaatgaaaaaaatgaacaaactacaaaacatcagtgaagagctccagagaaatatttctctacaactgatgagtaacatgaatatctccaacaagatcaggaacctctccaccacactgcaaacaatagccaccaaattatgtcgtgagctatatagcaaagaacaagagcacaaatgtaagccttgtccaaggagatggatttggcataaggacagctgttatttcctaagtgatgatgtccaaacatggcaggagagtaaaatggcctgtgctgctcagaatgccagcctgttgaagataaacaacaaaaatgcattggaatttataaaatcccagagtagatcatatgactattggctgggattatctcctgaagaagattccactcgtggtatgagagtggataatataatcaactcctctgcctgggttataagaaacgcacctgacttaaataacatgtattgtggatatataaatagactatatgttcaatattatcactgcacttataaaaaaagaatgatatgtgagaagatggccaatccagtgcagcttggttctacatattttagggaggcatga

SEQ ID NO: 262563 - DNA, 699 bp, Artificial Sequence
  derived and/or modified sequence
atgagcgaggaggtgacctacgccgacctgcagttccagaacagcagcgagatggagaagatccccgagatcggcaagttcggcgagaaggtgcacgtgaccctgaagatcgagatgaagaagatgaacaagctgcagaacatcagcgaggagctgcagagaaacatcagcctgcagctgatgagcaacatgaacatcagcaacaagatcagaaacctgagcaccaccctgcagaccatcgccaccaagctgtgcagagagctgtacagcaaggagcaggagcacaagtgcaagccctgccccagaagatggatctggcacaaggacagctgctacttcctgagcgacgacgtgcagacctggcaggagagcaagatggcctgcgccgcccagaacgccagcctgctgaagatcaacaacaagaacgccctggagttcatcaagagccagagcagaagctacgactactggctgggcctgagccccgaggaggacagcaccagaggcatgagagtggacaacatcatcaacagcagcgcctgggtgatcagaaacgcccccgacctgaacaacatgtactgcggctacatcaacagactgtacgtgcagtactaccactgcacctacaagaagagaatgatctgcgagaagatggccaaccccgtgcagctgggcagcacctacttcagagaggcctag

SEQ ID NO: 262564 - protein, 1043 aa, Artificial Sequence
  derived and/or modified sequence
MPVRGDRGFPPRRELSGWLRAPGMEELIWEQYTVTLQKDSKRGFGIAVSGGRDNPHFENGETSIVISDVLPGGPADGLLQENDRVVMVNGTPMEDVLHSFAVQQLRKSGKVAAIVVKRPRKVQVAALQASPPLDQDDRAFEVMDEFDGRSFRSGYSERSRLNSHGGRSRSWEDSPERGRPHERARSRERDLSRDRSRGRSLERGLDQDHARTRDRSRGRSLERGLDHDFGPSRDRDRDRSRGRSIDQDYERAYHRAYDPDYERAYSPEYRRGARHDARSRGPRSRSREHPHSRSPSPEPRGRPGPIGVLLMKSRANEEYGLRLGSQIFVKEMTRTGLATKDGNLHEGDIILKINGTVTENMSLTDARKLIEKSRGKLQLVVLRDSQQTLINIPSLNDSDSEIEDISEIESNRSFSPEERRHQYSDYDYHSSSEKLKERPSSREDTPSRLSRMGATPTPFKSTGDIAGTVVPETNKEPRYQEDPPAPQPKAAPRTFLRPSPEDEAIYGPNTKMVRFKKGDSVGLRLAGGNDVGIFVAGIQEGTSAEQEGLQEGDQILKVNTQDFRGLVREDAVLYLLEIPKGEMVTILAQSRADVYRDILACGRGDSFFIRSHFECEKETPQSLAFTRGEVFRVVDTLYDGKLGNWLAVRIGNELEKGLIPNKSRAEQMASVQNAQRDNAGDRADFWRMRGQRSGVKKNLRKSREDLTAVVSVSTKFPAYERVLLREAGFKRPVVLFGPIADIAMEKLANELPDWFQTAKTEPKDAGSEKSTGVVRLNTVRQIIEQDKHALLDVTPKAVDLLNYTQWFPIVIFFNPDSRQGVKTMRQRLNPTSNKSSRKLFDQANKLKKTCAHLFTATINLNSANDSWFGSLKDTIQHQQGEAVWVSEGKMEGMDDDPEDRMSYLTAMGADYLSCDSRLISDFEDTDGEGGAYTDNELDEPAEEPLVSSITRSSEPVQHEEIEIAQKHPDIYAVPIKTHKPDPGTPQHTSSRPPEPQKAPSRPYQDTRGSYGSDAEEEEYRQQLSEHSKRGYYGQSARYRDTEL

SEQ ID NO: 262565 - DNA, 3132 bp, Artificial Sequence
  derived and/or modified sequence
atgcccgtgagaggcgacagaggcttcccccccagaagagagctgagcggctggctgagagcccccggcatggaggagctgatctgggagcagtacaccgtgaccctgcagaaggacagcaagagaggcttcggcatcgccgtgagcggcggcagagacaacccccacttcgagaacggcgagaccagcatcgtgatcagcgacgtgctgcccggcggccccgccgacggcctgctgcaggagaacgacagagtggtgatggtgaacggcacccccatggaggacgtgctgcacagcttcgccgtgcagcagctgagaaagagcggcaaggtggccgccatcgtggtgaagagacccagaaaggtgcaggtggccgccctgcaggccagcccccccctggaccaggacgacagagccttcgaggtgatggacgagttcgacggcagaagcttcagaagcggctacagcgagagaagcagactgaacagccacggcggcagaagcagaagctgggaggacagccccgagagaggcagaccccacgagagagccagaagcagagagagagacctgagcagagacagaagcagaggcagaagcctggagagaggcctggaccaggaccacgccagaaccagagacagaagcagaggcagaagcctggagagaggcctggaccacgacttcggccccagcagagacagagacagagacagaagcagaggcagaagcatcgaccaggactacgagagagcctaccacagagcctacgaccccgactacgagagagcctacagccccgagtacagaagaggcgccagacacgacgccagaagcagaggccccagaagcagaagcagagagcacccccacagcagaagccccagccccgagcccagaggcagacccggccccatcggcgtgctgctgatgaagagcagagccaacgaggagtacggcctgagactgggcagccagatcttcgtgaaggagatgaccagaaccggcctggccaccaaggacggcaacctgcacgagggcgacatcatcctgaagatcaacggcaccgtgaccgagaacatgagcctgaccgacgccagaaagctgatcgagaagagcagaggcaagctgcagctggtggtgctgagagacagccagcagaccctgatcaacatccccagcctgaacgacagcgacagcgagatcgaggacatcagcgagatcgagagcaacagaagcttcagccccgaggagagaagacaccagtacagcgactacgactaccacagcagcagcgagaagctgaaggagagacccagcagcagagaggacacccccagcagactgagcagaatgggcgccacccccacccccttcaagagcaccggcgacatcgccggcaccgtggtgcccgagaccaacaaggagcccagataccaggaggacccccccgccccccagcccaaggccgcccccagaaccttcctgagacccagccccgaggacgaggccatctacggccccaacaccaagatggtgagattcaagaagggcgacagcgtgggcctgagactggccggcggcaacgacgtgggcatcttcgtggccggcatccaggagggcaccagcgccgagcaggagggcctgcaggagggcgaccagatcctgaaggtgaacacccaggacttcagaggcctggtgagagaggacgccgtgctgtacctgctggagatccccaagggcgagatggtgaccatcctggcccagagcagagccgacgtgtacagagacatcctggcctgcggcagaggcgacagcttcttcatcagaagccacttcgagtgcgagaaggagaccccccagagcctggccttcaccagaggcgaggtgttcagagtggtggacaccctgtacgacggcaagctgggcaactggctggccgtgagaatcggcaacgagctggagaagggcctgatccccaacaagagcagagccgagcagatggccagcgtgcagaacgcccagagagacaacgccggcgacagagccgacttctggagaatgagaggccagagaagcggcgtgaagaagaacctgagaaagagcagagaggacctgaccgccgtggtgagcgtgagcaccaagttccccgcctacgagagagtgctgctgagagaggccggcttcaagagacccgtggtgctgttcggccccatcgccgacatcgccatggagaagctggccaacgagctgcccgactggttccagaccgccaagaccgagcccaaggacgccggcagcgagaagagcaccggcgtggtgagactgaacaccgtgagacagatcatcgagcaggacaagcacgccctgctggacgtgacccccaaggccgtggacctgctgaactacacccagtggttccccatcgtgatcttcttcaaccccgacagcagacagggcgtgaagaccatgagacagagactgaaccccaccagcaacaagagcagcagaaagctgttcgaccaggccaacaagctgaagaagacctgcgcccacctgttcaccgccaccatcaacctgaacagcgccaacgacagctggttcggcagcctgaaggacaccatccagcaccagcagggcgaggccgtgtgggtgagcgagggcaagatggagggcatggacgacgaccccgaggacagaatgagctacctgaccgccatgggcgccgactacctgagctgcgacagcagactgatcagcgacttcgaggacaccgacggcgagggcggcgcctacaccgacaacgagctggacgagcccgccgaggagcccctggtgagcagcatcaccagaagcagcgagcccgtgcagcacgaggagatcgagatcgcccagaagcaccccgacatctacgccgtgcccatcaagacccacaagcccgaccccggcaccccccagcacaccagcagcagaccccccgagccccagaaggcccccagcagaccctaccaggacaccagaggcagctacggcagcgacgccgaggaggaggagtacagacagcagctgagcgagcacagcaagagaggctactacggccagagcgccagatacagagacaccgagctgtag

SEQ ID NO: 262566 - DNA, 3063 bp, Artificial Sequence
  derived and/or modified sequence
atggaggagctgatctgggagcagtacaccgtgaccctgcagaaggacagcaagagaggcttcggcatcgccgtgagcggcggcagagacaacccccacttcgagaacggcgagaccagcatcgtgatcagcgacgtgctgcccggcggccccgccgacggcctgctgcaggagaacgacagagtggtgatggtgaacggcacccccatggaggacgtgctgcacagcttcgccgtgcagcagctgagaaagagcggcaaggtggccgccatcgtggtgaagagacccagaaaggtgcaggtggccgccctgcaggccagcccccccctggaccaggacgacagagccttcgaggtgatggacgagttcgacggcagaagcttcagaagcggctacagcgagagaagcagactgaacagccacggcggcagaagcagaagctgggaggacagccccgagagaggcagaccccacgagagagccagaagcagagagagagacctgagcagagacagaagcagaggcagaagcctggagagaggcctggaccaggaccacgccagaaccagagacagaagcagaggcagaagcctggagagaggcctggaccacgacttcggccccagcagagacagagacagagacagaagcagaggcagaagcatcgaccaggactacgagagagcctaccacagagcctacgaccccgactacgagagagcctacagccccgagtacagaagaggcgccagacacgacgccagaagcagaggccccagaagcagaagcagagagcacccccacagcagaagccccagccccgagcccagaggcagacccggccccatcggcgtgctgctgatgaagagcagagccaacgaggagtacggcctgagactgggcagccagatcttcgtgaaggagatgaccagaaccggcctggccaccaaggacggcaacctgcacgagggcgacatcatcctgaagatcaacggcaccgtgaccgagaacatgagcctgaccgacgccagaaagctgatcgagaagagcagaggcaagctgcagctggtggtgctgagagacagccagcagaccctgatcaacatccccagcctgaacgacagcgacagcgagatcgaggacatcagcgagatcgagagcaacagaagcttcagccccgaggagagaagacaccagtacagcgactacgactaccacagcagcagcgagaagctgaaggagagacccagcagcagagaggacacccccagcagactgagcagaatgggcgccacccccacccccttcaagagcaccggcgacatcgccggcaccgtggtgcccgagaccaacaaggagcccagataccaggaggacccccccgccccccagcccaaggccgcccccagaaccttcctgagacccagccccgaggacgaggccatctacggccccaacaccaagatggtgagattcaagaagggcgacagcgtgggcctgagactggccggcggcaacgacgtgggcatcttcgtggccggcatccaggagggcaccagcgccgagcaggagggcctgcaggagggcgaccagatcctgaaggtgaacacccaggacttcagaggcctggtgagagaggacgccgtgctgtacctgctggagatccccaagggcgagatggtgaccatcctggcccagagcagagccgacgtgtacagagacatcctggcctgcggcagaggcgacagcttcttcatcagaagccacttcgagtgcgagaaggagaccccccagagcctggccttcaccagaggcgaggtgttcagagtggtggacaccctgtacgacggcaagctgggcaactggctggccgtgagaatcggcaacgagctggagaagggcctgatccccaacaagagcagagccgagcagatggccagcgtgcagaacgcccagagagacaacgccggcgacagagccgacttctggagaatgagaggccagagaagcggcgtgaagaagaacctgagaaagagcagagaggacctgaccgccgtggtgagcgtgagcaccaagttccccgcctacgagagagtgctgctgagagaggccggcttcaagagacccgtggtgctgttcggccccatcgccgacatcgccatggagaagctggccaacgagctgcccgactggttccagaccgccaagaccgagcccaaggacgccggcagcgagaagagcaccggcgtggtgagactgaacaccgtgagacagatcatcgagcaggacaagcacgccctgctggacgtgacccccaaggccgtggacctgctgaactacacccagtggttccccatcgtgatcttcttcaaccccgacagcagacagggcgtgaagaccatgagacagagactgaaccccaccagcaacaagagcagcagaaagctgttcgaccaggccaacaagctgaagaagacctgcgcccacctgttcaccgccaccatcaacctgaacagcgccaacgacagctggttcggcagcctgaaggacaccatccagcaccagcagggcgaggccgtgtgggtgagcgagggcaagatggagggcatggacgacgaccccgaggacagaatgagctacctgaccgccatgggcgccgactacctgagctgcgacagcagactgatcagcgacttcgaggacaccgacggcgagggcggcgcctacaccgacaacgagctggacgagcccgccgaggagcccctggtgagcagcatcaccagaagcagcgagcccgtgcagcacgaggagatcgagatcgcccagaagcaccccgacatctacgccgtgcccatcaagacccacaagcccgaccccggcaccccccagcacaccagcagcagaccccccgagccccagaaggcccccagcagaccctaccaggacaccagaggcagctacggcagcgacgccgaggaggaggagtacagacagcagctgagcgagcacagcaagagaggctactacggccagagcgccagatacagagacaccgagctgtag

SEQ ID NO: 262567 - DNA, 3132 bp, Artificial Sequence
  derived and/or modified sequence
atgcccgttcgaggcgaccggggatttcccccaagaagggaactgtcagggtggttaagagcccccgggatggaggagttaatctgggagcagtacacggtcactctgcaaaaagactctaaacgaggattcggtatcgccgtctctggcggcagagacaacccacacttcgagaatggagaaacatccattgtgatttctgatgtgctgcctggcggtcccgctgatgggctgctgcaagagaacgaccgagtagtgatggttaatgggacgcccatggaggacgtcctgcactcatttgcagtgcagcagttgagaaagtcgggcaaagtggcagcgattgttgttaagaggcctaggaaggtgcaggttgcggccctgcaagcttcgccccccctggaccaggacgaccgagcctttgaagtcatggatgagttcgatgggaggagttttaggagcgggtacagcgagagatctcggctgaattctcacggggggagaagcaggtcgtgggaagatagcccggagcggggcaggcctcatgagcgcgctcggtcacgggagcgagatctgagccgcgacaggagcaggggaaggagtcttgaacgtggcctggatcaggatcacgctcggacacgagatcggtccaggggaagaagcttagagagagggctggatcatgacttcggaccgtcgcgcgatagagatagagaccgctctaggggcaggtctattgatcaggactatgaacgagcttatcacagagcatatgacccagattacgaaagagcatatagcccagaatatcgtcggggggcccgccacgatgcacggagtcgagggccacggagcaggtcacgggagcatccccatagccgtagcccatcccccgagccacgtggtcgccctggaccaattggggtccttctgatgaagtctcgcgctaacgaagaatacggtctccgattggggagtcagatctttgtgaaggagatgacgcgaaccgggctcgcgactaaggatggcaatttacatgagggcgatataatcctgaagattaatggaacagttaccgagaatatgtctctaaccgacgctagaaaattaatcgagaagtcccgtggaaaattgcaactggtggtcctcagggactcccagcagaccctgataaacatcccaagcctgaacgactctgatagcgagatcgaagacataagcgaaattgaaagcaaccggagtttctcacccgaggaaaggcgtcaccagtattcagactatgactaccattccagctcggagaaattgaaggagaggccttccagccgggaagacactccgtctcgtctttccagaatgggcgccacacccactcctttcaaatccacgggggacattgcaggcactgtggtaccggagactaataaggaaccacgatatcaggaagacccccctgctccccagcctaaggccgctccccgaacttttctgagaccaagcccagaagacgaggcaatctacggtcctaacacaaaaatggtaagatttaaaaaaggtgatagcgtcggcctgagactagcagggggcaacgacgttggcattttcgtggctgggatccaagaaggtacatctgcagagcaagaagggttacaagagggggatcaaattctgaaagtcaatacccaagatttccgagggctcgtgcgtgaggacgccgtgctgtatttgttggaaattcctaagggagagatggtaaccatcctggcacaaagccgcgcagatgtctatagggatatattagcttgcggacgtggtgactcattttttattaggtcccatttcgagtgcgaaaaggagactccccaatcgctggccttcaccaggggggaggtgtttagagtggtggatacgctgtatgatggtaaactgggcaactggcttgctgttcgcattggaaacgagctggagaaggggttgatccccaacaagtcgcgagctgagcagatggcaagcgtgcaaaatgctcagagagacaatgctggcgacagggcagatttttggagaatgcgcgggcagcgaagcggagtcaaaaagaatctgcgcaaaagccgggaagatctcactgcagtggtcagtgttagtaccaaatttccagcgtatgaaagagtgctcctccgtgaggccggatttaagaggccagtagttctgttcggtcccatcgctgacatagctatggagaaattagctaacgagctgccagactggttccagactgcgaagaccgaacccaaagatgccggcagcgaaaagtcaactggagttgtccgcctaaatactgtgcgacaaattatcgagcaggataaacacgctctcctggatgtgacacccaaggcagtagacctgctgaattacacgcagtggttcccgatcgttattttttttaatccagattccaggcagggcgtcaagactatgaggcagagacttaacccaacaagtaataagtcctctcgcaaattgtttgaccaagctaacaagctgaaaaagacctgtgcccacttattcaccgccacaattaatctcaacagcgctaacgatagctggtttggcagcctgaaagacaccatccagcaccagcagggcgaggccgtgtgggtgagtgagggaaagatggaagggatggatgacgatccagaggaccgcatgtcctacctgacggcaatgggcgctgattatctttcttgcgactctagactcatcagcgatttcgaggacaccgatggagaagggggcgcttacacagataacgaattggatgagccagccgaagaaccccttgtgagcagtatcactcgctcttcagaaccggtccagcacgaggaaatcgagatcgcccagaaacaccctgatatctatgcagtgcctataaagacacacaagcctgatccagggacgcctcagcacacttcttctagaccacctgaacctcagaaagctccatcgcggccttaccaggacacaaggggctcatatgggtctgacgcggaggaagaagagtatagacagcagttaagcgagcatagcaagaggggctattacggtcagtctgcccgctaccgggacaccgaactttag

SEQ ID NO: 262568 - DNA, 3063 bp, Artificial Sequence
  derived and/or modified sequence
atggaagagcttatctgggagcagtacacggtaacactacagaaagacagtaagcgcggttttggcattgctgtgtcaggggggagagataatccccatttcgaaaatggcgagacctccatagtaatctctgatgtgttgcctggaggccccgccgatggactgctgcaggaaaatgacagggtggtaatggtaaatggcacacctatggaagacgtcctacacagtttcgccgtgcagcagctccggaagtctggaaaagtggctgcgattgtcgtgaaaaggccccggaaagttcaagtagccgcactccaagcctctcctccacttgatcaggatgatagagcctttgaggtgatggacgagttcgacggcagaagctttcgaagcggttatagcgagcgatctagacttaactcccacggcggccgtagccgcagctgggaggattcacctgagaggggcaggccacatgagagagctcgtagcagagaacgggatctgtctagggatcgctccagaggtcggtcactcgaacggggactcgaccaagaccatgctcgaacccgcgataggtctcgtggcaggtcactggaaaggggactcgaccacgacttcggtcccagcagagatcgagacagagacagaagcaggggaagaagtattgatcaggattatgaacgggcctaccacagggcatacgaccctgattatgagagagcatacagtccagaataccgtcgaggagccaggcacgatgctagatctcgcgggcccagatcccgtagtagggaacatccccactctagaagcccttccccagaaccaagagggcggcctggacctattggagtactgctgatgaagtctagggcaaacgaggagtacgggctgcgactgggatcacagatctttgtgaaagagatgaccagaacaggccttgcaacaaaggacgggaatctccatgagggtgacatcattctcaaaataaacgggaccgtgactgaaaatatgtcacttacagacgctcgaaagctcatagaaaagagtcggggcaagctgcagctggtcgtgctgcgtgattctcagcaaaccttgatcaacattccatccctgaatgattccgattcggaaatcgaggatatatctgagattgaatccaacaggtctttctcacccgaggagcgccggcaccagtacagcgattacgactaccactcatcttccgagaagctgaaagagcggccttcttctcgagaggatactccttcccggctctccagaatgggggctacccccacacctttcaaatcaacgggggacatcgctggcaccgtggtccctgagaccaataaggagcccagataccaggaggaccctccagccccccagcctaaagcagcaccacgcaccttccttcggccttcgcctgaggacgaagcaatatacggacccaataccaaaatggtgcgctttaaaaaaggcgattccgtggggctgaggctcgccggcggaaacgacgtcggcatctttgtggccgggatccaggagggaacatctgccgagcaggagggcctgcaggaaggggaccagatcctaaaggtcaacacgcaagatttcaggggactcgtgagagaggacgcagtactgtacttactggaaatcccaaagggagagatggtcaccattctggcgcagtccagggcggacgtgtaccgcgatatactggcctgtgggagaggagatagcttctttattcgaagccactttgagtgcgaaaaggaaacaccccagagtttagcctttacacgcggagaggtgtttcgggtagtggacacattatacgacggcaagttgggaaactggctggccgtaaggatcggcaatgagctggagaaaggcctcatacccaacaaatctagagccgaacaaatggcctctgtacagaatgcccaacgtgacaatgcgggcgatcgagctgatttttggaggatgagaggccagcgctcaggagtgaagaagaacctccgaaagagtcgggaagatctcaccgctgtggtgtccgtgtccactaagtttcctgcctatgaacgtgttctgctgagggaggccgggtttaagcgacctgtggttttattcggccctattgcggatatcgctatggaaaagctggccaacgaactgccagactggtttcagactgctaagacagagcccaaagacgccggatcagagaaatccaccggcgtggtgcgactgaataccgtgagacaaatcatcgagcaggacaagcatgcactgttggacgtgaccccaaaggctgtcgatctgctgaattatacccaatggtttcccatagttatcttctttaatcccgacagcaggcaaggagtaaagaccatgcgtcagaggcttaacccgaccagtaataaatcctctcggaaacttttcgaccaggcaaacaagctcaagaagacttgtgcccatttattcacagcaacgatcaatctgaatagcgccaatgattcttggttcggttctcttaaggacacaattcagcatcaacaaggcgaagcagtgtgggtttctgaaggcaaaatggagggcatggacgacgatccagaagatcggatgtcctacctgacagccatgggcgctgactacctgtcctgtgattcccgcttgatttccgactttgaggacactgatggcgagggcggggcctatactgacaacgagttagatgagcccgcagaggagcccctcgtctctagtatcacaagatctagtgagcccgtacagcatgaggagatcgaaattgcgcaaaagcacccagatatttacgccgtaccgattaaaacccacaaacccgatccaggaaccccccagcacacaagttcccggcctccagagcctcagaaggccccaagtcgcccgtaccaggacacccgaggatcctacggatcagacgcagaggaggaggagtatcggcagcagttgtccgagcatagcaagagaggctactacggtcaatctgcaaggtaccgagatactgagctctag

SEQ ID NO: 262569 - DNA, 3132 bp, Artificial Sequence
  derived and/or modified sequence
atgcctgtgcggggggaccggggcttccccccccggcgggagctgagcggctggctgcgggcccctggcatggaggagctgatctgggagcagtacacagtgaccctgcagaaggacagcaagaggggcttcggcattgctgtgtctgggggccgggacaacccccactttgaaaatggagagaccagcatcgtcatcagtgatgtgctgcccggcggccctgcagatggcctgctgcaggagaatgacagagtggtgatggtgaatggcacccccatggaggatgtgctgcacagctttgctgtgcagcagctgaggaagagcggcaaggtggccgccatcgtggtgaagaggcccaggaaggtgcaggtggccgccctgcaggccagcccccccctggaccaggatgaccgggcctttgaggtgatggatgaatttgatggccgctccttccgcagcggctacagcgagaggagccggctgaacagccacggcggccgcagccgctcctgggaggacagccctgagcggggccggccccatgagcgggcccggagccgggagcgggacctgagccgggacaggagccggggccgcagcctggagcggggcctggaccaggaccacgcccggacccgggacaggagccggggccgcagcctggagcggggcctggaccatgactttggccccagccgggaccgggaccgggacaggagccggggccgcagcattgaccaggactatgagcgggcctaccaccgggcctatgaccctgactatgagcgggcctacagccctgagtaccgccgcggggcccggcatgatgcccggagccggggccccaggagccgcagccgggagcacccccacagccgcagccccagccctgagccccggggccggcccggccccatcggcgtgctgctgatgaagagccgggccaatgaggagtatggcctgcggctgggcagccagatctttgtgaaggagatgaccaggacaggcctggccaccaaggatggcaacctgcatgaaggagacatcatcctgaagatcaatggcaccgtgacagagaacatgagcctgacagatgccaggaagctgattgagaagagccggggcaagctgcagctggtggtgctgcgggacagccagcagaccctcatcaacatccccagcctgaatgacagcgacagcgagattgaggacatcagcgagattgagagcaacagaagcttcagccctgaggagaggaggcaccagtacagcgactatgactaccacagcagcagcgagaagctgaaggagcggcccagcagccgggaggacacccccagccggctgagcaggatgggcgccacccccacccccttcaagagcactggagacattgctggcaccgtggtgcctgagaccaacaaggagccccgctaccaggaggaccccccagccccccagcccaaggccgcccccaggaccttcctgcggcccagcccagaagatgaggccatctacggccccaacaccaagatggtgcgcttcaagaagggggacagcgtgggcctgcggctggccggcggcaatgatgtgggcatctttgtggccggcatccaggagggcaccagcgctgagcaggagggcctgcaggagggggaccagatcctgaaggtgaacacccaggacttccggggcctggtgagagaagatgctgtgctgtacctgctggagatccccaagggggagatggtgaccatcctggcccagagcagagcagatgtgtacagagacatcctggcctgtggccgcggggacagcttcttcatccgcagccactttgaatgtgagaaggagaccccccagagcctggccttcaccagaggagaggtgttccgggtggtggacaccctgtatgatggcaagctgggcaactggctggccgtgagaattggaaatgagctggagaagggcctcatccccaacaagagcagagctgagcagatggcctctgtgcagaatgcccagagggacaatgctggggacagagctgacttctggaggatgaggggccagaggtctggagtgaagaagaacctgaggaagagccgggaggacctgacagctgtggtgtctgtgtccaccaagtttcctgcctatgagcgggtgctgctgcgggaggccggcttcaagaggcctgtggtgctgtttggccccatcgctgacatcgccatggagaagctggccaatgagctgcctgactggttccagacagccaagacagagcccaaggatgctggcagcgagaagagcactggagtggtgcggctgaacacagtgcggcagatcatcgagcaggacaagcacgccctgctggatgtgacccccaaggctgtggacctgctgaactacacccagtggttccccatcgtcatcttcttcaacccagacagccggcagggcgtgaagaccatgaggcagaggctgaaccccaccagcaacaagagcagcaggaagctgtttgaccaggccaacaagctgaagaagacctgtgcccacctgttcaccgccaccatcaacctgaacagcgccaatgacagctggtttggcagcctgaaggacaccatccagcaccagcagggcgaggccgtgtgggtgtctgagggcaagatggagggcatggatgatgatcctgaggacaggatgagctacctgacagccatgggcgctgactacctgagctgtgacagccgcctcatcagtgactttgaggacacagatggagagggcggggcctacacagacaatgagctggatgagcctgctgaggagcccctggtgagcagcatcaccaggagcagcgagcctgtgcagcacgaggagattgaaattgcccagaagcacccagacatctatgctgtgcccatcaagacccacaagccagaccccggcaccccccagcacaccagcagccggcccccagagccccagaaggcccccagccggccctaccaggacacccggggcagctatggcagtgatgctgaggaggaggagtaccggcagcagctgtctgagcacagcaagaggggctactacggccagagcgcccgctacagagacacagagctgtag

SEQ ID NO: 262570 - DNA, 3063 bp, Artificial Sequence
  derived and/or modified sequence
atggaggagctgatctgggagcagtacacagtgaccctgcagaaggacagcaagaggggctttggaattgctgtgtctgggggccgggacaacccccactttgaaaatggagagaccagcatcgtcatcagtgatgtgctgcccggcggccctgcagatggcctgctgcaggagaatgacagagtggtgatggtgaatggcacccccatggaggatgtgctgcacagctttgctgtgcagcagctgaggaagagcggcaaggtggccgccatcgtggtgaagaggcccaggaaggtgcaggtggccgccctgcaggccagcccccccctggaccaggatgaccgggcctttgaggtgatggatgaatttgatggccgctccttccgcagcggctacagcgagaggagccggctgaacagccatggaggccgcagccgctcctgggaggacagccctgagcggggccggccccatgagcgggcccggagccgggagcgggacctgagccgggacaggagccggggccgcagcctggagcggggcctggaccaggaccacgcccggacccgggacaggagccggggccgcagcctggagcggggcctggaccatgactttggccccagccgggaccgggaccgggacaggagccggggccgcagcattgaccaggactatgaaagagcctaccaccgggcctatgaccctgactatgaaagagcctacagccctgagtacagaagaggagcccggcatgatgcccggagccggggccccaggagccgcagccgggagcacccccacagccgcagccccagccctgagccccggggccggcccggccccatcggcgtgctgctgatgaagagccgggccaatgaggagtatggcctgcggctgggcagccagatctttgtgaaggagatgaccaggacaggcctggccaccaaggatggcaacctgcacgagggggacatcatcctgaagatcaatggaacagtgacagagaacatgagcctgacagatgccaggaagctgattgagaagagccggggcaagctgcagctggtggtgctgcgggacagccagcagaccctcatcaacatccccagcctgaatgacagcgacagcgagattgaggacatcagcgagattgagagcaacagaagcttcagccctgaggagcggcggcaccagtacagcgactatgactaccacagcagcagcgagaagctgaaggagcggcccagcagccgggaggacacccccagccggctgagcaggatgggcgccacccccacccccttcaagagcactggagacattgctggcaccgtggtgcctgagaccaacaaggagccccgctaccaggaggaccccccagccccccagcccaaggccgcccccaggaccttcctgcggcccagcccagaagatgaggccatctacggccccaacaccaagatggtgcgcttcaagaagggggacagcgtgggcctgcggctggccggcggcaatgatgtgggcatctttgtggccggcatccaggagggcaccagcgctgagcaggagggcctgcaggagggggaccagatcctgaaggtgaacacccaggacttccggggcctggtgcgggaggatgctgtgctgtacctgctggagatccccaagggggagatggtgaccatcctggcccagagcagagcagatgtgtacagagacatcctggcctgtggccgcggggacagcttcttcatccgcagccactttgaatgtgagaaggagaccccccagagcctggccttcaccagaggagaggtgttccgggtggtggacaccctgtatgatggcaagctgggcaactggctggccgtgagaattggaaatgagctggagaagggcctcatccccaacaagagcagagctgagcagatggcctctgtgcagaatgcccagagggacaatgctggggacagagctgacttctggaggatgaggggccagaggtctggagtgaagaagaacctgaggaagagccgggaggacctgacagctgtggtgtctgtgtccaccaagtttcctgcctatgaaagagtgctgctgcgggaggccggcttcaagaggcctgtggtgctgtttggccccatcgctgacatcgccatggagaagctggccaatgagctgcctgactggttccagacagccaagacagagcccaaggatgctggcagcgagaagagcactggagtggtgcggctgaacacagtgcggcagatcatcgagcaggacaagcacgccctgctggatgtgacccccaaggctgtggacctgctgaactacacccagtggttccccatcgtcatcttcttcaacccagacagccggcagggcgtgaagaccatgaggcagaggctgaaccccaccagcaacaagagcagcaggaagctgtttgaccaggccaacaagctgaagaagacctgtgcccacctgttcaccgccaccatcaacctgaacagcgccaatgacagctggtttggcagcctgaaggacaccatccagcaccagcagggcgaggccgtgtgggtgtctgagggcaagatggagggcatggatgatgatcctgaggacaggatgagctacctgacagccatgggcgctgactacctgagctgtgacagccgcctcatcagtgactttgaggacacagatggagagggcggggcctacacagacaatgagctggatgagcctgctgaggagcccctggtgagcagcatcaccaggagcagcgagcctgtgcagcacgaggagattgagatcgcccagaagcacccagacatctatgctgtgcccatcaagacccacaagccagaccccggcaccccccagcacaccagcagcaggcctcctgagccccagaaggcccccagccggccctaccaggacacccggggcagctatggcagtgatgctgaggaggaggagtaccggcagcagctgtctgagcacagcaagaggggctactacggccagagcgcccgctacagagacacagagctgtag

SEQ ID NO: 262571 - DNA, 3132 bp, Artificial Sequence
  derived and/or modified sequence
atgcccgtgcggggcgaccggggcttccccccccggcgggagctgtcggggtggctccgcgctcccggaatggaggagctgatatgggagcagtatactgtcacacttcagaaagacagcaagagaggttttgggattgccgtgagcggaggtagggacaatcctcactttgaaaacggcgaaaccagtatcgtgatctctgatgtgctccccggtggacctgcggacgggctcctgcaggagaatgaccgcgtggtgatggtgaatgggacgcccatggaagatgtactacattcctttgccgtccagcagctcagaaaatccggcaaggtagcagctattgtcgttaagagacctcgcaaggtgcaggtggccgctctgcaggccagccccccactagaccaggatgatcgggcatttgaggtcatggatgagtttgacggacggtcttttagaagcgggtacagtgaaagaagtcgtctgaactcacatgggggtagatccaggtcctgggaggactcacctgagcgcggacggcctcatgagagagctcgctcccgcgagcgcgacctcagtagggatcgatctcggggtcgatctctggagcgtggccttgatcaggaccatgctcgcacgcgcgaccggagtcgagggagaagccttgaacgcggcctggaccacgacttcggcccatctcgcgaccgggaccgcgataggtcccgaggaagatccattgatcaggactacgaaagagcctatcatcgcgcatatgacccggattacgagcgagcgtatagccctgagtacaggaggggagctagacacgacgccagatctcggggaccgcgcagtaggtcaagggaacacccacacagtcgctcgccctctcctgagccgcggggaaggccaggcccgataggcgtgctcttgatgaaatcccgagccaatgaagaatatggtctgagactagggtcccagatcttcgtgaaggagatgacacggactggattagcaacaaaagatggcaacctgcatgaaggagatattatcctgaagataaatggcaccgttaccgagaatatgtccctcacggatgcaaggaagctcattgagaaaagccgcgggaaactgcagctagtggtgctgagagatagccagcagaccctgattaacatcccatccctgaacgactctgattctgaaatcgaggacattagcgaaatagaatcaaatagaagcttctcccccgaagagcggaggcatcaatattccgattacgactaccactcaagttccgaaaaacttaaggagcggccctccagccgcgaggacacaccttccagattgagtagaatgggagcgacacccacccccttcaagagtacgggggatatcgccggaaccgtggtcccagaaaccaataaagaaccacgctatcaagaggacccgcctgccccacagcctaaggctgcaccccgaacgttcttgcgccccagtcccgaagacgaagcgatttacgggcctaatactaaaatggtgaggttcaaaaagggcgactctgtagggctgaggctggcgggcgggaacgatgtcgggatcttcgtagccggcattcaagagggtacctctgcagagcaggaggggctgcaagagggagatcagattcttaaagtaaatacacaggacttccggggtctggtgcgagaggacgctgtcctgtacctgttggaaatcccaaaaggtgaaatggttaccatcttagcacagagtcgcgcggatgtgtaccgagatatactcgcgtgtggacgcggagatagtttttttattcggtcccactttgaatgtgaaaaagagaccccgcaatctttggcttttacccggggcgaggtttttagagtggtggatacattgtacgatgggaagctcggaaattggttagccgtgcggatcggtaatgaattagaaaaaggtctgatcccgaacaaaagcagggccgagcagatggccagtgtccaaaacgctcagagggacaacgcgggggatcgcgccgacttttggcgcatgcgcggccaacggtctggggtgaaaaaaaacttgaggaagtctagagaggaccttaccgccgtagttagcgtttcaacaaaattcccggcctatgagagggtcttgctgcgagaggcaggatttaagcggcccgtggttttatttggtcctatcgcggacatcgcgatggagaagctggcaaatgagctgccagattggttccagacagctaaaaccgagcccaaagacgcaggatccgaaaaatccacaggcgtcgtgagactcaacactgtcaggcagattatagagcaggataaacacgctctgctggacgtcacccccaaagcagtagatctcttgaactatacccaatggttccctatcgtcatattcttcaaccctgactccaggcagggagtcaagacgatgcgccaaaggttaaatcctacttcgaacaaatctagccgcaaactctttgatcaggcaaataaactaaagaaaacttgtgcccatctattcactgcaacgatcaatctaaatagtgccaatgactcctggttcgggagcctcaaagacacaattcagcaccagcaaggggaggctgtctgggtctccgagggaaaaatggaaggcatggatgacgacccagaggatcgtatgtcctacctcactgccatgggtgcagattacttgagttgcgactcaaggctcattagcgatttcgaagacactgacggcgagggtggtgcctacacggacaatgagctcgacgaacctgcggaagaacctttggtctccagcattactcggagcagtgagcctgtgcagcatgaggagattgaaattgcacagaagcaccctgatatatatgcagtgcctatcaagacccacaaacccgaccccgggaccccacagcatacatccagtagacctcccgaaccacagaaagccccatcacgaccgtatcaggatactcggggctcatatggatctgacgcagaggaggaggagtacagacaacagctttctgaacatagcaagcgcgggtactacgggcagtcagcccgctatcgagacacagagctctag

SEQ ID NO: 262572 - DNA, 3063 bp, Artificial Sequence
  derived and/or modified sequence
atggaggagctgatctgggagcagtacaccgtgaccctgcagaaggacagcaagcggggtttcggcattgccgtatctggagggcgggacaacccacacttcgaaaacggcgaaaccagcatcgtaatatctgacgtcctgccgggcggacctgctgatggcctactccaggagaatgacagagttgtcatggtgaacggtactcccatggaggatgtattgcactcctttgccgtgcagcagctcaggaagagcggcaaagtcgccgcaatcgtggtgaaacggcctcggaaagtgcaggtggccgccctgcaggcgtcccctcccttggaccaggacgatagggcatttgaagtgatggacgagttcgatgggagatcattcagaagtgggtatagtgagcgatcaaggctaaattcccacggcggccgctccagatcgtgggaagactctcccgagagaggccgaccacatgaaagggccagaagccgcgagagagatcttagtagagatcgctcccgcgggcgtagtctggagcgtggtctagaccaagaccacgctcgcactcgcgatcggtcccgcggtagatccttggagcgcgggcttgaccatgacttcgggccttcccgagacagagatagagaccgctcacgcggccgtagtatagaccaggattacgagagggcttatcatcgggcctacgaccctgattacgaacgcgcctactctcctgaataccgacggggagctagacacgatgccaggtccagaggcccgcggtcccgctccagggaacacccccactcacgtagcccttcaccagagcctagaggacggcctggccctatcggggtgttgctgatgaagagtagggcaaatgaagaatacggtttgcgcttaggctcccagatcttcgtgaaggaaatgacccgcactggtcttgcaacgaaagatggaaatctgcacgagggggacattattctgaaaatcaacgggactgtcaccgaaaatatgagtcttacggacgctcgtaagctcatcgagaaatcaagggggaaactgcagctcgtcgtgctcagagactctcagcagactttgatcaacatcccaagccttaatgacagtgactcagagatcgaagatatttccgaaatcgagagcaaccgtagcttctcccctgaagaaagacgtcaccagtattctgactatgattaccattctagttccgaaaaattgaaggaaaggccatcctcaagagaggacacgccttccagactgagcaggatgggcgctacccccaccccatttaaatctacaggcgatatagctggaacagtggttcctgagacaaataaggaaccccggtaccaagaagatccaccagccccacagcctaaggccgccccccgcacttttttgcgcccctctccagaggacgaagccatttacggcccaaacaccaagatggtcagatttaagaagggggacagtgttggactgcgactcgccggtggtaacgatgtggggatttttgttgcaggcatccaagagggaacatcagccgagcaagagggcctgcaagaaggcgaccagatactgaaggtcaacacacaggatttcagaggcttggtgcgggaggacgccgttctatatctgctcgaaatcccgaagggggagatggtcactattctggctcagagccgtgctgatgtataccgagacatccttgcttgtggccggggggattcctttttcattagatctcactttgagtgcgagaaggaaacacctcaatcactggcgttcacaaggggtgaggtgttcagggtggtggacactctctacgatggaaagctgggcaactggcttgccgtccggatcgggaatgagctggaaaaaggattgatacccaataaatctcgggccgagcaaatggcaagtgttcaaaatgcccagcgagacaatgcaggcgaccgcgcagacttctggaggatgcgcggccagcgtagtggggtaaaaaagaacctgcgtaagtctcgtgaagatctgacagccgtcgtgagcgtctctactaaattccccgcatatgagagagtgctcctacgggaagctggtttcaagcggcctgttgtactgtttgggccaatcgcggacatcgccatggagaaattggccaatgagctgcccgactggtttcagaccgcgaaaactgaacccaaggacgctgggtccgaaaagtccaccggagtggtgcggctcaacacagtgcggcagattattgagcaggacaaacatgctctgctggacgtaacacctaaggccgtcgatctacttaattacactcagtggttccccattgtcatcttctttaacccagactcccggcaaggggtgaagacaatgcggcagagattgaatccaacaagcaataagtcctcccggaagctcttcgaccaggccaataagcttaagaagacttgcgctcatctgtttactgcaacaataaatctgaatagtgccaacgacagctggttcgggagtttgaaagatactattcagcatcagcagggcgaagcagtttgggtttcagaggggaagatggagggcatggatgacgacccagaggataggatgagctacctgaccgctatgggtgccgactacttgtcctgtgattcgcgtcttattagcgacttcgaagacaccgatggggagggaggcgcctataccgacaatgaacttgacgagcctgcggaagagccgttagtttcgtccatcacgcggtcctccgaacctgttcaacatgaagaaatcgagattgcccagaagcatcctgatatctacgccgtgccaattaagactcataagcctgatcctggcaccccccaacatacttcttcgaggccacccgagccacagaaagcaccctcacgaccctaccaggatactaggggctcctacggttctgatgctgaggaggaggagtaccgacaacagctgagtgaacactcaaaaaggggttactatggccaaagcgctagatatagggataccgagctgtag

SEQ ID NO: 262573 - DNA, 3132 bp, Artificial Sequence
  derived and/or modified sequence
atgccggtccgaggggatcgaggattccctccacgcagagagttgtcaggttggctgcgcgcacctgggatggaagagcttatctgggagcagtataccgtgacccttcaaaaagactcaaagcggggtttcggcatagctgtgtcaggcggacgcgacaacccacatttcgagaatggcgagacctcaattgttataagcgacgtgcttcccggtggaccagcggacggccttctgcaggagaacgacagagtggttatggtgaatggcaccccaatggaggacgtgctccactcctttgctgtgcagcagttacgcaaatccggcaaggtggcagcaattgtcgtaaagagaccacggaaggtccaggttgccgctctgcaggcttcacctcccttagaccaggatgatcgggctttcgaagtaatggatgaatttgatggacgcagctttcgaagtggctattctgaacgcagccgacttaatagtcacggcggtaggtccagatcctgggaagattcacccgagcggggacgccctcacgaacgtgcacgcagtagagagcgggacctgagtcgggatcgctcacggggtcgttctctcgaacgcggtctggatcaagatcatgcaagaacccgcgatagaagtcggggtagatcactcgaacggggacttgatcacgatttcggaccttcccgggaccgtgaccgagatcgcagccggggacgctccatcgatcaagattatgagagggcttatcaccgggcatacgacccagattacgagagagcatatagcccggagtatagacgcggagccagacacgatgcgagaagccgaggacccagatcccgaagtcgggagcatccccattctaggtcgcccagccctgaaccacgtggcagacctgggccaataggagtgttgctcatgaaatcccgggctaatgaggaatacgggctgaggctggggagccagatctttgtcaaggaaatgactcgcacgggactggccacaaaggacggtaacctgcacgaaggcgacataatcctcaagatcaatggaacagtgactgagaacatgagtttgaccgacgcgcgaaagctaatcgagaagtcgcgtggcaagttgcagctggtagtgttgagggactctcagcaaactctcataaatattccgtctctgaacgatagcgattctgagattgaggatatctccgaaatcgaaagtaaccgttccttttccccagaggagcgcaggcaccagtacagcgactatgactatcattcttcgagtgaaaagctgaaggagcgcccttcttcaagagaggacacaccctctcgattaagccgcatgggggctaccccaactccattcaagagtaccggcgatattgctgggaccgtagtgcccgagacaaataaagagcctaggtatcaggaagatccacccgcacctcagcccaaggcggctccaagaacgttcctacgcccttctcccgaagacgaggctatctacggtcctaacactaagatggttcggttcaagaagggcgatagtgtgggactccgcctagcagggggtaacgacgtaggtatctttgtggctggcattcaggaaggaacctccgcagagcaggaaggactccaggagggagaccagatcttgaaggtgaacacccaggatttccggggactagtccgcgaagacgctgtgttgtacttactggagatccccaaaggcgagatggtcacaattctggcacagtccagagcagatgtatatagggacatcctcgcgtgtggtcggggtgacagcttctttatacgctcccatttcgagtgtgagaaagagacccctcagagccttgcctttaccagaggcgaagtctttcgcgtggtggacactttgtatgacggcaagctcggaaactggctggccgtgcgcatcgggaatgagctggagaaaggtctgatacccaacaaatcacgcgctgaacaaatggcgagcgtccagaatgctcagagggataatgctggtgatagagcagatttctggcggatgagaggtcagcgctctggagtcaagaaaaaccttcgaaagtcaagagaggatctcaccgctgtggtaagtgtaagcacgaagttcccagcctacgagcgggtgctcctaagagaggccggatttaagcgccctgttgtgctgtttggccctattgctgatattgcaatggaaaagctcgcgaatgagctcccggactggtttcaaacggctaaaactgagcccaaagacgccggatcagagaaatccacaggtgtggtccgcctcaacacggtcaggcagattattgagcaggacaagcacgcacttctggatgtgactcctaaggcagtggatcttctgaattatacccaatggttcccaatagtgatcttttttaaccctgatagtcgacagggggtcaagaccatgcggcagaggttgaacccgacctccaataagtcgagccgaaaactctttgaccaggccaacaaactcaaaaagacctgcgcacacctcttcactgcgactattaacctgaactccgccaatgatagctggttcggttctctcaaagacacaatccaacatcaacagggggaagcggtgtgggtgagtgagggaaagatggagggcatggatgacgatccggaggatcgcatgagctacttaactgccatgggggctgactatctgtcctgcgacagtaggctcatttccgatttcgaggataccgatggagagggaggagcttataccgacaacgagctcgatgagcctgcggaagaacctttagtctcttcaattacgcggtcctctgagcccgtgcaacacgaagagatagaaattgcgcagaagcatccggatatatatgcagtgcccatcaagacacacaagccagatccaggtactcctcagcatacaagctctagacctccagagccccagaaagctcctagcagaccgtatcaggatactagaggctcctatgggtctgatgcagaagaggaagagtatcgccagcagttgtccgagcacagtaagcgaggatactacggacaaagcgccaggtatagagacacagagctgtag

SEQ ID NO: 262574 - DNA, 3063 bp, Artificial Sequence
  derived and/or modified sequence
atggaggagctcatatgggagcagtataccgtcactctccagaaggattccaagagggggtttggaatcgccgtctctggaggtcgggacaaccctcattttgagaacggtgagacatctattgtaatctccgatgtcctccctggcggtcctgctgatgggttgcttcaggagaatgacagggttgtgatggtgaatggaactccaatggaagacgtcctgcacagttttgccgtgcagcagttgcgcaagtctggtaaggttgctgccattgtggtcaagcgacctcgcaaggtacaggtcgcggctctgcaggcttcacctcctttggaccaagatgatcgggctttcgaggtcatggatgagtttgatggcaggtcctttaggtccggttactctgagcgatctcggctcaacagccacgggggaaggtcacgcagttgggaggactctcctgagagaggcagaccgcacgagagggcacgtagcagagaacgagacctgtcacgagatagatcccggggtcgcagtctggagcgcggtctggatcaggatcacgcccgaacgcgcgacaggtcacgaggtcgatccctggagaggggtcttgatcatgacttcggacctagccgagacagagacagagaccggtctaggggaaggtccattgaccaggactatgaaagggcgtatcaccgggcatatgaccctgactatgagcgagcttattcccccgaatatcggagaggtgcccgacatgacgctcggtcacgaggccctaggtcccgttcgcgcgaacacccccattcgcgatcccccagtccagaaccaaggggacgaccaggacccattggggtgctgttgatgaagagtcgggcaaatgaagagtacgggttgcgactcggtagtcaaatattcgttaaagagatgacgaggactggactggcgactaaggacggcaatcttcacgagggtgacatcatcttgaagattaacggcactgtaactgagaacatgagtctgaccgacgccaggaagcttattgagaagagccgaggcaaattgcaacttgtggttctgagagacagccagcagaccctgataaacattccaagcctgaacgattctgactccgagatcgaagatatatccgaaatcgagagcaacagatctttctcacccgaggaacgacgtcaccagtactctgactacgactatcactcaagttccgagaagctgaaggagaggccctccagtagagaggataccccttctcggctgagccgcatgggggctacccctaccccattcaaaagcactggcgacatcgccggaacagtggttcccgaaactaataaggaacccaggtatcaggaggacccacctgctccccagcccaaagccgctcccaggacatttctgaggcccagccccgaagatgaagccatctacggacccaacactaagatggtccggttcaagaagggagactccgtagggttgaggttggcaggtggtaatgacgtggggattttcgttgctggaattcaggagggaaccagcgccgagcaagaaggcctgcaagagggcgatcagatcttgaaagtcaacacacaggatttccgcggactggtgagggaggacgccgtgctctacctgctggagatcccaaagggggaaatggttacgattctggctcagtctagagctgacgtttaccgcgatatcctagcatgcggtcgaggcgatagcttcttcatcaggtcacactttgagtgtgagaaagagactcctcagtctctggcttttacacgcggagaagtgttccgtgtagtggacactctgtacgacgggaagctgggcaactggctggctgtcaggatcgggaatgaattagaaaagggactgatccctaacaagagtcgagcagagcaaatggcttcggtgcagaatgcccagcgggacaatgcaggcgatcgtgctgatttctggaggatgaggggacagcggagcggcgtgaagaaaaacctgagaaagagtcgcgaggacctgacagcggttgtgagcgtctcaacaaagttccccgcatatgagcgcgtactcctgcgggaggcgggattcaaacgacccgtggtccttttcggcccaatagcggacatcgcaatggaaaaactagccaatgagctccctgattggttccaaaccgctaaaacagagcctaaggacgccggttctgaaaaaagtacaggcgttgtacggctgaatacggttcgtcagataatcgaacaggacaagcacgcgttactggatgtgacacctaaagccgtggacctgctgaactacacacagtggttccctattgtgatttttttcaatcccgatagccgccaaggcgtcaaaactatgcggcaacgactaaaccctacatcaaacaagagttcccgcaagttgtttgaccaggccaataaactaaagaaaacctgtgctcatctcttcaccgctacaataaacctgaatagcgcgaacgattcatggtttggaagtttgaaagacaccatccagcaccaacagggcgaagccgtgtgggtgagcgagggcaaaatggaaggtatggatgacgatccagaggacaggatgagctatcttaccgcaatgggtgccgattacctgagctgtgacagccggctgatctccgactttgaggatactgacggggagggcggtgcttacactgataatgagctcgacgagccagccgaggaaccactggtgagtagcataacccgctcatctgagcctgtgcagcacgaagaaattgaaattgcacaaaaacatcccgatatttacgccgtgccaatcaagactcacaagcctgaccctggcacacctcagcatacgagctctcggccacccgagccacaaaaagctccgtcacgcccttatcaagatacccgcggttcttacgggagtgacgctgaggaggaggaatataggcagcaactgagcgaacactcaaagagaggctattacggccagagtgccaggtatcgggacactgaactgtag

SEQ ID NO: 262575 - DNA, 4058 bp, Artificial Sequence
  derived and/or modified sequence
agagcactgtccggtggtgcccaggaggagtaggagcaggagcagaagcagaagcggggtccggagctgcgcgcctacgcgggacctgtgtccgaaatgccggtgcgaggagaccgcgggtttccaccccggcgggagctgtcaggttggctccgcgccccaggcatggaagagctgatatgggaacagtacactgtgaccctacaaaaggattccaaaagaggatttggaattgcagtgtccggaggcagagacaacccccactttgaaaatggagaaacgtcaattgtcatttctgatgtgctcccgggtgggcctgctgatgggctgctccaagaaaatgacagagtggtcatggtcaatggcacccccatggaggatgtgcttcattcgtttgcagttcagcagctcagaaaaagtgggaaggtcgctgctattgtggtcaagaggccccggaaggtccaggtggccgcacttcaggccagccctcccctggatcaggatgaccgggcttttgaggtgatggacgagtttgatggcagaagtttccggagtggctacagcgagaggagccggctgaacagccatggggggcgcagccgcagctgggaggacagcccggaaagggggcgtccccatgagcgggcccggagccgggagcgggacctcagccgggaccggagccgtggccggagcctggagcggggcctggaccaagaccatgcgcgcacccgagaccgcagccgtggccggagcctggagcggggcctggaccacgactttgggccatcccgggaccgggaccgtgaccgcagccgcggccggagcattgaccaggactacgagcgagcctatcaccgggcctacgacccagactacgagcgggcctacagcccggagtacaggcgcggggcccgccacgatgcccgctctcggggaccccgaagccgcagccgcgagcacccgcactcacggagccccagccccgagcctagggggcggccggggcccatcggggtcctcctgatgaaaagcagagcgaacgaagagtatggtctccggcttgggagtcagatcttcgtaaaggaaatgacccgaacgggtctggcaactaaagatggcaaccttcacgaaggagacataattctcaagatcaatgggactgtaactgagaacatgtctttaacggatgctcgaaaattgatagaaaagtcaagaggaaaactacagctagtggtgttgagagacagccagcagaccctcatcaacatcccgtcattaaatgacagtgactcagaaatagaagatatttcagaaatagagtcaaaccgatcattttctccagaggagagacgtcatcagtattctgattatgattatcattcctcaagtgagaagctgaaggaaaggccaagttccagagaggacacgccgagcagattgtccaggatgggtgcgacacccactccctttaagtccacaggggatattgcaggcacagttgtcccagagaccaacaaggaacccagataccaagaggaccccccagctcctcaaccaaaagcagccccgagaacttttcttcgtcctagtcctgaagatgaagcaatatatggccctaataccaaaatggtaaggttcaagaagggagacagcgtgggcctccggttggctggtggcaatgatgtcgggatatttgttgctggcattcaagaagggacctcggcggagcaggagggccttcaagaaggagaccagattctgaaggtgaacacacaggatttcagaggattagtgcgggaggatgccgttctctacctgttagaaatccctaaaggtgaaatggtgaccattttagctcagagccgagccgatgtgtatagagacatcctggcttgtggcagaggggattcgttttttataagaagccactttgaatgtgagaaggaaactccacagagcctggccttcaccagaggggaggtcttccgagtggtagacacactgtatgacggcaagctgggcaactggctggctgtgaggattgggaacgagttggagaaaggcttaatccccaacaagagcagagctgaacaaatggccagtgttcaaaatgcccagagagacaacgctggggaccgggcagatttctggagaatgcgtggccagaggtctggggtgaagaagaacctgaggaaaagtcgggaagacctcacagctgttgtgtctgtcagcaccaagttcccagcttatgagagggttttgctgcgagaagctggtttcaagagacctgtggtcttattcggccccatagctgatatagcaatggaaaaattggctaatgagttacctgactggtttcaaactgctaaaacggaaccaaaagatgcaggatctgagaaatccactggagtggtccggttaaataccgtgaggcaaattattgaacaggataagcatgcactactggatgtgactccgaaagctgtggacctgttgaattacacccagtggttcccaattgtgatttttttcaacccagactccagacaaggtgtcaaaaccatgagacaaaggttaaatccaacgtccaacaaaagttctcgaaagttatttgatcaagccaacaagcttaaaaaaacgtgtgcacacctttttacagctacaatcaacctaaattcagccaatgatagctggtttggcagcttaaaggacactattcagcatcagcaaggagaagcggtttgggtctctgaaggaaagatggaagggatggatgatgaccccgaagaccgcatgtcctacttaaccgccatgggcgcggactatctgagttgcgacagccgcctcatcagtgactttgaagacacggacggtgaaggaggcgcctacactgacaatgagctggatgagccagccgaggagccgctggtgtcgtccatcacccgctcctcggagccggtgcagcacgaggagatcgaaattgcccagaagcatcctgatatctatgcagttccaatcaaaacgcacaagccagaccctggcacgccccagcacacgagttccagaccccctgagccacagaaagctccttccagaccttatcaggataccagaggaagttatggcagtgatgccgaggaggaggagtaccgccagcagctgtcagaacactccaagcgcggttactatggccagtctgcccgataccgggacacagaattatagatgtctgagcacggactctcccaggcctgcctgcatggcatcagactagccactcctgccaggccgccgggatggttcttctccagttagaatgcaccatggagacgtggtgggactccagctcgtgtgtcctcatggagaacccaggggacagctggtgcaaattcagaactgagggctctgtttgtgggactgggttagaggagtctgtggctttttgttcagaattaagcagaacactgcagtcagatcctgttacttgcttcagtggaccgaaatctgtattctgtttgcgtacttgtaatatgtatattaagaagcaataactatttttcctcattaatagctgccttcaaggactgtttcagtgtgagtcagaatgtgaaaaaggaataaaaaatactgttgggctcaaactaaattcaaagaagtactttattgcaactcttttaagtgccttggatgagaagtgtcttaaattttcttcctttgaagctttaggcagagccataatggactaaaacattttgactaagtttttataccagcttaatagctgtagttttccctgcactgtgtcatcttttcaaggcatttgtctttgtaatattttccataaatttggactgtctatatcataactatacttgatagtttggctataagtgctcaatagcttgaagcccaagaagttggtatcgaaatttgttgtttgtttaaacccaagtgctgcacaaaagcagatacttgaggaaaacactatttccaaaagcacatgtattgacaacagttttataatttaataaaaaggaatacattgcaatccgtaa

SEQ ID NO: 262576 - DNA, 4085 bp, Artificial Sequence
  derived and/or modified sequence
agctgcgtctccctcccggggctcgcgcgcccagaaccctccggtctcaaggaagcagggtgcgaagtaccacattactgtcatctccctgtgagtgggattggcaccccggctgcagctccaggagcaagtactccaggaagcacagagctgtaccagtacacggcccacgttgccaggccccaggcatggaagagctgatatgggaacagtacactgtgaccctacaaaaggattccaaaagaggatttggaattgcagtgtccggaggcagagacaacccccactttgaaaatggagaaacgtcaattgtcatttctgatgtgctcccgggtgggcctgctgatgggctgctccaagaaaatgacagagtggtcatggtcaatggcacccccatggaggatgtgcttcattcgtttgcagttcagcagctcagaaaaagtgggaaggtcgctgctattgtggtcaagaggccccggaaggtccaggtggccgcacttcaggccagccctcccctggatcaggatgaccgggcttttgaggtgatggacgagtttgatggcagaagtttccggagtggctacagcgagaggagccggctgaacagccatggggggcgcagccgcagctgggaggacagcccggaaagggggcgtccccatgagcgggcccggagccgggagcgggacctcagccgggaccggagccgtggccggagcctggagcggggcctggaccaagaccatgcgcgcacccgagaccgcagccgtggccggagcctggagcggggcctggaccacgactttgggccatcccgggaccgggaccgtgaccgcagccgcggccggagcattgaccaggactacgagcgagcctatcaccgggcctacgacccagactacgagcgggcctacagcccggagtacaggcgcggggcccgccacgatgcccgctctcggggaccccgaagccgcagccgcgagcacccgcactcacggagccccagccccgagcctagggggcggccggggcccatcggggtcctcctgatgaaaagcagagcgaacgaagagtatggtctccggcttgggagtcagatcttcgtaaaggaaatgacccgaacgggtctggcaactaaagatggcaaccttcacgaaggagacataattctcaagatcaatgggactgtaactgagaacatgtctttaacggatgctcgaaaattgatagaaaagtcaagaggaaaactacagctagtggtgttgagagacagccagcagaccctcatcaacatcccgtcattaaatgacagtgactcagaaatagaagatatttcagaaatagagtcaaaccgatcattttctccagaggagagacgtcatcagtattctgattatgattatcattcctcaagtgagaagctgaaggaaaggccaagttccagagaggacacgccgagcagattgtccaggatgggtgcgacacccactccctttaagtccacaggggatattgcaggcacagttgtcccagagaccaacaaggaacccagataccaagaggaccccccagctcctcaaccaaaagcagccccgagaacttttcttcgtcctagtcctgaagatgaagcaatatatggccctaataccaaaatggtaaggttcaagaagggagacagcgtgggcctccggttggctggtggcaatgatgtcgggatatttgttgctggcattcaagaagggacctcggcggagcaggagggccttcaagaaggagaccagattctgaaggtgaacacacaggatttcagaggattagtgcgggaggatgccgttctctacctgttagaaatccctaaaggtgaaatggtgaccattttagctcagagccgagccgatgtgtatagagacatcctggcttgtggcagaggggattcgttttttataagaagccactttgaatgtgagaaggaaactccacagagcctggccttcaccagaggggaggtcttccgagtggtagacacactgtatgacggcaagctgggcaactggctggctgtgaggattgggaacgagttggagaaaggcttaatccccaacaagagcagagctgaacaaatggccagtgttcaaaatgcccagagagacaacgctggggaccgggcagatttctggagaatgcgtggccagaggtctggggtgaagaagaacctgaggaaaagtcgggaagacctcacagctgttgtgtctgtcagcaccaagttcccagcttatgagagggttttgctgcgagaagctggtttcaagagacctgtggtcttattcggccccatagctgatatagcaatggaaaaattggctaatgagttacctgactggtttcaaactgctaaaacggaaccaaaagatgcaggatctgagaaatccactggagtggtccggttaaataccgtgaggcaaattattgaacaggataagcatgcactactggatgtgactccgaaagctgtggacctgttgaattacacccagtggttcccaattgtgatttttttcaacccagactccagacaaggtgtcaaaaccatgagacaaaggttaaatccaacgtccaacaaaagttctcgaaagttatttgatcaagccaacaagcttaaaaaaacgtgtgcacacctttttacagctacaatcaacctaaattcagccaatgatagctggtttggcagcttaaaggacactattcagcatcagcaaggagaagcggtttgggtctctgaaggaaagatggaagggatggatgatgaccccgaagaccgcatgtcctacttaaccgccatgggcgcggactatctgagttgcgacagccgcctcatcagtgactttgaagacacggacggtgaaggaggcgcctacactgacaatgagctggatgagccagccgaggagccgctggtgtcgtccatcacccgctcctcggagccggtgcagcacgaggagatcgaaattgcccagaagcatcctgatatctatgcagttccaatcaaaacgcacaagccagaccctggcacgccccagcacacgagttccagaccccctgagccacagaaagctccttccagaccttatcaggataccagaggaagttatggcagtgatgccgaggaggaggagtaccgccagcagctgtcagaacactccaagcgcggttactatggccagtctgcccgataccgggacacagaattatagatgtctgagcacggactctcccaggcctgcctgcatggcatcagactagccactcctgccaggccgccgggatggttcttctccagttagaatgcaccatggagacgtggtgggactccagctcgtgtgtcctcatggagaacccaggggacagctggtgcaaattcagaactgagggctctgtttgtgggactgggttagaggagtctgtggctttttgttcagaattaagcagaacactgcagtcagatcctgttacttgcttcagtggaccgaaatctgtattctgtttgcgtacttgtaatatgtatattaagaagcaataactatttttcctcattaatagctgccttcaaggactgtttcagtgtgagtcagaatgtgaaaaaggaataaaaaatactgttgggctcaaactaaattcaaagaagtactttattgcaactcttttaagtgccttggatgagaagtgtcttaaattttcttcctttgaagctttaggcagagccataatggactaaaacattttgactaagtttttataccagcttaatagctgtagttttccctgcactgtgtcatcttttcaaggcatttgtctttgtaatattttccataaatttggactgtctatatcataactatacttgatagtttggctataagtgctcaatagcttgaagcccaagaagttggtatcgaaatttgttgtttgtttaaacccaagtgctgcacaaaagcagatacttgaggaaaacactatttccaaaagcacatgtattgacaacagttttataatttaataaaaaggaatacattgcaatccgtaatttt

SEQ ID NO: 262577 - protein, 720 aa, Artificial Sequence
  derived and/or modified sequence
MAQGLEVALTDLQSSRNNVRHHTEEITVDHLLVRRGQAFNLTLYFRNRSFQPGLDNIIFVVETGPLPDLALGTRAVFSLARHHSPSPWIAWLETNGATSTEVSLCAPPTAAVGRYLLKIHIDSFQGSVTAYQLGEFILLFNPWCPEDAVYLDSEPQRQEYVMNDYGFIYQGSKNWIRPCPWNYGQFEDKIIDICLKLLDKSLHFQTDPATDCALRGSPVYVSRVVCAMINSNDDNGVLNGNWSENYTDGANPAEWTGSVAILKQWNATGCQPVRYGQCWVFAAVMCTVMRCLGIPTRVITNFDSGHDTDGNLIIDEYYDNTGRILGNKKKDTIWNFHVWNECWMARKDLPPAYGGWQVLDATPQEMSNGVYCCGPASVRAIKEGEVDLNYDTPFVFSMVNADCMSWLVQGGKEQKLHQDTSSVGNFISTKSIQSDERDDITENYKYEEGSLQERQVFLKALQKLKARSFHGSQRGAELQPSRPTSLSQDSPRSLHTPSLRPSDVVQVSLKFKLLDPPNMGQDICFVLLALNMSSQFKDLKVNLSAQSLLHDGSPLSPFWQDTAFITLSPKEAKTYPCKISYSQYSQYLSTDKLIRISALGEEKSSPEKILVNKIITLSYPSITINVLGAAVVNQPLSIQVIFSNPLSEQVEDCVLTVEGSGLFKKQQKVFLGVLKPQHQASIILETVPFKSGQRQIQANMRSNKFKDIKGYRNVYVDFAL

SEQ ID NO: 262578 - protein, 719 aa, Artificial Sequence
  derived and/or modified sequence
AQGLEVALTDLQSSRNNVRHHTEEITVDHLLVRRGQAFNLTLYFRNRSFQPGLDNIIFVVETGPLPDLALGTRAVFSLARHHSPSPWIAWLETNGATSTEVSLCAPPTAAVGRYLLKIHIDSFQGSVTAYQLGEFILLFNPWCPEDAVYLDSEPQRQEYVMNDYGFIYQGSKNWIRPCPWNYGQFEDKIIDICLKLLDKSLHFQTDPATDCALRGSPVYVSRVVCAMINSNDDNGVLNGNWSENYTDGANPAEWTGSVAILKQWNATGCQPVRYGQCWVFAAVMCTVMRCLGIPTRVITNFDSGHDTDGNLIIDEYYDNTGRILGNKKKDTIWNFHVWNECWMARKDLPPAYGGWQVLDATPQEMSNGVYCCGPASVRAIKEGEVDLNYDTPFVFSMVNADCMSWLVQGGKEQKLHQDTSSVGNFISTKSIQSDERDDITENYKYEEGSLQERQVFLKALQKLKARSFHGSQRGAELQPSRPTSLSQDSPRSLHTPSLRPSDVVQVSLKFKLLDPPNMGQDICFVLLALNMSSQFKDLKVNLSAQSLLHDGSPLSPFWQDTAFITLSPKEAKTYPCKISYSQYSQYLSTDKLIRISALGEEKSSPEKILVNKIITLSYPSITINVLGAAVVNQPLSIQVIFSNPLSEQVEDCVLTVEGSGLFKKQQKVFLGVLKPQHQASIILETVPFKSGQRQIQANMRSNKFKDIKGYRNVYVDFAL

SEQ ID NO: 262579 - DNA, 2160 bp, Artificial Sequence
  derived and/or modified sequence
gcccagggcctggaggtggccctgaccgacctgcagagcagcagaaacaacgtgagacaccacaccgaggagatcaccgtggaccacctgctggtgagaagaggccaggccttcaacctgaccctgtacttcagaaacagaagcttccagcccggcctggacaacatcatcttcgtggtggagaccggccccctgcccgacctggccctgggcaccagagccgtgttcagcctggccagacaccacagccccagcccctggatcgcctggctggagaccaacggcgccaccagcaccgaggtgagcctgtgcgccccccccaccgccgccgtgggcagatacctgctgaagatccacatcgacagcttccagggcagcgtgaccgcctaccagctgggcgagttcatcctgctgttcaacccctggtgccccgaggacgccgtgtacctggacagcgagccccagagacaggagtacgtgatgaacgactacggcttcatctaccagggcagcaagaactggatcagaccctgcccctggaactacggccagttcgaggacaagatcatcgacatctgcctgaagctgctggacaagagcctgcacttccagaccgaccccgccaccgactgcgccctgagaggcagccccgtgtacgtgagcagagtggtgtgcgccatgatcaacagcaacgacgacaacggcgtgctgaacggcaactggagcgagaactacaccgacggcgccaaccccgccgagtggaccggcagcgtggccatcctgaagcagtggaacgccaccggctgccagcccgtgagatacggccagtgctgggtgttcgccgccgtgatgtgcaccgtgatgagatgcctgggcatccccaccagagtgatcaccaacttcgacagcggccacgacaccgacggcaacctgatcatcgacgagtactacgacaacaccggcagaatcctgggcaacaagaagaaggacaccatctggaacttccacgtgtggaacgagtgctggatggccagaaaggacctgccccccgcctacggcggctggcaggtgctggacgccaccccccaggagatgagcaacggcgtgtactgctgcggccccgccagcgtgagagccatcaaggagggcgaggtggacctgaactacgacacccccttcgtgttcagcatggtgaacgccgactgcatgagctggctggtgcagggcggcaaggagcagaagctgcaccaggacaccagcagcgtgggcaacttcatcagcaccaagagcatccagagcgacgagagagacgacatcaccgagaactacaagtacgaggagggcagcctgcaggagagacaggtgttcctgaaggccctgcagaagctgaaggccagaagcttccacggcagccagagaggcgccgagctgcagcccagcagacccaccagcctgagccaggacagccccagaagcctgcacacccccagcctgagacccagcgacgtggtgcaggtgagcctgaagttcaagctgctggacccccccaacatgggccaggacatctgcttcgtgctgctggccctgaacatgagcagccagttcaaggacctgaaggtgaacctgagcgcccagagcctgctgcacgacggcagccccctgagccccttctggcaggacaccgccttcatcaccctgagccccaaggaggccaagacctacccctgcaagatcagctacagccagtacagccagtacctgagcaccgacaagctgatcagaatcagcgccctgggcgaggagaagagcagccccgagaagatcctggtgaacaagatcatcaccctgagctaccccagcatcaccatcaacgtgctgggcgccgccgtggtgaaccagcccctgagcatccaggtgatcttcagcaaccccctgagcgagcaggtggaggactgcgtgctgaccgtggagggcagcggcctgttcaagaagcagcagaaggtgttcctgggcgtgctgaagccccagcaccaggccagcatcatcctggagaccgtgcccttcaagagcggccagagacagatccaggccaacatgagaagcaacaagttcaaggacatcaagggctacagaaacgtgtacgtggacttcgccctgtag

SEQ ID NO: 262580 - DNA, 2163 bp, Artificial Sequence
  derived and/or modified sequence
atggcccagggcctagaggtggctctaacggatttgcaatcctccagaaataatgtgagacatcataccgaagagatcaccgtggaccacctattggtgagaagaggacaggctttcaacctcacgctttacttccgcaataggtccttccagcccggacttgacaatattatctttgttgttgagactgggcccctacccgatctggccctaggcacgcgggctgtgttctctttagccagacatcatagcccatctccgtggattgcctggctagagacgaatggggcaacgagcacagaagtgtccctttgtgctcctcccaccgccgctgtgggcaggtaccttctcaaaatccacattgattcctttcaaggatctgtcaccgcctaccagctgggggagtttattctgctcttcaatccttggtgcccagaggatgccgtttacctggatagcgagcctcaacggcaggagtatgtcatgaacgattatggatttatttaccagggatctaaaaattggattaggccctgcccatggaattatgggcagtttgaggacaagatcatagacatctgcctgaagcttctggacaagtcattacacttccaaactgatccagccactgactgcgctctgagaggctctccagtgtatgtctcgagggtcgtatgcgccatgattaacagcaatgacgacaacggcgtactgaatggcaactggtctgagaattataccgatggggccaacccggccgagtggaccgggtccgtcgccatcctgaagcaatggaatgctaccgggtgtcagccagtgagatacggtcaatgttgggtgttcgcagctgtcatgtgcacagtaatgagatgtttgggcatccctactagagtaatcacgaattttgattccggacacgataccgatgggaacctgattatagacgaatactatgacaacacagggaggatcctgggaaacaagaaaaaggatacaatctggaactttcacgtgtggaatgagtgctggatggccagaaaggatcttcctccggcttatggaggctggcaggttctggacgcgactcctcaggagatgagcaacggcgtttactgctgcggacctgcttccgttcgcgccatcaaggagggcgaagtggacctgaattatgatactccattcgttttttcaatggttaacgccgactgcatgagttggcttgtccaggggggcaaggaacaaaagctgcaccaagacacatcgagcgtcgggaacttcattagtacaaagtcaatccagtccgatgaaagagacgacatcacggagaactacaagtatgaggagggctctctgcaggaacgacaggtctttctgaaggccctccagaaattgaaggcacgcagcttccatgggagccagcgcggagcggaactccagccctctcggcccacgagtctcagtcaggactcccccagaagtttgcatactccttctctaagaccatccgatgtggtacaagtgagcctgaagttcaagttgttagacccaccaaatatgggacaagacatttgcttcgtgcttctggctctcaatatgtccagtcagtttaaagatctcaaagtcaacttatccgctcagtctctcctgcacgatggatcccctctctcccccttctggcaggataccgcctttattactttaagcccaaaggaagccaaaacctatccttgcaagatttcgtatagccaatactcccagtacctgtctacagataaactgattcgaatatctgccctcggggaagagaagtcctccccagaaaaaatcctggtcaataagattattactctgtcttacccgtcaattacaattaacgtattgggcgcagccgttgtaaatcagccattgagcatacaggtcatatttagtaaccccctctctgaacaggttgaagactgcgtactcaccgtggagggctcagggttattcaagaaacagcaaaaggttttcctcggcgtgctgaagccacagcatcaggcaagcatcattctcgagactgtccctttcaagtccggccaacgacagatacaggcaaatatgcgtagcaataagtttaaagacattaagggttaccgaaacgtgtacgtggattttgcactgtag

SEQ ID NO: 262581 - DNA, 2160 bp, Artificial Sequence
  derived and/or modified sequence
gcccagggtctggaagtggctctgaccgaccttcagtcgagcaggaataatgtcaggcatcacaccgaagagatcactgtggatcatctgctggttaggcgcgggcaagctttcaaccttacactgtatttccgcaacaggtcattccagccaggtctggataacattatcttcgtagtggagaccggtccccttccagacttggccctgggcactcgagctgtgttttcactggcacgccaccactccccttctccttggattgcctggctggagactaacggagccaccagtactgaggtctccctgtgtgcccctcccacggccgctgtgggtcgctacctgctcaaaattcacatcgattcttttcagggaagtgtcacggcctatcagctgggggaatttattttgctgtttaacccatggtgtcctgaggatgccgtctatctggattcggagcctcagcgccaggaatatgtcatgaacgattatggctttatctaccaaggtagtaagaattggatacggccttgtccttggaactacggacaattcgaggataagattatagatatttgtttgaagcttctggacaagtcgctacatttccagacggacccggccactgattgtgctctgcggggatcgcccgtgtacgtcagcagagtagtgtgtgctatgatcaacagcaacgatgacaatggcgtcctgaacggcaattggagcgagaattacactgatggcgccaaccctgcagagtggaccggatcagtagctattttaaaacagtggaatgctactggatgccaaccagtgcgatatggtcagtgttgggttttcgcagcagtcatgtgtaccgtaatgagatgtctgggcattcccacccgcgtcatcaccaatttcgatagcggccatgataccgacggaaacttgatcattgacgaatactatgacaacactgggcgtattttaggtaataaaaaaaaagacactatatggaattttcacgtctggaacgagtgctggatggcgcggaaggacctgcctccggcatatggcggttggcaggttctggatgccacccctcaggagatgtcaaacggcgtgtattgctgcggtcccgccagcgtgagggctatcaaggaaggtgaggtggacttgaactacgataccccctttgtgttttccatggtcaatgccgattgtatgtcatggctggtacaaggagggaaggagcagaaactacaccaggatacaagttccgttggcaattttatttcaacaaagtccatacaatctgatgagagagacgacatcaccgagaattataagtatgaagaaggctcattacaagaacgccaggtttttctcaaagccctgcagaagctcaaagcgcgatcattccatggctcccagcggggggccgaactacagccaagtagacccacatccctgagtcaggattcgccccgttctttgcacaccccaagcctcagaccctccgatgttgtccaggtcagcctgaaattcaagctcctcgatccacccaacatgggacaggacatttgttttgtgctccttgccctcaatatgtcctcccaattcaaggacctcaaagtgaatctgtcagcacaatccctgttacatgacgggtcccccctctctccattctggcaagacacagcttttattacgctgtcccctaaagaagccaagacttatccctgtaagatcagttactcacagtactcccagtacctgtccactgacaagctgattaggatcagtgctttgggggaggaaaagtcctctcctgagaaaattcttgtaaataaaatcataaccctcagctatccctctatcacaataaatgtgctgggagccgctgttgtgaaccaaccactgtctatacaggtcattttttccaaccccttatctgagcaggtggaggactgcgtgctcacagtggagggttcagggctgtttaagaagcagcaaaaggtgttcttgggagtactcaagcctcagcatcaagcttccattatcctcgaaactgtgcctttcaagagtggccagaggcagatccaggccaacatgagatctaacaaatttaaagatataaaagggtatcgcaatgtttatgtggattttgccttgtag

SEQ ID NO: 262582 - DNA, 2163 bp, Artificial Sequence
  derived and/or modified sequence
atggcccagggcctggaggtggccctgacagacctgcagagcagcaggaacaacgtgcgccaccacacagaggagatcaccgtggaccacctgctggtgcggcggggccaggccttcaacctgaccctgtacttcaggaacagaagcttccagcccggcctggacaacatcatctttgtggtggagaccggccccctgcctgacctggccctgggcaccagggctgtgttcagcctggcccggcaccacagccccagcccctggatcgcctggctggagaccaatggagccaccagcacagaggtgtccctgtgtgccccacccacagctgctgtgggccgctacctgctgaagatccacatcgacagcttccagggctctgtgacagcctaccagctgggggagttcatcctgctcttcaacccctggtgcccagaagatgctgtgtacctggacagcgagccccagaggcaggagtatgtgatgaatgactatggcttcatctaccagggcagcaagaactggatccggccctgcccctggaactacggccagtttgaggacaagatcatcgacatctgcctgaagctgctggacaagagcctgcacttccagacagatcctgccacagactgtgccctgcggggcagccctgtgtatgtgtcccgggtggtgtgtgccatgatcaacagcaatgatgacaatggagtgctgaatggaaactggagcgagaactacacagatggagccaacccagctgagtggacaggctctgtggccatcctgaagcagtggaatgccaccggctgccagcctgtgcgctatggccagtgctgggtgtttgctgctgtgatgtgcaccgtgatgcgctgcctgggcatccccaccagggtcatcaccaactttgacagcggccatgacacagatggcaacctgatcattgatgagtactatgacaacacaggccgcatcctgggcaacaagaagaaggacaccatctggaacttccacgtgtggaatgaatgctggatggccaggaaggacctgcccccagcctatggaggctggcaggtgctggatgccaccccccaggagatgagcaatggagtgtactgctgcggccctgcctctgtgcgggccatcaaggagggggaggtggacctgaactatgacaccccatttgtgttctccatggtgaatgctgactgcatgtcctggctggtgcagggcggcaaggagcagaagctgcaccaggacaccagctctgtgggcaacttcatcagcaccaagagcatccagagtgatgaaagagatgacatcacagagaactacaagtatgaggagggcagcctgcaggagcggcaggtgttcctgaaggccctgcagaagctgaaggcccggagcttccacggcagccagagaggagctgagctgcagcccagccggcccaccagcctgagccaggacagccccaggagcctgcacacccccagcctgcggcccagtgatgtggtgcaggtgtccctgaagttcaagctgctggacccccccaacatgggccaggacatctgctttgtgctgctggccctgaacatgagcagccagttcaaggacctgaaggtgaacctgagcgcccagagcctgctgcatgatggcagccccctgagccccttctggcaggacacagccttcatcaccctgagccccaaggaggccaagacctacccctgcaagatctcctacagccagtacagccagtacctgagcacagacaagctgatccgcatcagcgccctgggggaggagaagagcagccctgagaagatcctggtgaacaagatcatcaccctgagctaccccagcatcaccatcaacgtgctgggcgctgctgtggtgaaccagcccctgagcatccaggtgatcttcagcaaccccctgtctgagcaggtggaggactgtgtgctgactgtggagggcagcggcctcttcaagaagcagcagaaggtgttcctgggcgtgctgaagccccagcaccaggccagcatcatcctggagaccgtgcccttcaagagcggccagaggcagatccaggccaacatgaggagcaacaagttcaaggacatcaagggctacagaaatgtgtatgtggactttgccctgtag

SEQ ID NO: 262583 - DNA, 2160 bp, Artificial Sequence
  derived and/or modified sequence
gcccagggcctggaggtggccctgacagacctgcagagcagcagaaataatgtgcgccaccacacagaggagatcaccgtggaccacctgctggtgagaagaggccaggccttcaacctgaccctgtacttcaggaacagaagcttccagcccggcctggacaacatcatctttgtggtggagaccggccccctgcctgacctggccctgggcaccagggctgtgttcagcctggcccggcaccacagccccagcccctggatcgcctggctggagaccaacggggccaccagcacagaggtgtccctgtgtgccccacccacagctgctgtgggccgctacctgctgaagatccacatcgacagcttccagggctctgtgacagcctaccagctgggggagttcatcctgctcttcaacccctggtgcccagaagatgctgtgtacctggacagcgagccccagaggcaggagtatgtgatgaatgactatggcttcatctaccagggcagcaagaactggatccggccctgcccctggaactacggccagtttgaggacaagatcatcgacatctgcctgaagctgctggacaagagcctgcacttccagacagatcctgccacagactgtgccctgcggggcagccctgtgtatgtgtcccgggtggtgtgtgccatgatcaacagcaatgatgacaacggggtgctgaatggaaactggagcgagaactacacagatggagccaacccagctgagtggacaggctctgtggccatcctgaagcagtggaatgccaccggctgccagcctgtgcgctatggccagtgctgggtgtttgctgctgtgatgtgcaccgtgatgcgctgcctgggcatccccaccagggtcatcaccaactttgattctggccatgacacagatggcaacctgatcattgatgagtactatgacaacacaggccgcatcctgggcaacaagaagaaggacaccatctggaacttccacgtgtggaatgaatgctggatggccaggaaggacctgcccccagcctacggcggctggcaggtgctggatgccaccccccaggagatgagcaatggagtgtactgctgcggccctgcctctgtgcgggccatcaaggagggggaggtggacctgaactatgacaccccatttgtgttctccatggtgaatgctgactgcatgtcctggctggtgcagggcggcaaggagcagaagctgcaccaggacaccagctctgtgggcaacttcatcagcaccaagagcatccagagtgatgaaagagatgacatcacagagaactacaagtatgaggagggcagcctgcaggagcggcaggtgttcctgaaggccctgcagaagctgaaggcccgctccttccacggcagccagagaggagctgagctgcagcccagccggcccaccagcctgagccaggacagccccaggagcctgcacacccccagcctgcggcccagtgatgtggtgcaggtgtccctgaagttcaagctgctggacccccccaacatgggccaggacatctgctttgtgctgctggccctgaacatgagcagccagttcaaggacctgaaggtgaacctgagcgcccagagcctgctgcatgatggcagccccctgagccccttctggcaggacacagccttcatcaccctgagccccaaggaggccaagacctacccctgcaagatctcctacagccagtacagccagtacctgagcacagacaagctgatccgcatcagcgccctgggggaggagaagagcagccctgagaagatcctggtgaacaagatcatcaccctgagctaccccagcatcaccatcaacgtgctgggcgctgctgtggtgaaccagcccctgagcatccaggtgatcttcagcaaccccctgtctgagcaggtggaggactgtgtgctgactgtggagggcagcggcctcttcaagaagcagcagaaggtgttcctgggcgtgctgaagccccagcaccaggccagcatcatcctggagaccgtgcccttcaagagcggccagaggcagatccaggccaacatgaggagcaacaagttcaaggacatcaagggctacagaaatgtgtatgtggactttgccctgtag

SEQ ID NO: 262584 - DNA, 2163 bp, Artificial Sequence
  derived and/or modified sequence
atggcccagggcctggaggtggccctgaccgacctgcagagcagcagaaacaatgtgcgccatcacaccgaggaaataacggtggatcatctgttagtgaggagaggccaggctttcaatttgaccctgtatttccgaaatagaagtttccagccaggtctcgacaacatcatattcgtggtcgagactggaccactgcctgatctggcgctgggtactagagccgtcttttctctagcaagacaccattccccgtctccctggattgcctggctggaaacgaatggagccacaagcacggaagtcagcctctgcgcgcccccaaccgctgcagtcgggcggtatctccttaagatccacattgattcatttcaagggagtgtcactgcataccagctgggggagttcattctgctattcaatccatggtgccctgaagacgcagtttaccttgacagtgaaccacagagacaagagtacgtgatgaatgactacggtttcatttaccagggatccaaaaactggatcaggccatgtccatggaattatggtcagtttgaggacaaaatcattgacatttgtcttaagttgcttgataaaagcctgcattttcagacggatccagccacagactgtgccctaagggggtctcccgtctacgtgagtagggttgtgtgtgccatgattaactctaacgacgacaatggggtgctaaatggtaactggtcagaaaactacaccgatggcgccaatcccgccgagtggaccggatccgttgctatcctcaaacaatggaatgcgactgggtgtcagccggtgcgctacgggcagtgttgggtattcgccgcagtaatgtgtaccgtaatgagatgtcttggcattccgactagagtgattaccaacttcgactcaggccacgacactgacggcaaccttatcatcgatgagtactacgacaatacaggacgcatcctgggaaataaaaaaaaggataccatttggaatttccatgtctggaacgaatgttggatggctaggaaggacttgcctcctgcctatgggggttggcaggtgctggatgccacacctcaagaaatgagtaacggcgtctattgttgtggtccggccagcgttcgcgccataaaagagggcgaagtggacctgaactatgatacaccttttgtgttcagcatggtgaatgcagactgcatgagctggctggtacaggggggaaaagaacagaagctgcaccaggatacctcctcagtgggtaactttatctcgacaaaatcaatccagagtgatgaacgcgacgacataacagagaattataaatacgaggagggttccttgcaggaacgccaggtgtttctgaaggctctgcaaaaacttaaggcaagatcctttcatggttctcaacgcggcgcagagctgcagcccagccgtcctaccagcctctcacaagacagtccgagatccttgcacaccccaagtcttagacctagcgatgtcgtgcaagtgagtctcaagttcaagttactcgatcctccaaatatgggacaagatatttgtttcgtgctgctagctctcaacatgtcatcgcagttcaaggatctgaaggtgaatctgtcagcacagagcttgctgcacgatggttcaccactgagtccattctggcaggacacggccttcataactttgagccccaaagaggctaagacctacccctgtaaaatatcttattctcagtactcccagtacttaagcaccgacaagctgatcagaatttccgccttgggcgaagagaaatcttcacctgaaaagatcctggttaacaaaattataaccctctcttatccttccatcaccatcaacgtgctgggcgccgccgtcgtcaaccagccactgagcatccaggtgatttttagcaaccccctgagtgaacaggtcgaggactgtgtccttacagtggaaggaagcgggctgttcaaaaagcagcagaaagtgtttctgggcgtgctgaaaccccagcaccaggcatccatcattttggaaacagtgccttttaagtctgggcaacgacaaattcaggccaacatgagatccaacaaattcaaggatatcaaaggctaccggaacgtatacgtcgactttgcactgtag

SEQ ID NO: 262585 - DNA, 2160 bp, Artificial Sequence
  derived and/or modified sequence
gcccagggcctggaggtggccctgaccgacctgcagagcagccggaataacgttcggcatcataccgaggaaattaccgtggaccaccttctggtacggcgagggcaggcatttaacttaaccttatacttccgtaaccgctcttttcagccaggcctcgataatatcatcttcgtcgtggaaacaggaccactcccagatctcgccctgggcacccgggccgtgttctctctggcgcggcaccactccccatcaccttggattgcctggctggagaccaacggagctactagcaccgaggtatcactgtgtgctccaccgactgctgccgtgggacggtatctcttgaagattcatatcgattcattccagggatccgtcactgcctaccaactgggcgagttcattctgctattcaacccttggtgcccagaggatgctgtttatttggacagcgagccgcagcggcaggagtacgttatgaacgattacgggtttatctaccaagggagtaagaactggatccggccctgcccctggaactatgggcagtttgaggataaaattattgatatttgccttaaattgctggataagagtctgcactttcagactgatccagcgaccgactgtgcacttcgcggcagccctgtttatgtctcccgcgtggtgtgtgcaatgataaactctaacgacgataatggcgtcttgaacggcaattggtccgagaattatactgatggcgccaaccctgcagagtggactggcagcgtggcaattctgaagcagtggaacgctactggatgccagccagtgagatatgggcaatgctgggtattcgccgctgtaatgtgcaccgtcatgagatgcctcgggatccctactcgggttatcaccaattttgattccggacatgacaccgacggaaacctgatcatcgatgaatactacgacaacactgggagaatcctgggcaataagaaaaaggatactatctggaatttccacgtatggaacgagtgctggatggctaggaaggatttgccgccagcttatgggggttggcaggtgttagacgctactccacaagagatgtcgaacggcgtatattgctgtgggccagcttccgtgcgcgcgataaaggaaggcgaggtcgacctgaattatgataccccgtttgtgttcagtatggtgaatgcggattgtatgagctggttagtacagggaggcaaggagcagaaactccatcaggacaccagcagtgtgggaaacttcatcagcacaaagagcattcagagtgacgagcgggacgacattaccgagaactataagtacgaggagggttccctacaggaaagacaagtcttcttaaaagccctacaaaagctcaaagcgaggagtttccatggctcgcagcggggcgccgaacttcaaccaagcagacctacctccctctcgcaagattcaccccgctccctgcataccccgagcttacggccaagcgacgtagtgcaggtgtcgctcaaattcaagttgctcgacccacccaatatgggacaggacatctgcttcgttctgttagcactaaatatgtcatctcagttcaaggacctgaaggttaacctgtctgcccaatcattgctacatgacggtagccctctctcccctttttggcaggacacagcgtttataacactgtcccccaaggaggcaaaaacgtacccttgtaaaatttcttactcccagtacagccaatacctgtctactgacaaattgataaggatctctgccttaggagaggagaaatcctcaccggaaaaaatccttgttaacaagattatcactttgtcatatccctctataacaatcaacgtgctgggagctgccgttgttaaccagcccctttccattcaggttatcttttctaatccccttagcgaacaggtggaagattgtgtgctgaccgtcgaggggagcggcctgtttaaaaaacaacagaaggtgtttcttggcgtcctgaaaccacagcatcaggcgtccattatactggagacggtaccttttaaatccgggcaacgccagatccaagccaatatgcgatcgaacaaattcaaagacattaagggctatcggaacgtgtatgtggattttgctctttag

SEQ ID NO: 262586 - DNA, 2163 bp, Artificial Sequence
  derived and/or modified sequence
atggctcagggcctggaggtggcacttactgacctgcaatctagccgcaacaacgtgcgccatcacacagaggaaataacagtggaccacttactggttcggaggggacaagcgttcaacttgaccctatatttccggaataggtccttccagcccggtctggataacatcattttcgtggtggagactggcccactacctgacctggcattgggcacaagagccgtcttcagcctggctagacatcacagtccaagtccgtggatcgcgtggctggaaactaacggtgccacctctacagaagtttctctgtgtgcccctcctacggcagccgtgggacggtacctcctgaagatccatatcgattcgttccagggttcagtgaccgcttaccagttaggagagttcatactgttgttcaatccctggtgcccagaggatgctgtttatctggactccgagccgcagcgccaggaatacgttatgaatgactacggtttcatttatcaaggctctaaaaactggataaggccgtgcccttggaattacggtcagttcgaggataaaatcatcgatatctgtctaaagttgctcgacaagtcgctccacttccagaccgaccctgcaactgattgcgccttacggggtagtcccgtctatgtgtctagagtcgtatgcgccatgatcaattcgaatgacgacaacggagtgctgaacggcaattggagtgaaaattatacagatggggctaacccggcagagtggaccggctcggttgccattctcaagcaatggaacgccacaggttgccagccagtgcgttacgggcaatgttgggttttcgcagccgtgatgtgtaccgtcatgcgctgtttagggatccccacccgcgtaataactaacttcgacagcggccacgataccgatggcaacctgatcatcgacgagtattatgacaacacgggcaggatcctgggcaacaagaaaaaggacaccatatggaatttccacgtttggaacgagtgttggatggctcgcaaggacctgccaccagcttacgggggatggcaggttctggacgccactccccaggagatgagtaatggggtgtactgctgtggccctgcctcagtgagggccattaaagagggcgaggtcgacctgaactatgacacaccattcgtcttctcaatggttaatgcagattgcatgtcttggttggtccagggcggaaaagaacagaagctccatcaagacacttcatcagttgggaattttataagtactaaatcaattcagagtgatgaaagagatgacattaccgagaactacaagtacgaggaaggctcactgcaggagagacaggtgttcctcaaagctctccagaaattaaaagcacggtccttccacgggtcccagagaggagcagagctgcaaccaagcaggcccaccagtctctcacaggatagcccaagatccttgcatacaccatcactcaggccaagtgacgttgttcaagtctctctgaagtttaaactcttagaccccccaaacatgggacaggatatctgcttcgtgctcctggccctgaatatgagtagccaatttaaggacctcaaggtgaatctgagtgcacagagtttactacatgatggctctcccttgtcacctttttggcaagatactgctttcatcactttatcacctaaagaggccaagacatacccatgcaaaattagctatagccagtatagccagtacctctcgaccgacaaacttatacggatttctgcattgggtgaggagaagagcagccccgaaaagattctggtgaacaagattatcaccctctcctacccctcaattactatcaacgttcttggagcagctgttgtcaaccagcccttgagcatccaggttatcttcagtaacccactgtctgaacaggttgaggattgtgtgctgacagtagaagggtctggcctctttaagaagcagcagaaggttttcctgggcgttcttaagcctcagcatcaggcatcaatcattctcgagaccgtgcccttcaaatctggccagagacagatccaggccaatatgaggtccaataaattcaaggacatcaagggttatcggaatgtctatgttgacttcgcactttag

SEQ ID NO: 262587 - DNA, 2160 bp, Artificial Sequence
  derived and/or modified sequence
gcacagggactcgaagtggccctgacagacctgcagtccagtcggaacaacgtgcgccatcataccgaggagatcaccgtagaccatctcctggtccgcagagggcaggcttttaacctaaccctttacttccgaaataggtctttccaaccaggcttagataacatcatctttgtagtggagaccggtccgctgcccgatctggcgctgggtacgcgcgctgtcttttccctggcccgacaccactcacccagcccatggatagcgtggttagagacaaacggtgcgacaagtactgaggtttcactgtgcgccccacctactgcagccgttggaaggtacttgctcaagattcacatcgacagcttccagggctctgtcacagcctaccaactcggagaattcattttattgtttaacccctggtgccctgaggacgcagtgtaccttgactccgaaccacagagacaggagtacgttatgaatgactacggctttatctaccagggcagcaagaactggatcagaccgtgtccatggaactatgggcagtttgaggataaaattattgatatctgcctcaaactcctggataaaagcctgcacttccagacagaccctgcaactgattgcgctctccgtggcagccctgtgtacgtaagtcgcgtcgtatgcgccatgatcaactctaacgacgataatggggttctaaacggcaactggagcgagaactacacggatggcgctaatccagcagaatggaccggatcagtggctatcctgaaacaatggaacgccactggatgccagccagttcgatatgggcagtgctgggtgtttgcggcagtgatgtgtacagttatgcggtgtttgggtataccaacacgtgtcatcaccaacttcgattcaggccacgataccgacggaaatctgatcatcgacgaatactatgacaataccggcagaattttaggtaacaaaaaaaaggatacaatttggaactttcacgtctggaacgaatgctggatggccaggaaggatctgccaccagcatatggtggttggcaggtactggatgcgacgcctcaggagatgagtaatggagtctattgctgcggtcctgcctctgtgagggccattaaggagggggaggtggatctgaattatgatactccgttcgttttctcaatggtcaacgcggattgcatgtcctggctggtgcagggtggcaaggaacagaaactgcaccaggacacctccagtgtgggtaatttcatcagtaccaagtcaattcagagcgacgagcgggatgacataactgagaattacaaatacgaagagggttctttgcaagagaggcaggtatttctgaaggccctgcagaagttgaaagctcgcagttttcatgggtctcagcgcggtgccgaactgcagccttctaggccgacgtctttgagtcaagatagtcccagaagcttgcatactccatccctgcgacccagcgacgtagtccaggtgtctctgaagttcaaactgttggatccacccaatatgggacaggacatatgctttgtgcttttggcactcaatatgagtagtcaatttaaggatctaaaagtgaatctctctgcacagtccctgctacatgatggtagccccctgtctccattttggcaagatactgccttcataacactcagtcctaaggaggcaaagacttatccttgtaaaatctcctacagccagtacagtcaatacctttcaactgacaaactcattcggattagcgctctgggcgaagagaagtccagtcctgagaagatcctcgtcaataagatcattacattgagctaccctagcataacgataaacgtattgggagccgcagtcgtcaaccagcccctctctattcaggttatattcagcaacccactcagtgagcaggtcgaggactgtgttctgaccgtggaagggtcggggctgtttaagaaacaacaaaaagtctttctaggggtgctcaagccgcaacaccaggcgtccataatcttggaaactgtgccatttaagtccggccagcggcaaattcaagccaacatgcgcagcaacaagtttaaagacatcaaagggtatcgtaatgtttacgtcgacttcgctctgtag

SEQ ID NO: 262588 - DNA, 2767 bp, Artificial Sequence
  derived and/or modified sequence
cagctaccatggcccaagggctagaagtggccctcacagacctccagagctccagaaataatgtgcggcaccacacggaggagatcactgtggaccacctgcttgttcgccggggccaggccttcaacctcaccctgtacttcaggaaccggagcttccagccaggcctggacaacatcatcttcgtggttgaaactggaccgctgccagacctggccttggggactcgggctgtgttcagcctggcacgccatcacagccccagcccctggattgcctggctggagaccaatggggccacctccacagaggtgagcttgtgcgctcctcccacggcggccgtgggtcggtacctcttgaaaatccacatcgactccttccaggggtctgtgacggcctaccagctaggggagttcatcctgcttttcaatccctggtgcccagaggatgctgtctacttggacagtgaaccccagaggcaggagtatgtcatgaatgattatggcttcatctaccaaggcagcaagaactggatccgcccatgtccctggaactatggacagtttgaagacaaaatcatagacatctgcctgaagctgctagacaagagcctgcacttccagactgacccagccacagactgtgctctgcggggaagccccgtctacgtcagcagagtggtgtgtgccatgatcaacagcaatgatgataatggggtgctcaatggaaactggagtgagaattacacagacggcgccaaccctgcggagtggacgggcagcgtggccatcctgaagcagtggaacgccacaggctgccagcccgtgcgctacgggcaatgctgggtctttgctgccgtcatgtgcacagtgatgaggtgtctggggatccctacccgtgtgatcaccaacttcgactctggccacgatacagatggaaacctgatcatagatgagtattatgacaacacaggcaggattttggggaataagaagaaggatactatctggaacttccatgtctggaatgagtgctggatggcccggaaggatctgccccctgcatatggaggctggcaggtgctggacgccacacctcaggagatgagcaacggcgtctactgctgtggccctgcctctgtcagagccatcaaagaaggagaagtggacctgaactatgacacgccctttgtgttttcgatggtgaatgctgactgcatgtcctggctcgtccagggagggaaggagcagaagcttcaccaggacacgagttctgttggcaattttatcagcacaaagagcatccagagtgacgagcgggatgacatcacagagaactacaagtatgaagaaggatccctccaggagaggcaggtgtttctgaaggctctgcagaagctgaaggctagaagcttccatggctcccaaagaggagcagagttgcaaccttccaggcccacatcactgagccaggacagccctcggagcctgcatacaccttcccttcgacccagtgatgtggtgcaagtctccctgaaattcaagctgctcgacccgcccaacatgggccaggatatatgctttgtcctgctggccctcaacatgtcctcccagttcaaggacctcaaagtgaacctgagtgcccagtctctgctgcacgatggcagccccctgtccccattctggcaggacacagcgttcatcacactctctcctaaagaagcaaagacctacccctgcaaaatctcctattcccagtacagccagtacctgtcaacagacaagctgatccgcatcagtgccctgggtgaagagaaaagcagtcctgagaaaatcctggtgaacaagatcatcaccttatcttatccaagcatcacgattaatgttctaggagcagccgttgtgaaccagccactctccatacaggtgatattttcaaaccccctctcggagcaggttgaggactgtgtgctgactgtggaaggaagtggcctcttcaagaaacagcagaaagtcttccttggagtcctcaaaccccaacaccaagcaagcatcattctggagaccgtccccttcaagagtggacaaaggcagatccaagctaatatgagaagcaacaagtttaaggacattaagggttacaggaatgtttatgtagactttgcattataaattctggaacaacgcgccagacgtgtgaatttcaagcttcaggaaaaggagcaagttcaaatgcaagctgcgccattccccaccacaacagaggcttcacagggctccagcaagagccacagaggggatgacgtgttcattttctgtctctcctgactccactagaaatttaagctccatgagggcaaagactttgctttgtttactacccctatactcagaaccatttctggcatatgctaggcactcaacaaatattttttgaatgaatgaataggagactccagcatccagagaacaggtaggaaatgtctatggatggatatttccctggaccatttgcacagctcccctggactcttttcagggcccagggattccactgtgtcccatccagagattccaggattccagtctcctatccagaagcgtgatttggcacagaggtcagaggatactggtaggacttggccatgacttaactgccccctgccccagatatccaggaaagaaaaagacaggctgaacagctcactgttgttttgttgttgcgaaagctaattccctagtatgaataaacttcagaccttgctctc

SEQ ID NO: 262589 - DNA, 2756 bp, Artificial Sequence
  derived and/or modified sequence
gctcaagggctagaagtggccctcacagacctccagagctccagaaataatgtgcggcaccacacggaggagatcactgtggaccacctgcttgttcgccggggccaggccttcaacctcaccctgtacttcaggaaccggagcttccagccaggcctggacaacatcatcttcgtggttgaaactggaccgctgccagacctggccttggggactcgggctgtgttcagcctggcacgccatcacagccccagcccctggattgcctggctggagaccaatggggccacctccacagaggtgagcttgtgcgctcctcccacggcggccgtgggtcggtacctcttgaaaatccacatcgactccttccaggggtctgtgacggcctaccagctaggggagttcatcctgcttttcaatccctggtgcccagaggatgctgtctacttggacagtgaaccccagaggcaggagtatgtcatgaatgattatggcttcatctaccaaggcagcaagaactggatccgcccatgtccctggaactatggacagtttgaagacaaaatcatagacatctgcctgaagctgctagacaagagcctgcacttccagactgacccagccacagactgtgctctgcggggaagccccgtctacgtcagcagagtggtgtgtgccatgatcaacagcaatgatgataatggggtgctcaatggaaactggagtgagaattacacagacggcgccaaccctgcggagtggacgggcagcgtggccatcctgaagcagtggaacgccacaggctgccagcccgtgcgctacgggcaatgctgggtctttgctgccgtcatgtgcacagtgatgaggtgtctggggatccctacccgtgtgatcaccaacttcgactctggccacgatacagatggaaacctgatcatagatgagtattatgacaacacaggcaggattttggggaataagaagaaggatactatctggaacttccatgtctggaatgagtgctggatggcccggaaggatctgccccctgcatatggaggctggcaggtgctggacgccacacctcaggagatgagcaacggcgtctactgctgtggccctgcctctgtcagagccatcaaagaaggagaagtggacctgaactatgacacgccctttgtgttttcgatggtgaatgctgactgcatgtcctggctcgtccagggagggaaggagcagaagcttcaccaggacacgagttctgttggcaattttatcagcacaaagagcatccagagtgacgagcgggatgacatcacagagaactacaagtatgaagaaggatccctccaggagaggcaggtgtttctgaaggctctgcagaagctgaaggctagaagcttccatggctcccaaagaggagcagagttgcaaccttccaggcccacatcactgagccaggacagccctcggagcctgcatacaccttcccttcgacccagtgatgtggtgcaagtctccctgaaattcaagctgctcgacccgcccaacatgggccaggatatatgctttgtcctgctggccctcaacatgtcctcccagttcaaggacctcaaagtgaacctgagtgcccagtctctgctgcacgatggcagccccctgtccccattctggcaggacacagcgttcatcacactctctcctaaagaagcaaagacctacccctgcaaaatctcctattcccagtacagccagtacctgtcaacagacaagctgatccgcatcagtgccctgggtgaagagaaaagcagtcctgagaaaatcctggtgaacaagatcatcaccttatcttatccaagcatcacgattaatgttctaggagcagccgttgtgaaccagccactctccatacaggtgatattttcaaaccccctctcggagcaggttgaggactgtgtgctgactgtggaaggaagtggcctcttcaagaaacagcagaaagtcttccttggagtcctcaaaccccaacaccaagcaagcatcattctggagaccgtccccttcaagagtggacaaaggcagatccaagctaatatgagaagcaacaagtttaaggacattaagggttacaggaatgtttatgtagactttgcattataaattctggaacaacgcgccagacgtgtgaatttcaagcttcaggaaaaggagcaagttcaaatgcaagctgcgccattccccaccacaacagaggcttcacagggctccagcaagagccacagaggggatgacgtgttcattttctgtctctcctgactccactagaaatttaagctccatgagggcaaagactttgctttgtttactacccctatactcagaaccatttctggcatatgctaggcactcaacaaatattttttgaatgaatgaataggagactccagcatccagagaacaggtaggaaatgtctatggatggatatttccctggaccatttgcacagctcccctggactcttttcagggcccagggattccactgtgtcccatccagagattccaggattccagtctcctatccagaagcgtgatttggcacagaggtcagaggatactggtaggacttggccatgacttaactgccccctgccccagatatccaggaaagaaaaagacaggctgaacagctcactgttgttttgttgttgcgaaagctaattccctagtatgaataaacttcagaccttgctctc

SEQ ID NO: 262590 - DNA, 2163 bp, Artificial Sequence
  derived and/or modified sequence
atggcccagggcctggaggtggccctgaccgacctgcagagcagcagaaacaacgtgagacaccacaccgaggagatcaccgtggaccacctgctggtgagaagaggccaggccttcaacctgaccctgtacttcagaaacagaagcttccagcccggcctggacaacatcatcttcgtggtggagaccggccccctgcccgacctggccctgggcaccagagccgtgttcagcctggccagacaccacagccccagcccctggatcgcctggctggagaccaacggcgccaccagcaccgaggtgagcctgtgcgccccccccaccgccgccgtgggcagatacctgctgaagatccacatcgacagcttccagggcagcgtgaccgcctaccagctgggcgagttcatcctgctgttcaacccctggtgccccgaggacgccgtgtacctggacagcgagccccagagacaggagtacgtgatgaacgactacggcttcatctaccagggcagcaagaactggatcagaccctgcccctggaactacggccagttcgaggacaagatcatcgacatctgcctgaagctgctggacaagagcctgcacttccagaccgaccccgccaccgactgcgccctgagaggcagccccgtgtacgtgagcagagtggtgtgcgccatgatcaacagcaacgacgacaacggcgtgctgaacggcaactggagcgagaactacaccgacggcgccaaccccgccgagtggaccggcagcgtggccatcctgaagcagtggaacgccaccggctgccagcccgtgagatacggccagtgctgggtgttcgccgccgtgatgtgcaccgtgatgagatgcctgggcatccccaccagagtgatcaccaacttcgacagcggccacgacaccgacggcaacctgatcatcgacgagtactacgacaacaccggcagaatcctgggcaacaagaagaaggacaccatctggaacttccacgtgtggaacgagtgctggatggccagaaaggacctgccccccgcctacggcggctggcaggtgctggacgccaccccccaggagatgagcaacggcgtgtactgctgcggccccgccagcgtgagagccatcaaggagggcgaggtggacctgaactacgacacccccttcgtgttcagcatggtgaacgccgactgcatgagctggctggtgcagggcggcaaggagcagaagctgcaccaggacaccagcagcgtgggcaacttcatcagcaccaagagcatccagagcgacgagagagacgacatcaccgagaactacaagtacgaggagggcagcctgcaggagagacaggtgttcctgaaggccctgcagaagctgaaggccagaagcttccacggcagccagagaggcgccgagctgcagcccagcagacccaccagcctgagccaggacagccccagaagcctgcacacccccagcctgagacccagcgacgtggtgcaggtgagcctgaagttcaagctgctggacccccccaacatgggccaggacatctgcttcgtgctgctggccctgaacatgagcagccagttcaaggacctgaaggtgaacctgagcgcccagagcctgctgcacgacggcagccccctgagccccttctggcaggacaccgccttcatcaccctgagccccaaggaggccaagacctacccctgcaagatcagctacagccagtacagccagtacctgagcaccgacaagctgatcagaatcagcgccctgggcgaggagaagagcagccccgagaagatcctggtgaacaagatcatcaccctgagctaccccagcatcaccatcaacgtgctgggcgccgccgtggtgaaccagcccctgagcatccaggtgatcttcagcaaccccctgagcgagcaggtggaggactgcgtgctgaccgtggagggcagcggcctgttcaagaagcagcagaaggtgttcctgggcgtgctgaagccccagcaccaggccagcatcatcctggagaccgtgcccttcaagagcggccagagacagatccaggccaacatgagaagcaacaagttcaaggacatcaagggctacagaaacgtgtacgtggacttcgccctgtag

SEQ ID NO: 262591 - DNA, 807 bp, Artificial Sequence
  derived and/or modified sequence
atgtacaaggaaactgtgtacagcgcctttaacttgcttatgcattaccctcccccctcgggggcgggccagcatccacagccccagcccccactgcataaagcaaaccaaccccctcatggcgtccctcagttaagtctgtatgaacatttcaacagcccccatccaactccagcacccgcagacatttcccagaagcaggtgcaccggcccctgcagaccccagatctgagcgggttctacagtttaacttctgggagcatggggcagctgccgcacactgtgtcctggttcactcatccctccctgatgctgggctcgggcgtcccaggccacccagccgcaatcccacaccccgcaatcgtccccccttccgggaagcaggagctgcagccatttgatagaaatttgaagactcaggccgagtccaaggccgagaaagaggccaagaagccgaccatcaagaaacccttaaacgcttttatgctctatatgaaggaaatgcgagccaaagtgatagctgaatgtaccctgaaggagagcgccgccattaatcagatactaggccggcggtggcacgccctgtccagagaggagcaagccaagtactacgagctggcccgcaaagagagacagttacatatgcagctttatcctggttggagcgcacgcgacaactatggaaagaagaagcggcgctcccgggaaaaacaccaagagagcactacggatcccggtagcccaaagaagtgtcgagcccgtttcggactgaaccagcaaactgactggtgtggaccatgtcggtag

SEQ ID NO: 262592 - DNA, 1101 bp, Artificial Sequence
  derived and/or modified sequence
atgtataaagagacagtttactccgccttcaacctgctaatgcattaccccccgcctagtggagccggccagcacccgcaaccccagccgcccctgcataaagccaaccagcctccacatggggtcccgcagctttcactgtatgagcacttcaactctccacatcctacacccgcccctgctgacatcagtcagaagcaggttcaccgcccgctgcaaacgccggacctgtccggcttttatagcctcacatccggttcgatgggacaacttccacataccgtgtcatggttcactcatcctagcttgatgttggggagcggcgtgcctggacatcccgcagcaatcccgcatcctgctatcgtgcccccaagcgggaaacaggagctgcagccatttgacagaaacctgaaaacacaagccgaatcgaaagccgagaaggaggctaagaagcccacgataaaaaagcctctgaatgccttcatgttatacatgaaagagatgcgcgctaaggttattgccgagtgtacgctcaaggagtcagccgcaatcaatcagatattgggccggagatggcatgccttaagccgtgaggagcaggctaagtactatgagctcgcccgaaaagagcgccagttgcacatgcagctctacccgggatggagtgccagggacaactatggtaaaaagaagcgccgcagccgcgaaaaacatcaagagagtacaactgatcctggctccccaaagaagtgtagagcaaggtttggattaaaccaacagaccgattggtgcggaccatgcaggcgcaagaagaagtgcattcgctatcttcccggtgagggtcggtgcccaagccccgttccttcggacgactcagcgcttggatgtcccggaagcccagctccccaagatagcccctcgtatcacctcctgccaaggtttccaacggagctgctcacctcacccgcagagcccgctcctacttctcctggactgagcaccgctctgagtttgccaacgccggggccaccgcaggctcctagatctacactgcaatctacacaggtgcaacagcaggagagccagcggcaggtggcttag

SEQ ID NO: 262593 - DNA, 372 bp, Artificial Sequence
  derived and/or modified sequence
atgtataaggagactgtgtacagtgcgtttaatcttcttatgcattatcctcctccctccggggctggtcagcacccacagccgcagcctccacttcacaaagcgaaccaaccaccgcatggagtgccccagctgtcattgtacgagcacttcaatagtcctcatcccacaccagctcctgccgacatctcccagaagcaggtacaccgccccctacaaactcctgatcttagtggcttttacagtctgactagcggctcaatgggacaacttcctcacaccgttagctggttcacacacccatcactcatgctgggtagcggggtgcctggacacccagccgcgatcccacatccggccatcgtgccttag

SEQ ID NO: 262594 - DNA, 444 bp, Artificial Sequence
  derived and/or modified sequence
atgtacaaggagaccgtctactctgcttttaacctgcttatgcattacccaccgcctagcggcgccggacagcatccccagccccagccaccacttcacaaagccaatcagcctccacacggtgttccacagctgtccttgtatgagcactttaatagccctcatccaacacctgcgccagctgatatctcccagaaacaggtacatagaccattacagacacctgacctatccggattttacagccttacaagcggcagcatgggacagctgccacatactgtgtcttggtttacacatccaagccttatgcttgggtccggggtgccaggacaccccgcagcaataccacaccctgccattgtgccaccctctggaaagcaggaactccagccgttcgaccgcaacctgaaaactcaagccgagtcaaaggctgagaaatag

SEQ ID NO: 262595 - DNA, 807 bp, Artificial Sequence
  derived and/or modified sequence
atgtacaaggagaccgtgtacagcgccttcaacctgctgatgcactaccccccacccagcggggccggccagcacccccagccccagccccccctgcacaaggccaaccagcccccccacggcgtgccccagctgagcctgtatgagcacttcaacagcccccaccccaccccagccccagctgacatcagccagaagcaggtgcaccggcccctgcagaccccagacctgagcggcttctacagcctgaccagcggctccatgggccagctgccccacacagtgtcctggttcacccaccccagcctgatgctgggcagcggcgtgcccggccaccctgctgccatcccccacccagccatcgtgcccccatctgggaagcaggagctgcagccctttgacaggaacctgaagacccaggccgagagcaaggccgagaaggaggccaagaagcccaccatcaagaagcccctgaatgccttcatgctgtacatgaaggagatgagggccaaggtgattgctgaatgtaccctgaaggagagcgctgccatcaaccagatcctgggccgccgctggcacgccctgagccgggaggagcaggccaagtactatgagctggccaggaaggagcggcagctgcacatgcagctgtacccaggctggagcgcccgggacaactacggcaagaagaagaggaggagccgggagaagcaccaggagagcaccacagatcctggcagccccaagaagtgccgggccaggtttggcctgaaccagcagacagactggtgtggcccctgcaggtag

SEQ ID NO: 262596 - DNA, 1101 bp, Artificial Sequence
  derived and/or modified sequence
atgtacaaggagaccgtgtacagcgccttcaacctgctgatgcactaccccccacccagcggggccggccagcacccccagccccagccccccctgcacaaggccaaccagcccccccacggcgtgccccagctgagcctgtatgagcacttcaacagcccccaccccaccccagccccagctgacatcagccagaagcaggtgcaccggcccctgcagaccccagacctgagcggcttctacagcctgaccagcggctccatgggccagctgccccacacagtgtcctggttcacccaccccagcctgatgctgggcagcggcgtgcccggccaccctgctgccatcccccacccagccatcgtgcccccatctgggaagcaggagctgcagccctttgacaggaacctgaagacccaggccgagagcaaggccgagaaggaggccaagaagcccaccatcaagaagcccctgaatgccttcatgctgtacatgaaggagatgagggccaaggtgattgctgaatgtaccctgaaggagagcgctgccatcaaccagatcctgggccgccgctggcacgccctgagccgggaggagcaggccaagtactatgagctggccaggaaggagcggcagctgcacatgcagctgtacccaggctggagcgcccgggacaactacggcaagaagaagaggaggagccgggagaagcaccaggagagcaccacagatcctggcagccccaagaagtgccgggccaggtttggcctgaaccagcagacagactggtgtggcccctgcaggaggaagaagaagtgcatccgctacctgcccggggagggccgctgccccagccctgtgcccagtgatgacagcgccctgggctgccccggcagccctgccccccaggacagccccagctaccacctgctgccccgcttccccacagagctgctgaccagccctgctgagcccgcccccaccagccctggcctgagcacagccctgagcctgcccaccccaggccccccccaggcccccaggagcaccctgcagagcacccaggtgcagcagcaggagagccagaggcaggtggcctag

SEQ ID NO: 262597 - DNA, 372 bp, Artificial Sequence
  derived and/or modified sequence
atgtacaaggagaccgtgtacagcgccttcaacctgctgatgcactaccccccacccagcggggccggccagcacccccagccccagccccccctgcacaaggccaaccagcccccccacggcgtgccccagctgagcctgtatgagcacttcaacagcccccaccccaccccagccccagctgacatcagccagaagcaggtgcaccggcccctgcagaccccagacctgagcggcttctacagcctgaccagcggctccatgggccagctgccccacacagtgtcctggttcacccaccccagcctgatgctgggcagcggcgtgcccggccaccctgctgccatcccccacccagccatcgtgccctag

SEQ ID NO: 262598 - DNA, 444 bp, Artificial Sequence
  derived and/or modified sequence
atgtacaaggagaccgtgtacagcgccttcaacctgctgatgcactaccccccacccagcggggccggccagcacccccagccccagccccccctgcacaaggccaaccagcccccccacggcgtgccccagctgagcctgtatgagcacttcaacagcccccaccccaccccagccccagctgacatcagccagaagcaggtgcaccggcccctgcagaccccagacctgagcggcttctacagcctgaccagcggctccatgggccagctgccccacacagtgtcctggttcacccaccccagcctgatgctgggcagcggcgtgcccggccaccctgctgccatcccccacccagccatcgtgcccccatctgggaagcaggagctgcagccctttgacaggaacctgaagacccaggccgagagcaaggccgagaagtag

SEQ ID NO: 262599 - DNA, 807 bp, Artificial Sequence
  derived and/or modified sequence
atgtacaaggagaccgtgtacagcgccttcaacctgctgatgcactatcccccaccatccggcgctggccagcaccctcagccccagccccccctccacaaggcaaaccagccccctcatggtgtgccccaactatcactctacgaacatttcaattcgccccatccgacacctgcccctgcagacatctctcaaaagcaggtgcacagaccgctgcagactcccgatctgtcaggattctactctttaacaagcgggtctatggggcagctgccgcacacagtctcttggttcacacacccttcactgatgctggggagcggcgtccctgggcacccggccgcaatacctcacccagcaatcgtgcccccctcaggaaaacaagagctgcagccattcgatcggaacctgaagacccaggccgagtcgaaagcagagaaggaggcaaagaagcccaccatcaaaaagccactgaacgcctttatgctgtatatgaaggagatgagagcaaaggtgatcgccgagtgtactctgaaggagtcagcggccattaatcagattctcggccgccgctggcatgcgctatcaagggaggaacaagccaaatattatgagctggcccggaaagaaaggcagttgcacatgcaactatatcctgggtggagcgcgagagataattatggcaaaaagaagcgacggtcacgggagaagcaccaggaaagtactacagaccctgggtccccaaaaaagtgcagagcacggttcggcctcaaccagcagactgattggtgcggcccttgccgctag

SEQ ID NO: 262600 - DNA, 1101 bp, Artificial Sequence
  derived and/or modified sequence
atgtacaaggagaccgtgtacagcgccttcaacctgctgatgcactatcccccaccctctggtgccgggcagcacccccaacctcaaccgccgctgcacaaggcaaatcagcccccccacggcgtgccccagcttagcttatacgaacattttaatagccctcatcccacacctgcaccagctgacatttctcaaaaacaggtgcaccgcccgcttcagaccccggatcttagcggattttactccttgacatctgggtccatgggtcagctcccacataccgtgtcctggtttacacatccgtctcttatgcttggtagcggtgtgccaggtcaccctgccgccattccccaccccgccattgttccaccatcgggtaagcaggaactgcaaccattcgatcgaaacctgaagacccaggccgaatccaaggcggagaaggaagctaaaaagcctaccattaaaaagccattgaatgcttttatgctctacatgaaggagatgcgcgccaaggtcattgccgaatgcaccctgaaagagtcagctgcaataaatcagatcctggggcgacggtggcacgccctgagcagggaggagcaggcgaaatactatgagttggccaggaaggaaaggcaattgcacatgcagctctaccccggatggtctgcacgagacaattatggcaagaaaaagcgcagaagccgggagaagcatcaggagtccacaaccgatcctggaagtccgaaaaaatgcagagcccggttcgggctgaatcagcagaccgactggtgtggcccatgccgacggaaaaagaaatgcatcaggtacctccccggggagggccggtgcccaagtccagtgcccagcgatgactccgctctgggctgtcccgggtccccagccccacaagacagcccatcttaccaccttctgccccgcttcccgactgagctgctgacatcccctgcagagcccgcacctacctcacccggcctgtccactgcattgtctctgcctacgcctgggcccccccaagcgccacggtcaacactgcagtcaactcaggtacagcagcaggaatctcagaggcaagttgcctag

SEQ ID NO: 262601 - DNA, 372 bp, Artificial Sequence
  derived and/or modified sequence
atgtacaaggagaccgtgtacagcgccttcaacctgctgatgcactacccgcccccttccggcgcaggccaacacccacagccccagccgcccttacacaaagctaaccagcctccccatggggtaccgcaactgtcgctctatgagcattttaattcaccccaccctacacccgcgcccgcagacattagccaaaagcaggtccataggccgctccagactcctgacctctctggcttctatagtctgacatccgggtctatggggcagttgccccatacggtttcttggtttactcatccatccctgatgctcggaagtggggttccaggccatccagctgcgatcccacacccagccattgtgccatag

SEQ ID NO: 262602 - DNA, 444 bp, Artificial Sequence
  derived and/or modified sequence
atgtacaaggagaccgtgtacagcgccttcaacctgctgatgcactaccctcctccttctggggccggacagcatcctcagcctcagcccccccttcacaaggccaatcagcccccccatggcgttccacagctgtccttgtacgaacactttaattctccccaccccacacccgcacctgccgacatctcgcaaaaacaggttcaccgacctctgcagactccagatctatccggattttatagtcttacctcagggagcatggggcagttaccacatacagtctcttggtttacgcatcctagccttatgctggggtccggtgttccaggccatcccgcggctattccacatcccgctattgtgcccccctcgggcaaacaggagcttcaaccatttgatagaaacctcaaaacccaggccgagagcaaagcagagaagtag

SEQ ID NO: 262603 - DNA, 807 bp, Artificial Sequence
  derived and/or modified sequence
atgtacaaggagacagtgtatagtgctttcaatctgctcatgcattaccccccaccatctggcgctggccaacatccacagccccagccccctctccataaagctaatcaacccccacatggggtgcctcagctctccctgtacgaacatttcaattccccacacccaacccccgctccagccgatatatcgcaaaaacaggtgcaccgaccactgcagacacctgacctcagcggattttactcccttaccagcggaagtatgggacagttacctcacacagtgtcctggttcactcacccatcactgatgttgggtagcggagtgcccggacatcccgctgctataccccacccagccatagtacctccaagcggaaaacaggaattgcagccctttgatcgaaatctaaagacgcaggcggaatccaaagctgagaaggaggctaaaaagcccacaatcaagaagcccctgaatgcatttatgctttacatgaaagaaatgcgggctaaagtgattgctgaatgcacactgaaggaaagtgctgcgattaaccagattctcggtcgcagatggcacgcactttcccgagaggaacaagctaaatactacgaactggcacgaaaggagaggcagttacatatgcagctttacccgggatggtctgccagggacaactacggcaagaaaaagaggcgcagtagggagaagcaccaggagtctaccacagatccaggatcccccaaaaagtgtcgcgcacgcttcgggctaaatcaacaaaccgattggtgtggaccatgtaggtag

SEQ ID NO: 262604 - DNA, 1101 bp, Artificial Sequence
  derived and/or modified sequence
atgtataaggaaacagtgtactccgcctttaacttgcttatgcattatccaccacccagtggagcaggacaacacccacagccacagcctccactgcataaggccaaccagcctccgcacggtgtaccgcagctctctttgtacgagcactttaatagccctcatcctacccccgcacccgcagacattagccagaagcaggtccaccgtcctctgcagacccccgacctaagtggcttctacagccttacctccggctccatggggcagttgcctcatactgtctcatggttcacgcacccatccctaatgttgggtagcggggtgccgggacaccccgctgccatcccccaccctgcgattgtaccgccttccggcaagcaggaattgcaacctttcgatagaaatctcaaaacccaggccgaatccaaggctgaaaaggaagccaagaaacccaccattaagaagcctctaaatgccttcatgctgtatatgaaagagatgagagccaaggtaattgctgagtgcacactcaaagagtccgccgctattaaccagatcttaggtcgtcgctggcacgccttgtcccgagaggagcaagcaaaatactacgagcttgcacgaaaggagcgtcagctgcacatgcagctttatcctggctggagcgctcgggacaactatggcaaaaaaaagcggcgaagtcgcgaaaaacaccaggagtcaacaaccgatcctggcagtccgaaaaaatgtagggctcggttcgggctgaatcagcagaccgactggtgcggcccatgcagaagaaagaagaagtgtatcaggtacctgcccggagagggcagatgtccgtcgccagtgcccagcgacgattcagcccttggatgtccgggatcccctgctcctcaggattctccaagctaccatttactgccaagattcccaaccgagctccttacgtctcctgccgaaccggcacctacctcccccggactgagtacagcactgtccctgccgaccccagggccacctcaggcgccacgaagcacactccagtcaactcaggtgcaacagcaagagagtcagcggcaggtcgcttag

SEQ ID NO: 262605 - DNA, 372 bp, Artificial Sequence
  derived and/or modified sequence
atgtataaagagaccgtatactctgcttttaatcttctgatgcactatcctcctccctccggcgctggccagcatcctcaacctcagccgcctctccacaaagcgaaccagccccctcatggcgttccgcagctgtccttatatgagcattttaactcaccgcacccaactccagccccagcagacatttcgcaaaagcaggtgcaccgacccctccagacccctgacctttcaggcttttatagcctcacaagtgggtccatgggccagctgccgcataccgtaagctggtttacacatcccagcctcatgttaggatcaggtgtgcccggtcaccccgcagccatccctcacccagcaattgtcccctag

SEQ ID NO: 262606 - DNA, 444 bp, Artificial Sequence
  derived and/or modified sequence
atgtacaaagagacagtttatagcgcatttaatttattgatgcactaccctcccccttccggtgccggtcagcaccctcagcctcaacccccactgcacaaggcgaatcagcctcctcatggcgtaccacagctctcactctatgagcatttcaacagcccccacccaactccggcacccgctgacattagccagaaacaagtccaccggccactccagactcccgatctgtcaggtttctattcgctcactagtggctccatgggccaacttcctcacaccgtgtcttggtttacacacccctctctgatgctcggctccggcgtgcccggacacccagcggctataccacatccagccatcgttccaccctcaggtaaacaggagctgcagcccttcgaccggaacctgaagactcaggctgagagcaaagccgagaagtag

SEQ ID NO: 262607 - DNA, 807 bp, Artificial Sequence
  derived and/or modified sequence
atgtacaaggagaccgtgtacagcgccttcaacctgctgatgcactaccccccccccagcggcgccggccagcacccccagccccagccccccctgcacaaggccaaccagcccccccacggcgtgccccagctgagcctgtacgagcacttcaacagcccccaccccacccccgcccccgccgacatcagccagaagcaggtgcacagacccctgcagacccccgacctgagcggcttctacagcctgaccagcggcagcatgggccagctgccccacaccgtgagctggttcacccaccccagcctgatgctgggcagcggcgtgcccggccaccccgccgccatcccccaccccgccatcgtgccccccagcggcaagcaggagctgcagcccttcgacagaaacctgaagacccaggccgagagcaaggccgagaaggaggccaagaagcccaccatcaagaagcccctgaacgccttcatgctgtacatgaaggagatgagagccaaggtgatcgccgagtgcaccctgaaggagagcgccgccatcaaccagatcctgggcagaagatggcacgccctgagcagagaggagcaggccaagtactacgagctggccagaaaggagagacagctgcacatgcagctgtaccccggctggagcgccagagacaactacggcaagaagaagagaagaagcagagagaagcaccaggagagcaccaccgaccccggcagccccaagaagtgcagagccagattcggcctgaaccagcagaccgactggtgcggcccctgcagatag

SEQ ID NO: 262608 - DNA, 1101 bp, Artificial Sequence
  derived and/or modified sequence
atgtacaaggagaccgtgtacagcgccttcaacctgctgatgcactaccccccccccagcggcgccggccagcacccccagccccagccccccctgcacaaggccaaccagcccccccacggcgtgccccagctgagcctgtacgagcacttcaacagcccccaccccacccccgcccccgccgacatcagccagaagcaggtgcacagacccctgcagacccccgacctgagcggcttctacagcctgaccagcggcagcatgggccagctgccccacaccgtgagctggttcacccaccccagcctgatgctgggcagcggcgtgcccggccaccccgccgccatcccccaccccgccatcgtgccccccagcggcaagcaggagctgcagcccttcgacagaaacctgaagacccaggccgagagcaaggccgagaaggaggccaagaagcccaccatcaagaagcccctgaacgccttcatgctgtacatgaaggagatgagagccaaggtgatcgccgagtgcaccctgaaggagagcgccgccatcaaccagatcctgggcagaagatggcacgccctgagcagagaggagcaggccaagtactacgagctggccagaaaggagagacagctgcacatgcagctgtaccccggctggagcgccagagacaactacggcaagaagaagagaagaagcagagagaagcaccaggagagcaccaccgaccccggcagccccaagaagtgcagagccagattcggcctgaaccagcagaccgactggtgcggcccctgcagaagaaagaagaagtgcatcagatacctgcccggcgagggcagatgccccagccccgtgcccagcgacgacagcgccctgggctgccccggcagccccgccccccaggacagccccagctaccacctgctgcccagattccccaccgagctgctgaccagccccgccgagcccgcccccaccagccccggcctgagcaccgccctgagcctgcccacccccggccccccccaggcccccagaagcaccctgcagagcacccaggtgcagcagcaggagagccagagacaggtggcctag

SEQ ID NO: 262609 - DNA, 372 bp, Artificial Sequence
  derived and/or modified sequence
atgtacaaggagaccgtgtacagcgccttcaacctgctgatgcactaccccccccccagcggcgccggccagcacccccagccccagccccccctgcacaaggccaaccagcccccccacggcgtgccccagctgagcctgtacgagcacttcaacagcccccaccccacccccgcccccgccgacatcagccagaagcaggtgcacagacccctgcagacccccgacctgagcggcttctacagcctgaccagcggcagcatgggccagctgccccacaccgtgagctggttcacccaccccagcctgatgctgggcagcggcgtgcccggccaccccgccgccatcccccaccccgccatcgtgccctag

SEQ ID NO: 262610 - DNA, 444 bp, Artificial Sequence
  derived and/or modified sequence
atgtacaaggagaccgtgtacagcgccttcaacctgctgatgcactaccccccccccagcggcgccggccagcacccccagccccagccccccctgcacaaggccaaccagcccccccacggcgtgccccagctgagcctgtacgagcacttcaacagcccccaccccacccccgcccccgccgacatcagccagaagcaggtgcacagacccctgcagacccccgacctgagcggcttctacagcctgaccagcggcagcatgggccagctgccccacaccgtgagctggttcacccaccccagcctgatgctgggcagcggcgtgcccggccaccccgccgccatcccccaccccgccatcgtgccccccagcggcaagcaggagctgcagcccttcgacagaaacctgaagacccaggccgagagcaaggccgagaagtag

SEQ ID NO: 262611 - protein, 407 aa, Artificial Sequence
  derived and/or modified sequence
MWPNGSSLGPCFRPTNITLEERRLIASPWFAASFCVVGLASNLLALSVLAGARQGGSHTRSSFLTFLCGLVLTDFLGLLVTGTIVVSQHAALFEWHAVDPGCRLCRFMGVVMIFFGLSPLLLGAAMASERYLGITRPFSRPAVASQRRAWATVGLVWAAALALGLLPLLGVGRYTVQYPGSWCFLTLGAESGDVAFGLLFSMLGGLSVGLSFLLNTVSVATLCHVYHGQEAAQQRPRDSEVEMMAQLLGIMVVASVCWLPLLVFIAQTVLRNPPAMSPAGQLSRTTEKELLIYLRVATWNQILDPWVYILFRRAVLRRLQPRLSTRPRRSLTLWPSLEYSGTISAHCNLRLPGSSDSRASASRAAGITGVSHCARPCMLFDPEFDLLAGVQLLPFEPPTGKALSRKD

SEQ ID NO: 262612 - DNA, 1224 bp, Artificial Sequence
  derived and/or modified sequence
atgtggcccaacggcagcagcctgggcccctgcttcagacccaccaacatcaccctggaggagagaagactgatcgccagcccctggttcgccgccagcttctgcgtggtgggcctggccagcaacctgctggccctgagcgtgctggccggcgccagacagggcggcagccacaccagaagcagcttcctgaccttcctgtgcggcctggtgctgaccgacttcctgggcctgctggtgaccggcaccatcgtggtgagccagcacgccgccctgttcgagtggcacgccgtggaccccggctgcagactgtgcagattcatgggcgtggtgatgatcttcttcggcctgagccccctgctgctgggcgccgccatggccagcgagagatacctgggcatcaccagacccttcagcagacccgccgtggccagccagagaagagcctgggccaccgtgggcctggtgtgggccgccgccctggccctgggcctgctgcccctgctgggcgtgggcagatacaccgtgcagtaccccggcagctggtgcttcctgaccctgggcgccgagagcggcgacgtggccttcggcctgctgttcagcatgctgggcggcctgagcgtgggcctgagcttcctgctgaacaccgtgagcgtggccaccctgtgccacgtgtaccacggccaggaggccgcccagcagagacccagagacagcgaggtggagatgatggcccagctgctgggcatcatggtggtggccagcgtgtgctggctgcccctgctggtgttcatcgcccagaccgtgctgagaaacccccccgccatgagccccgccggccagctgagcagaaccaccgagaaggagctgctgatctacctgagagtggccacctggaaccagatcctggacccctgggtgtacatcctgttcagaagagccgtgctgagaagactgcagcccagactgagcaccagacccagaagaagcctgaccctgtggcccagcctggagtacagcggcaccatcagcgcccactgcaacctgagactgcccggcagcagcgacagcagagccagcgccagcagagccgccggcatcaccggcgtgagccactgcgccagaccctgcatgctgttcgaccccgagttcgacctgctggccggcgtgcagctgctgcccttcgagccccccaccggcaaggccctgagcagaaaggactag

SEQ ID NO: 262613 - DNA, 1224 bp, Artificial Sequence
  derived and/or modified sequence
atgtggcctaacgggtcctccctgggcccctgcttccgcccaaccaacatcaccctggaggagaggcgcttaatcgccagtccctggttcgctgccagcttctgtgtggtcggcttagcaagcaaccttctggcactatcggtgctggctggagcacggcagggtgggtcacatacacgttcatccttcctgacatttctctgcgggcttgtcctgactgacttcctgggcctgctggtgacagggacaatcgtagtatcccagcacgccgcattgttcgagtggcacgccgtggatcctggctgtcgcctatgcaggtttatgggcgtagtgatgatattcttcggactttcccccctcttgttgggtgccgcgatggcgagtgaacgctatctggggatcacacgaccgtttagtagacccgctgtggcaagccaacgacgggcatgggcgacggtcgggcttgtatgggccgctgctcttgctttgggtctcctccctctcctgggtgtcggcaggtatactgtgcagtaccccggatcctggtgcttcctcacactcggagcggagtcgggggacgtggcctttgggttgctcttctcaatgctgggagggctaagcgtgggcctcagtttcctgcttaatacagtgtctgtggccactttatgccacgtgtaccatgggcaagaagctgctcaacaacgtcctagagattctgaagttgagatgatggcgcaactgctggggattatggtggtggcctcggtgtgctggctgcccctgctcgtcttcatcgcgcagacagtcctgagaaacccacccgccatgtcgccagccggccagttatcccgcacgactgagaaagaactactcatttatcttcgggtggccacctggaaccagattctcgatccctgggtctatatcctgttcagaagggcggtgttaaggagactgcaacccagactctccaccaggccccgtcggagcctgactctttggccttctctggaatattctggcaccattagcgctcattgcaaccttagattgcctggctcctccgatagccgagcatccgcctcccgcgccgccggtattacaggagtctcgcattgtgcccgtccctgcatgctcttcgatccggaatttgatctgctagctggggtacagctattaccatttgagcctcccactggtaaggcactttcacgcaaggactag

SEQ ID NO: 262614 - DNA, 1224 bp, Artificial Sequence
  derived and/or modified sequence
atgtggcccaacggcagcagcctgggcccctgcttccggcccaccaacatcaccctggaggagcggcggctgattgccagcccctggtttgctgccagcttctgtgtggtgggcctggccagcaacctgctggccctgtctgtgctggccggggcccggcagggcggcagccacaccaggagcagcttcctgaccttcctgtgtggcctggtgctgacagacttcctgggcctgctggtgacaggcaccatcgtggtgtcccagcacgccgccctgtttgagtggcatgctgtggaccccggctgccgcctgtgccgcttcatgggcgtggtgatgatcttcttcggcctgagccccctgctgctgggcgccgccatggccagcgagcgctacctgggcatcacccggcccttcagcaggcctgctgtggccagccagaggcgggcctgggccaccgtgggcctggtgtgggccgccgccctggccctgggcctgctgcccctgctgggcgtgggccgctacacagtgcagtacccaggctcctggtgcttcctgaccctgggcgctgagagcggagatgtggccttcggcctgctcttctccatgctgggcggcctgtctgtgggcctgtccttcctgctgaacacagtgtctgtggccaccctgtgccacgtgtaccacggccaggaggccgcccagcagaggccccgggacagcgaggtggagatgatggcccagctgctgggcatcatggtggtggcctctgtgtgctggctgcccctgctggtgttcatcgcccagacagtgctgagaaatcctccagccatgagccctgctggccagctgagcaggaccacagagaaggagctgctgatctacctgcgggtggccacctggaaccagatcctggacccctgggtgtacatcctcttccggcgggctgtgctgcggcggctgcagccccggctgagcacccggccccggcgcagcctgaccctgtggcccagcctggagtacagcggcaccatcagcgcccactgcaacctgcggctgcccggcagcagtgacagccgggccagcgccagcagagctgctggcatcaccggggtgagccactgtgcccggccctgcatgctgtttgatcctgagtttgacctgctggccggcgtgcagctgctgccctttgagcccccaacaggcaaggccctgagcaggaaggactag

SEQ ID NO: 262615 - DNA, 1224 bp, Artificial Sequence
  derived and/or modified sequence
atgtggcccaacggcagcagcctgggcccctgcttccggcccaccaatattaccctggaagagcgccgtctgattgcatcgccctggttcgccgcttcgttctgtgtcgtgggccttgcttccaaccttctggcccttagcgtgcttgccggagccagacagggaggaagtcacacacggagcagtttcctgacattcttatgcgggctagtactcaccgacttcctgggtctcctggtgaccgggacaatcgtggtgagccaacacgcggcacttttcgagtggcatgccgttgatcccggatgtagattatgccgcttcatgggagtggtaatgattttcttcgggttgtccccactcttactgggagctgcgatggccagtgagaggtatttaggtattacccggcctttttcccgccctgccgtggcctcccagcggcgggcttgggccaccgtgggccttgtgtgggctgccgccctggcactaggtctccttcctcttctgggggtcggccgatacacggtccagtaccctgggagttggtgctttctgactttgggggcagagtctggggatgttgcattcggcctcctgttctctatgctcggagggttgtcagtcgggctgtcatttctcctcaatactgtcagcgtggcgaccctgtgccacgtataccacggccaggaagctgctcagcagaggcctcgggatagcgaagtggagatgatggctcagctgctaggaattatggtcgtcgccagcgtctgttggctcccattactagtgtttatcgcacagaccgttctccggaatccacccgccatgagcccagctggacagctgtcaagaacaaccgagaaagagctattgatttatttaagagttgctacctggaaccaaattctggacccttgggtttacattctattcagacgggcagttttacgaagactacagcctagactgtcaacccggccaagacgctcactcactctctggcccagtctagagtacagtggcaccatctcagctcactgcaatctgcggcttccaggctcctcagactcacgggccagcgccagccgggccgcggggatcaccggcgtttctcattgcgcacgaccctgcatgctgttcgacccagaatttgatctcctcgctggagtacagctgcttccttttgagcctcccaccggcaaagcactgtcgcgaaaggattag

SEQ ID NO: 262616 - DNA, 1224 bp, Artificial Sequence
  derived and/or modified sequence
atgtggcctaatggcagtagccttggcccatgctttaggcccacgaacatcacattggaagagcgcagattgatcgcgtcaccgtggttcgctgcaagcttctgtgtggtcggacttgccagcaacctcctcgctctgagcgttctggctggcgcacgccaagggggttcccacacccgaagctccttccttacattcctatgcggactcgttttaactgattttctgggcctgctggttacgggtactatcgtggtcagtcaacacgccgctctcttcgaatggcatgccgtggaccctggttgccggctttgtagatttatgggcgtcgtgatgatctttttcggtctatctccacttttactcggagcggctatggcatctgaaagatatctgggtataacacgtccattctcccgccctgccgttgcatcacaacggcgtgcttgggctacggtaggactggtgtgggccgcagctttggctcttgggctgctgccgctccttggcgtggggcgatacactgtccagtaccctggatcctggtgttttctcacgctgggggctgaatctggggatgtggccttcggtctgctctttagcatgcttggcggtctttctgtaggactcagtttcctattgaacaccgtttcagtcgctaccctctgtcatgtatatcatggccaagaggcagcacagcaacggcctagggattcagaagttgagatgatggcccaactgctgggcattatggtcgtggcctccgtttgctggctccctcttttagtgttcattgcccagacagtgctcaggaaccctccagccatgagcccggctgggcagctgagtaggactacggaaaaagaacttctgatttacctgcgcgtggccacctggaaccagattctggacccttgggtgtacatcctgtttagacgggctgtcctgcgcaggctgcaacctagactctcaactcgtcccaggcgatctttgactctgtggccgtctctggaatattctgggactatcagcgctcactgcaatttacgcctgcctggaagttctgactccagagcgagtgcttcccgtgctgccggtattaccggcgtttcacattgcgccaggccctgcatgctcttcgatcccgagttcgacttgttggccggagtccagcttttgccattcgaacccccaacagggaaggcactctccaggaaggactag

SEQ ID NO: 262617 - DNA, 1941 bp, Artificial Sequence
  derived and/or modified sequence
cccacccgtcccagctcggcttagcccccgcggacccctccaggccgcgaccccagggcgtcctgtgccgccacgccctccatctgtgtgggtcctctgctgggcccgcccctggtcacagccagactgactcagtttccctgggaggtcccgctcgagcccgtccttcccctccctctgcccgcccccagccctcgccccaccctcggcgcccgcacatctgcctgctcagctccagacggcgcccggacccccgggcgcgggatccagccaggtgggagccccgcagatgaggtctctgaaggtgtgcctgaaccagtgccagcctgccctgtctgcagcatcggcctgatggggtggtgactgatccctcagggctccggagccatgtggcccaacggcagttccctggggccctgtttccggcccacaaacattaccctggaggagagacggctgatcgcctcgccctggttcgccgcctccttctgcgtggtgggcctggcctccaacctgctggccctgagcgtgctggcgggcgcgcggcaggggggttcgcacacgcgctcctccttcctcaccttcctctgcggcctcgtcctcaccgacttcctggggctgctggtgaccggtaccatcgtggtgtcccagcacgccgcgctcttcgagtggcacgccgtggaccctggctgccgtctctgtcgcttcatgggcgtcgtcatgatcttcttcggcctgtccccgctgctgctgggggccgccatggcctcagagcgctacctgggtatcacccggcccttctcgcgcccggcggtcgcctcgcagcgccgcgcctgggccaccgtggggctggtgtgggcggccgcgctggcgctgggcctgctgcccctgctgggcgtgggtcgctacaccgtgcaatacccggggtcctggtgcttcctgacgctgggcgccgagtccggggacgtggccttcgggctgctcttctccatgctgggcggcctctcggtcgggctgtccttcctgctgaacacggtcagcgtggccaccctgtgccacgtctaccacgggcaggaggcggcccagcagcgtccccgggactccgaggtggagatgatggctcagctcctggggatcatggtggtggccagcgtgtgttggctgccccttctggtcttcatcgcccagacagtgctgcgaaacccgcctgccatgagccccgccgggcagctgtcccgcaccacggagaaggagctgctcatctacttgcgcgtggccacctggaaccagatcctggacccctgggtgtatatcctgttccgccgcgccgtgctccggcgtctccagcctcgcctcagcacccggcccagacggagtctcactctgtggcccagcctggagtacagtggcacgatctcggctcactgcaacctccgcctcccgggttcaagcgattctcgtgcctcagcctcccgagcagctgggattacaggcgtaagccactgcgcccggccttgcatgctctttgaccctgaatttgacctacttgctggggtacagttgcttccttttgaacctccaacagggaaggctctgtccagaaaggattgaatgtgaacgggggcacccccttttcttgccaaaatatatctctgcctttggttttattttcctttgggtccagaagttttcaatctctggagtttgtgcattgggcctcacccggagcagacgagggcagggctgggaaggatggggagggacatagaggattcggttcctcccccaccttgtttcttgagtgtttcctaatcacttgatgggtggtaccacctagaattcttccagcagcctgtaatgggagggctacaggttagccctggaacctgcaatcaaaccacctttgaatctgtgtgtcattaaaagtagatataaatgggc

SEQ ID NO: 262618 - protein, 296 aa, Artificial Sequence
  derived and/or modified sequence
MMLPLQGAQMLQMLEKSLRKSLPASLKVYGTVFHINHGNPFNLKAVVDKWPDFNTVVVCPQEQDMTDDLDHYTNTYQIYSKDPQNCQEFLGSPELINWKQHLQIQSSQPSLNEAIQNLAAIKSFKVKQTQRILYMAAETAKELTPFLLKSKILSPNGGKPKAINQEMFKLSSMDVTHAHLVNKFWHFGGNERSQRFIERCIQTFPTCCLLGPEGTPVCWDLMDQTGEMRMAGTLPEYRLHGLVTYVIYSHAQKLGKLGFPVYSHVDYSNEAMQKMSYTLQHVPIPRSWNQWNCVPL

SEQ ID NO: 262619 - DNA, 891 bp, Artificial Sequence
  derived and/or modified sequence
atgatgttaccattgcagggtgcccagatgctgcagatgctcgagaaatccctgcggaaatccttaccggcctccctgaaagtatacggtacagtttttcacattaatcatggcaatccctttaacctgaaggctgtggttgacaaatggcccgacttcaatacggtggtggtgtgtccccaggaacaggacatgaccgatgatctggaccactacacaaacacttaccaaatttatagcaaggatcctcagaactgccaggagttcctgggatcccctgagctcattaattggaagcaacatttgcagatacagtcgtcccagccctcactgaatgaagctattcagaatctagcagcgattaagtcctttaaagtcaaacagacacaacggatcctgtatatggccgccgagacggctaaggaattaactcccttcctcttgaaatcaaaaattcttagccccaacggaggcaaaccaaaggccattaaccaggagatgttcaaattgtcatccatggacgtgactcacgcacacctggtgaataagttctggcatttcggcggcaatgagaggagtcagcggtttatcgagcggtgcattcagacttttccaacatgctgcctgttgggaccggagggaactcctgtctgttgggatctgatggatcagacaggcgaaatgcgcatggccggcactctaccagagtaccgtctgcatggcctcgtaacttatgtgatctattcgcacgctcagaaactgggcaaactgggctttcccgtctattctcatgtggactacagtaacgaggctatgcagaagatgagctacactctccagcatgtccccatacctcggtcctggaatcagtggaactgcgtgcccctgtag

SEQ ID NO: 262620 - DNA, 891 bp, Artificial Sequence
  derived and/or modified sequence
atgatgttaccgctgcagggcgcccagatgcttcagatgctggagaaaagcctgaggaaatccctgcctgcatcactgaaagtatatggcaccgtgttccacatcaaccatggtaacccttttaatttgaaggctgttgtggataagtggcctgactttaataccgtcgtcgtttgtccccaggagcaggatatgacagacgacttggaccactatacaaacacttaccagatttactccaaggaccctcagaattgtcaggaattcttaggttctccagaactgataaactggaagcagcatctgcagatccagtccagccaacccagcctgaacgaggctatccagaatcttgctgctatcaagagttttaaggtgaaacagacccagcggatcttgtacatggccgcagagacggcgaaagagctgactccgtttctcctcaaatctaagattctgagcccgaatggcggaaagcctaaagctatcaaccaggagatgtttaagctttcgtcaatggatgtaacgcacgcccacctcgttaataaattttggcacttcgggggaaatgaacgcagccaacgcttcatcgagcggtgcattcagacatttccgacctgttgcctcctgggcccggagggaacccccgtttgctgggatctcatggaccaaaccggagaaatgcggatggcaggcactctccctgagtatcggcttcatggcttagtaacttacgtgatttacagccatgcccagaaattaggaaagctcgggtttcccgtttattcccatgtggactactctaacgaggccatgcagaagatgagctatacactccagcatgttcctatccccagaagctggaatcagtggaattgcgtgcctctgtag

SEQ ID NO: 262621 - DNA, 1735 bp, Artificial Sequence
  derived and/or modified sequence
ggtggtgtatcaaaatttactctgcgagactctgctgaactggctgcatcagggagaaatttcatctcccagaagggtgttgctcatcgtttcttcccggaaacatctgcagagactagcttttcaggctaaggtatcctccatgatgttaccattgcaaggtgcccagatgctgcagatgctggagaaatccttgaggaagagcctcccagcatccttaaaggtttatggaactgtctttcacataaaccatggaaatccattcaatctgaaggctgtggtggacaagtggcctgattttaatacagtggttgtctgccctcaggagcaggatatgacagatgaccttgatcactataccaatacttaccaaatctactccaaagatccccaaaactgtcaggaattccttggatcaccagaactcatcaactggaaacagcatttacagattcaaagttcacagcctagcctgaatgaggctatacaaaatcttgcagccattaagtccttcaaagtcaaacaaacacaacgcattctctatatggcagctgaaacagccaaggaactgactcctttcctgctgaaatcaaagattttatctcccaatggtggcaaacccaaggccatcaaccaagagatgtttaaactctcatccatggatgttacccatgctcacttggtgaataaattctggcattttggtggtaatgagaggagccagagattcattgagcgctgcattcagacctttcccacctgctgtctcctggggcctgaggggacccctgtgtgctgggatctaatggaccagactggagagatgagaatggcaggcaccttgccggaataccggctccatggccttgtgacgtatgtcatctattcccacgcccagaaattgggcaaacttgggtttcctgtctattctcatgtagactacagcaatgaagctatgcaaaaaatgagttacacactgcaacatgttcccattcccagaagctggaaccagtggaactgtgtacctctgtgatgccaatcctgaacataagacagtgttgggcaggtctgggcgtataatttgaggagtggatggtggatgaaaagaaataataaattgtaatcagcagtaaaggagtgggcactgtttggactctggggaagcagtgtgatgttcaacagcatcgccatggtccctgcattcacaggtttctcagtgggaagcaggcccaggtcctcttacatttgacataagcaatttacctccccacatttccaggacctctatgacacttcatcagatacatattgctccaaattacttctcctggaatccctggttcctcagttgcaagacccttgccagtttttctgggagctaggaagaggtgaattaaattttctgagcactatgacttctttctttctaaagcctttcccttatgatcaacaagtggactctcctcagcaggtctttagagattatcctctcctgttattgctactttataggtacattaaatatactggacacaaatatatatgggatattaggctaaatacagtatacatgatatagcagggaatgttactagaagaaatatcaactgatgatatcctatcctctccaagctcctattccaggaaaaaagatccaatgttttttctaaagatgagcttccaaaacccacaactcctaaataatacagaaagttttgtgtttgactgtatacaa

SEQ ID NO: 262622 - DNA, 1070 bp, Artificial Sequence
  derived and/or modified sequence
cagtgacagtccttgtgctctggttagattccatatccctgaacttcaacctgaaaacttccatcagctaaggtatcctccatgatgttaccattgcaaggtgcccagatgctgcagatgctggagaaatccttgaggaagagcctcccagcatccttaaaggtttatggaactgtctttcacataaaccatggaaatccattcaatctgaaggctgtggtggacaagtggcctgattttaatacagtggttgtctgccctcaggagcaggatatgacagatgaccttgatcactataccaatacttaccaaatctactccaaagatccccaaaactgtcaggaattccttggatcaccagaactcatcaactggaaacagcatttacagattcaaagttcacagcctagcctgaatgaggctatacaaaatcttgcagccattaagtccttcaaagtcaaacaaacacaacgcattctctatatggcagctgaaacagccaaggaactgactcctttcctgctgaaatcaaagattttatctcccaatggtggcaaacccaaggccatcaaccaagagatgtttaaactctcatccatggatgttacccatgctcacttggtgaataaattctggcattttggtggtaatgagaggagccagagattcattgagcgctgcattcagacctttcccacctgctgtctcctggggcctgaggggacccctgtgtgctgggatctaatggaccagactggagagatgagaatggcaggcaccttgccggaataccggctccatggccttgtgacgtatgtcatctattcccacgcccagaaattgggcaaacttgggtttcctgtctattctcatgtagactacagcaatgaagctatgcaaaaaatgagttacacactgcaacatgttcccattcccagaagctggaaccagtggaactgtgtacctctgtgatgccaatcctgaacataagacagtgttgggcaggtctgggcgtataatttgaggagtggatggtggatgaaaagaaataataaattgtaatcagcagt

SEQ ID NO: 262623 - DNA, 891 bp, Artificial Sequence
  derived and/or modified sequence
atgatgctgcccctgcagggcgcccagatgctgcagatgctggagaagagcctgaggaagagcctgcctgccagcctgaaggtgtatggaacagtgttccacatcaaccacggcaaccccttcaacctgaaggctgtggtggacaagtggccagacttcaacacagtggtggtgtgcccccaggagcaggacatgacagatgacctggaccactacaccaacacctaccagatctacagcaaggacccccagaactgccaggagttcctgggcagccctgagctgatcaactggaagcagcacctgcagatccagagcagccagcccagcctgaatgaggccatccagaacctggccgccatcaagagcttcaaggtgaagcagacccagaggatcctgtacatggctgctgagacagccaaggagctgacccccttcctgctgaagagcaagatcctgagccccaacggcggcaagcccaaggccatcaaccaggagatgttcaagctgagctccatggatgtgacccacgcccacctggtgaacaagttctggcactttggaggaaatgaaagaagccagcgcttcatcgagcgctgcatccagaccttccccacctgctgcctgctgggccctgagggcacccctgtgtgctgggacctgatggaccagacaggagagatgaggatggccggcaccctgcctgagtaccgcctgcacggcctggtgacctacgtgatctacagccacgcccagaagctgggcaagctgggcttccctgtgtacagccacgtggactacagcaatgaggccatgcagaagatgagctacaccctgcagcacgtgcccatccccaggtcctggaaccagtggaactgtgtgcccctgtag

SEQ ID NO: 262624 - DNA, 891 bp, Artificial Sequence
  derived and/or modified sequence
atgatgctgcccctgcagggcgcccagatgctgcagatgctggagaagtctctgagaaagtcgttgccagcttctctcaaggtctatggtaccgtgttccatattaaccatggtaacccattcaacttgaaggccgttgttgataaatggcctgatttcaatactgtggtcgtgtgccctcaggagcaggacatgacagatgatttggatcattatacaaacacttatcagatctatagcaaggacccgcagaactgtcaggagttcctgggttctcctgagctgatcaattggaaacagcatttgcagattcagagctcacagccttccttgaacgaggccattcagaacctagcagcaattaagtcctttaaagttaagcaaactcagcgcattctatacatggcagctgaaactgctaaagaattgacgccgttcctgctgaagtctaagatcctgtcaccaaacggagggaagcctaaagctataaaccaggaaatgttcaagttgagcagcatggacgtcactcacgcacacttggtgaacaaattctggcacttcggcggcaacgaacggagccagcggttcatagagagatgcatccagacctttcctacttgctgcttgctagggccagagggcaccccagtgtgttgggacctcatggatcagaccggagaaatgaggatggccggaacgcttcctgaataccgcctgcatggcttagtcacctatgtgatctacagccacgcccagaaactgggcaaattagggtttcccgtgtattcccacgtggattacagtaatgaggctatgcagaaaatgtcttacacactgcagcacgtcccaataccgcggtcttggaaccagtggaactgcgttcccctctag

SEQ ID NO: 262625 - DNA, 891 bp, Artificial Sequence
  derived and/or modified sequence
atgatgctgcccctgcagggcgcccagatgctgcagatgctggagaaatctttgagaaaatcgctgccagcatcactaaaggtgtacggtaccgtgtttcatattaaccacgggaacccgtttaatttgaaggccgtggtcgataagtggcccgacttcaacaccgtggtagtctgccctcaggagcaagatatgactgatgacctggaccattatacgaatacttaccagatctactctaaggaccctcagaactgccaagagtttctgggatctccggaactaattaactggaaacagcacctgcagatccagtcaagccaaccatcactgaatgaggccatccaaaacctagccgccattaaatccttcaaagtgaagcagactcagaggattttgtatatggctgccgaaacagccaaggaactgacccctttccttctgaaaagcaaaatccttagccccaacggaggtaaacctaaagcgattaaccaagaaatgttcaagcttagctctatggacgtgacccacgcccatttggtcaataagttttggcatttcggcggcaatgagcggtctcagcggttcatcgaaagatgtatccagacctttcccacttgctgcctgctaggaccagagggcactcccgtctgttgggatctgatggatcagacaggcgaaatgcgaatggccggcaccctccccgaatacaggctgcacgggctggttacttatgtgatctacagccatgcccaaaagcttgggaaactgggcttcccagtctacagccacgtggattacagcaatgaagcgatgcaaaagatgtcttatacgctgcagcatgtgcccattcccaggtcttggaatcaatggaattgcgtgcccctgtag

SEQ ID NO: 262626 - DNA, 891 bp, Artificial Sequence
  derived and/or modified sequence
atgatgttgcccctgcaaggcgctcagatgcttcagatgctggaaaagtcacttcggaagtctctgcctgctagcctgaaagtttacgggactgtatttcatattaatcacggtaacccttttaatctcaaggctgtggtggataagtggcccgacttcaacacagtggttgtgtgcccacaggagcaggacatgacagacgatcttgatcactatacaaatacgtatcaaatctattcaaaagacccccagaactgtcaagaattcctgggatcccccgagctgatcaactggaagcagcaccttcagatccagtcttcacagccctctctgaatgaagcgatccagaatctggcagccatcaagagctttaaagtgaagcagacacagagaatattatatatggccgctgagaccgctaaggagctcactccttttttactgaaatccaagatcttatccccgaacgggggaaagcctaaagcaatcaatcaagaaatgtttaaactcagcagtatggacgtgacccacgcccacctggtgaacaagttttggcatttcggtggcaacgagcgtagccaaaggttcatagagcggtgtatccagacatttccgacctgttgtttactaggacccgaagggacgccagtctgctgggacctcatggatcagacaggtgagatgcgcatggcagggacattgcctgagtacaggctacatggcctggtgacctacgtcatctacagccacgcacaaaaactgggaaagctcggttttcccgtatactctcacgtggattatagcaacgaggccatgcaaaagatgtcgtacaccttacagcatgtgcccattcccagaagttggaaccagtggaattgtgtgcctctctag

SEQ ID NO: 262627 - DNA, 891 bp, Artificial Sequence
  derived and/or modified sequence
atgatgctgcctttacagggcgctcaaatgctccagatgttggaaaaaagcttgcgcaaatctttgcccgcaagcctaaaagtgtatggcacggtctttcacataaatcacggaaaccctttcaacttgaaggccgttgtggataagtggccggatttcaacactgtggtggtttgtcctcaggagcaagatatgacggacgatttagaccattatacaaacacatatcagatatattcaaaagacccacagaactgtcaggagtttctcggtagccccgaattgattaattggaagcaacatctccagattcagagtagccagcctagcctgaatgaggcaatccagaacttagccgctatcaaatcattcaaggtgaagcagacccagcgcatcctctatatggccgctgagaccgctaaggagttgacaccgttccttttgaagagtaaaattcttagtcctaacggaggcaagcctaaggctattaaccaagaaatgttcaagttaagctccatggatgtgacacatgcacacttagtcaacaagttctggcacttcgggggtaatgaaagaagccagaggtttattgaaaggtgtattcaaaccttcccaacatgttgcttgctgggacccgaggggacacccgtatgctgggatctgatggaccagacaggagagatgaggatggccggaacactgccagaatacagactgcatggtttagtgacctacgtgatctactcccatgcccagaaactcggcaagctggggtttcccgtctattcacatgtggactactcaaatgaggcaatgcagaaaatgagttacacactgcaacatgttcccattcccagatcctggaaccaatggaactgtgtgcccctatag

SEQ ID NO: 262628 - DNA, 891 bp, Artificial Sequence
  derived and/or modified sequence
atgatgctgcccctgcagggcgcccagatgctgcagatgctggagaagagcctgagaaagagcctgcccgccagcctgaaggtgtacggcaccgtgttccacatcaaccacggcaaccccttcaacctgaaggccgtggtggacaagtggcccgacttcaacaccgtggtggtgtgcccccaggagcaggacatgaccgacgacctggaccactacaccaacacctaccagatctacagcaaggacccccagaactgccaggagttcctgggcagccccgagctgatcaactggaagcagcacctgcagatccagagcagccagcccagcctgaacgaggccatccagaacctggccgccatcaagagcttcaaggtgaagcagacccagagaatcctgtacatggccgccgagaccgccaaggagctgacccccttcctgctgaagagcaagatcctgagccccaacggcggcaagcccaaggccatcaaccaggagatgttcaagctgagcagcatggacgtgacccacgcccacctggtgaacaagttctggcacttcggcggcaacgagagaagccagagattcatcgagagatgcatccagaccttccccacctgctgcctgctgggccccgagggcacccccgtgtgctgggacctgatggaccagaccggcgagatgagaatggccggcaccctgcccgagtacagactgcacggcctggtgacctacgtgatctacagccacgcccagaagctgggcaagctgggcttccccgtgtacagccacgtggactacagcaacgaggccatgcagaagatgagctacaccctgcagcacgtgcccatccccagaagctggaaccagtggaactgcgtgcccctgtag

SEQ ID NO: 262629 - protein, 175 aa, Artificial Sequence
  derived and/or modified sequence
MENDPSRRRESISLTPVAKGLENMGADFLESLEEGQLPRSDLSPAEIRSSWSEAAPKPFSRWRNLQPALRARSFCREHMQLFRWIGTGLLCTGLSAFLLVACLLDFQRALALFVLTCVVLTFLGHRLLKRLLGPKLRRFLKPQGHPRLLLWFKRDPRPWSKEGPNQYLPQITWTV

SEQ ID NO: 262630 - DNA, 528 bp, Artificial Sequence
  derived and/or modified sequence
atggaaaacgatccctcccgcaggagagaaagcatctctcttacgccagtcgccaagggcttggagaacatgggcgctgactttctggaatcactcgaggaggggcagttgccacgatctgatctatccccggccgaaatccgaagttcatggagtgaagcagcacccaaaccgttttctcgctggcggaacctgcaaccagcgttgagagcaaggtccttttgccgcgaacatatgcaactctttaggtggattggcacaggactgctgtgcacaggcctgtccgcattcctgcttgtggcttgtctcttagattttcaaagagcattggccctgtttgtgttgacttgcgtcgtgctgacatttctcggacaccggctcttgaagaggctcttggggccgaagctgagaagatttctaaagccccaaggtcacccacggctacttctttggtttaaacgtgaccctaggccatggagcaaggagggaccaaatcaataccttccacagatcacctggactgtatag

SEQ ID NO: 262631 - DNA, 528 bp, Artificial Sequence
  derived and/or modified sequence
atggagaatgaccccagcagaagaagagagagcatcagcctgacccctgtggccaagggcctggagaacatgggcgctgacttcctggagagcctggaggagggccagctgcccaggagtgacctgagccctgctgagatccgcagctcctggagcgaggccgcccccaagcccttcagccgctggaggaacctgcagcctgccctgcgggcccgctccttctgccgggagcacatgcagctgttccgctggattggaacaggcctgctgtgcaccggcctgagcgccttcctgctggtggcctgcctgctggacttccagagggccctggccctgtttgtgctgacctgtgtggtgctgaccttcctgggccaccggctgctgaagaggctgctgggccccaagctgcggcgcttcctgaagccccagggccacccccggctgctgctgtggttcaagagggacccccggccctggagcaaggagggccccaaccagtacctgccccagatcacctggacagtgtag

SEQ ID NO: 262632 - DNA, 528 bp, Artificial Sequence
  derived and/or modified sequence
atggagaacgaccccagccggcggcgggagagcatcagcctgacccccgtggcgaaaggtttggaaaatatgggcgcagacttcctggagtccctagaggagggccagctgcctcgtagcgacctgagcccagctgaaattagatcctcttggtcagaggctgcacccaagccattttcccgctggagaaacctacagcccgccctgagagcacgcagcttctgccgtgagcatatgcagctgttccgatggattggcactggccttctatgcacgggactgtcggcattcttgcttgtggcctgtttgctggacttccagcgcgcgctcgccctgtttgtactgacctgtgtggtgctgactttcctcggccatcgactgttaaagcggctgctaggtcctaagctgagacgattcctcaagccacaagggcacccccggctgttgctgtggttcaagagagacccacggccatggagcaaggaaggacctaatcagtacttgccccagatcacctggaccgtttag

SEQ ID NO: 262633 - DNA, 528 bp, Artificial Sequence
  derived and/or modified sequence
atggaaaatgacccaagccgcaggcgcgagagcatcagcctgacacccgtagcgaagggtctcgaaaacatgggagctgatttcttggaatctttggaagagggtcagctgcccaggtccgaccttagtccagccgaaatcaggtcatcctggagcgaggccgctcccaaaccattctcgagatggaggaatcttcagccagctctgcgggcacgcagcttttgtcgtgaacacatgcaactttttcgctggattggcactgggctgttgtgcacgggcctgagcgccttcctgttggtggcctgtttactcgattttcaacgggcacttgcgctctttgttctgacctgcgtggtgctaacttttctgggacatcggctgctgaagcgcctgctgggtcctaaactgcgcagattcctgaaaccccagggccacccacggctcctactatggttcaaaagggatccacgaccctggtccaaggaggggccaaatcagtacctccctcaaatcacatggacagtgtag

SEQ ID NO: 262634 - DNA, 1360 bp, Artificial Sequence
  derived and/or modified sequence
agggcccacaacgatgtgaaggttataagctgcactgcatggttgctgctggatgtgttgtgttcctggcttccctctggatgctgacagaaacaagggaatttctgctgaagtgacaaggcaagccagagccaaagcaggttggacccagcttgtccccacagagacgtgtgcttccctctctctctgagagcgacctgttaaccgcaaatacctggaaggtctgggacatggagaacgacccctcgagacgaagagagtccatctctctcacacctgtggccaagggtctggagaacatgggggctgatttcttggaaagcctggaggaaggccagctccctaggagtgacttgagccccgcagagatcaggagcagctggagcgaggcggcgccgaagcccttctccagatggaggaacctgcagccagccctgagagccagaagcttctgcagggagcacatgcagctgtttcgatggatcggcacaggcctgctctgcactgggctctctgccttcctgctggtggcctgcctcctggatttccagagggccctggctctgtttgtcctcacctgtgtggtcctcaccttcctgggccaccgcctgctgaaacggcttctggggccaaagctgaggaggtttctcaagcctcagggccatccccgcctgctgctctggtttaagagggatcccaggccatggagcaaggagggcccgaatcagtacctccctcagatcacctggacagtgtgagacaaaaagccgcagggaccatccctggagggggattcagcaggctcgatcggggtccaggtgctggtatttttcattagcctccaggggattctgatgtagccagcagcgtccttggacaacagtttgagatctgctgcttttcaaactggattccttggagcgctggaaatctcagcgatgtcacagggcaggagagggaggttgtggagggaaaattcagacttcccgcccagcccaccatttcaccaggcagctctaaatttatgtgttttataagccaaggttcacacaaaaaagaaaattcgctgggggaaaaaaacagtttctatggcttaaaaaaaagtctgaagaccaccagtctatttcaatactctattttgttgatgaagaagctggtgaccaaagatacccaaagactaagtcagggggatgcaggggtacaggggtgcctctcactttcccaaagtgagatccacataccacagcaaaatgatttgagccagcctgtggatgaacacatttaaaattttatttataaatacatttactgttacatttgacttctctttattaaatacatttgtgatttatttttgcaa

SEQ ID NO: 262635 - DNA, 528 bp, Artificial Sequence
  derived and/or modified sequence
atggagaacgaccccagcagaagaagagagagcatcagcctgacccccgtggccaagggcctggagaacatgggcgccgacttcctggagagcctggaggagggccagctgcccagaagcgacctgagccccgccgagatcagaagcagctggagcgaggccgcccccaagcccttcagcagatggagaaacctgcagcccgccctgagagccagaagcttctgcagagagcacatgcagctgttcagatggatcggcaccggcctgctgtgcaccggcctgagcgccttcctgctggtggcctgcctgctggacttccagagagccctggccctgttcgtgctgacctgcgtggtgctgaccttcctgggccacagactgctgaagagactgctgggccccaagctgagaagattcctgaagccccagggccaccccagactgctgctgtggttcaagagagaccccagaccctggagcaaggagggccccaaccagtacctgccccagatcacctggaccgtgtag

SEQ ID NO: 262636 - protein, 638 aa, Artificial Sequence
  derived and/or modified sequence
MATGANATPLDFPSKKRKRSRWNQDTMEQKTVIPGMPTVIPPGLTREQERAYIVQLQIEDLTRKLRTGDLGIPPNPEDRSPSPEPIYNSEGKRLNTREFRTRKKLEEERHNLITEMVALNPDFKPPADYKPPATRVSDKVMIPQDEYPEINFVGLLIGPRGNTLKNIEKECNAKIMIRGKGSVKEGKVGRKDGQMLPGEDEPLHALVTANTMENVKKAVEQIRNILKQGIETPEDQNDLRKMQLRELARLNGTLREDDNRILRPWQSSETRSITNTTVCTKCGGAGHIASDCKFQRPGDPQSAQDKARMDKEYLSLMAELGEAPVPASVGSTSGPATTPLASAPRPAAPANNPPPPSLMSTTQSRPPWMNSGPSESRPYHGMHGGGPGGPGGGPHSFPHPLPSLTGGHGGHPMQHNPNGPPPPWMQPPPPPMNQGPHPPGHHGPPPMDQYLGSTPVGSGVYRLHQGKGMMPPPPMGMMPPPPPPPSGQPPPPPSGPLPPWQQQQQQPPPPPPPSSSMASSTPLPWQQNTTTTTTSAGTGSIPPWQQQQAAAAASPGAPQMQGNPTMVPLPPGVQPPLPPGAPPPPPPPPPGSAGMMIPPRGGDGPSHESEDFPRPLVTLPGRQPQQRPWWTGWFGKAA

SEQ ID NO: 262637 - DNA, 1917 bp, Artificial Sequence
  derived and/or modified sequence
atggccaccggcgccaacgccacccccctggacttccccagcaagaagagaaagagaagcagatggaaccaggacaccatggagcagaagaccgtgatccccggcatgcccaccgtgatcccccccggcctgaccagagagcaggagagagcctacatcgtgcagctgcagatcgaggacctgaccagaaagctgagaaccggcgacctgggcatcccccccaaccccgaggacagaagccccagccccgagcccatctacaacagcgagggcaagagactgaacaccagagagttcagaaccagaaagaagctggaggaggagagacacaacctgatcaccgagatggtggccctgaaccccgacttcaagccccccgccgactacaagccccccgccaccagagtgagcgacaaggtgatgatcccccaggacgagtaccccgagatcaacttcgtgggcctgctgatcggccccagaggcaacaccctgaagaacatcgagaaggagtgcaacgccaagatcatgatcagaggcaagggcagcgtgaaggagggcaaggtgggcagaaaggacggccagatgctgcccggcgaggacgagcccctgcacgccctggtgaccgccaacaccatggagaacgtgaagaaggccgtggagcagatcagaaacatcctgaagcagggcatcgagacccccgaggaccagaacgacctgagaaagatgcagctgagagagctggccagactgaacggcaccctgagagaggacgacaacagaatcctgagaccctggcagagcagcgagaccagaagcatcaccaacaccaccgtgtgcaccaagtgcggcggcgccggccacatcgccagcgactgcaagttccagagacccggcgacccccagagcgcccaggacaaggccagaatggacaaggagtacctgagcctgatggccgagctgggcgaggcccccgtgcccgccagcgtgggcagcaccagcggccccgccaccacccccctggccagcgcccccagacccgccgcccccgccaacaacccccccccccccagcctgatgagcaccacccagagcagacccccctggatgaacagcggccccagcgagagcagaccctaccacggcatgcacggcggcggccccggcggccccggcggcggcccccacagcttcccccaccccctgcccagcctgaccggcggccacggcggccaccccatgcagcacaaccccaacggccccccccccccctggatgcagcccccccccccccccatgaaccagggcccccacccccccggccaccacggccccccccccatggaccagtacctgggcagcacccccgtgggcagcggcgtgtacagactgcaccagggcaagggcatgatgccccccccccccatgggcatgatgcccccccccccccccccccccagcggccagcccccccccccccccagcggccccctgcccccctggcagcagcagcagcagcagcccccccccccccccccccccagcagcagcatggccagcagcacccccctgccctggcagcagaacaccaccaccaccaccaccagcgccggcaccggcagcatccccccctggcagcagcagcaggccgccgccgccgccagccccggcgccccccagatgcagggcaaccccaccatggtgcccctgccccccggcgtgcagccccccctgccccccggcgcccccccccccccccccccccccccccccggcagcgccggcatgatgatcccccccagaggcggcgacggccccagccacgagagcgaggacttccccagacccctggtgaccctgcccggcagacagccccagcagagaccctggtggaccggctggttcggcaaggccgcctag

SEQ ID NO: 262638 - DNA, 1917 bp, Artificial Sequence
  derived and/or modified sequence
atggcaacaggcgccaatgcaacacccctggattttccatcaaaaaagcgcaaaagaagtcggtggaatcaggatacgatggagcagaaaactgtgatccctggaatgccgaccgtcatccctcctggcctgactcgggagcaggaacgcgcctacatagtgcagcttcagattgaggatctcacacgcaaactcaggaccggtgatctgggaattccaccaaaccccgaggacaggtccccgtcccctgagcctatttacaactcagaaggcaaaaggctgaatacaagagagttccgcacccgcaagaaactcgaagaagaacgacataacttgattaccgagatggtggctctgaatccagattttaagccgcctgccgactataagccacccgcaactcgcgtttccgacaaggttatgataccacaggacgagtatcccgagatcaacttcgtggggttactgatcggtccccgcggcaacaccttgaagaatatcgagaaggaatgcaacgcaaagattatgatccgggggaaaggctccgtcaaagagggcaaagtagggagaaaagatgggcagatgcttccgggtgaagacgagcccttacacgctttagtgaccgccaacactatggagaacgtgaagaaagccgtcgagcagattagaaatattctcaaacagggtatcgagactcctgaagaccagaatgacctgcgcaaaatgcagctccgcgagttggcccgcttaaatggaactctgagagaagacgataatcggattctgcgaccatggcagagctccgaaactcgaagcattactaacacaactgtgtgcacaaagtgcggaggcgccggacacatagcatctgattgtaaattccagcgacctggcgatccccaatccgcacaggataaggctagaatggacaaagagtacctgagtttaatggctgagctgggggaggcacccgtgcctgcctctgtcggtagcacctccggccctgctacaacaccactcgctagtgcccctaggccggctgcccccgcgaacaacccaccccccccatcgttgatgtctacaacacagtctcgcccaccatggatgaattcggggccaagtgaatctcgcccgtatcatggcatgcacggcggagggccaggtggtcccggcgggggcccgcatagctttcctcacccattacccagcctgacaggaggccacggaggccaccccatgcagcacaatccaaacggcccaccacccccatggatgcaaccacccccaccacctatgaatcagggtcctcatccaccgggccaccacggcccaccgcccatggatcagtatttggggagtactcccgtcggtagcggcgtatatcgcctccaccagggaaagggcatgatgccccccccaccaatgggcatgatgccaccgccgcctccccctccctcaggacaacccccccctcccccaagtggtccccttccaccttggcagcaacagcagcagcagcctccacccccccctccgcccagcagtagcatggccagcagtacacccttaccatggcaacaaaacacaactacaactacgacatctgctggtaccggctcaatcccaccctggcagcagcaacaggcagcggccgcggctagccctggtgccccccagatgcagggcaatcctaccatggtgcccctgcccccgggcgtccagcccccgctaccaccgggagctccacctcccccaccccccccgccaccagggtccgccgggatgatgatcccaccacgagggggagatggaccctctcacgagtccgaggactttccccgacctctagtcactctgcccggacgccaacctcagcagcgcccttggtggactgggtggttcggtaaggctgcatag

SEQ ID NO: 262639 - DNA, 1917 bp, Artificial Sequence
  derived and/or modified sequence
atggccactggagccaatgccacccccctggacttccccagcaagaagaggaagaggagccgctggaaccaggacaccatggagcagaagacagtcatccctggcatgcccaccgtcatccccccaggcctgacccgggagcaggagcgggcctacatcgtgcagctgcagatcgaggacctgaccaggaagctgaggactggagacctgggcatcccccccaacccagaagatagaagccccagccctgagcccatctacaacagcgagggcaagaggctgaacacccgggagttccgcaccaggaagaagctggaggaggagcggcacaacctgatcacagagatggtggccctgaacccagacttcaagcccccagctgactacaagcccccagccaccagggtgtctgacaaggtgatgatcccccaggatgagtacccagagatcaactttgtgggcctgctgattggcccccggggcaacaccctgaagaacatcgagaaggagtgcaatgccaagatcatgatccggggcaagggctctgtgaaggagggcaaggtgggcaggaaggatggccagatgctgcctggagaagatgagcccctgcacgccctggtgacagccaacaccatggagaatgtgaagaaggctgtggagcagatccggaacatcctgaagcagggcatcgagaccccagaggaccagaatgacctgaggaagatgcagctgcgggagctggcccggctgaatggcaccctgcgggaggatgacaaccgcatcctgcggccctggcagagcagcgagaccaggagcatcaccaacaccaccgtgtgcaccaagtgtggcggggccggccacatcgccagtgactgcaagttccagaggcctggggacccccagagcgcccaggacaaggccaggatggacaaggagtacctgagcctgatggccgagctgggggaggcccctgtgcctgcctctgtgggcagcaccagcggccctgccaccacccccctggccagcgcccccaggcctgctgccccagccaacaaccccccaccacccagcctgatgagcaccacccagagccggcccccctggatgaacagcggccccagcgagagccggccctaccacggcatgcatggaggcggccctgggggccctgggggcggcccccacagcttcccccaccccctgcccagcctgactggaggccacggcggccaccccatgcagcacaaccccaacggccccccaccaccctggatgcagcccccacctccacccatgaaccagggcccccaccccccaggccaccacggccccccacccatggaccagtacctgggcagcacccctgtgggcagcggcgtgtaccgcctgcaccagggcaagggcatgatgcctcctccacccatgggcatgatgcctcctcctcctcctccacccagcggccagcccccacctccacccagcggccccctgcccccctggcagcagcagcagcagcagcccccacctcctcctccacccagcagctccatggccagcagcacccccctgccctggcagcagaacaccaccaccaccaccaccagcgctggcaccggcagcatccccccctggcagcagcagcaggccgctgctgctgccagccctggggccccccagatgcagggcaaccccaccatggtgcccctgcccccaggagtgcagccccccctgcccccaggggcccctcctcctcctcctcctcctcctcctggcagcgctggcatgatgatccccccaagaggaggagatggccccagccatgaaagtgaggacttcccccggcccctggtgaccctgcccggccggcagccccagcagaggccctggtggacaggctggtttgggaaggccgcctag

SEQ ID NO: 262640 - DNA, 1917 bp, Artificial Sequence
  derived and/or modified sequence
atggccaccggcgccaacgccacccccctggacttccccagcaagaagcggaagcgcagtcggtggaaccaggatacgatggagcagaaaaccgtgatccccggaatgccgacagtgatacctcctgggctgaccagagagcaagagagggcgtacatcgtccagctgcagatagaggatctgactaggaagttaagaaccggggacctcggcataccccctaatcctgaggaccggtcccccagccccgaaccaatctacaatagcgagggaaagagactgaacaccagggaatttcggactcgcaagaagttggaggaagagcggcacaatctgataaccgagatggtggccctgaaccctgacttcaaaccgcctgccgactacaagcctcccgctacccgggtgtcagataaggtgatgatcccccaagatgaataccctgaaatcaattttgtgggcttgctaattggcccccggggaaacacgctgaaaaacatcgagaaggagtgcaacgcgaagattatgatccgcggaaagggctctgtgaaagaggggaaggtgggccgaaaagacggccagatgctgcctggagaggacgaacctctacacgccctcgtgaccgccaacacaatggagaacgtcaagaaggccgtggagcagattaggaacatactgaaacagggcatcgagactcccgaggatcagaatgaccttaggaaaatgcagctgcgtgaacttgcaagactcaatggcaccttacgagaagatgacaaccgcattttgagaccatggcagtcatcggagacacgatccatcacaaacaccaccgtgtgtacaaaatgtggcggcgcaggccatatagcctccgactgtaaatttcagagacccggggaccctcagtctgcccaggataaagcacgcatggacaaggagtacctttccctgatggcggagctcggcgaagctcccgtgcccgcttctgtaggcagcaccagcggcccagcaactacccctctagctagcgctccaaggcccgcggcacctgccaacaatcccccacccccctccctgatgtccacaactcaaagccggccgccctggatgaacagcggaccttcagagagcagaccttatcacggaatgcacggtggtggcccaggcgggcccggcggggggcctcactcatttccgcatcctttaccctccctgaccggcggacacggaggtcacccaatgcagcacaaccccaatggccccccacccccatggatgcagccgcctcccccccctatgaaccagggtcctcatccaccaggtcatcatggcccacccccaatggatcagtacctgggttctacccctgtgggaagcggggtttaccggttacaccagggaaaagggatgatgcctccccccccaatggggatgatgccccctccccctccacctccatcaggacagcccccgccccccccttctggacctctgcctccatggcagcagcaacagcaacaaccccctccccccccaccccccagcagctccatggcgtcctccacgcccttgccatggcagcagaataccacgaccactacgacttctgccggaaccggctctattcccccctggcagcaacagcaggcagctgccgcagcatctccgggcgcgccgcagatgcagggcaacccaactatggtacccctgccccccggcgtgcagccacccctcccacctggagctcccccacctcccccaccaccacctcctggctcggccggtatgatgattccacctcgggggggtgacggcccctcccacgagtcagaggactttccaagacccctggtaaccctacccggccgacagccccagcagcgtccttggtggactggctggttcggaaaagcagcctag

SEQ ID NO: 262641 - DNA, 1917 bp, Artificial Sequence
  derived and/or modified sequence
atggccaccggtgctaatgcaactccgcttgacttccccagcaaaaagagaaagagaagtaggtggaatcaggataccatggaacagaaaactgttataccaggtatgcctacagtgatcccaccagggctgacacgtgagcaggagcgggcttatattgtacagctccagattgaagatctgacaagaaagctgagaaccggggacctcgggattccccctaatcctgaggaccggtccccgagccccgagccgatttacaatagcgagggaaagcgattaaacacaagagaattcaggacccggaagaagcttgaggaagagaggcataaccttattacagaaatggtggctttgaaccccgactttaaaccacccgcagattacaagcccccagccacacgcgttagtgacaaagtgatgattccgcaggatgaataccctgaaatcaatttcgtcggtctcctgatcgggcctcgtggaaacacactcaagaatatagagaaagagtgcaatgctaagattatgatcagaggtaagggatctgtgaaggaagggaaagtgggcaggaaagacgggcaaatgctgcctggcgaagacgaacccctgcatgcattggtcactgctaacaccatggaaaatgtcaagaaggcagtggaacagatacgcaatatcctgaagcagggaatcgaaacgcctgaggatcagaacgatctgagaaagatgcagcttagagaattagccagactgaacggtactctacgggaggacgataataggatactccggccatggcagtccagtgaaactcgtagtatcacaaacacaaccgtctgtacaaagtgtgggggtgccggtcatattgcctcggactgcaagtttcagaggcccggtgatccgcagagcgctcaggacaaggctaggatggacaaggagtatctgtctctgatggctgagctgggagaggcacccgttccagcgagcgtcggctccacttctggtccagcgactaccccattggcgtctgcccctcgccctgctgcgcctgcaaacaatcctcctcctcccagcctcatgtccacaacacagtctaggcctccttggatgaattccgggccttccgaatcgagaccctaccacggcatgcacggaggcggaccagggggacccggaggtggcccacacagcttcccacatcccctaccctctctgacagggggtcatggaggccatcctatgcagcataatcctaacgggccaccgccaccatggatgcagcctcctccccctccaatgaaccagggtccacaccctcctggccaccatgggccaccacccatggatcaatacctgggctcaaccccggttgggagcggtgtttacaggctacatcaggggaaggggatgatgcccccacctcctatgggcatgatgccacctccaccccctccaccctccgggcagcctccaccgccaccctccgggcctctgccaccttggcaacagcaacagcagcaacctcctccgccacccccaccctcatctagcatggcgtcttctacaccactaccttggcagcagaatacaaccaccacaaccacgtccgctggcactggctcaatccccccatggcaacagcagcaggccgctgcagcagcctcccctggagccccacagatgcaaggcaaccctaccatggtcccccttccccctggcgtgcagccccctctgccccctggagcgccaccccctccaccacccccaccccctggaagcgcgggaatgatgatcccccctcgaggcggagatggaccatcgcacgagtcagaagactttcccaggcctctggtcaccctccccggaagacagccccagcagcgaccctggtggacaggatggtttggaaaagctgcttag

SEQ ID NO: 262642 - DNA, 3094 bp, Artificial Sequence
  derived and/or modified sequence
cggagctcagttcacgcagtaacaaatgaagtgcgcgctgcgacacctcccagcccaccgaactccgccgccatttcctcgcttggcctaacggttcggccaatcccagcgcgcatcaagaaggactgaggctccgccaatcggaggccgccgatttcgacccttcgcctcggcccggcccaatccaggccccggccccgccgcccccggcccgcccccgcggtgccctctctcctccctctttgtgcgtctcgcgccgccgccgcccgccgcgtgagaggacgggctccgcgcgctccggcagcgcattcgggtcccctccccccgggaggcttgcgaaggagaagccgccgcagaggaaaagcaggtgccggtgcctgtccccgggggcgccatggcgaccggagcgaacgccacgccgttggacttcccaagtaagaagcggaagaggagccgctggaaccaagacacaatggaacagaagacagtgattccaggaatgcctacagttattccccctggacttactcgagaacaagaaagagcttatatagtgcaactgcagatagaagacctgactcgtaaactgcgcacaggagacctgggcatcccccctaaccctgaggacaggtccccttcccctgagcccatctacaatagcgaggggaagcggcttaacacccgagagttccgcacccgcaaaaagctggaagaggagcggcacaacctcatcacagagatggttgcactcaatccggatttcaagccacctgcagattacaaacctccagcaacacgtgtgagtgataaagtcatgattccacaagatgagtacccagaaatcaactttgtggggctgctcatcgggcccagagggaacaccctgaagaacatagagaaggagtgcaatgccaagattatgatccgggggaaagggtctgtgaaagaagggaaggttgggcgcaaagatggccagatgttgccaggagaagatgagccacttcatgccctggttactgccaatacaatggagaacgtcaaaaaggcagtggaacagataagaaacatcctgaagcagggtatcgagactccagaggaccagaatgatctacggaagatgcagcttcgggagttggctcgcttaaatgggacccttcgggaagacgataacaggatcttaagaccctggcagagctcagagacccgcagcattaccaacaccacagtgtgtaccaagtgtggaggggctggccacattgcttcagactgtaaattccaaaggcctggtgatcctcagtcagctcaggataaagcacggatggataaagaatatttgtccctcatggctgaactgggtgaagcacctgtcccagcatctgtgggctccacctctgggcctgccaccacacccctggccagcgcacctcgtcctgctgctcccgccaacaacccacctccaccgtctctcatgtctaccacccagagccgcccaccctggatgaattctggcccttcagagagtcggccctaccacggcatgcatggaggtggtcctggtgggcccggaggtggcccccacagcttcccacacccattacccagcctgacaggtgggcatggtggacatcccatgcagcacaaccccaatggacccccacccccttggatgcagccaccaccaccaccgatgaaccagggcccccaccctcctgggcaccatggccctcctccaatggatcagtacctgggaagtacgcctgtgggctctggggtctatcgcctgcatcaaggaaaaggtatgatgccgccaccacctatgggcatgatgccgccgccgccgccgcctcccagtgggcagcccccaccccctccctctggtcctcttcccccatggcaacaacagcagcagcagcctccgccaccccctccgcccagcagcagtatggcttccagtacccccttgccatggcagcaaaatacgacgactaccaccacgagcgctggcacagggtccatcccgccatggcaacagcagcaggcggctgccgcagcttctccaggagcccctcagatgcaaggcaaccccactatggtgcccctgccccccggggtccagccgcctctgccgcctggggcccctccccctccgccgcctccaccgcctggttccgccggcatgatgatccctccccgcggcggcgatggcccgagccatgagagtgaggactttccgcgcccattggtgacccttccaggcagacagcctcagcaacgcccctggtggacaggatggttcggcaaagcagcctgagttatttttgtggacggaatcggaacacgctggctccatatcgtgaaatttttattaatttttttctttttcctttgttacttctttatcttttcctttcttcagactccgtccaaggagatgctctccccggtcttctgctgcaatttagattcctttcccttctctccagttctccttcccttaccaaggagaggggagcaaatggttttgggcaagggctttggccattcatgtcaagctggttgtgggtttttcaaggtgccatagccacccccaaagatgtttgtttaaagcgtggggttttttaatctctgccacccttgtcaagggagtcttgtaaagttgccgagggtaggttcatctccaggtttcgggattcccatccgtcctggcgatcctgccagcagtgggtgggcagcctgagctccctcgggctcgcctgccagcctggagttcttcctgtgctccttgatcacctgagctgcctcagattccatttggtcctctccttcctggaaggcttccttttatgttttgttttaatcccaaatgtctgaatgttttgcagtgtgtaggggtttgagccccttgttcattctccttcctttttcctcccgcttccctctccatgaagtgattctgttgacaataatgtatactgcgcgttctcttcactggtttatctgcagaaatttctctgggcttttttcggtgttagattcaacactgcgctaaagcggggatgttccattgaataaaagagcagtgtggttttctggg

SEQ ID NO: 262643 - protein, 571 aa, Artificial Sequence
  derived and/or modified sequence
MATGANATPLDFPSKKRKRSRWNQDTMEQKTVIPGMPTVIPPGLTREQERAYIVQLQIEDLTRKLRTGDLGIPPNPEDRSPSPEPIYNSEGKRLNTREFRTRKKLEEERHNLITEMVALNPDFKPPADYKPPATRVSDKVMIPQDEYPEINFVGLLIGPRGNTLKNIEKECNAKIMIRGKGSVKEGKVGRKDGQMLPGEDEPLHALVTANTMENVKKAVEQIRNILKQGIETPEDQNDLRKMQLRELARLNGTLREDDNRILRPWQSSETRSITNTTVCTKCGGAGHIASDCKFQRPGDPQSAQDKARMDKEYLSLMAELGEAPVPASVGSTSGPATTPLASAPRPAAPANNPPPPSLMSTTQSRPPWMNSGPSESRPYHGMHGGGPGGPGGGPHSFPHPLPSLTGGHGGHPMQHNPNGPPPPWMQPPPPPMNQGPHPPGHHGPPPMGKSVPGKYACGLWGLSPASRKRYDAATTYGHDAAAAAASQWAAPTPSLWSSSPMATTAAAASATPSAQQQYGFQYPLAMAAKIPPRGGDGPSHESEDFPRPLVTLPGRQPQQRPWWTGWFGKAA

SEQ ID NO: 262644 - DNA, 1716 bp, Artificial Sequence
  derived and/or modified sequence
atggccaccggcgccaacgccacccccctggacttccccagcaagaagagaaagagaagcagatggaaccaggacaccatggagcagaagaccgtgatccccggcatgcccaccgtgatcccccccggcctgaccagagagcaggagagagcctacatcgtgcagctgcagatcgaggacctgaccagaaagctgagaaccggcgacctgggcatcccccccaaccccgaggacagaagccccagccccgagcccatctacaacagcgagggcaagagactgaacaccagagagttcagaaccagaaagaagctggaggaggagagacacaacctgatcaccgagatggtggccctgaaccccgacttcaagccccccgccgactacaagccccccgccaccagagtgagcgacaaggtgatgatcccccaggacgagtaccccgagatcaacttcgtgggcctgctgatcggccccagaggcaacaccctgaagaacatcgagaaggagtgcaacgccaagatcatgatcagaggcaagggcagcgtgaaggagggcaaggtgggcagaaaggacggccagatgctgcccggcgaggacgagcccctgcacgccctggtgaccgccaacaccatggagaacgtgaagaaggccgtggagcagatcagaaacatcctgaagcagggcatcgagacccccgaggaccagaacgacctgagaaagatgcagctgagagagctggccagactgaacggcaccctgagagaggacgacaacagaatcctgagaccctggcagagcagcgagaccagaagcatcaccaacaccaccgtgtgcaccaagtgcggcggcgccggccacatcgccagcgactgcaagttccagagacccggcgacccccagagcgcccaggacaaggccagaatggacaaggagtacctgagcctgatggccgagctgggcgaggcccccgtgcccgccagcgtgggcagcaccagcggccccgccaccacccccctggccagcgcccccagacccgccgcccccgccaacaacccccccccccccagcctgatgagcaccacccagagcagacccccctggatgaacagcggccccagcgagagcagaccctaccacggcatgcacggcggcggccccggcggccccggcggcggcccccacagcttcccccaccccctgcccagcctgaccggcggccacggcggccaccccatgcagcacaaccccaacggccccccccccccctggatgcagcccccccccccccccatgaaccagggcccccacccccccggccaccacggccccccccccatgggcaagagcgtgcccggcaagtacgcctgcggcctgtggggcctgagccccgccagcagaaagagatacgacgccgccaccacctacggccacgacgccgccgccgccgccgccagccagtgggccgcccccacccccagcctgtggagcagcagccccatggccaccaccgccgccgccgccagcgccacccccagcgcccagcagcagtacggcttccagtaccccctggccatggccgccaagatcccccccagaggcggcgacggccccagccacgagagcgaggacttccccagacccctggtgaccctgcccggcagacagccccagcagagaccctggtggaccggctggttcggcaaggccgcctag

SEQ ID NO: 262645 - DNA, 1716 bp, Artificial Sequence
  derived and/or modified sequence
atggccactggcgcaaatgcaacgccactggattttccttcaaaaaaaaggaaaagatcccggtggaaccaggacacaatggaacagaagaccgtcattccaggaatgccgaccgtcattccgcctggactgactagagaacaagagagggcatatatcgtgcagctgcagatcgaggatctgactcgcaagctcagaaccggagatctgggcattccccctaatcccgaggatcgaagcccaagtcccgagcccatctacaactctgagggcaaacggttgaatacacgcgagtttaggaccaggaagaagctggaggaagaacgccataatctcattactgaaatggtggcactgaatcctgattttaagccaccagccgattataagccaccagcgacccgggtgtctgataaggtgatgatcccccaggatgagtatcccgaaatcaacttcgtcggcctgctgatcggccccaggggaaacaccttgaaaaatatcgaaaaagaatgtaacgccaagattatgatcagggggaaaggatccgttaaggaaggcaaggtgggaagaaaggatggacagatgcttcccggagaggacgagccccttcacgcacttgtgacagccaataccatggagaacgtaaagaaagcagtggaacagattcgcaatatattaaagcaaggaatcgaaaccccagaggaccaaaatgacttacgcaagatgcaactgcgggagctagccaggctcaatggcaccctgcgggaggacgacaacagaatcctgcggccttggcagtcctccgagacaagaagcatcaccaacacaactgtctgtaccaagtgcggcggggccggccacattgcgtcggactgtaagttccagcggccaggggatccccaatccgcccaggataaggccagaatggacaaggaatacttatctctcatggccgagctgggggaggctcctgtgccggcctccgtgggctctacctctgggcccgcaacaacccccctggcttctgcacctcgtccagccgctcctgctaataacccacctcccccctcactcatgtctacaacgcagtcccggcccccttggatgaattccggacccagcgaaagccgcccatatcatgggatgcatggtggcgggcccggcggaccaggaggggggccacatagtttcccccatcccctgccatccttgacgggtgggcatggaggccaccccatgcagcataacccaaatggtcctccacccccctggatgcagccgccacctccccctatgaaccagggtccgcacccccctgggcatcatgggcccccgccaatgggtaagtcagtacctggcaaatacgcctgcggcctgtggggtctctccccggctagcaggaaaaggtatgatgccgctacaacgtatggccacgacgctgccgctgctgcggcctcccagtgggccgccccaactcctagcctttggtcctcttcccccatggccaccaccgctgcggcagcatccgccactccgtctgcgcagcagcaatacgggtttcaatatccactggctatggccgctaagataccccctcgaggaggggatggacccagccacgagagcgaagatttccccagaccactggtgacgctccctggcaggcagcctcagcagcgaccatggtggacgggctggtttggcaaagccgcctag

SEQ ID NO: 262646 - DNA, 1716 bp, Artificial Sequence
  derived and/or modified sequence
atggccactggagccaatgccacccccctggacttccccagcaagaagaggaagaggagccgctggaaccaggacaccatggagcagaagacagtcatccctggcatgcccaccgtcatccccccaggcctgacccgggagcaggagcgggcctacatcgtgcagctgcagatcgaggacctgaccaggaagctgaggactggagacctgggcatcccccccaacccagaagatagaagccccagccctgagcccatctacaacagcgagggcaagaggctgaacacccgggagttccgcaccaggaagaagctggaggaggagcggcacaacctgatcacagagatggtggccctgaacccagacttcaagcccccagctgactacaagcccccagccaccagggtgtctgacaaggtgatgatcccccaggatgagtacccagagatcaactttgtgggcctgctgattggcccccggggcaacaccctgaagaacatcgagaaggagtgcaatgccaagatcatgatccggggcaagggctctgtgaaggagggcaaggtgggcaggaaggatggccagatgctgcctggagaagatgagcccctgcacgccctggtgacagccaacaccatggagaatgtgaagaaggctgtggagcagatccggaacatcctgaagcagggcatcgagaccccagaggaccagaatgacctgaggaagatgcagctgcgggagctggcccggctgaatggcaccctgcgggaggatgacaaccgcatcctgcggccctggcagagcagcgagaccaggagcatcaccaacaccaccgtgtgcaccaagtgtggcggggccggccacatcgccagtgactgcaagttccagaggcctggggacccccagagcgcccaggacaaggccaggatggacaaggagtacctgagcctgatggccgagctgggggaggcccctgtgcctgcctctgtgggcagcaccagcggccctgccaccacccccctggccagcgcccccaggcctgctgccccagccaacaaccccccaccacccagcctgatgagcaccacccagagccggcccccctggatgaacagcggccccagcgagagccggccctaccacggcatgcatggaggcggccctgggggccctgggggcggcccccacagcttcccccaccccctgcccagcctgactggaggccacggcggccaccccatgcagcacaaccccaacggccccccaccaccctggatgcagcccccacctccacccatgaaccagggcccccaccccccaggccaccacggccccccacccatgggcaagtctgtgcctgggaagtatgcctgtggcctgtggggcctgagccctgccagcaggaagagatatgatgctgccaccacctacggccatgatgctgctgctgctgctgccagccagtgggccgcccccacccccagcctgtggagcagcagccccatggccaccacagctgctgctgccagcgccaccccatctgcccagcagcagtatggcttccagtaccccctggccatggccgccaagatccccccaagaggaggagatggccccagccatgaaagtgaggacttcccccggcccctggtgaccctgcccggccggcagccccagcagaggccctggtggacaggctggtttgggaaggccgcctag

SEQ ID NO: 262647 - DNA, 1716 bp, Artificial Sequence
  derived and/or modified sequence
atggccaccggcgccaacgccacccccctggacttccccagcaagaaacggaagaggtcccggtggaaccaggatacaatggagcaaaagacagtcatccctggaatgcccacggtgatccctcccgggctgacacgggaacaagagagagcttatatcgtgcaactccagatcgaggatctgacccgaaagctccggactggcgacctcggcatccctccaaatcctgaagacaggagtccctccccagaacccatctataactctgaagggaagcgactaaatacaagggagtttcggactaggaagaagctagaggaagaaagacataaccttattaccgagatggtggccctcaatcctgatttcaagccccctgctgattataaaccacctgcaacccgcgtctcagacaaggtgatgattccacaagatgagtatcccgaaattaacttcgtaggccttctgatcggaccgcgaggtaatactctaaagaacatcgaaaaggagtgtaacgccaagattatgattcgcgggaaggggagcgtgaaggagggtaaggtgggaaggaaggacggtcaaatgctcccgggagaggacgaacctttgcatgcgctcgttacggccaacactatggaaaatgtgaaaaaggcagttgagcagattcggaatatcctgaagcagggtatagaaaccccggaagaccagaacgatctgagaaaaatgcagctgagagagctagccaggctgaacggcacactgagagaagatgataaccgcatcctgcgtccatggcagtccagtgaaacacgttccatcacaaacaccacagtctgcacgaagtgtgggggtgcaggccacattgctagcgattgcaagtttcagcgacctggagacccccaatctgctcaggataaggcccgcatggataaagagtacctttctttgatggccgagttgggagaagccccggttcctgcctccgtgggatccacaagtgggccggcaacaacaccactagcctcagctcccagacctgcagcaccggcaaacaatcctcccccccccagcttgatgtccacgactcagtcgagaccaccatggatgaattctggccccagtgaatcacggccttatcatggcatgcatggcgggggtcccggtggaccagggggtgggccccactctttcccccatccactgccatcactaacagggggacacggaggccaccccatgcagcacaaccccaacggcccccctcctccatggatgcagcctccgcccccaccaatgaaccaaggaccgcatccccccggtcaccacggaccccccccaatgggtaagagcgtgcccgggaaatatgcatgcggactctgggggctcagtcctgcttcgcgcaagagatacgacgccgccaccacgtacggccacgatgcagcagccgccgccgccagccagtgggccgccccaacaccttccttgtggtcttcctcacccatggcgacaaccgcagccgctgcctccgcaacaccctctgcccagcagcagtatgggtttcagtacccactagccatggcagcaaaaatcccccccagggggggtgatggcccatctcacgagagcgaggatttcccgcgtccgttagtgaccctgccaggcaggcagcctcagcaacgaccctggtggacggggtggtttgggaaagcggcctag

SEQ ID NO: 262648 - DNA, 1716 bp, Artificial Sequence
  derived and/or modified sequence
atggctactggcgctaacgcgactcctctagacttcccgtctaagaaacgaaagcggtcacgttggaaccaggatacgatggagcagaagacggtcatcccagggatgccgaccgtcattcccccaggactgacacgagagcaggagagagcgtatatcgtgcagttgcagattgaagacctcactcggaaacttcgcaccggtgaccttggcatcccccctaaccccgaggaccgctccccgtccccagagcccatatataactccgaggggaaacgcctcaacacaagggagtttcggacacgaaagaaacttgaagaggaacgccacaacttgattaccgagatggtggccctcaatcctgattttaaacccccagccgactacaagcctccggctacaagggtgtctgataaagtgatgatcccacaggatgaataccctgaaattaactttgttgggttgttaattgggccaagaggcaacactctgaagaatattgagaaggaatgcaacgcaaagattatgatccggggaaaaggcagcgtcaaggaaggcaaggttgggaggaaagatggacagatgttacccggagaagacgagccgctgcacgccctggtcacggccaacactatggaaaatgtgaagaaggctgtagaacaaattagaaacatactgaagcagggcatagagacgccagaagaccagaacgacctgcggaagatgcaactgagggaactcgcgcgactgaatggaaccctcagagaagacgacaatcggatcttgcggccatggcagtccagcgaaacaagatccatcacgaacactactgtctgtactaagtgcggaggcgcaggacacattgctagtgattgcaaatttcagaggcccggtgatccccaaagtgctcaagacaaggccagaatggacaaagaatacctcagcctcatggccgaactgggcgaggcacccgtccccgcttcagtcggctccacaagtggcccagcgacgactcctcttgcctcagctccacggcctgctgctccagccaacaatccgcctccgcctagcctaatgtccaccacacaatcccgcccaccttggatgaatagcggtccatccgagtcccggccttatcacggcatgcatgggggaggcccagggggacccggaggagggcctcatagtttccctcacccacttccttctctcaccggcggacacggtggacatcccatgcagcacaatcctaatgggccacctcctccgtggatgcaaccacctcctcccccaatgaatcagggcccacaccctcccggacaccacggccctcccccaatggggaaatccgtcccagggaaatacgcctgtggtctctggggcctatctccggcaagccgcaagaggtacgacgccgcaaccacatacggacatgatgccgctgcagcggctgctagtcaatgggccgcacccaccccatccttatggagtagtagtcccatggcgacgacagccgcagccgcatctgccacaccttcagcccagcaacagtatggtttccagtaccccctagccatggcagccaagatccccccacgcggaggcgatggcccatcccatgagtctgaggattttcccaggcccctggtgactctgcccggaagacagccacagcagagaccatggtggaccgggtggtttggaaaggctgcatag

SEQ ID NO: 262649 - DNA, 2854 bp, Artificial Sequence
  derived and/or modified sequence
gcgacacctcccagcccaccgaactccgccgccatttcctcgcttggcctaacggttcggccaatcccagcgcgcatcaagaaggactgaggctccgccaatcggaggccgccgatttcgacccttcgcctcggcccggcccaatccaggccccggccccgccgcccccggcccgcccccgcggtgccctctctcctccctctttgtgcgtctcgcgccgccgccgcccgccgcgtgagaggacgggctccgcgcgctccggcagcgcattcgggtcccctccccccgggaggcttgcgaaggagaagccgccgcagaggaaaagcaggtgccggtgcctgtccccgggggcgccatggcgaccggagcgaacgccacgccgttggacttcccaagtaagaagcggaagaggagccgctggaaccaagacacaatggaacagaagacagtgattccaggaatgcctacagttattccccctggacttactcgagaacaagaaagagcttatatagtgcaactgcagatagaagacctgactcgtaaactgcgcacaggagacctgggcatcccccctaaccctgaggacaggtccccttcccctgagcccatctacaatagcgaggggaagcggcttaacacccgagagttccgcacccgcaaaaagctggaagaggagcggcacaacctcatcacagagatggttgcactcaatccggatttcaagccacctgcagattacaaacctccagcaacacgtgtgagtgataaagtcatgattccacaagatgagtacccagaaatcaactttgtggggctgctcatcgggcccagagggaacaccctgaagaacatagagaaggagtgcaatgccaagattatgatccgggggaaagggtctgtgaaagaagggaaggttgggcgcaaagatggccagatgttgccaggagaagatgagccacttcatgccctggttactgccaatacaatggagaacgtcaaaaaggcagtggaacagataagaaacatcctgaagcagggtatcgagactccagaggaccagaatgatctacggaagatgcagcttcgggagttggctcgcttaaatgggacccttcgggaagacgataacaggatcttaagaccctggcagagctcagagacccgcagcattaccaacaccacagtgtgtaccaagtgtggaggggctggccacattgcttcagactgtaaattccaaaggcctggtgatcctcagtcagctcaggataaagcacggatggataaagaatatttgtccctcatggctgaactgggtgaagcacctgtcccagcatctgtgggctccacctctgggcctgccaccacacccctggccagcgcacctcgtcctgctgctcccgccaacaacccacctccaccgtctctcatgtctaccacccagagccgcccaccctggatgaattctggcccttcagagagtcggccctaccacggcatgcatggaggtggtcctggtgggcccggaggtggcccccacagcttcccacacccattacccagcctgacaggtgggcatggtggacatcccatgcagcacaaccccaatggacccccacccccttggatgcagccaccaccaccaccgatgaaccagggcccccaccctcctgggcaccatggccctcctccaatgggtaaatcagtacctgggaagtacgcctgtgggctctggggtctatcgcctgcatcaaggaaaaggtatgatgccgccaccacctatgggcatgatgccgccgccgccgccgcctcccagtgggcagcccccaccccctccctctggtcctcttcccccatggcaacaacagcagcagcagcctccgccaccccctccgcccagcagcagtatggcttccagtacccccttgccatggcagcaaagatccctccccgcggcggcgatggcccgagccatgagagtgaggactttccgcgcccattggtgacccttccaggcagacagcctcagcaacgcccctggtggacaggatggttcggcaaagcagcctgagttatttttgtggacggaatcggaacacgctggctccatatcgtgaaatttttattaatttttttctttttcctttgttacttctttatcttttcctttcttcagactccgtccaaggagatgctctccccggtcttctgctgcaatttagattcctttcccttctctccagttctccttcccttaccaaggagaggggagcaaatggttttgggcaagggctttggccattcatgtcaagctggttgtgggtttttcaaggtgccatagccacccccaaagatgtttgtttaaagcgtggggttttttaatctctgccacccttgtcaagggagtcttgtaaagttgccgagggtaggttcatctccaggtttcgggattcccatccgtcctggcgatcctgccagcagtgggtgggcagcctgagctccctcgggctcgcctgccagcctggagttcttcctgtgctccttgatcacctgagctgcctcagattccatttggtcctctccttcctggaaggcttccttttatgttttgttttaatcccaaatgtctgaatgttttgcagtgtgtaggggtttgagccccttgttcattctccttcctttttcctcccgcttccctctccatgaagtgattctgttgacaataatgtatactgcgcgttctcttcactggtttatctgcagaaatttctctgggcttttttcggtgttagattcaacactgcgctaaagcggggatgttccattgaataaaagagcagtgtggttttctggg

SEQ ID NO: 262650 - protein, 548 aa, Artificial Sequence
  derived and/or modified sequence
MATGANATPLDFPSKKRKRSRWNQDTMEQKTVIPGMPTVIPPGLTREQERAYIVQLQIEDLTRKLRTGDLGIPPNPEDRSPSPEPIYNSEGKRLNTREFRTRKKLEEERHNLITEMVALNPDFKPPADYKPPATRVSDKVMIPQDEYPEINFVGLLIGPRGNTLKNIEKECNAKIMIRGKGSVKEGKVGRKDGQMLPGEDEPLHALVTANTMENVKKAVEQIRNILKQGIETPEDQNDLRKMQLRELARLNGTLREDDNRILRPWQSSETRSITNTTVCTKCGGAGHIASDCKFQRPGDPQSAQDKARMDKEYLSLMAELGEAPVPASVGSTSGPATTPLASAPRPAAPANNPPPPSLMSTTQSRPPWMNSGPSESRPYHGMHGGGPGGPGGGPHSFPHPLPSLTGGHGGHPMQHNPNGPPPPWMQPPPPPMNQGPHPPGHHGPPPMDQYLGSTPVGSGVYRLHQGKGMMPPPPMGMMPPPPPPPSGQPPPPPSGPLPPWQQQQQQPPPPPPPSSSMASSTPLPWQQRSLPAAAMARAMRVRTFRAHW

SEQ ID NO: 262651 - protein, 433 aa, Artificial Sequence
  derived and/or modified sequence
MVALNPDFKPPADYKPPATRVSDKVMIPQDEYPEINFVGLLIGPRGNTLKNIEKECNAKIMIRGKGSVKEGKVGRKDGQMLPGEDEPLHALVTANTMENVKKAVEQIRNILKQGIETPEDQNDLRKMQLRELARLNGTLREDDNRILRPWQSSETRSITNTTVCTKCGGAGHIASDCKFQRPGDPQSAQDKARMDKEYLSLMAELGEAPVPASVGSTSGPATTPLASAPRPAAPANNPPPPSLMSTTQSRPPWMNSGPSESRPYHGMHGGGPGGPGGGPHSFPHPLPSLTGGHGGHPMQHNPNGPPPPWMQPPPPPMNQGPHPPGHHGPPPMDQYLGSTPVGSGVYRLHQGKGMMPPPPMGMMPPPPPPPSGQPPPPPSGPLPPWQQQQQQPPPPPPPSSSMASSTPLPWQQRSLPAAAMARAMRVRTFRAHW

SEQ ID NO: 262652 - DNA, 3527 bp, Artificial Sequence
  derived and/or modified sequence
agtaacaaatgaagtgcgcgctgcgacacctcccagcccaccgaactccgccgccatttcctcgcttggcctaacggttcggccaatcccagcgcgcatcaagaaggactgaggctccgccaatcggaggccgccgatttcgacccttcgcctcggcccggcccaatccaggccccggccccgccgcccccggcccgcccccgcggtgccctctctcctccctctttgtgcgtctcgcgccgccgccgcccgccgcgtgagaggacgggctccgcgcgctccggcagcgcattcgggtcccctccccccgggaggcttgcgaaggagaagccgccgcagaggaaaagcaggtgccggtgcctgtccccgggggcgccatggcgaccggagcgaacgccacgccgttggacttcccaagtaagaagcggaagaggagccgctggaaccaagacacaatggaacagaagacagtgattccaggaatgcctacagttattccccctggacttactcgagaacaagaaagagcttatatagtgcaactgcagatagaagacctgactcgtaaactgcgcacaggagacctgggcatcccccctaaccctgaggacaggtccccttcccctgagcccatctacaatagcgaggggaagcggcttaacacccgagagttccgcacccgcaaaaagctggaagaggagcggcacaacctcatcacagagatggttgcactcaatccggatttcaagccacctgcagattacaaacctccagcaacacgtgtgagtgataaagtcatgattccacaagatgagtacccagaaatcaactttgtggggctgctcatcgggcccagagggaacaccctgaagaacatagagaaggagtgcaatgccaagattatgatccgggggaaagggtctgtgaaagaagggaaggttgggcgcaaagatggccagatgttgccaggagaagatgagccacttcatgccctggttactgccaatacaatggagaacgtcaaaaaggcagtggaacagataagaaacatcctgaagcagggtatcgagactccagaggaccagaatgatctacggaagatgcagcttcgggagttggctcgcttaaatgggacccttcgggaagacgataacaggatcttaagaccctggcagagctcagagacccgcagcattaccaacaccacagtgtgtaccaagtgtggaggggctggccacattgcttcagactgtaaattccaaaggcctggtgatcctcagtcagctcaggataaagcacggatggataaagaatatttgtccctcatggctgaactgggtgaagcacctgtcccagcatctgtgggctccacctctgggcctgccaccacacccctggccagcgcacctcgtcctgctgctcccgccaacaacccacctccaccgtctctcatgtctaccacccagagccgcccaccctggatgaattctggcccttcagagagtcggccctaccacggcatgcatggaggtggtcctggtgggcccggaggtggcccccacagcttcccacacccattacccagcctgacaggtgggcatggtggacatcccatgcagcacaaccccaatggacccccacccccttggatgcagccaccaccaccaccgatgaaccagggcccccaccctcctgggcaccatggccctcctccaatggatcagtacctgggaagtacgcctgtgggctctggggtctatcgcctgcatcaaggaaaaggtatgatgccgccaccacctatgggcatgatgccgccgccgccgccgcctcccagtgggcagcccccaccccctccctctggtcctcttcccccatggcaacaacagcagcagcagcctccgccaccccctccgcccagcagcagtatggcttccagtacccccttgccatggcagcaaaatacgacgactaccaccacgagcgctggcacagggtccatcccgccatggcaacagcagcaggcggctgccgcagcttctccaggagcccctcagatgcaaggcaaccccactatggtgcccctgccccccggggtccagccgcctctgccgcctggggcccctccccctccgccgcctccaccgcctggttccgccggcatgatgtatgccccgccccctcctcctccgcctcccatggacccttctaactttgtcaccatgatgggcatgggggtggcgggcatgccgcccttcgggatgcctccagctcccccaccgcctccaccacagaactagacttgttttttaagaaaatatatattatatatagagagaattggtctcgtttaaacacgccgaacctcaccatatggagccagacattgggacgcacgcatgtgattgtgtgtgcacgcatgtgtgtgtgtgcacgcactgggctgggccaagcgactgaggattcgcttgggaacgggcaggtggtagtaggggcgccagcttgggctctcctggcgccccgtagcatcgagtgtcttctttgtcttctttctctcctcacccaactccctttgcctctccccaaaccgggccgccaggatccctccccgcggcggcgatggcccgagccatgagagtgaggactttccgcgcccattggtgacccttccaggcagacagcctcagcaacgcccctggtggacaggatggttcggcaaagcagcctgagttatttttgtggacggaatcggaacacgctggctccatatcgtgaaatttttattaatttttttctttttcctttgttacttctttatcttttcctttcttcagactccgtccaaggagatgctctccccggtcttctgctgcaatttagattcctttcccttctctccagttctccttcccttaccaaggagaggggagcaaatggttttgggcaagggctttggccattcatgtcaagctggttgtgggtttttcaaggtgccatagccacccccaaagatgtttgtttaaagcgtggggttttttaatctctgccacccttgtcaagggagtcttgtaaagttgccgagggtaggttcatctccaggtttcgggattcccatccgtcctggcgatcctgccagcagtgggtgggcagcctgagctccctcgggctcgcctgccagcctggagttcttcctgtgctccttgatcacctgagctgcctcagattccatttggtcctctccttcctggaaggcttccttttatgttttgttttaatcccaaatgtctgaatgttttgcagtgtgtaggggtttgagccccttgttcattctccttcctttttcctcccgcttccctctccatgaagtgattctgttgacaataatgtatactgcgcgttctcttcactggtttatctgcagaaatttctctgggcttttttcggtgttagattcaacactgcgctaaagcggggatgttccattgaataaaagagcagtgtggttttctgggaaaaaaaaaaaaaaaaaa

SEQ ID NO: 262653 - DNA, 1647 bp, Artificial Sequence
  derived and/or modified sequence
atggccaccggcgccaacgccacccccctggacttccccagcaagaagagaaagagaagcagatggaaccaggacaccatggagcagaagaccgtgatccccggcatgcccaccgtgatcccccccggcctgaccagagagcaggagagagcctacatcgtgcagctgcagatcgaggacctgaccagaaagctgagaaccggcgacctgggcatcccccccaaccccgaggacagaagccccagccccgagcccatctacaacagcgagggcaagagactgaacaccagagagttcagaaccagaaagaagctggaggaggagagacacaacctgatcaccgagatggtggccctgaaccccgacttcaagccccccgccgactacaagccccccgccaccagagtgagcgacaaggtgatgatcccccaggacgagtaccccgagatcaacttcgtgggcctgctgatcggccccagaggcaacaccctgaagaacatcgagaaggagtgcaacgccaagatcatgatcagaggcaagggcagcgtgaaggagggcaaggtgggcagaaaggacggccagatgctgcccggcgaggacgagcccctgcacgccctggtgaccgccaacaccatggagaacgtgaagaaggccgtggagcagatcagaaacatcctgaagcagggcatcgagacccccgaggaccagaacgacctgagaaagatgcagctgagagagctggccagactgaacggcaccctgagagaggacgacaacagaatcctgagaccctggcagagcagcgagaccagaagcatcaccaacaccaccgtgtgcaccaagtgcggcggcgccggccacatcgccagcgactgcaagttccagagacccggcgacccccagagcgcccaggacaaggccagaatggacaaggagtacctgagcctgatggccgagctgggcgaggcccccgtgcccgccagcgtgggcagcaccagcggccccgccaccacccccctggccagcgcccccagacccgccgcccccgccaacaacccccccccccccagcctgatgagcaccacccagagcagacccccctggatgaacagcggccccagcgagagcagaccctaccacggcatgcacggcggcggccccggcggccccggcggcggcccccacagcttcccccaccccctgcccagcctgaccggcggccacggcggccaccccatgcagcacaaccccaacggccccccccccccctggatgcagcccccccccccccccatgaaccagggcccccacccccccggccaccacggccccccccccatggaccagtacctgggcagcacccccgtgggcagcggcgtgtacagactgcaccagggcaagggcatgatgccccccccccccatgggcatgatgcccccccccccccccccccccagcggccagcccccccccccccccagcggccccctgcccccctggcagcagcagcagcagcagcccccccccccccccccccccagcagcagcatggccagcagcacccccctgccctggcagcagagaagcctgcccgccgccgccatggccagagccatgagagtgagaaccttcagagcccactggtag

SEQ ID NO: 262654 - DNA, 1647 bp, Artificial Sequence
  derived and/or modified sequence
atggcaacgggagcgaacgccaccccactcgattttccatccaaaaaaaggaagagaagcaggtggaatcaggacaccatggaacagaagactgttattcctgggatgcccacagtgattccgccaggattaacgcgcgagcaggagagagcatacattgtacaactgcagattgaagatctgacaaggaaactcagaactggagatctgggaatcccacccaatcccgaggatcggagcccctctcctgagcctatctacaattccgagggtaagaggcttaacacaagagagttcaggacacgcaagaagctggaggaagagcgccataatcttattactgagatggtggcactaaatccagattttaagcctcccgccgattataagccccctgcaacaagggtgagtgacaaagttatgatcccgcaggatgagtatcctgaaattaatttcgttggactcctgatcgggccaaggggtaatacgttaaaaaacattgaaaaagaatgcaacgccaagataatgatccggggtaaggggagcgttaaggaaggtaaggttggtagaaaagacggccagatgctgcccggcgaggatgagcccttacacgccttggtgactgctaatactatggagaacgtgaagaaggcggtggaacagatcagaaatatcttgaagcagggcatcgaaacacccgaagatcagaatgaccttcggaagatgcagcttagagagctcgctcgtctgaacgggactctgcgtgaggacgataacaggatccttcgcccctggcagagttctgagactaggagtattacaaacacaaccgtgtgcacgaaatgtggcggggccggacacattgccagcgactgcaaatttcagagacccggcgacccgcagagcgctcaggacaaagctaggatggacaaagagtatttgtcccttatggcagaactgggggaggccccagttcctgccagcgtcggctcaaccagtggcccagcgactaccccactggcaagtgcgccgcgtcccgcggctcccgcgaacaacccgccacctccctctctgatgtctaccacacaaagtagaccaccctggatgaacagtggaccatctgagagtcgtccctatcacggcatgcacggaggcgggccggggggacctggaggggggcctcactctttccctcaccccctgccatccttgacaggagggcatggtggccacccgatgcagcataatccaaacggtccaccaccgccatggatgcagccacctccaccaccaatgaatcagggcccacacccccccggtcatcatggtcctcccccaatggatcagtatctaggttcaaccccagtcggttccggcgtttacaggctgcatcagggcaagggaatgatgccacccccccctatgggtatgatgcccccaccacccccccccccaagcggccaaccccctcccccaccatctggaccgctaccaccttggcaacagcagcagcagcagcccccgccacccccgcccccttcgtcctccatggcctcctccacaccacttccttggcagcaaaggagcctacccgccgccgccatggctcgggctatgcgggtccgtacgttccgggctcattggtag

SEQ ID NO: 262655 - DNA, 1647 bp, Artificial Sequence
  derived and/or modified sequence
atggccactggagccaatgccacccccctggacttccccagcaagaagaggaagaggagccgctggaaccaggacaccatggagcagaagacagtcatccctggcatgcccaccgtcatccccccaggcctgacccgggagcaggagcgggcctacatcgtgcagctgcagatcgaggacctgaccaggaagctgaggactggagacctgggcatcccccccaacccagaagatagaagccccagccctgagcccatctacaacagcgagggcaagaggctgaacacccgggagttccgcaccaggaagaagctggaggaggagcggcacaacctgatcacagagatggtggccctgaacccagacttcaagcccccagctgactacaagcccccagccaccagggtgtctgacaaggtgatgatcccccaggatgagtacccagagatcaactttgtgggcctgctgattggcccccggggcaacaccctgaagaacatcgagaaggagtgcaatgccaagatcatgatccggggcaagggctctgtgaaggagggcaaggtgggcaggaaggatggccagatgctgcctggagaagatgagcccctgcacgccctggtgacagccaacaccatggagaatgtgaagaaggctgtggagcagatccggaacatcctgaagcagggcatcgagaccccagaggaccagaatgacctgaggaagatgcagctgcgggagctggcccggctgaatggcaccctgcgggaggatgacaaccgcatcctgcggccctggcagagcagcgagaccaggagcatcaccaacaccaccgtgtgcaccaagtgtggcggggccggccacatcgccagtgactgcaagttccagaggcctggggacccccagagcgcccaggacaaggccaggatggacaaggagtacctgagcctgatggccgagctgggggaggcccctgtgcctgcctctgtgggcagcaccagcggccctgccaccacccccctggccagcgcccccaggcctgctgccccagccaacaaccccccaccacccagcctgatgagcaccacccagagccggcccccctggatgaacagcggccccagcgagagccggccctaccacggcatgcatggaggcggccctgggggccctgggggcggcccccacagcttcccccaccccctgcccagcctgactggaggccacggcggccaccccatgcagcacaaccccaacggccccccaccaccctggatgcagcccccacctccacccatgaaccagggcccccaccccccaggccaccacggccccccacccatggaccagtacctgggcagcacccctgtgggcagcggcgtgtaccgcctgcaccagggcaagggcatgatgcctcctccacccatgggcatgatgcctcctcctcctcctccacccagcggccagcccccacctccacccagcggccccctgcccccctggcagcagcagcagcagcagcccccacctcctcctccacccagcagctccatggccagcagcacccccctgccctggcagcagaggagcctgcctgctgctgccatggcccgggccatgagggtgaggaccttccgggcccactggtag

SEQ ID NO: 262656 - DNA, 1647 bp, Artificial Sequence
  derived and/or modified sequence
atggccaccggcgccaacgccacccccctggacttccccagcaagaaaaggaaaaggagcaggtggaaccaagatacgatggaacagaagaccgtcatccccggaatgcctactgtcattcccccggggctgactagggagcaggaacgagcttacatcgtgcagctgcagattgaagacctcacaagaaagctgcgcacgggcgacctggggatcccgccaaacccggaggaccggtctcctagccctgaacccatttacaactccgagggcaaacggcttaacaccagagagtttcgcacacggaagaagttagaagaagaacggcacaacctcatcactgaaatggtggctctgaacccggatttcaagccacctgctgattacaagcctcctgctaccagggtgagtgataaagtcatgattcctcaggacgagtaccctgaaatcaacttcgttggattgttaatcggcccacgagggaacacactgaagaatatcgagaaggaatgcaatgccaaaattatgattagaggaaaaggaagcgtaaaagaaggtaaggttggtcggaaagacgggcagatgttgccaggcgaggacgagcctcttcacgccctggtgaccgccaatacgatggagaacgtaaagaaggcggtcgagcagatcagaaatatactgaagcagggaatagagaccccagaagatcagaatgatttgcgaaaaatgcaattgcgcgagcttgcccggcttaacggcactctcagggaggatgataatcgcattttaaggccatggcagtctagcgaaaccaggtcaatcactaacacaaccgtgtgcaccaaatgtgggggagctggtcacatcgccagcgattgcaagtttcaaagacctggggatccccaatcagcccaagacaaagcaaggatggacaaagagtatctgagcctaatggctgagttaggggaagcacccgtgcccgcctccgtaggcagcacctctggccctgcaactacaccacttgcctcagctccacgcccagccgccccggcaaacaaccctcccccccccagtctgatgtccacgactcaatctcgccccccatggatgaattctggtcccagtgaatcccgcccttaccacggaatgcacggaggaggacccggaggcccgggcggtggaccacattctttccctcacccactgcccagcctgacaggcggtcacggtggccatcccatgcaacacaaccctaatggaccacccccaccgtggatgcagcccccaccgccacctatgaatcaaggccctcaccccccagggcaccatggtcccccccctatggaccaatacctgggctcaaccccggttggcagcggggtctataggcttcaccaaggaaaggggatgatgccaccacctccgatgggtatgatgccccctcctcccccaccacctagcggccagcctccccctccaccctccggacccctgccaccttggcaacaacagcaacagcagccgcctcctccaccaccaccatcttcgtcgatggcaagctcaacacctttaccctggcaacagcgaagcctcccagcagccgctatggcacgggctatgcgcgtgagaacatttcgcgcccattggtag

SEQ ID NO: 262657 - DNA, 1647 bp, Artificial Sequence
  derived and/or modified sequence
atggcaaccggagctaacgccacacctctcgattttccctccaagaagaggaaaaggtctcggtggaaccaggacactatggaacagaagaccgtgatacccggtatgcccaccgtgattccacccggactgaccagagagcaagagagggcctacatcgtacagctgcagattgaagacttgactagaaaattgcgaacgggcgatctcggaatcccacctaaccctgaagatcgctcgccatctccggaaccaatctataattccgaaggcaagagactgaacacacgcgaattccgtacaagaaaaaaattagaggaagagcgtcacaacctcattacagaaatggtggcactgaatccagattttaaaccaccagccgactataagccccctgctacaagggtctccgataaagtgatgatcccacaggacgagtatccagaaatcaactttgtggggctgttaatcggcccacggggaaatacccttaagaacatcgagaaagaatgcaacgcgaagattatgatcagaggtaaaggatccgtgaaggaggggaaggttgggagaaaagatgggcagatgctcccgggtgaggacgagccactgcatgccctcgttactgcaaataccatggaaaatgtgaaaaaagcggttgagcaaattagaaatatcctgaagcagggtatagagactcccgaagatcagaatgacttacgtaagatgcaactccgggaattggctcgattgaacggcaccctgagagaggatgacaatcgcatcctgcggccttggcagagctccgagacaaggtccatcactaacacaacagtgtgcacaaaatgcggtggcgctggccacatcgcttccgactgtaaattccagcgaccaggtgatccccaaagtgctcaggataaggctaggatggacaaggaatacctctcgctgatggccgagctcggcgaagcccctgtgcccgcttccgtaggaagcacctccgggccagcaactaccccactggccagcgctccccgtccagccgcacctgccaacaacccaccacccccttcgctgatgagcacgacccagtccaggcccccatggatgaattctggcccatcagagtctcggccttaccatggaatgcacggcggaggtccgggtggtccaggcggaggtccccattccttcccccatcccctgcccagtctgactgggggacatggcggacacccaatgcaacataatccaaatggacctccccctccttggatgcaaccaccacctcctccaatgaaccagggccctcatcctccaggtcaccacggaccacccccaatggaccagtacctcggaagcacaccagtgggatccggggtttatcggctgcatcagggcaagggcatgatgccccctccacctatgggcatgatgcctcccccaccccctcccccttctggccagccaccgcctcccccttctggtcccctgcccccttggcaacagcagcagcagcagcctccccctccgccacctcccagctctagcatggcttcctcaacacccctgccttggcaacaaagatcactcccagccgcagccatggcacgtgccatgcgtgtgaggacctttagggcccattggtag

SEQ ID NO: 262658 - DNA, 1920 bp, Artificial Sequence
  derived and/or modified sequence
atggccaccggcgccaacgccacccccctggacttccccagcaagaagagaaagagaagcagatggaaccaggacaccatggagcagaagaccgtgatccccggcatgcccaccgtgatcccccccggcctgaccagagagcaggagagagcctacatcgtgcagctgcagatcgaggacctgaccagaaagctgagaaccggcgacctgggcatcccccccaaccccgaggacagaagccccagccccgagcccatctacaacagcgagggcaagagactgaacaccagagagttcagaaccagaaagaagctggaggaggagagacacaacctgatcaccgagatggtggccctgaaccccgacttcaagccccccgccgactacaagccccccgccaccagagtgagcgacaaggtgatgatcccccaggacgagtaccccgagatcaacttcgtgggcctgctgatcggccccagaggcaacaccctgaagaacatcgagaaggagtgcaacgccaagatcatgatcagaggcaagggcagcgtgaaggagggcaaggtgggcagaaaggacggccagatgctgcccggcgaggacgagcccctgcacgccctggtgaccgccaacaccatggagaacgtgaagaaggccgtggagcagatcagaaacatcctgaagcagggcatcgagacccccgaggaccagaacgacctgagaaagatgcagctgagagagctggccagactgaacggcaccctgagagaggacgacaacagaatcctgagaccctggcagagcagcgagaccagaagcatcaccaacaccaccgtgtgcaccaagtgcggcggcgccggccacatcgccagcgactgcaagttccagagacccggcgacccccagagcgcccaggacaaggccagaatggacaaggagtacctgagcctgatggccgagctgggcgaggcccccgtgcccgccagcgtgggcagcaccagcggccccgccaccacccccctggccagcgcccccagacccgccgcccccgccaacaacccccccccccccagcctgatgagcaccacccagagcagacccccctggatgaacagcggccccagcgagagcagaccctaccacggcatgcacggcggcggccccggcggccccggcggcggcccccacagcttcccccaccccctgcccagcctgaccggcggccacggcggccaccccatgcagcacaaccccaacggccccccccccccctggatgcagcccccccccccccccatgaaccagggcccccacccccccggccaccacggccccccccccatggaccagtacctgggcagcacccccgtgggcagcggcgtgtacagactgcaccagggcaagggcatgatgccccccccccccatgggcatgatgcccccccccccccccccccccagcggccagcccccccccccccccagcggccccctgcccccctggcagcagcagcagcagcagcccccccccccccccccccccagcagcagcatggccagcagcacccccctgccctggcagcagaacaccaccaccaccaccaccagcgccggcaccggcagcatccccccctggcagcagcagcaggccgccgccgccgccagccccggcgccccccagatgcagggcaaccccaccatggtgcccctgccccccggcgtgcagccccccctgccccccggcgcccccccccccccccccccccccccccccggcagcgccggcatgatgtacgccccccccccccccccccccccccccatggaccccagcaacttcgtgaccatgatgggcatgggcgtggccggcatgccccccttcggcatgccccccgcccccccccccccccccccccagaactag

SEQ ID NO: 262659 - DNA, 1302 bp, Artificial Sequence
  derived and/or modified sequence
atggtggccctgaaccccgacttcaagccccccgccgactacaagccccccgccaccagagtgagcgacaaggtgatgatcccccaggacgagtaccccgagatcaacttcgtgggcctgctgatcggccccagaggcaacaccctgaagaacatcgagaaggagtgcaacgccaagatcatgatcagaggcaagggcagcgtgaaggagggcaaggtgggcagaaaggacggccagatgctgcccggcgaggacgagcccctgcacgccctggtgaccgccaacaccatggagaacgtgaagaaggccgtggagcagatcagaaacatcctgaagcagggcatcgagacccccgaggaccagaacgacctgagaaagatgcagctgagagagctggccagactgaacggcaccctgagagaggacgacaacagaatcctgagaccctggcagagcagcgagaccagaagcatcaccaacaccaccgtgtgcaccaagtgcggcggcgccggccacatcgccagcgactgcaagttccagagacccggcgacccccagagcgcccaggacaaggccagaatggacaaggagtacctgagcctgatggccgagctgggcgaggcccccgtgcccgccagcgtgggcagcaccagcggccccgccaccacccccctggccagcgcccccagacccgccgcccccgccaacaacccccccccccccagcctgatgagcaccacccagagcagacccccctggatgaacagcggccccagcgagagcagaccctaccacggcatgcacggcggcggccccggcggccccggcggcggcccccacagcttcccccaccccctgcccagcctgaccggcggccacggcggccaccccatgcagcacaaccccaacggccccccccccccctggatgcagcccccccccccccccatgaaccagggcccccacccccccggccaccacggccccccccccatggaccagtacctgggcagcacccccgtgggcagcggcgtgtacagactgcaccagggcaagggcatgatgccccccccccccatgggcatgatgcccccccccccccccccccccagcggccagcccccccccccccccagcggccccctgcccccctggcagcagcagcagcagcagcccccccccccccccccccccagcagcagcatggccagcagcacccccctgccctggcagcagagaagcctgcccgccgccgccatggccagagccatgagagtgagaaccttcagagcccactggtag

SEQ ID NO: 262660 - DNA, 2022 bp, Artificial Sequence
  derived and/or modified sequence
atggccaccggcgccaacgccacccccctgggcaagctgggcccccccggcctgccccccctgcccggccccaagggcggcttcgagcccggccccccccccgcccccggccccggcgccggcctgctggcccccggcccccccccccccccccccgtgggcagcatgggcgccctgaccgccgccttccccttcgccgccctgcccccccccccccccccccccccccccccccccccccagcagccccccccccccccccccccccccagccccggcgccagctacccccccccccagccccccccccccccccccctgtaccagagagtgagccccccccagcccccccccccccagccccccagaaaggaccagcagcccggccccgccggcggcggcggcgacttccccagcaagaagagaaagagaagcagatggaaccaggacaccatggagcagaagaccgtgatccccggcatgcccaccgtgatcccccccggcctgaccagagagcaggagagagcctacatcgtgcagctgcagatcgaggacctgaccagaaagctgagaaccggcgacctgggcatcccccccaaccccgaggacagaagccccagccccgagcccatctacaacagcgagggcaagagactgaacaccagagagttcagaaccagaaagaagctggaggaggagagacacaacctgatcaccgagatggtggccctgaaccccgacttcaagccccccgccgactacaagccccccgccaccagagtgagcgacaaggtgatgatcccccaggacgagtaccccgagatcaacttcgtgggcctgctgatcggccccagaggcaacaccctgaagaacatcgagaaggagtgcaacgccaagatcatgatcagaggcaagggcagcgtgaaggagggcaaggtgggcagaaaggacggccagatgctgcccggcgaggacgagcccctgcacgccctggtgaccgccaacaccatggagaacgtgaagaaggccgtggagcagatcagaaacatcctgaagcagggcatcgagacccccgaggaccagaacgacctgagaaagatgcagctgagagagctggccagactgaacggcaccctgagagaggacgacaacagaatcctgagaccctggcagagcagcgagaccagaagcatcaccaacaccaccgtgtgcaccaagtgcggcggcgccggccacatcgccagcgactgcaagttccagagacccggcgacccccagagcgcccaggacaaggccagaatggacaaggagtacctgagcctgatggccgagctgggcgaggcccccgtgcccgccagcgtgggcagcaccagcggccccgccaccacccccctggccagcgcccccagacccgccgcccccgccaacaacccccccccccccagcctgatgagcaccacccagagcagacccccctggatgaacagcggccccagcgagagcagaccctaccacggcatgcacggcggcggccccggcggccccggcggcggcccccacagcttcccccaccccctgcccagcctgaccggcggccacggcggccaccccatgcagcacaaccccaacggccccccccccccctggatgcagcccccccccccccccatgaaccagggcccccacccccccggccaccacggccccccccccatggaccagtacctgggcagcacccccgtgggcagcggcgtgtacagactgcaccagggcaagggcatgatgccccccccccccatgggcatgatgcccccccccccccccccccccagcggccagcccccccccccccccagcggccccctgcccccctggcagcagcagcagcagcagcccccccccccccccccccccagcagcagcatggccagcagcacccccctgccctggcagcagagaagcctgcccgccgccgccatggccagagccatgagagtgagaaccttcagagcccactggtag

SEQ ID NO: 262661 - DNA, 1842 bp, Artificial Sequence
  derived and/or modified sequence
atggagcagaagaccgtgatccccggcatgcccaccgtgatcccccccggcctgaccagagagcaggagagagcctacatcgtgcagctgcagatcgaggacctgaccagaaagctgagaaccggcgacctgggcatcccccccaaccccgaggacagaagccccagccccgagcccatctacaacagcgagggcaagagactgaacaccagagagttcagaaccagaaagaagctggaggaggagagacacaacctgatcaccgagatggtggccctgaaccccgacttcaagccccccgccgactacaagccccccgccaccagagtgagcgacaaggtgatgatcccccaggacgagtaccccgagatcaacttcgtgggcctgctgatcggccccagaggcaacaccctgaagaacatcgagaaggagtgcaacgccaagatcatgatcagaggcaagggcagcgtgaaggagggcaaggtgggcagaaaggacggccagatgctgcccggcgaggacgagcccctgcacgccctggtgaccgccaacaccatggagaacgtgaagaaggccgtggagcagatcagaaacatcctgaagcagggcatcgagacccccgaggaccagaacgacctgagaaagatgcagctgagagagctggccagactgaacggcaccctgagagaggacgacaacagaatcctgagaccctggcagagcagcgagaccagaagcatcaccaacaccaccgtgtgcaccaagtgcggcggcgccggccacatcgccagcgactgcaagttccagagacccggcgacccccagagcgcccaggacaaggccagaatggacaaggagtacctgagcctgatggccgagctgggcgaggcccccgtgcccgccagcgtgggcagcaccagcggccccgccaccacccccctggccagcgcccccagacccgccgcccccgccaacaacccccccccccccagcctgatgagcaccacccagagcagacccccctggatgaacagcggccccagcgagagcagaccctaccacggcatgcacggcggcggccccggcggccccggcggcggcccccacagcttcccccaccccctgcccagcctgaccggcggccacggcggccaccccatgcagcacaaccccaacggccccccccccccctggatgcagcccccccccccccccatgaaccagggcccccacccccccggccaccacggccccccccccatggaccagtacctgggcagcacccccgtgggcagcggcgtgtacagactgcaccagggcaagggcatgatgccccccccccccatgggcatgatgcccccccccccccccccccccagcggccagcccccccccccccccagcggccccctgcccccctggcagcagcagcagcagcagcccccccccccccccccccccagcagcagcatggccagcagcacccccctgccctggcagcagaacaccaccaccaccaccaccagcgccggcaccggcagcatccccccctggcagcagcagcaggccgccgccgccgccagccccggcgccccccagatgcagggcaaccccaccatggtgcccctgccccccggcgtgcagccccccctgccccccggcgcccccccccccccccccccccccccccccggcagcgccggcatgatgtacgccccccccccccccccccccccccccatggaccccagcaacttcgtgaccatgatgggcatgggcgtggccggcatgccccccttcggcatgccccccgcccccccccccccccccccccagaactag

SEQ ID NO: 262662 - DNA, 1920 bp, Artificial Sequence
  derived and/or modified sequence
atggcgacaggtgccaatgccacaccactcgacttcccatctaaaaaaaggaaacggtcccggtggaatcaagatacgatggagcagaaaacagtgatccccggcatgcccactgtgatcccaccaggcctcaccagggaacaggaaagggcctacatcgtccagctgcagatcgaagatctaaccagaaaactcagaacaggcgacctgggcatcccgcccaatccagaggatcgcagcccgagtccagaacctatctataatagcgagggtaaacggcttaacacccgggagttcagaacgaggaagaaattggaggaggaaagacataatttgatcacggaaatggtagcgttgaatcccgacttcaagccacctgctgactataaaccaccagcgaccagggtttcagacaaagtgatgatcccccaggacgaatatcctgaaattaatttcgtgggtctgttaatcggaccacgcggcaataccctgaagaacattgagaaggagtgcaatgccaagattatgattaggggaaagggaagtgtcaaggagggaaaggtgggacggaaagatggacagatgctgcccggcgaagacgagccgttacatgcactggtaaccgccaataccatggagaatgtcaagaaagctgtggaacagatacgcaatatcctgaagcagggaatcgagacccccgaagatcagaacgaccttagaaaaatgcagcttcgagaactggctagactgaacggaacactgagagaggacgataaccgaatcttgagaccatggcagagctccgagacccggtcgatcacaaatacaaccgtatgcacgaagtgtggtggcgccggccacatagcgagtgactgcaaatttcagcgacctggagacccacaaagtgctcaggacaaggcaaggatggacaaagaatacctctctctgatggcagagctcggcgaagcacctgtccccgcgtctgtggggagtacaagtggaccggcaacaacaccccttgcttccgctccccgccccgctgccccagcaaataatcctccgccaccttcactgatgtctacaacgcaatcgcgaccgccctggatgaacagcggacctagcgagagccgaccataccacggaatgcatggcggtggaccaggtggccctggaggggggccacatagctttccccatcctcttccatctcttaccggcggtcacggaggccaccccatgcagcataaccccaacgggccacctccaccttggatgcaaccacccccccccccgatgaaccagggcccccatcccccaggacaccacggacctccacctatggaccagtatcttggcagtacacctgttggttccggtgtttatagattgcatcagggcaaggggatgatgccaccccccccgatgggaatgatgccgccccctcctcctcctccttcaggccagcctccacctcctccaagcggacccctaccaccgtggcagcaacagcagcaacagcccccccccccaccgccaccttcatcctcaatggcctcctcgacaccccttccatggcagcaaaacacaacaacaaccacaacaagcgctggcacaggctctatccccccatggcagcagcaacaggctgctgcagctgcctcccctggcgcaccccagatgcaaggtaatcctaccatggtgccactcccccctggggttcagccacccctgcctccaggtgcgcctccccctcctcccccacctcctcctggctccgcgggaatgatgtatgcacctccccccccgccaccacctccaatggatccctccaactttgtgactatgatgggtatgggcgtagctggaatgccaccctttggaatgccgcctgctcccccccctccaccaccacagaactag

SEQ ID NO: 262663 - DNA, 1302 bp, Artificial Sequence
  derived and/or modified sequence
atggttgcactcaaccctgacttcaagccacccgccgactataaacctccggcaacacgggtaagcgataaagtgatgatcccacaggacgagtatccggaaatcaactttgtcggcctgctgattggcccacgaggcaacacattgaagaatatcgagaaagaatgtaacgccaagattatgatcagggggaaaggcagcgtgaaggaaggaaaggtcggccgtaaggacggacaaatgttaccaggagaagacgagcccttgcacgctcttgtaaccgccaacacgatggagaacgtaaaaaaggcggtggaacaaataagaaacatcttaaaacaaggtatcgagacacccgaggatcagaatgaccttagaaaaatgcagcttagagagctggcacggctgaatggtactctgcgcgaggatgacaacagaattttaagaccgtggcagagcagcgaaactaggtccatcaccaatactaccgtgtgtacaaagtgcggcggggccgggcatatcgcctcagattgcaagttccagcgacctggcgacccccagtccgcacaggataaagcgaggatggacaaagagtacttaagtctgatggctgagttgggtgaggcaccagtgccagccagcgtcggctccacaagtgggcccgctactacacctttggcgtccgcaccaaggccagcagctcccgcaaacaatcccccacctccttcactgatgtccacaacccagtcacgcccgccttggatgaattctggcccgtcagagagcaggccgtaccacggaatgcatggaggaggtcctggagggccgggcggggggcctcactcttttcctcaccctctgcccagcctgaccggaggacatggaggtcaccccatgcagcataatcctaacggcccaccaccaccatggatgcaaccgccccccccacctatgaatcaagggcctcacccgccaggccaccatggacctccaccaatggaccaatatctggggtccacgcccgtaggtagcggggtgtaccgtctccatcagggaaaggggatgatgcctccgccgccgatgggcatgatgcccccgccaccgccccccccaagtgggcagcccccccctccaccaagcggaccactccctccatggcagcaacaacaacagcagccacctccgcctccccctccatcctctagtatggcttcaagcacccccctaccctggcagcaacgttcactccccgccgccgctatggcccgggccatgcgggttcgcaccttcagggcccactggtag

SEQ ID NO: 262664 - DNA, 2022 bp, Artificial Sequence
  derived and/or modified sequence
atggctaccggcgcgaacgcaacgcctctcggaaaactgggtccacccggacttcctccgctgccaggccccaagggcggctttgagcccggccccccccccgcccctggaccaggtgcaggcctgctggcgcccggccccccacccccaccaccagtcggatctatgggtgcgctgacggccgcgttcccgttcgcagcacttccccctccacccccgcccccgcctccccccccacctcaacaacccccaccaccccccccaccgccctcaccgggggctagctatccaccgccacagcctccccccccccctcctttatatcagagggtgtctcccccccaaccccccccaccccagccgccaaggaaagaccaacagccaggacccgctggcgggggcggagactttccaagcaagaagcgcaaaaggtctcgttggaatcaggataccatggaacagaaaacagtcattcccggaatgcccaccgttattccacccggactgacgagagaacaggagagggcctacatcgttcaactgcagatagaggaccttactagaaagctccgcaccggcgacctgggcatccccccaaaccctgaggatagaagtcctagtcctgagcctatctacaacagcgagggtaaacgcctgaatacgagggagtttagaacacgcaagaagctagaggaagagcggcacaatttaattaccgagatggtggccctgaatccagactttaagccaccagccgattacaaacctccagccacgcgggtatccgataaggtgatgattccacaggacgagtaccccgagattaactttgtaggacttctgatcggcccacggggtaacacgctcaagaacattgaaaaagaatgcaatgcaaagatcatgatccgtgggaagggaagcgtgaaagagggtaaagtaggaaggaaagatggacaaatgctgccaggggaagacgagccactacacgcactcgtgactgccaacaccatggaaaacgtcaaaaaggcagtggagcagatacgcaacattctgaagcaaggaatcgagacacccgaagaccaaaacgacctgcggaaaatgcaactgcgagaactcgctagactgaatggaaccctgcgcgaggatgataaccgtattcttcgcccctggcaatcaagcgagactcgttctatcacaaacacaacagtgtgcactaaatgcggtggtgcaggacatatagctagtgattgtaagtttcagaggcctggggacccgcagagcgcccaggataaggcccgcatggacaaggagtacctgagcttaatggctgaactaggcgaagcacccgtccctgcttcagttggtagcacttccgggccagcaaccacacccctcgcgtcagctcctcggcctgccgcacccgcaaataatcctccccctccttctttgatgtctacaacccagagtagacccccgtggatgaacagcggaccctcagaatccaggccctatcacggcatgcacgggggcggcccaggtgggcccggtggcggccctcacagctttccccatccactccccagccttacaggtggccacgggggccacccgatgcagcacaatccaaacggaccaccacctccctggatgcagcccccacccccccctatgaatcagggacctcaccctccaggacatcacggtccacctcctatggaccagtatctcggcagcactcctgtcggatcgggggtgtaccgtctgcatcagggcaagggaatgatgccccctccgcctatgggcatgatgccacctccaccccccccccctagtggtcagcctcccccccccccatccggcccccttcctccctggcaacaacagcagcagcagccccccccccctcccccaccatcctcctccatggccagtagtacaccattaccttggcagcaaagatcgcttccagccgccgccatggccagggcaatgcgggtccgaaccttcagagcccattggtag

SEQ ID NO: 262665 - DNA, 1842 bp, Artificial Sequence
  derived and/or modified sequence
atggagcagaagaccgttattccaggcatgccaacagtgattccacccggactgacccgggagcaagaacgggcttacatcgtccaattgcagatagaggacctgactcgaaaactccgcaccggagacttgggtatccctccgaaccccgaggatcggagcccctcccccgagcccatatacaattctgagggcaagcgtctgaatacccgggaatttagaaccagaaagaaactcgaagaggaacgccacaatctgatcactgaaatggtggcgctgaatcctgattttaagccacccgccgactataagccccctgccactcgcgtgtccgacaaagtgatgatccctcaggacgaatatcctgaaataaacttcgttgggctgctgatcggcccgcgtgggaacacacttaagaatatagagaaggagtgcaatgctaaaatcatgatccggggaaagggtagcgttaaggaaggaaaggtgggccggaaggacggacagatgctgcccggagaggacgagccacttcacgccctggtgacagctaacacaatggagaacgtcaagaaagctgtggaacagattcggaacatactcaagcagggaatcgaaacacccgaggaccagaacgaccttcgcaagatgcagctccgggagcttgcccgccttaacggcaccttacgggaagacgataatcgaattctgagaccctggcagtcatccgagactcggtcaattacaaacaccactgtctgtacaaagtgtggaggcgccggtcacatcgctagtgactgcaaatttcagaggccaggggacccacaaagtgcccaagacaaggcccgaatggataaagaatacctgtctctgatggcggagctcggcgaggctcccgtccccgcctccgtgggctccacaagtggacccgccacaactcccttagcctctgccccacggcccgccgcacccgccaacaatcctcccccaccaagcctgatgtccacgacccagtcaaggccaccctggatgaactccgggccctcagagagtagaccttaccatgggatgcatgggggcggaccaggaggtcccggaggtggtccccattcatttccccacccactcccttccttgacgggcggccacggggggcatcccatgcaacacaacccgaatggtccgccacctccctggatgcaaccacctccccctcctatgaaccagggcccccatcctcctggccaccatggaccacccccaatggatcagtacctgggctcaacccccgtgggttctggggtttatcggcttcaccagggcaagggtatgatgccgcccccccctatgggcatgatgcccccacctccccctcctccaagcggccagccccctcctcccccctcaggtcctttacctccttggcaacagcagcagcagcagccgccaccacctcctccaccgtcctcgtcaatggcctcttcgaccccattgccatggcagcaaaacaccactacgactacaacgagcgccggtaccggttcaatccccccatggcagcaacagcaggcagcagccgcagcatcccctggcgccccccagatgcagggtaatcccacaatggtgcctcttcccccaggggtccaaccacctttgccaccgggagctcctcctccccctccaccaccgcctcccggtagcgcagggatgatgtatgcccctcccccaccccctccccctcccatggatccctcaaacttcgtcaccatgatggggatgggggtcgccggtatgccacctttcgggatgccccccgcaccgccccctcctccaccccagaactag

SEQ ID NO: 262666 - DNA, 1920 bp, Artificial Sequence
  derived and/or modified sequence
atggccactggagccaatgccacccccctggacttccccagcaagaagaggaagaggagccgctggaaccaggacaccatggagcagaagacagtcatccctggcatgcccaccgtcatccccccaggcctgacccgggagcaggagcgggcctacatcgtgcagctgcagatcgaggacctgaccaggaagctgaggactggagacctgggcatcccccccaacccagaagatagaagccccagccctgagcccatctacaacagcgagggcaagaggctgaacacccgggagttccgcaccaggaagaagctggaggaggagcggcacaacctgatcacagagatggtggccctgaacccagacttcaagcccccagctgactacaagcccccagccaccagggtgtctgacaaggtgatgatcccccaggatgagtacccagagatcaactttgtgggcctgctgattggcccccggggcaacaccctgaagaacatcgagaaggagtgcaatgccaagatcatgatccggggcaagggctctgtgaaggagggcaaggtgggcaggaaggatggccagatgctgcctggagaagatgagcccctgcacgccctggtgacagccaacaccatggagaatgtgaagaaggctgtggagcagatccggaacatcctgaagcagggcatcgagaccccagaggaccagaatgacctgaggaagatgcagctgcgggagctggcccggctgaatggcaccctgcgggaggatgacaaccgcatcctgcggccctggcagagcagcgagaccaggagcatcaccaacaccaccgtgtgcaccaagtgtggcggggccggccacatcgccagtgactgcaagttccagaggcctggggacccccagagcgcccaggacaaggccaggatggacaaggagtacctgagcctgatggccgagctgggggaggcccctgtgcctgcctctgtgggcagcaccagcggccctgccaccacccccctggccagcgcccccaggcctgctgccccagccaacaaccccccaccacccagcctgatgagcaccacccagagccggcccccctggatgaacagcggccccagcgagagccggccctaccacggcatgcatggaggcggccctgggggccctgggggcggcccccacagcttcccccaccccctgcccagcctgactggaggccacggcggccaccccatgcagcacaaccccaacggccccccaccaccctggatgcagcccccacctccacccatgaaccagggcccccaccccccaggccaccacggccccccacccatggaccagtacctgggcagcacccctgtgggcagcggcgtgtaccgcctgcaccagggcaagggcatgatgcctcctccacccatgggcatgatgcctcctcctcctcctccacccagcggccagcccccacctccacccagcggccccctgcccccctggcagcagcagcagcagcagcccccacctcctcctccacccagcagctccatggccagcagcacccccctgccctggcagcagaacaccaccaccaccaccaccagcgctggcaccggcagcatccccccctggcagcagcagcaggccgctgctgctgccagccctggggccccccagatgcagggcaaccccaccatggtgcccctgcccccaggagtgcagccccccctgcccccaggggcccctcctcctcctcctcctcctcctcctggcagcgctggcatgatgtatgcccctcctcctcctcctcctccacccatggaccccagcaactttgtgaccatgatgggcatgggcgtggccggcatgccacccttcggcatgcccccagcccctcctcctcctccaccccagaactag

SEQ ID NO: 262667 - DNA, 1302 bp, Artificial Sequence
  derived and/or modified sequence
atggtggccctgaacccagacttcaagcccccagctgactacaagcccccagccaccagggtgtctgacaaggtgatgatcccccaggatgagtacccagagatcaactttgtgggcctgctgattggcccccggggcaacaccctgaagaacatcgagaaggaatgtaatgccaagatcatgatccggggcaaaggatctgtgaaggagggcaaggtgggcaggaaggatggccagatgctgcccggggaggatgagcccctgcacgccctggtgacagccaacaccatggagaatgtgaagaaggctgtggagcagatccggaacatcctgaagcagggcatcgagaccccagaggaccagaatgacctgaggaagatgcagctgcgggagctggcccggctgaatggcaccctgagagaagatgacaaccgcatcctgcggccctggcagagcagcgagaccaggagcatcaccaacaccaccgtgtgcaccaagtgtggcggggccggccacatcgccagtgactgcaagttccagaggcctggggacccccagagcgcccaggacaaggccaggatggacaaggagtacctgagcctgatggccgagctgggggaggcccctgtgcctgcctctgtgggcagcaccagcggccctgccaccacccccctggccagcgcccccaggcctgctgccccagccaacaaccccccaccacccagcctgatgagcaccacccagagcaggcctccctggatgaacagcggccccagcgagagccggccctaccacggcatgcacggcggcggccctgggggccctgggggcggcccccacagcttcccccaccccctgcccagcctgaccggcggccatggaggccaccccatgcagcacaaccccaatggacctcctccaccctggatgcagcccccacctccacccatgaaccagggcccccaccccccaggccaccacggccccccacccatggaccagtacctgggcagcacccctgtgggcagcggcgtgtaccgcctgcaccagggcaagggcatgatgcctcctccacccatgggcatgatgcctcctcctcctcctcctccttctggccagcccccacctcctccttctggccccctgcccccctggcagcagcagcagcagcagcccccacctcctcctccacccagcagctccatggccagcagcacccccctgccctggcagcagaggagcctgcctgctgctgccatggcccgggccatgagggtgaggaccttccgggcccactggtag

SEQ ID NO: 262668 - DNA, 2022 bp, Artificial Sequence
  derived and/or modified sequence
atggccactggagccaatgccacccccctgggcaagctgggccccccaggcctgccccccctgcccggccccaagggcggctttgagcccggccccccaccagcccctggccctggggccggcctgctggcccctggccccccacctcctcctcctgtgggctccatgggcgccctgacagctgccttcccctttgctgccctgcccccacctcctcctcctcctcctcctcctccaccccagcagcccccacctcctcctcctccacccagccctggggccagctaccccccaccccagcccccacctcctccacccctgtaccagagggtgtccccaccccagcccccaccaccccagccccccaggaaggaccagcagcccggccctgctgggggcggcggggacttccccagcaagaagaggaagaggagccgctggaaccaggacaccatggagcagaagacagtcatccctggcatgcccaccgtcatccccccaggcctgacccgggagcaggagcgggcctacatcgtgcagctgcagatcgaggacctgaccaggaagctgaggactggagacctgggcatcccccccaaccctgaggacaggagccccagccctgagcccatctacaacagcgagggcaagaggctgaacacccgggagttccgcaccaggaagaagctggaggaggagcggcacaacctgatcacagagatggtggccctgaacccagacttcaagcccccagctgactacaagcccccagccaccagggtgtctgacaaggtgatgatcccccaggatgagtacccagagatcaactttgtgggcctgctgattggcccccggggcaacaccctgaagaacatcgagaaggaatgtaatgccaagatcatgatccggggcaaaggatctgtgaaggagggcaaggtgggcaggaaggatggccagatgctgcccggggaggatgagcccctgcacgccctggtgacagccaacaccatggagaatgtgaagaaggctgtggagcagatccggaacatcctgaagcagggcatcgagaccccagaggaccagaatgacctgaggaagatgcagctgcgggagctggcccggctgaatggcaccctgagagaagatgacaaccgcatcctgcggccctggcagagcagcgagaccaggagcatcaccaacaccaccgtgtgcaccaagtgtggcggggccggccacatcgccagtgactgcaagttccagaggcctggggacccccagagcgcccaggacaaggccaggatggacaaggagtacctgagcctgatggccgagctgggggaggcccctgtgcctgcctctgtgggcagcaccagcggccctgccaccacccccctggccagcgcccccaggcctgctgccccagccaacaaccccccaccacccagcctgatgagcaccacccagagcaggcctccctggatgaacagcggccccagcgagagccggccctaccacggcatgcacggcggcggccctgggggccctgggggcggcccccacagcttcccccaccccctgcccagcctgaccggcggccatggaggccaccccatgcagcacaaccccaatggacctcctccaccctggatgcagcccccacctccacccatgaaccagggcccccaccccccaggccaccacggccccccacccatggaccagtacctgggcagcacccctgtgggcagcggcgtgtaccgcctgcaccagggcaagggcatgatgcctcctccacccatgggcatgatgcctcctcctcctcctcctccttctggccagcccccacctcctccttctggccccctgcccccctggcagcagcagcagcagcagcccccacctcctcctccacccagcagctccatggccagcagcacccccctgccctggcagcagaggagcctgcctgctgctgccatggcccgggccatgagggtgaggaccttccgggcccactggtag

SEQ ID NO: 262669 - DNA, 1842 bp, Artificial Sequence
  derived and/or modified sequence
atggagcagaagacagtcatccctggcatgcccaccgtcatccccccaggcctgacccgggagcaggagcgggcctacatcgtgcagctgcagatcgaggacctgaccaggaagctgaggactggagacctgggcatcccccccaacccagaagatagaagccccagccctgagcccatctacaacagcgagggcaagaggctgaacacccgggagttccgcaccaggaagaagctggaggaggagcggcacaacctgatcacagagatggtggccctgaacccagacttcaagcccccagctgactacaagcccccagccaccagggtgtctgacaaggtgatgatcccccaggatgagtacccagagatcaactttgtgggcctgctgattggcccccggggcaacaccctgaagaacatcgagaaggagtgcaatgccaagatcatgatccggggcaagggctctgtgaaggagggcaaggtgggcaggaaggatggccagatgctgcctggagaagatgagcccctgcacgccctggtgacagccaacaccatggagaatgtgaagaaggctgtggagcagatccggaacatcctgaagcagggcatcgagaccccagaggaccagaatgacctgaggaagatgcagctgcgggagctggcccggctgaatggcaccctgcgggaggatgacaaccgcatcctgcggccctggcagagcagcgagaccaggagcatcaccaacaccaccgtgtgcaccaagtgtggcggggccggccacatcgccagtgactgcaagttccagaggcctggggacccccagagcgcccaggacaaggccaggatggacaaggagtacctgagcctgatggccgagctgggggaggcccctgtgcctgcctctgtgggcagcaccagcggccctgccaccacccccctggccagcgcccccaggcctgctgccccagccaacaaccccccaccacccagcctgatgagcaccacccagagccggcccccctggatgaacagcggccccagcgagagccggccctaccacggcatgcatggaggcggccctgggggccctgggggcggcccccacagcttcccccaccccctgcccagcctgactggaggccacggcggccaccccatgcagcacaaccccaacggccccccaccaccctggatgcagcccccacctccacccatgaaccagggcccccaccccccaggccaccacggccccccacccatggaccagtacctgggcagcacccctgtgggcagcggcgtgtaccgcctgcaccagggcaagggcatgatgcctcctccacccatgggcatgatgcctcctcctcctcctccacccagcggccagcccccacctccacccagcggccccctgcccccctggcagcagcagcagcagcagcccccacctcctcctccacccagcagctccatggccagcagcacccccctgccctggcagcagaacaccaccaccaccaccaccagcgctggcaccggcagcatccccccctggcagcagcagcaggccgctgctgctgccagccctggggccccccagatgcagggcaaccccaccatggtgcccctgcccccaggagtgcagccccccctgcccccaggggcccctcctcctcctcctcctcctcctcctggcagcgctggcatgatgtatgcccctcctcctcctcctcctccacccatggaccccagcaactttgtgaccatgatgggcatgggcgtggccggcatgccacccttcggcatgcccccagcccctcctcctcctccaccccagaactag

SEQ ID NO: 262670 - DNA, 1920 bp, Artificial Sequence
  derived and/or modified sequence
atggccaccggcgccaacgccacccccctggacttccccagcaagaaaaggaagagatccaggtggaatcaggatacgatggaacaaaaaactgtgatacccgggatgcccaccgttattccacctggactgacaagggagcaggaacgggcctatatcgtccagctgcagatcgaggacctcacccgtaagctccgtacaggggatttaggcatccctcctaatcctgaggaccggtccccaagcccagaacccatttacaactccgaaggaaaacggctgaatactcgcgaatttcggacacggaagaagctcgaagaggagcgacacaatctgattacagagatggtggctctcaatcccgacttcaagcccccagcggactataagccacctgctactcgagtttctgacaaagtgatgatcccccaggatgaataccctgagatcaatttcgtgggcctactgatcggtccgcgcggtaacaccttgaagaacatagaaaaggagtgcaacgcaaagatcatgatcaggggtaaggggagcgtaaaagaggggaaagtcggtagaaaggacggacaaatgctcccaggggaagatgagcctctacatgctctggttacagccaataccatggagaatgtgaagaaagccgtggagcaaatcagaaatatcctcaagcaagggatcgagacacccgaagaccagaacgatctccgcaaaatgcagctgcgcgagctggcacggttgaatgggacactaagggaagacgataaccgaatacttcgcccctggcagtctagtgaaactaggtccattaccaatacaactgtttgcaccaaatgcgggggtgcaggccacatcgcgtcggactgcaaatttcagcgaccgggcgacccccagtcagctcaggataaagctaggatggataaagagtacttgtcgcttatggcggagttgggtgaggctcccgtgcctgcttccgtaggctctacaagtggacctgcaactacaccactggccagcgcgccaagaccagccgcacctgccaacaacccacctcccccctcactgatgagtaccacgcagtcccggcctccttggatgaacagtgggccttcagagagccggccctatcacggaatgcatggaggcggccctggcggccccggaggcgggccacattcttttccacatccgctcccaagcttgaccggcggacacggcggacatccaatgcagcataacccgaacggtccccctcccccctggatgcagccacctcctccccctatgaatcagggaccacatccccctggccatcacggaccccctcctatggaccagtacctcggctctacccccgtcggatctggcgtgtatcgcttgcatcagggtaaaggaatgatgccccctcccccaatgggaatgatgccgccacctccaccaccgcccagcggacagcctcctcctcccccgagtggaccactgccaccttggcaacagcagcagcaacagccacccccacctccacccccttcgtccagtatggctagctcaacccctctgccctggcagcagaatactaccacgacaaccaccagtgccggaaccggttctattcccccatggcagcagcaacaggcggccgctgcagcttctcctggagccccacaaatgcaaggcaatccaaccatggtccctctcccccccggagttcagcctcctctgccaccaggcgcacctcccccacccccccccccccctccgggtagcgctggaatgatgtacgccccccccccacccccacctccacctatggacccgtcgaattttgtgactatgatgggcatgggcgtggcgggtatgcccccatttggcatgccaccggctcccccccctccccccccacagaactag

SEQ ID NO: 262671 - DNA, 1302 bp, Artificial Sequence
  derived and/or modified sequence
atggtggccctgaaccccgacttcaagccccccgccgactacaagcccccggcgacccgggtttccgacaaagttatgattcctcaggatgaataccctgagatcaatttcgtaggcctgctgatcggcccacggggtaatacattgaaaaacatagagaaggagtgtaacgcaaaaatcatgatccggggtaaaggatccgtcaaagagggaaaagtcggtcggaaagatgggcagatgctacctggagaagacgaacctctgcatgccctggtcacagctaatactatggagaacgtcaaaaaggcggtagaacaaattaggaatatcctgaagcaaggcatcgagacacccgaagatcagaacgacctaaggaagatgcagctaagagaactcgctagactgaacggaacactccgcgaagacgataacaggattttacggccctggcagagttccgaaactcgctctatcaccaatacaactgtctgcaccaaatgtggcggcgccggccatatcgcatctgactgcaaattccagcggcccggagacccacaaagtgctcaggataaggcacggatggacaaggagtacctttcactgatggctgagctgggcgaggctcctgtacctgccagcgtggggtccacatccggtccggcaacaacccctctggcaagcgccccgcggccagcagctcccgcaaacaatccacctcccccatccctgatgtccacaacccagtcacggccaccatggatgaattcaggtccctcagagtccaggccgtaccatgggatgcacggagggggcccggggggccctgggggagggccacactcgtttccacaccccttaccttccctgacaggaggccatggtggacacccgatgcagcacaatcccaacgggccaccgcccccatggatgcaacctccaccaccgccaatgaatcagggtccccacccaccaggccatcatggccctcccccaatggaccaatatcttgggtctaccccagtagggtcaggtgtttatcgcctgcaccaaggaaaaggcatgatgcctcccccccccatgggaatgatgcccccgccacccccccctccttccgggcagccacctcccccaccgagcggccccttgccgccttggcagcagcagcaacagcaacctccgccacctccccccccttcaagcagtatggcctcctcgacgcctctgccttggcaacagagatccctgcccgctgctgcaatggcacgagccatgagggttaggactttccgggcccactggtag

SEQ ID NO: 262672 - DNA, 2022 bp, Artificial Sequence
  derived and/or modified sequence
atggccaccggcgccaacgccacccccctgggcaagctgggcccccctggactgcctccgctcccaggcccgaagggcggctttgagccgggcccacctccagcaccgggacctggagccggcctacttgcaccagggccgcccccccctccaccagtcggatccatgggtgcactgacagccgctttccccttcgcagcgcttcctcctcctccgccaccaccccctccccctccacctcagcagccacctccgcccccacctcctcctagtcccggtgctagctatccaccaccccagcccccaccccccccacctctttaccagcgagtctcaccccctcaaccgcccccgcctcaacccccgcgtaaggaccagcagccaggacccgccggtggaggcggcgattttccctccaagaaaaggaaaaggtcaagatggaaccaagacaccatggagcagaagaccgttatcccaggcatgcctacagtgatcccacccgggctgactagggaacaggaaagggcatacattgtgcagctgcagatcgaagatcttacaagaaagctgagaaccggcgatctcggtatacctcccaaccccgaagacagaagcccatctcccgaacccatctataattcggagggaaaaaggttgaatacacgtgagtttcgtacacgtaagaagttggaggaagagcgacacaaccttatcaccgagatggtggctcttaaccccgactttaagccacctgctgattataagccacccgcaacgcgagttagcgataaggtaatgataccccaggacgagtacccagagataaactttgtgggcctgttgatcggcccacgcggaaacacactcaagaatatcgagaaggaatgcaacgctaaaattatgatacggggaaagggctctgtgaaagaaggaaaggtgggccgcaaggatggccagatgctcccaggtgaagacgaaccactgcacgcacttgtgacagccaacacgatggagaacgtcaagaaagctgtggaacaaatacgcaatatactgaagcaggggatagaaacgcctgaagaccagaatgatttaagaaagatgcaactgcgagagctggcccgcctgaacggaactctgcgggaggatgataaccgaatcctgcggccctggcagtcatcagagaccagaagtatcaccaataccaccgtgtgcacaaagtgtggtggcgccgggcatattgcctcagattgtaagttccagaggcccggtgatccccaatcagcccaagataaagcaaggatggacaaagagtacctcagtctcatggctgagttaggagaggcacctgtcccagcttctgtgggctcgactagcgggccagctaccacacctctggcttctgctccgcgcccagccgctccggccaataaccctccccccccatcattaatgagcaccacacagtctcgtcccccctggatgaattccggtccaagcgaaagtcggccttatcatggcatgcatggcggtgggccgggcgggccaggaggcggaccacacagttttcctcacccgctcccttcgttgactggaggccatgggggccaccctatgcaacacaacccgaacggtccccccccaccatggatgcaacccccacctcctccaatgaaccagggtccccatccacccgggcaccacggaccgccaccgatggaccagtacctggggtctacaccggtcggatctggtgtttaccggctccatcaggggaagggcatgatgcctccccctcccatgggcatgatgcctcccccgccccctccacccagtggacaaccgccaccccctccctccggtccgctgcccccctggcagcagcaacagcaacagccgccccccccaccccccccaagctcatccatggcctctagcactcccctgccgtggcaacagcgttccctgccagcagctgctatggcacgcgcgatgcgtgtaaggacattccgggctcactggtag

SEQ ID NO: 262673 - DNA, 1842 bp, Artificial Sequence
  derived and/or modified sequence
atggagcagaagaccgtgatccccggcatgcccaccgtgatcccccccggactgacaagggagcaggagcgggcctacatcgtccagctccagatagaagacctaacgagaaagctgcgcactggtgatttgggaatccctccgaaccctgaggatcggagccctagccccgagcctatctataactccgaaggaaagcggctgaacactcgggaatttaggactagaaaaaagcttgaggaagagagacacaacctcattaccgaaatggtggctctcaatcctgacttcaaaccaccggccgattataagccaccagctactagagtgtccgacaaggtcatgattccacaggacgagtacccagagattaacttcgtgggcttacttatcggccctaggggcaatactctgaaaaacatcgaaaaggagtgcaacgcaaaaatcatgatcagggggaagggctcagtgaaagagggaaaggtgggtaggaaggatggtcagatgctgcctggggaagatgagcccctgcatgccttagtcacggctaatacaatggagaacgttaaaaaggccgtagagcagattaggaatattctgaagcagggaattgaaacccccgaggaccagaacgatctccgtaagatgcagctgcgtgagctggcacgactcaatggtactctccgagaagacgacaaccggattctgaggccgtggcaatcttcagagacgcggtccattacaaatacgacagtgtgtacaaaatgcgggggagcagggcatattgccagtgactgtaagttccagaggcctggcgaccctcagtccgctcaagataaggcgcgcatggataaagaatacctcagtcttatggcagaattaggcgaggcgccagttccagcgagtgtgggaagcacaagtgggccagcgaccactccactggcatctgccccccggcctgcggcccctgccaataatcccccaccaccgtccctcatgtctaccactcagtctcggcccccttggatgaattccgggccttctgagtcgcgtccgtaccatggcatgcacggcggaggcccaggcggcccaggtggcggcccacatagttttccgcatcctctgccctccctgacaggtggccacggtggacaccctatgcagcacaatcccaatggacctccaccgccctggatgcagccgcctccacccccaatgaaccaggggcctcatcctccagggcatcacggcccacctccaatggaccaatatctgggatccactcccgtcggctctggggtctaccgattgcatcagggaaaggggatgatgccccccccccccatgggtatgatgcctcctccaccccctccaccgtcgggccagccccctcccccaccaagtgggccgcttccaccttggcagcagcaacagcagcagccccctccccctcccccaccatcatctagcatggccagcagtactccgttgccctggcagcaaaacactaccactacaactacgagcgccgggactggctccattccaccatggcagcagcagcaagcagctgctgccgcctcaccaggggccccacagatgcaaggcaatcccaccatggtaccgctgccacctggagttcagccccccctgccacccggcgcaccaccaccccccccacctccacctcctggcagtgcagggatgatgtatgcgcctcctcctccaccgccgccgccaatggatccatctaatttcgtgaccatgatgggcatgggcgtggccgggatgccgccattcggaatgccacctgccccgccacctcctcccccccagaattag

SEQ ID NO: 262674 - DNA, 1920 bp, Artificial Sequence
  derived and/or modified sequence
atggccactggcgctaacgccactccgcttgactttccctccaaaaagcggaagagatctcggtggaaccaggatactatggaacagaaaaccgttattccaggtatgcccactgtgattccaccagggctgaccagggaacaggagagagcatatattgtgcaacttcagatcgaggatctcactagaaaactgcgtactggcgacttaggcatacccccaaaccccgaagatcgttcccccagtcccgagcctatttacaactccgaggggaagcgacttaacacccgtgagtttagaacaagaaagaagctggaagaagagaggcataatcttattaccgaaatggtcgccttaaatccggatttcaagcctccagctgactacaagccccctgccactagagtaagcgacaaagtgatgatcccacaagatgaataccccgaaatcaatttcgtgggcttgctcattgggcctcgcggtaatacgctcaagaatatcgaaaaagaatgtaacgctaaaatcatgataagaggcaaagggagcgttaaagaaggtaaggtaggtcgcaaagatgggcagatgctccctggtgaagacgagcccctacacgccctggtgacagctaatacaatggagaacgtgaaaaaggcagtggaacaaatccgcaacattttaaagcaaggtattgaaactcccgaggatcagaacgacttgcggaagatgcagctccgtgagctcgccaggctgaatggcacccttcgggaggatgacaataggatcctgagaccatggcagagtagtgaaactcgctcaattaccaacactaccgtgtgtacaaagtgcgggggagcaggccacatagctagtgactgtaagtttcagagacctggagacccacagtctgctcaggataaagccaggatggacaaagagtatctgtcactgatggcggagttgggcgaggccccagtgcctgcctcagtcgggagtacctccggtccggcaactacgccattggcatctgcccctcgacctgcagctcctgctaataatccccctccccctagtttgatgtcaacaacccagagtcggccaccctggatgaacagtggtccttctgaatctcggccttatcatgggatgcacgggggagggccaggcggacccggtggtggccctcacagtttcccccaccctctgccttcactgacgggaggccacggtggacaccctatgcaacacaaccctaacggcccaccaccaccttggatgcagccgccaccgccacctatgaatcagggtcctcatcctccaggtcatcatggcccacccccaatggaccagtacctcggaagcactccagtgggctcaggcgtttaccgcctgcatcaggggaaaggtatgatgccaccacctcccatgggtatgatgccacctccgccacctcccccaagcgggcagccccctccaccacctagtggaccgctgccgccttggcagcagcagcaacaacaacccccaccccctcccccaccatcttcaagcatggctagctctacaccacttccatggcagcagaacactacaaccactactacctcagcaggaaccgggagcatcccaccatggcagcagcagcaggccgctgccgcagcgtcccctggagccccacagatgcagggcaacccaaccatggttccacttcctccgggagtacagcctccgttgccacctggagccccaccccctccccctcccccacccccaggtagcgccggtatgatgtacgctcccccaccccctcctcctcctcctatggaccccagcaacttcgtgacaatgatggggatgggggtggccggtatgcctccattcggcatgcctccagcgcctcccccacctcccccacaaaattag

SEQ ID NO: 262675 - DNA, 1302 bp, Artificial Sequence
  derived and/or modified sequence
atggtcgccttgaatccagacttcaagccccctgctgattacaagcctccagccactagagtctcagataaggtgatgattccgcaggatgaataccctgagatcaacttcgtgggactcttgatcggaccccgagggaacacattgaaaaatatagagaaagaatgcaacgcaaagatcatgatccggggtaaagggtccgtcaaggagggcaaggtgggacgaaaggacggacagatgctcccaggggaggacgagccactccatgcactggtgacagcgaacactatggaaaatgtcaaaaaagccgtggaacaaatcagaaacattctgaaacaggggattgaaaccccagaagaccaaaacgacttgagaaagatgcagctgcgggagctggcacgcctcaatggcacacttagggaagacgataaccgcatcctgcggccttggcagtcctccgaaacacggtcaataacaaacaccacggtgtgcaccaagtgcggcggtgcgggtcacatcgcgagcgattgcaaattccagcgccctggcgatccccagagtgcccaggacaaggccaggatggacaaggaatacttgtcactcatggctgagctgggagaggctcctgtgccagcttctgtgggttccaccagcggtccagctactactcccctcgccagtgctccgagaccggcagcgccagccaataatccccctccccctagccttatgtccactacccagtcacgcccaccttggatgaactcgggcccaagcgaatctcggccttatcacggaatgcatgggggaggtcctggcggaccagggggagggcctcattcttttccccatcctctcccaagcctaactgggggtcacgggggacaccctatgcaacataatcctaacggccctccccctccttggatgcagccccctccccctccaatgaaccagggaccccacccgcctggccaccacgggccaccacccatggaccagtacctgggttctacccccgttggctccggcgtataccggcttcaccagggaaagggaatgatgcctccccctccaatgggtatgatgcctcctccaccaccccctccatctggacagcccccaccacctcccagtggaccactccccccatggcagcagcagcagcagcagccccctccacctcccccaccatcttcatccatggcgtcgagcacccctctcccctggcagcagcggtctctcccagcggctgcgatggcccgagccatgcgagtaagaactttcagagcccattggtag

SEQ ID NO: 262676 - DNA, 2022 bp, Artificial Sequence
  derived and/or modified sequence
atggccaccggtgcgaacgctaccccattggggaaactgggaccacccggactcccaccactgcctggcccaaagggcggatttgaaccagggcctccacctgcccctggccctggagccggattgctggctccgggtcccccaccccctccaccggttggaagtatgggagctctgacagccgcttttccatttgctgccctgccaccgccacctccaccaccccctcctccacctccgcagcagccacctcccccacctcctccaccatctccaggcgcatcctaccctcccccacagcctccacctcctccacccctttatcagcgcgtctcacctcctcagccacctccaccccaaccccctaggaaggaccagcagcctggccctgctggcggtgggggagactttccctccaagaaaagaaagcggtcacggtggaaccaggatacaatggaacagaagactgtcatccctggcatgcccaccgtaattccaccaggcctgactagagaacaagaacgggcatatatcgtacagctgcagatagaagacctaacccgcaagctgcgtacaggtgatcttggaattccaccaaacccagaggatagatctcctagccccgagccaatatataactccgagggtaagcggcttaacactcgggaattccggacccggaaaaaactggaggaggagcgacacaatcttatcactgagatggtcgctctgaaccccgacttcaagcctccagccgattataagccccctgcaacccgagttagcgacaaagtgatgataccccaggatgagtacccagagatcaacttcgttgggctgcttattggacctcggggtaacacattgaagaatatcgagaaggagtgcaatgccaaaatcatgatcaggggcaaaggatctgtcaaagagggcaaggtcggcaggaaagacggccagatgctccctggagaggacgagcctctgcacgctctggtaacagccaacacaatggaaaacgttaagaaggctgtggagcaaattagaaacatcctcaagcaggggattgagactcctgaagaccaaaacgatctgcgaaagatgcagctgagagagctcgccagattgaatggaaccctgcgcgaggacgacaaccggattttgcgtccgtggcaatcctctgagacacggagtatcaccaatactacagtgtgcaccaaatgtgggggagctggacacattgccagcgactgcaagtttcaacgacctggggacccccagtctgctcaggataaagcaaggatggacaaggaatatctgagtctcatggctgagctcggcgaagccccagtgccagctagtgtgggcagtacaagcggacctgccaccactcctctggcaagcgcccctcgacctgctgcccctgccaacaaccctccacctcctagcttgatgtccacaacacagtcccgtcccccatggatgaattcaggcccatccgagagtaggccatatcatgggatgcatggtggagggccaggtggcccaggaggagggccacacagctttcctcatcccctaccaagcctgaccggtggccatggcggacatcccatgcagcataacccaaacggacctcccccaccatggatgcagccgccaccacccccaatgaatcaggggccacaccctcccggtcatcatggcccaccacctatggatcagtacctaggctcaactcccgttggatcaggcgtgtaccggctccaccagggcaagggcatgatgccccctccccctatgggtatgatgcctcctccacccccacccccttctggacagccaccccctccgccatcaggccctcttcctccatggcagcagcagcagcagcaaccgcctccgcctccacctccatcttcaagtatggcgtcttccaccccacttccttggcagcagaggtcgctaccagcggcagccatggctagggccatgagagtccggacatttcgggcacactggtag

SEQ ID NO: 262677 - DNA, 1842 bp, Artificial Sequence
  derived and/or modified sequence
atggagcagaagacagtgatccctggtatgccaaccgtcattccacccggactgacaagagaacaggaacgagcctacattgtccaactgcagatagaggatttgaccaggaagttgcgcacaggcgacctgggcattccacccaaccccgaggaccggagtcccagcccagaaccaatctataattcagaggggaaacggctgaatacccgcgagttcaggaccaggaaaaagctggaggaagaaaggcataatctgatcaccgagatggtggcattgaaccctgatttcaagccccctgcagactacaagccacctgcaacccgagtgtccgataaggtgatgattcctcaggacgagtatcccgaaattaattttgtgggactgttaatcggaccacgtggaaatacactgaagaacattgaaaaggaatgcaacgcgaagattatgattagagggaaaggtagcgtgaaggaaggaaaggtcggcaggaaggatggccagatgcttcctggagaggatgaacccttgcacgctctggttactgctaacaccatggagaatgtcaagaaagccgtggagcagattcgcaatatcctgaaacagggcatagagactcctgaggaccagaatgacttaaggaaaatgcagctccgagagcttgccagacttaatggtacgttgagggaggacgataaccggattctgcgtccatggcagtccagcgagacacggagtatcacaaatacgactgtatgcacaaaatgtggcggagctggtcatatcgcatcagattgtaaattccaacgcccaggcgatccccagtccgcgcaggacaaagcccgtatggacaaggagtatctgagcctgatggctgagctcggtgaggctccggtgcctgcctccgttggaagcacatccggcccagccacaaccccattggcgagcgccccaaggccggcagcaccagccaataatccccctcccccttctttaatgagtaccactcagtcaaggcctccatggatgaactctggaccctccgagagcaggccataccatgggatgcatggtggcggtcctggaggtcctggcggtggtccacactcgtttccccacccactaccaagtctgactggaggccacggaggccaccctatgcagcataacccaaatggccctcctcctccatggatgcaaccccctcccccaccaatgaatcagggccctcatccacctgggcaccacgggcctccacctatggaccagtacctcggctccactcccgtggggtccggcgtctaccggttacatcagggaaagggaatgatgccaccacctcccatgggcatgatgcctccccctccccctcccccatccgggcagcctcccccacctcctagcggacccctccccccatggcagcagcaacaacaacagcctccccctccccctccaccctcttccagcatggcctcttccacaccccttccttggcagcaaaatacaactacaaccactacaagtgcgggtaccggctcgatcccaccttggcagcaacaacaggctgctgcagccgcatccccgggagcgcctcaaatgcagggcaaccccacaatggtcccactgccccctggggttcagccacctctgcctccgggtgcaccgcctcccccacccccacctccaccgggttcagccggaatgatgtatgcaccgccaccgccaccccctccccctatggacccgtctaactttgtgaccatgatgggcatgggagttgcaggcatgccgccatttggcatgcctcctgcccctcctccccctccccctcagaattag

SEQ ID NO: 262678 - DNA, 2850 bp, Artificial Sequence
  derived and/or modified sequence
gcgacacctcccagcccaccgaactccgccgccatttcctcgcttggcctaacggttcggccaatcccagcgcgcatcaagaaggactgaggctccgccaatcggaggccgccgatttcgacccttcgcctcggcccggcccaatccaggccccggccccgccgcccccggcccgcccccgcggtgccctctctcctccctctttgtgcgtctcgcgccgccgccgcccgccgcgtgagaggacgggctccgcgcgctccggcagcgcattcgggtcccctccccccgggaggcttgcgaaggagaagccgccgcagaggaaaagcaggtgccggtgcctgtccccgggggcgccatggcgaccggagcgaacgccacgccgttggacttcccaagtaagaagcggaagaggagccgctggaaccaagacacaatggaacagaagacagtgattccaggaatgcctacagttattccccctggacttactcgagaacaagaaagagcttatatagtgcaactgcagatagaagacctgactcgtaaactgcgcacaggagacctgggcatcccccctaaccctgaggacaggtccccttcccctgagcccatctacaatagcgaggggaagcggcttaacacccgagagttccgcacccgcaaaaagctggaagaggagcggcacaacctcatcacagagatggttgcactcaatccggatttcaagccacctgcagattacaaacctccagcaacacgtgtgagtgataaagtcatgattccacaagatgagtacccagaaatcaactttgtggggctgctcatcgggcccagagggaacaccctgaagaacatagagaaggagtgcaatgccaagattatgatccgggggaaagggtctgtgaaagaagggaaggttgggcgcaaagatggccagatgttgccaggagaagatgagccacttcatgccctggttactgccaatacaatggagaacgtcaaaaaggcagtggaacagataagaaacatcctgaagcagggtatcgagactccagaggaccagaatgatctacggaagatgcagcttcgggagttggctcgcttaaatgggacccttcgggaagacgataacaggatcttaagaccctggcagagctcagagacccgcagcattaccaacaccacagtgtgtaccaagtgtggaggggctggccacattgcttcagactgtaaattccaaaggcctggtgatcctcagtcagctcaggataaagcacggatggataaagaatatttgtccctcatggctgaactgggtgaagcacctgtcccagcatctgtgggctccacctctgggcctgccaccacacccctggccagcgcacctcgtcctgctgctcccgccaacaacccacctccaccgtctctcatgtctaccacccagagccgcccaccctggatgaattctggcccttcagagagtcggccctaccacggcatgcatggaggtggtcctggtgggcccggaggtggcccccacagcttcccacacccattacccagcctgacaggtgggcatggtggacatcccatgcagcacaaccccaatggacccccacccccttggatgcagccaccaccaccaccgatgaaccagggcccccaccctcctgggcaccatggccctcctccaatggatcagtacctgggaagtacgcctgtgggctctggggtctatcgcctgcatcaaggaaaaggtatgatgccgccaccacctatgggcatgatgccgccgccgccgccgcctcccagtgggcagcccccaccccctccctctggtcctcttcccccatggcaacaacagcagcagcagcctccgccaccccctccgcccagcagcagtatggcttccagtacccccttgccatggcagcaaagatccctccccgcggcggcgatggcccgagccatgagagtgaggactttccgcgcccattggtgacccttccaggcagacagcctcagcaacgcccctggtggacaggatggttcggcaaagcagcctgagttatttttgtggacggaatcggaacacgctggctccatatcgtgaaatttttattaatttttttctttttcctttgttacttctttatcttttcctttcttcagactccgtccaaggagatgctctccccggtcttctgctgcaatttagattcctttcccttctctccagttctccttcccttaccaaggagaggggagcaaatggttttgggcaagggctttggccattcatgtcaagctggttgtgggtttttcaaggtgccatagccacccccaaagatgtttgtttaaagcgtggggttttttaatctctgccacccttgtcaagggagtcttgtaaagttgccgagggtaggttcatctccaggtttcgggattcccatccgtcctggcgatcctgccagcagtgggtgggcagcctgagctccctcgggctcgcctgccagcctggagttcttcctgtgctccttgatcacctgagctgcctcagattccatttggtcctctccttcctggaaggcttccttttatgttttgttttaatcccaaatgtctgaatgttttgcagtgtgtaggggtttgagccccttgttcattctccttcctttttcctcccgcttccctctccatgaagtgattctgttgacaataatgtatactgcgcgttctcttcactggtttatctgcagaaatttctctgggcttttttcggtgttagattcaacactgcgctaaagcggggatgttccattgaataaaagagcagtgtggttttctggg

SEQ ID NO: 262679 - DNA, 3470 bp, Artificial Sequence
  derived and/or modified sequence
accgaactccgccgccatttcctcgcttggcctaacggttcggccaatcccagcgcgcatcaagaaggactgaggctccgccaatcggaggccgccgatttcgacccttcgcctcggcccggcccaatccaggccccggccccgccgcccccggcccgcccccgcggtgccctctctcctccctctttgtgcgtctcgcgccgccgccgcccgccgcgtgagaggacgggctccgcgcgctccggcagcgcattcgggtcccctccccccgggaggcttgcgaaggagaagccgccgcagaggaaaagcaggtgccggtgcctgtccccgggggcgccatggcgaccggagcgaacgccacgccgttggacttcccaagtaagaagcggaagaggagccgctggaaccaagacacaatggaacagaagacagtgattccaggaatgcctacagttattccccctggacttactcgagaacaagaaagagcttatatagtgcaactgcagatagaagacctgactcgtaaactgcgcacaggagacctgggcatcccccctaaccctgaggacaggtccccttcccctgagcccatctacaatagcgaggggaagcggcttaacacccgagagttccgcacccgcaaaaagctggaagaggagcggcacaacctcatcacagagatggttgcactcaatccggatttcaagccacctgcagattacaaacctccagcaacacgtgtgagtgataaagtcatgattccacaagatgagtacccagaaatcaactttgtggggctgctcatcgggcccagagggaacaccctgaagaacatagagaaggagtgcaatgccaagattatgatccgggggaaagggtctgtgaaagaagggaaggttgggcgcaaagatggccagatgttgccaggagaagatgagccacttcatgccctggttactgccaatacaatggagaacgtcaaaaaggcagtggaacagataagaaacatcctgaagcagggtatcgagactccagaggaccagaatgatctacggaagatgcagcttcgggagttggctcgcttaaatgggacccttcgggaagacgataacaggatcttaagaccctggcagagctcagagacccgcagcattaccaacaccacagtgtgtaccaagtgtggaggggctggccacattgcttcagactgtaaattccaaaggcctggtgatcctcagtcagctcaggataaagcacggatggataaagaatatttgtccctcatggctgaactgggtgaagcacctgtcccagcatctgtgggctccacctctgggcctgccaccacacccctggccagcgcacctcgtcctgctgctcccgccaacaacccacctccaccgtctctcatgtctaccacccagagccgcccaccctggatgaattctggcccttcagagagtcggccctaccacggcatgcatggaggtggtcctggtgggcccggaggtggcccccacagcttcccacacccattacccagcctgacaggtgggcatggtggacatcccatgcagcacaaccccaatggacccccacccccttggatgcagccaccaccaccaccgatgaaccagggcccccaccctcctgggcaccatggccctcctccaatggatcagtacctgggaagtacgcctgtgggctctggggtctatcgcctgcatcaaggaaaaggtatgatgccgccaccacctatgggcatgatgccgccgccgccgccgcctcccagtgggcagcccccaccccctccctctggtcctcttcccccatggcaacaacagcagcagcagcctccgccaccccctccgcccagcagcagtatggcttccagtacccccttgccatggcagcaaaatacgacgactaccaccacgagcgctggcacagggtccatcccgccatggcaacagcagcaggcggctgccgcagcttctccaggagcccctcagatgcaaggcaaccccactatggtgcccctgccccccggggtccagccgcctctgccgcctggggcccctccccctccgccgcctccaccgcctggttccgccggcatgatgtatgccccgccccctcctcctccgcctcccatggacccttctaactttgtcaccatgatgggcatgggggtggcgggcatgccgcccttcgggatgcctccagctcccccaccgcctccaccacagaactagacttgttttttaagaaaatatatattatatatagagagaattggtctcgtttaaacacgccgaacctcaccatatggagccagacattgggacgcacgcatgtgattgtgtgtgcacgcatgtgtgtgtgtgcacgcactgggctgggccaagcgactgaggattcgcttgggaacgggcaggtggtagtaggggcgccagcttgggctctcctggcgccccgtagcatcgagtgtcttctttgtcttctttctctcctcacccaactccctttgcctctccccaaaccgggccgccaggatccctccccgcggcggcgatggcccgagccatgagagtgaggactttccgcgcccattggtgacccttccaggcagacagcctcagcaacgcccctggtggacaggatggttcggcaaagcagcctgagttatttttgtggacggaatcggaacacgctggctccatatcgtgaaatttttattaatttttttctttttcctttgttacttctttatcttttcctttcttcagactccgtccaaggagatgctctccccggtcttctgctgcaatttagattcctttcccttctctccagttctccttcccttaccaaggagaggggagcaaatggttttgggcaagggctttggccattcatgtcaagctggttgtgggtttttcaaggtgccatagccacccccaaagatgtttgtttaaagcgtggggttttttaatctctgccacccttgtcaagggagtcttgtaaagttgccgagggtaggttcatctccaggtttcgggattcccatccgtcctggcgatcctgccagcagtgggtgggcagcctgagctccctcgggctcgcctgccagcctggagttcttcctgtgctccttgatcacctgagctgcctcagattccatttggtcctctccttcctggaaggcttccttttatgttttgttttaatcccaaatgtctgaatgttttgcagtgtgtaggggtttgagccccttgttcattctccttcctttttcctcccgcttccctctccatgaagtgattctgttgacaataatgtatactgcgcgttctcttcactggtttatctgcagaaatttctctgggcttttttcggtgttagattcaacactgcgctaaagcggggatgttccattgaataaaagagcagtgtggttttctggg

SEQ ID NO: 262680 - DNA, 2309 bp, Artificial Sequence
  derived and/or modified sequence
agtaacaaatgaagtgcgcgctgcgacacctcccagcccaccgaactccgccgccatttcctcgcttggcctaacggttcggccaatcccagcgcgcatcaagaaggactgaggctccgccaatcggaggccgccgatttcgacccttcgcctcggcccggcccaatccaggccccggccccgccgcccccggcccgcccccgcggtgccctctctcctccctctttgtgcgtctcgcgccgccgccgcccgccgcgtgagaggacgggctccgcgcgctccggcagcgcattcgggtcccctccccccgggaggcttgcgaaggagaagccgccgcagaggaaaagcaggtgccggtgcctgtccccgggggcgccatggcgaccggagcgaacgccacgccgttggacttcccaagtaagaagcggaagaggagccgctggaaccaagacacaatggaacagaagacagtgattccaggaatgcctacagttattccccctggacttactcgagaacaagaaagagcttatataggtccccttcccctgagcccatctacaatagcgaggggaagcggcttaacacccgagagttccgcacccgcaaaaagctggaagaggagcggcacaacctcatcacagagatggttgcactcaatccggatttcaagccacctgcagattacaaacctccagcaacacgtgtgagtgataaagtcatgattccacaagatgagtacccagaaatcaactttgtggggctgctcatcgggcccagagggaacaccctgaagaacatagagaaggagtgcaatgccaagattatgatccgggggaaagggtctgtgaaagaagggaaggttgggcgcaaagatggccagatgttgccaggagaagatgagccacttcatgccctggttactgccaatacaatggagaacgtcaaaaaggcagtggaacagataagaaacatcctgaagcagggtatcgagactccagaggaccagaatgatctacggaagatgcagcttcgggagttggctcgcttaaatgggacccttcgggaagacgataacaggatcttaagaccctggcagagctcagagacccgcagcattaccaacaccacagtgtgtaccaagtgtggaggggctggccacattgcttcagactgtaaattccaaaggcctggtgatcctcagtcagctcaggataaagcacggatggataaagaatatttgtccctcatggctgaactgggtgaagcacctgtcccagcatctgtgggctccacctctgggcctgccaccacacccctggccagcgcacctcgtcctgctgctcccgccaacaacccacctccaccgtctctcatgtctaccacccagagccgcccaccctggatgaattctggcccttcagagagtcggccctaccacggcatgcatggaggtggtcctggtgggcccggaggtggcccccacagcttcccacacccattacccagcctgacaggtgggcatggtggacatcccatgcagcacaaccccaatggacccccacccccttggatgcagccaccaccaccaccgatgaaccagggcccccaccctcctgggcaccatggccctcctccaatggatcagtacctgggaagtacgcctgtgggctctggggtctatcgcctgcatcaaggaaaaggtatgatgccgccaccacctatgggcatgatgccgccgccgccgccgcctcccagtgggcagcccccaccccctccctctggtcctcttcccccatggcaacaacagcagcagcagcctccgccaccccctccgcccagcagcagtatggcttccagtacccccttgccatggcagcaaagatccctccccgcggcggcgatggcccgagccatgagagtgaggactttccgcgcccattggtgacccttccaggcagacagcctcagcaacgcccctggtggacaggatggttcggcaaagcagcctgagttatttttgtggacggaatcggaacacgctggctccatatcgtgaaatttttattaatttttttctttttcctttgttacttctttatcttttcctttcttcagactccgtccaaggagatgctctccccggtcttctgctgcaatttagattcctttcccttctctccagttctccttcccttaccaaggagaggggagcaaatggttttgggcaagggctttggccattcatgtcaagctggttgtgggtttttcaaggtgccatagccacccccaaagatgtttgtttaaag

SEQ ID NO: 262681 - DNA, 2947 bp, Artificial Sequence
  derived and/or modified sequence
cctccccccgggaggcttgcgaaggagaagccgccgcagaggaaaagcaggtgccggtgcctgtccccgggggcgccatggcgaccggagcgaacgccacgccgttgggtaagctgggcccccccgggctgcccccgctccccgggcccaaaggaggcttcgagccgggccctccgcctgcacccgggcctggggcggggctgctggctcccgggccgccgccgcccccgcccgtgggctcgatgggggccctgaccgcggccttccccttcgcggcgctgcctccgccgcctccgccgccgccccctccgcctccccagcagccgccgccgcctccaccgccaccgtcccccggcgcctcgtacccgccgccgcagccgccccctccgccgccgctctaccagcgcgtgtcgccgccgcagccgccgccaccccagccgccgcgtaaggaccagcagccgggcccggccggcggcggaggagacttcccaagtaagaagcggaagaggagccgctggaaccaagacacaatggaacagaagacagtgattccaggaatgcctacagttattccccctggacttactcgagaacaagaaagagcttatatagtgcaactgcagatagaagacctgactcgtaaactgcgcacaggagacctgggcatcccccctaaccctgaggacaggtccccttcccctgagcccatctacaatagcgaggggaagcggcttaacacccgagagttccgcacccgcaaaaagctggaagaggagcggcacaacctcatcacagagatggttgcactcaatccggatttcaagccacctgcagattacaaacctccagcaacacgtgtgagtgataaagtcatgattccacaagatgagtacccagaaatcaactttgtggggctgctcatcgggcccagagggaacaccctgaagaacatagagaaggagtgcaatgccaagattatgatccgggggaaagggtctgtgaaagaagggaaggttgggcgcaaagatggccagatgttgccaggagaagatgagccacttcatgccctggttactgccaatacaatggagaacgtcaaaaaggcagtggaacagataagaaacatcctgaagcagggtatcgagactccagaggaccagaatgatctacggaagatgcagcttcgggagttggctcgcttaaatgggacccttcgggaagacgataacaggatcttaagaccctggcagagctcagagacccgcagcattaccaacaccacagtgtgtaccaagtgtggaggggctggccacattgcttcagactgtaaattccaaaggcctggtgatcctcagtcagctcaggataaagcacggatggataaagaatatttgtccctcatggctgaactgggtgaagcacctgtcccagcatctgtgggctccacctctgggcctgccaccacacccctggccagcgcacctcgtcctgctgctcccgccaacaacccacctccaccgtctctcatgtctaccacccagagccgcccaccctggatgaattctggcccttcagagagtcggccctaccacggcatgcatggaggtggtcctggtgggcccggaggtggcccccacagcttcccacacccattacccagcctgacaggtgggcatggtggacatcccatgcagcacaaccccaatggacccccacccccttggatgcagccaccaccaccaccgatgaaccagggcccccaccctcctgggcaccatggccctcctccaatggatcagtacctgggaagtacgcctgtgggctctggggtctatcgcctgcatcaaggaaaaggtatgatgccgccaccacctatgggcatgatgccgccgccgccgccgcctcccagtgggcagcccccaccccctccctctggtcctcttcccccatggcaacaacagcagcagcagcctccgccaccccctccgcccagcagcagtatggcttccagtacccccttgccatggcagcaaagatccctccccgcggcggcgatggcccgagccatgagagtgaggactttccgcgcccattggtgacccttccaggcagacagcctcagcaacgcccctggtggacaggatggttcggcaaagcagcctgagttatttttgtggacggaatcggaacacgctggctccatatcgtgaaatttttattaatttttttctttttcctttgttacttctttatcttttcctttcttcagactccgtccaaggagatgctctccccggtcttctgctgcaatttagattcctttcccttctctccagttctccttcccttaccaaggagaggggagcaaatggttttgggcaagggctttggccattcatgtcaagctggttgtgggtttttcaaggtgccatagccacccccaaagatgtttgtttaaagcgtggggttttttaatctctgccacccttgtcaagggagtcttgtaaagttgccgagggtaggttcatctccaggtttcgggattcccatccgtcctggcgatcctgccagcagtgggtgggcagcctgagctccctcgggctcgcctgccagcctggagttcttcctgtgctccttgatcacctgagctgcctcagattccatttggtcctctccttcctggaaggcttccttttatgttttgttttaatcccaaatgtctgaatgttttgcagtgtgtaggggtttgagccccttgttcattctccttcctttttcctcccgcttccctctccatgaagtgattctgttgacaataatgtatactgcgcgttctcttcactggtttatctgcagaaatttctctgggcttttttcggtgttagattcaacactgcgctaaagcggggatgttccattgaataaaagagcagtgtggttttctggg

SEQ ID NO: 262682 - DNA, 2317 bp, Artificial Sequence
  derived and/or modified sequence
gacgcagtgaggtggccgggctgtgcggcgcaactgtatagactgggggcccactattgctgtccagtccgctggtgtcgggaacaggggtggcgggtgttcagcgctggacggggtgctagctgtgaatgccagcagggcgtgaaagcctcacctgatgacgtgcagcgactcccttctggtcttgaggaaccagaatgggaaccgtaccaaggatagctcctctgcttctacagcaaggcagggttttcatccgggagagacttcccaagtaagaagcggaagaggagccgctggaaccaagacacaatggaacagaagacagtgattccaggaatgcctacagttattccccctggacttactcgagaacaagaaagagcttatatagtgcaactgcagatagaagacctgactcgtaaactgcgcacaggagacctgggcatcccccctaaccctgaggacaggtccccttcccctgagcccatctacaatagcgaggggaagcggcttaacacccgagagttccgcacccgcaaaaagctggaagaggagcggcacaacctcatcacagagatggttgcactcaatccggatttcaagccacctgcagattacaaacctccagcaacacgtgtgagtgataaagtcatgattccacaagatgagtacccagaaatcaactttgtggggctgctcatcgggcccagagggaacaccctgaagaacatagagaaggagtgcaatgccaagattatgatccgggggaaagggtctgtgaaagaagggaaggttgggcgcaaagatggccagatgttgccaggagaagatgagccacttcatgccctggttactgccaatacaatggagaacgtcaaaaaggcagtggaacagataagaaacatcctgaagcagggtatcgagactccagaggaccagaatgatctacggaagatgcagcttcgggagttggctcgcttaaatgggacccttcgggaagacgataacaggatcttaagaccctggcagagctcagagacccgcagcattaccaacaccacagtgtgtaccaagtgtggaggggctggccacattgcttcagactgtaaattccaaaggcctggtgatcctcagtcagctcaggataaagcacggatggataaagaatatttgtccctcatggctgaactgggtgaagcacctgtcccagcatctgtgggctccacctctgggcctgccaccacacccctggccagcgcacctcgtcctgctgctcccgccaacaacccacctccaccgtctctcatgtctaccacccagagccgcccaccctggatgaattctggcccttcagagagtcggccctaccacggcatgcatggaggtggtcctggtgggcccggaggtggcccccacagcttcccacacccattacccagcctgacaggtgggcatggtggacatcccatgcagcacaaccccaatggacccccacccccttggatgcagccaccaccaccaccgatgaaccagggcccccaccctcctgggcaccatggccctcctccaatggatcagtacctgggaagtacgcctgtgggctctggggtctatcgcctgcatcaaggaaaaggtatgatgccgccaccacctatgggcatgatgccgccgccgccgccgcctcccagtgggcagcccccaccccctccctctggtcctcttcccccatggcaacaacagcagcagcagcctccgccaccccctccgcccagcagcagtatggcttccagtacccccttgccatggcagcaaaatacgacgactaccaccacgagcgctggcacagggtccatcccgccatggcaacagcagcaggcggctgccgcagcttctccaggagcccctcagatgcaaggcaaccccactatggtgcccctgccccccggggtccagccgcctctgccgcctggggcccctccccctccgccgcctccaccgcctggttccgccggcatgatgtatgccccgccccctcctcctccgcctcccatggacccttctaactttgtcaccatgatgggcatgggggtggcgggcatgccgcccttcgggatgcctccagctcccccaccgcctccaccacagaactagacttgttttttaagaaaatatatattatatatagagagaattggtctcgtttaaacacgccgaacctcaccatatggagccagacattgggacgcacgcatgtgattgtgtgtgcacgcatgtgtgtgtgtgcacgcactgggctgggccaagcgactgaggattc

SEQ ID NO: 262683 - protein, 581 aa, Artificial Sequence
  derived and/or modified sequence
MTSAVVDSGGTILELSSNGVENQEESEKVSEYPAVIVEPVPSARLEQGYAAQVLVYDDETYMMQDVAEEQEVETENVETVEASVHSSNAHCTDKTIEAAEALLHMESPTCLRDSRSPEFIHAAMRPDVITETVVEVSTEESEPMDTSPIPTSPDSHEPMKKKKVGRKPKTQQSPISNGSPELGIKKKPREGKGNTTYLWEFLLDLLQDKNTCPRYIKWTQREKGIFKLVDSKAVSKLWGKHKNKPDMNYETMGRALRYYYQRGILAKVEGQRLVYQFKDMPKNIVVIDDDKSETCNEDLAGTTDEKSLERVSLSAESLLKAASSVRSGKNSSPINCSRAEKGVARVVNITSPGHDASSRSPTTTASVSATAAPRTVRVAMQVPVVMTSLGQKISTVAVQSVNAGAPLITSTSPTTATSPKVVIQTIPTVMPASTENGDKITMQPAKIITIPATQLAQCQLQTKSNLTGSGSINIVGTPLAVRALTPVSIAHGTPVMRLSMPTQQASGQTPPRVISAVIKGPEVKSEAVAKKQEHDVKTLQLVEEKPADGNKTVTHVVVVSAPSAIALPVTMKTEGLVTCEK

SEQ ID NO: 262684 - DNA, 1746 bp, Artificial Sequence
  derived and/or modified sequence
atgaccagcgccgtggtggacagcggcggcaccatcctggagctgagcagcaacggcgtggagaaccaggaggagagcgagaaggtgagcgagtaccccgccgtgatcgtggagcccgtgcccagcgccagactggagcagggctacgccgcccaggtgctggtgtacgacgacgagacctacatgatgcaggacgtggccgaggagcaggaggtggagaccgagaacgtggagaccgtggaggccagcgtgcacagcagcaacgcccactgcaccgacaagaccatcgaggccgccgaggccctgctgcacatggagagccccacctgcctgagagacagcagaagccccgagttcatccacgccgccatgagacccgacgtgatcaccgagaccgtggtggaggtgagcaccgaggagagcgagcccatggacaccagccccatccccaccagccccgacagccacgagcccatgaagaagaagaaggtgggcagaaagcccaagacccagcagagccccatcagcaacggcagccccgagctgggcatcaagaagaagcccagagagggcaagggcaacaccacctacctgtgggagttcctgctggacctgctgcaggacaagaacacctgccccagatacatcaagtggacccagagagagaagggcatcttcaagctggtggacagcaaggccgtgagcaagctgtggggcaagcacaagaacaagcccgacatgaactacgagaccatgggcagagccctgagatactactaccagagaggcatcctggccaaggtggagggccagagactggtgtaccagttcaaggacatgcccaagaacatcgtggtgatcgacgacgacaagagcgagacctgcaacgaggacctggccggcaccaccgacgagaagagcctggagagagtgagcctgagcgccgagagcctgctgaaggccgccagcagcgtgagaagcggcaagaacagcagccccatcaactgcagcagagccgagaagggcgtggccagagtggtgaacatcaccagccccggccacgacgccagcagcagaagccccaccaccaccgccagcgtgagcgccaccgccgcccccagaaccgtgagagtggccatgcaggtgcccgtggtgatgaccagcctgggccagaagatcagcaccgtggccgtgcagagcgtgaacgccggcgcccccctgatcaccagcaccagccccaccaccgccaccagccccaaggtggtgatccagaccatccccaccgtgatgcccgccagcaccgagaacggcgacaagatcaccatgcagcccgccaagatcatcaccatccccgccacccagctggcccagtgccagctgcagaccaagagcaacctgaccggcagcggcagcatcaacatcgtgggcacccccctggccgtgagagccctgacccccgtgagcatcgcccacggcacccccgtgatgagactgagcatgcccacccagcaggccagcggccagaccccccccagagtgatcagcgccgtgatcaagggccccgaggtgaagagcgaggccgtggccaagaagcaggagcacgacgtgaagaccctgcagctggtggaggagaagcccgccgacggcaacaagaccgtgacccacgtggtggtggtgagcgcccccagcgccatcgccctgcccgtgaccatgaagaccgagggcctggtgacctgcgagaagtag

SEQ ID NO: 262685 - DNA, 1746 bp, Artificial Sequence
  derived and/or modified sequence
atgaccagcgctgtggtggactcgggcgggaccattcttgagctctcctccaacggagttgaaaatcaggaggagagtgagaaagtctccgaatatcccgcagtaatcgtggagccagtgccctctgcccggctggaacaggggtacgctgcccaggtcctggtgtatgatgatgagacttacatgatgcaagacgtcgcagaagaacaggaagtagaaacagagaacgtcgaaactgtcgaggcttcagtgcacagctcgaacgcccactgcacagacaagaccatcgaagccgcggaggccttacttcacatggagagccccacttgcttgcgggattctagaagtccagaattcattcacgccgctatgcggccagatgttatcacagagacagtcgtcgaggtgtccactgaggagtctgagccgatggataccagcccaatccccacatctcccgacagccatgagcctatgaagaagaagaaggtaggacgcaagccaaaaacccaacaaagtccaataagtaacgggagccctgaattgggcatcaaaaaaaaacctagagaggggaaaggaaataccacctacttgtgggagttcttactggatcttttgcaagacaaaaatacatgcccacggtatataaaatggacacagagggaaaaggggatattcaaactggtggattccaaagccgtttccaaactgtggggaaaacacaagaataaaccagatatgaattacgagacaatgggtagggccctgcggtactactatcagaggggcattcttgcgaaggtcgaaggccagcgtctggtttaccagtttaaggacatgcccaaaaacattgtggttatcgacgacgacaagagcgagacctgcaatgaggacctagccggaaccaccgacgaaaaaagcctagagcgcgttagtctgtcagctgaatccctgttgaaagcagcttcgagtgtgcgctctggaaaaaattcttccccgattaactgcagcagggccgaaaaaggagtggcccgtgtcgtgaatataacaagcccaggacacgatgcctcatcaagaagcccaacaacaacagcaagcgttagcgccaccgcagcccctcgcaccgtccgcgtggccatgcaagtgccggtggtgatgacctcccttggccagaaaataagcactgtcgcagtgcaatcagtgaatgccggagcaccattaattacatccacctcaccgaccaccgcgacaagcccgaaggttgttatccagactatccccaccgtaatgcccgcatctaccgaaaatggagacaagatcacaatgcaacctgccaaaatcatcactatccctgcgacacagcttgcccagtgccaactgcaaaccaagtctaatcttacaggttccggcagtatcaacattgtgggcacacctctagcggtgcgggcactcacccctgttagcatcgcacatggcactcctgtgatgcggctgagcatgccaactcaacaggcttccgggcaaacccccccccgggttatttctgctgtaatcaaggggccagaggtaaagtctgaagccgtggccaagaagcaggagcatgatgttaaaaccctgcaactggtcgaagaaaaacctgcggacggaaacaagactgtgacacatgtggtcgtagtcagcgccccatcggctatagcacttcccgtaactatgaagacggagggcctcgtcacctgcgagaaatag

SEQ ID NO: 262686 - DNA, 1746 bp, Artificial Sequence
  derived and/or modified sequence
atgacttccgcagtggtggattccgggggaacgatattggagcttagctctaacggagttgagaaccaggaggagtctgagaaagtgagcgagtatccagccgtgattgtagagccggtaccctcagccaggttagaacagggctacgcagcgcaggtcctcgtgtatgacgacgagacttacatgatgcaggatgtggcagaggaacaggaggtcgaaactgaaaacgtggagacagtggaggcctccgtgcacagcagtaacgctcattgcaccgataagactatcgaagcagcggaggccttgctccacatggagtcgcctacttgcctgcgcgactcccggtcccctgaattcatccacgcagcaatgagaccagatgtgattaccgaaacagtggtggaagtctccacggaggaaagcgaacctatggacacgagtccgatccccaccagtccagattcacatgaaccaatgaagaagaaaaaggtgggaaggaaaccgaagacccagcagtcgccaattagcaacggaagcccagagctgggaataaagaaaaagccaagagagggtaaaggcaacaccacctatctctgggaatttctcctcgacctgctgcaggataagaacacatgcccccggtatattaaatggactcagcgggaaaagggcattttcaaactggtagattcgaaggcagtgagcaagctgtgggggaagcataaaaacaaaccagacatgaattatgagaccatgggacgagcgcttcgttattactatcagagaggaatcctggccaaagtggagggtcagagacttgtctatcagtttaaggacatgcctaagaacatcgttgtcattgatgatgataagtccgaaacttgcaacgaggacctagccggaacaacagacgaaaaaagtctcgaacgagtatccctatcagccgaaagcctgctcaaagcggcctctagcgtgaggtcgggaaaaaactcatcccccatcaattgttcccgagcagagaagggcgtggcacgggttgtcaacattacgtcacctggacacgatgcctcatcaaggagccctaccaccaccgcatcagtctccgccacagctgcgcctcggaccgtgcgagtcgctatgcaggtgcccgtggtgatgactagcctgggtcaaaagatctctaccgtggcagtgcagtccgtcaatgctggcgcccctctgattacttccacctctccgactaccgcaactagcccaaaggttgtgatccaaactatacctactgtgatgccagcaagcactgagaacggagataaaatcaccatgcagccggccaagatcataacaataccagccacccaactggcacagtgccaacttcaaacaaagtccaatctgacagggtcaggaagtatcaacatagtgggaactcccttagccgtgcgggcactcacccccgtgagcatcgcacatggcactcccgtaatgcggctgtcaatgcccacccagcaagcttcaggacagacgcccccccgtgtgataagtgcagttatcaaggggccagaagtcaaatccgaagcagtcgctaagaaacaggaacatgatgtcaaaaccctccagctcgtggaagagaagccagccgacgggaataaaactgtgactcatgtagtcgtggtaagtgctccctctgccattgccctccctgttacaatgaagacagaggggctcgtgacctgcgagaagtag

SEQ ID NO: 262687 - DNA, 3218 bp, Artificial Sequence
  derived and/or modified sequence
aaaatagtgaaggatgcttagactacttaacatacaaactgctttctggttaatcatctttagaagactggatttctggatatctactccactccatctctattgacttttaaaacatgataatgcaaacctataacactggcaaccatcagtgaacctttaatttcattgattaatagcgtttgaagcttcctcagggaataacaatgacatcagcagtggttgacagtggaggtactattttggagctttccagcaatggagtagaaaatcaagaggaaagtgaaaaggtttctgaatatccagcagtgattgtggagccagttccaagtgccagattagagcagggctatgcagcccaggttctggtttatgatgatgagacttatatgatgcaagatgtggcagaagaacaagaagttgagaccgagaatgtggaaacagtggaagcatcagttcacagcagtaatgcacactgtacagataagacaattgaagctgctgaagccctgcttcatatggaatctcctacctgcttgagggattcaagaagtcctgaattcatccatgctgctatgaggccagatgtcattacagaaactgtagtggaggtgtcaactgaagagtctgaacccatggatacctctcctattccaacatcaccagatagccatgaaccaatgaaaaagaaaaaagttggccgtaaaccaaagacccagcaatcaccaatttccaatgggtctcctgagttaggtataaagaagaaaccaagagaaggaaaaggaaacacaacctatttgtgggagtttcttttagatctacttcaagataaaaatacttgtcccaggtatattaaatggactcagagagaaaaaggcatattcaagctggtggattcaaaggctgtctctaagctttggggaaagcataagaacaaaccagacatgaactatgaaaccatgggacgagctttgagatactactaccaaaggggaattcttgcaaaggttgaaggacagaggcttgtatatcagttcaaggatatgccgaaaaacatagtggtcatagatgatgacaaaagtgaaacctgtaatgaagatttagcaggaactactgatgaaaaatcattagaacgagtgtcactgtctgcagaaagtctcctgaaagcagcatcctctgttcgcagtggaaaaaattcatcccctataaactgctccagagcagagaagggtgtagctagagttgtgaatatcacttcccctgggcacgatgcttcatccaggtctcctactaccactgcatctgtgtcagcaacagcagctccaaggacagttcgtgtggcaatgcaggtacctgttgtaatgacatcattgggtcagaaaatttcaactgtggcagttcagtcagttaatgcaggtgcaccattaataaccagcactagtccaacaacagcgacctctccaaaggtagtcattcagacaatccctactgtgatgccagcttctactgaaaatggagacaaaatcaccatgcagcctgccaaaattattaccatcccagctacacagcttgcacagtgtcaactgcagacaaagtcaaatctgactggatcaggaagcattaacattgttggaaccccattggctgtgagagcacttacccctgtttcaatagcccatggtacacctgtaatgagactatcaatgcctactcagcaggcatctggccagactcctcctcgagttatcagtgcagtcataaaggggccagaggttaaatcggaagcagtggcaaaaaagcaagaacatgatgtgaaaactttgcagctagtagaagaaaaaccagcagatggaaataagacagtgacccacgtagtggttgtcagtgcgccttcagctattgcccttcctgtaactatgaaaacagaaggactagtgacatgtgagaaataaaatagcagctccaccatggacttcaggctgttagtggcagtactgacataaacatttgcaagggaagtcatcaagaaaagtcaaagaagactttaaaacatttttaatgcatatacaaaaacaatcagacttactggaaataaattacctatcccatgtttcagtgggaaatgaactacatattgagatgctgacagaaaactgcctcttacagtaggaaacaactgaacccatcaataagaaaaaggatcgaaagggaccaagcagctcactacgatatcaagttacactaagacttggaacactaacattctgtaagaggttatatagttttcagtgggaggggttgggatgggtaatctcattgttacatatagcaatttttgatgcattttatatgcataccagcaattattactgtgttcgcacagttctcacttaactggtgctatgtgaagactctgctaatataggtattttagaatgtgaattgaagaatggatcccaaaaacttcagaaagaggatagcaaaaaaagatctagtgcgattttatatatatatatatatatatatacatacatatatatatatcatatagcttaagctgatttaaaacaaaggccttagactaattttcgattttctttcttgaaataagctaatggcttgtttgtgtaaagcttttttattaaaagaaaaattttaaaaatcttgtacctagcacagtattgttatagaatatacatgtaacattttatatggtagtttaagtctgtcagtttcttaattgtggacaaattaacagttggctctggccttttgctgtaacatgcctgtgtcactcacttagccttggcatttgtgcagacataccattttcagttctgctgtcacttggaagttcaggctcagcatgaatttttggcaggtagctctaatacctggagttttctttgtttttttttcttttttttagttgaagtttatgagggaaataccagtgttcagttttgaactataatagtttgtatattcaacatttgaagtatattctattttgttgtactcttgtttcaaagtgtattcaagtaggttttctgaaatatagaaatgaaatttatcttctgttttggtctctggtgatattttaaacaatatttaaaagtcagtatagaagtgttttagttaggaagtgataaaacatctctcttctccttcccaactactgcatgaagaaattctacttccattatattaatatttgg

SEQ ID NO: 262688 - DNA, 3515 bp, Artificial Sequence
  derived and/or modified sequence
attgctcccagcgccaagctctgtgtcgccgccgtcgcctaggcggttgggggtcggtggggcggcgcgggcgggggtcgctgcgcggggcggcgagcctctgttttgtctccttctctccctgtggagcggctcgggctgctggggaggccccggctccctccggacgctcggccaacggcggcggctagtccgcggccctgctgagagggaaaaggacgccgcggtcttcccaggcgtcgcggagagcagttccaaagaactactggttcagattttagctcttcccaagttgtgaaaatagtgaaggatgcttagactacttaacatacaaactgctttctggttaatcatctttagaagactggatttctggatatctactccactccatctctattgacttttaaaacatgataatgcaaacctataacactggcaaccatcagtgaacctttaatttcattgattaatagcgtttgaagcttcctcagggaataacaatgacatcagcagtggttgacagtggaggtactattttggagctttccagcaatggagtagaaaatcaagaggaaagtgaaaaggtttctgaatatccagcagtgattgtggagccagttccaagtgccagattagagcagggctatgcagcccaggttctggtttatgatgatgagacttatatgatgcaagatgtggcagaagaacaagaagttgagaccgagaatgtggaaacagtggaagcatcagttcacagcagtaatgcacactgtacagataagacaattgaagctgctgaagccctgcttcatatggaatctcctacctgcttgagggattcaagaagtcctgaattcatccatgctgctatgaggccagatgtcattacagaaactgtagtggaggtgtcaactgaagagtctgaacccatggatacctctcctattccaacatcaccagatagccatgaaccaatgaaaaagaaaaaagttggccgtaaaccaaagacccagcaatcaccaatttccaatgggtctcctgagttaggtataaagaagaaaccaagagaaggaaaaggaaacacaacctatttgtgggagtttcttttagatctacttcaagataaaaatacttgtcccaggtatattaaatggactcagagagaaaaaggcatattcaagctggtggattcaaaggctgtctctaagctttggggaaagcataagaacaaaccagacatgaactatgaaaccatgggacgagctttgagatactactaccaaaggggaattcttgcaaaggttgaaggacagaggcttgtatatcagttcaaggatatgccgaaaaacatagtggtcatagatgatgacaaaagtgaaacctgtaatgaagatttagcaggaactactgatgaaaaatcattagaacgagtgtcactgtctgcagaaagtctcctgaaagcagcatcctctgttcgcagtggaaaaaattcatcccctataaactgctccagagcagagaagggtgtagctagagttgtgaatatcacttcccctgggcacgatgcttcatccaggtctcctactaccactgcatctgtgtcagcaacagcagctccaaggacagttcgtgtggcaatgcaggtacctgttgtaatgacatcattgggtcagaaaatttcaactgtggcagttcagtcagttaatgcaggtgcaccattaataaccagcactagtccaacaacagcgacctctccaaaggtagtcattcagacaatccctactgtgatgccagcttctactgaaaatggagacaaaatcaccatgcagcctgccaaaattattaccatcccagctacacagcttgcacagtgtcaactgcagacaaagtcaaatctgactggatcaggaagcattaacattgttggaaccccattggctgtgagagcacttacccctgtttcaatagcccatggtacacctgtaatgagactatcaatgcctactcagcaggcatctggccagactcctcctcgagttatcagtgcagtcataaaggggccagaggttaaatcggaagcagtggcaaaaaagcaagaacatgatgtgaaaactttgcagctagtagaagaaaaaccagcagatggaaataagacagtgacccacgtagtggttgtcagtgcgccttcagctattgcccttcctgtaactatgaaaacagaaggactagtgacatgtgagaaataaaatagcagctccaccatggacttcaggctgttagtggcagtactgacataaacatttgcaagggaagtcatcaagaaaagtcaaagaagactttaaaacatttttaatgcatatacaaaaacaatcagacttactggaaataaattacctatcccatgtttcagtgggaaatgaactacatattgagatgctgacagaaaactgcctcttacagtaggaaacaactgaacccatcaataagaaaaaggatcgaaagggaccaagcagctcactacgatatcaagttacactaagacttggaacactaacattctgtaagaggttatatagttttcagtgggaggggttgggatgggtaatctcattgttacatatagcaatttttgatgcattttatatgcataccagcaattattactgtgttcgcacagttctcacttaactggtgctatgtgaagactctgctaatataggtattttagaatgtgaattgaagaatggatcccaaaaacttcagaaagaggatagcaaaaaaagatctagtgcgattttatatatatatatatatatatatacatacatatatatatatcatatagcttaagctgatttaaaacaaaggccttagactaattttcgattttctttcttgaaataagctaatggcttgtttgtgtaaagcttttttattaaaagaaaaattttaaaaatcttgtacctagcacagtattgttatagaatatacatgtaacattttatatggtagtttaagtctgtcagtttcttaattgtggacaaattaacagttggctctggccttttgctgtaacatgcctgtgtcactcacttagccttggcatttgtgcagacataccattttcagttctgctgtcacttggaagttcaggctcagcatgaatttttggcaggtagctctaatacctggagttttctttgtttttttttcttttttttagttgaagtttatgagggaaataccagtgttcagttttgaactataatagtttgtatattcaacatttgaagtatattctattttgttgtactcttgtttcaaagtgtattcaagtaggttttctgaaatatagaaatgaaatttatcttctgttttggtctctggtgatattttaaacaatatttaaaagtcagtatagaagtgttttagttaggaagtgataaaacatctctcttctccttcccaactactgcatgaagaaattctacttccattatattaatatttgg

SEQ ID NO: 262689 - DNA, 1746 bp, Artificial Sequence
  derived and/or modified sequence
atgaccagcgctgtggtggacagcggcggcaccatcctggagctgagcagcaatggagtggagaaccaggaggagagcgagaaggtgtctgagtacccagctgtgattgtggagcctgtgcccagcgcccggctggagcagggctacgccgcccaggtgctggtgtatgatgatgagacctacatgatgcaggatgtggccgaggagcaggaggtggagacagaaaatgtggagaccgtggaggcctctgtgcacagcagcaatgcccactgcacagacaagaccatcgaggccgctgaggccctgctgcacatggagagccccacctgcctgcgggacagccgcagccctgagttcatccacgccgccatgaggccagatgtgatcacagagaccgtggtggaggtgtccacagaggagagcgagcccatggacaccagccccatccccaccagcccagacagccatgagcccatgaagaagaagaaggtgggcaggaagcccaagacccagcagagccccatcagcaatggcagccctgagctgggcatcaagaagaagccccgggagggcaagggcaacaccacctacctgtgggagttcctgctggacctgctgcaggacaagaacacctgcccccgctacatcaagtggacccagcgggagaagggcatcttcaagctggtggacagcaaggctgtgtccaagctgtggggcaagcacaagaacaagccagacatgaactatgagaccatgggccgggccctgcgctactactaccagaggggcatcctggccaaggtggagggccagaggctggtgtaccagttcaaggacatgcccaagaacatcgtggtgattgatgatgacaagtctgagacctgcaatgaagacctggccggcaccacagatgagaagagcctggagcgggtgtccctgtctgctgagagcctgctgaaggccgccagctctgtgcgcagcggcaagaacagcagccccatcaactgcagcagagctgagaagggcgtggcccgggtggtgaacatcaccagccctggccatgatgccagcagccgcagccccaccaccacagcctctgtgtctgccacagctgcccccaggacagtgcgggtggccatgcaggtgcctgtggtgatgaccagcctgggccagaagatcagcacagtggccgtgcagagcgtgaatgctggggcccccctcatcaccagcaccagccccaccacagccaccagccccaaggtggtgatccagaccatccccaccgtgatgcctgccagcacagaaaatggagacaagatcaccatgcagcctgccaagatcatcaccatcccagccacccagctggcccagtgccagctgcagaccaagagcaacctgactggaagtggcagcatcaacatcgtgggcacccccctggccgtgcgggccctgacccctgtgtccatcgcccacggcacccctgtgatgaggctgtccatgcccacccagcaggccagcggccagaccccacccagggtcatctctgctgtgatcaagggccctgaggtgaagtctgaggccgtggccaagaagcaggagcatgatgtgaagaccctgcagctggtggaggagaagccagcagatggcaacaagacagtgacccacgtggtggtggtgtctgcccccagcgccatcgccctgcctgtgaccatgaagacagagggcctggtgacctgtgagaagtag

SEQ ID NO: 262690 - DNA, 1746 bp, Artificial Sequence
  derived and/or modified sequence
atgaccagcgccgtggtggacagcggcggcaccatcctggagctgtccagcaacggcgtcgaaaaccaagaggagtcagaaaaggtttcagagtatcctgcagtcattgtcgaaccagtacctagcgctcggctggagcagggctacgctgcccaggtactggtgtacgatgacgaaacatacatgatgcaggacgtggctgaggaacaggaagtggagaccgaaaatgtggaaacagtagaagccagcgtccatagttccaacgctcattgcacggacaaaaccatcgaggctgcagaagctctgttgcacatggaaagtccaacttgtctccgcgactcaaggtcacctgagtttatacacgccgcaatgaggcctgatgtcataaccgaaacagtggtagaggtgtctacagaagaaagcgaacccatggacaccagtccaattccaaccagcccagacagccatgagcccatgaaaaagaagaaagtgggcagaaaaccaaagacccaacagagtcccattagcaatggctcccccgaactcggcataaaaaagaaacctcgtgaaggcaaaggaaataccacatacttatgggagttcctgctggatctgctacaggacaaaaacacctgtccgcgctacatcaaatggacacagagagaaaaaggaattttcaagctagtggacagcaaggccgtctccaagctgtgggggaaacacaaaaacaagccagacatgaactacgaaactatgggcagggccttacggtactactatcagagagggatcctagccaaggtggagggacaaaggcttgtatatcaattcaaggacatgccgaagaacatcgtggtgatagatgacgataagtctgaaacctgtaacgaggatctagccggaaccactgacgagaagtccctggagcgcgtgtccctctccgcagaatctctgttaaaggccgcgtcatcagtcagatcaggcaagaacagcagccccattaactgtagccgggcagaaaagggagtcgcacgcgtggtcaatatcacatcacccggccatgatgcaagcagcagaagtcccaccaccacagcctctgttagcgctacagcagcacctcgcaccgtccgagtagccatgcaggtgcctgtggttatgacaagccttggccagaagatctcaacagtggcggtgcagtccgtaaacgctggggctccgctgattacgtccaccagccctaccaccgctacctcacccaaagtggtgatacagacaatccccactgtaatgccggccagcaccgaaaacggagataagatcacgatgcagccggccaagatcatcacgatccctgccactcagctggctcagtgccagttgcagactaagtctaacctgacaggtagcggaagcataaatattgtaggcactccactggcagtgcgtgctctgactcctgtgtcgatagcacacggtactccggtcatgcggctgtccatgcctactcaacaggcatcaggtcagacccccccgagagtaatctccgccgttattaagggaccggaagttaagtccgaagctgtcgctaagaaacaggagcatgatgtgaaaacactccagttagtggaggaaaagcctgcggatggaaataagacagtgacccatgttgtggtcgtctcagccccatccgccatagcccttcctgtcacaatgaagaccgaggggctagtgacatgtgagaaatag

SEQ ID NO: 262691 - DNA, 1746 bp, Artificial Sequence
  derived and/or modified sequence
atgaccagcgccgtggtggacagcggcggcaccatcctggagctgtcaagtaacggtgttgaaaatcaggaagaatccgaaaaggtgagtgagtacccagctgttatcgtagaacctgtgcccagcgccaggctggagcagggctatgcggcacaggtactcgtgtacgacgacgagacatatatgatgcaggatgtcgctgaagaacaggaggtggagacagaaaacgtcgagacagttgaggccagtgtacacagctctaacgctcattgcactgataaaacaatagaggcagccgaagccctcctgcatatggaatcgccgacatgcctgagagactcaaggagtcctgagttcattcacgcggccatgcggcctgatgtgattacagagaccgtcgtagaagtatccaccgaggagagtgagcccatggatacctcgcccatccctacgtctcccgatagtcatgagcctatgaagaaaaagaaggtggggcgtaagcccaagacacaacaatcgccaatatctaatggaagccctgaactcggtattaagaaaaaacccagagagggcaagggaaatacgacctatttgtgggagtttctgcttgatttgttacaggacaagaatacatgcccgagatacatcaagtggacccagcgggagaagggcattttcaaactggttgatagcaaagcggtttccaaactgtggggaaagcacaaaaataaacccgacatgaattatgaaaccatgggacgcgctctacggtattattatcaaagaggaatactcgccaaagtggagggccagaggctggtataccagttcaaagatatgcctaaaaatattgtggtgattgacgacgacaaatctgagacatgtaacgaggatctcgccggcacaacagacgagaagagcctggaacgggtaagtctgagcgccgagtcccttcttaaggccgcctcttctgtgagatcaggtaaaaactcaagccctattaactgctcccgagctgaaaagggagtggcccgggtggtgaacataactagcccagggcatgatgcaagttcccggagcccaacgactacagcttctgtcagcgcaactgcggccccaagaaccgtcagggtagcaatgcaggtgcctgtggtgatgacttctttggggcaaaagatttccacggttgcggttcaaagtgttaatgccggtgctccactgatcaccagcacgtcaccaacaacagctacctctcctaaagtcgtgattcaaacaatcccaacggtgatgcctgcatccaccgaaaatggggacaagatcaccatgcagccggctaagataatcacaatcccagccactcaactcgctcagtgtcagctccagacaaagtccaacctcactggatctggctccattaatatcgtggggaccccactcgccgtgcgtgcactgacaccagttagcatcgctcacggtacccctgtgatgcgcctttccatgcccacacagcaggccagtggccagacacctccaagagtgatatctgcagtgattaaaggccccgaggtgaaaagcgaggctgtcgcgaaaaagcaagagcacgacgtgaagacgctccagcttgtggaggagaaacctgccgacggaaacaaaacggtcacccatgtcgttgtggtgagcgcacccagtgcaattgctctccccgtgaccatgaagacagaagggctggtgacatgcgaaaaatag

SEQ ID NO: 262692 - DNA, 1746 bp, Artificial Sequence
  derived and/or modified sequence
atgacctcggcagttgtggattccggcggaactatcctggagctgagttccaacggagtggaaaaccaagaggaaagcgaaaaggtgagcgagtaccccgcagtgattgtggagccagtcccttctgcccgacttgaacagggctacgccgctcaagtgctcgtttatgatgacgaaacatacatgatgcaggacgttgcagaggagcaggaagtggaaacggaaaacgtggaaacagtggaggcaagtgttcattctagtaacgcccattgtacagataagaccattgaggcagcagaagctttgctccacatggagtcccccacctgtctccgtgactcacgctcaccagaatttattcacgcagcaatgcgaccagatgttattactgagaccgtggttgaggtgtcgaccgaggagagcgaacctatggacacctcacccattccaacctcgccggatagccacgaacctatgaagaaaaagaaggtaggaagaaagcccaaaacccaacagtctcccatcagcaatggttccccagagctggggatcaagaaaaaacctagggaggggaagggaaatactacttacctgtgggaattcttacttgaccttcttcaggacaagaacacctgtcctcgctacatcaagtggacacagagagagaagggtatcttcaagctggtggacagtaaggcagtgtcgaagctctggggcaagcacaaaaacaaaccggacatgaactatgaaaccatgggcagggcactgcggtactattaccagagggggatcctggctaaagtcgaaggacaaaggctggtgtatcagttcaaggacatgccgaagaatatcgtagtcattgacgacgataagagcgagacatgcaacgaagacttggctggcacgaccgatgagaaatctctagagcgcgttagcctcagcgccgagagtctgcttaaggccgcaagctccgtaagatccggaaagaatagctcccccatcaactgctctcgagccgagaagggtgttgctagagtcgtgaacatcacatcccctggccacgatgcatcttcccggtcccccactacgactgcgagcgtctcagcaactgccgctcctaggacggtccgcgtcgccatgcaggtaccagtggtgatgaccagtctgggtcaaaagatcagcactgtcgccgtgcagtccgtaaacgctggcgctcccctgatcacatcgacaagcccaacaaccgccaccagccccaaagtcgtgatccagaccattcctaccgtgatgccggctagtacagaaaacggtgataagatcaccatgcaaccggctaaaatcattaccatacctgcaactcagttagcccaatgccagttgcagaccaagtccaatctcaccggatctgggagtattaacattgtggggacgccactggccgtgcgggcactaacccccgtgagtattgctcacggaacacccgttatgagactctctatgccgacacagcaggcctccggccagacacctccccgagttatttctgccgtgattaagggtcccgaggtcaagagtgaagccgtggcaaaaaaacaggagcacgatgtcaagaccctgcagctggttgaggagaagcccgcagacggtaataagaccgtcactcacgtagtggtcgtgtctgccccttcggctattgccttgcctgtaacaatgaagacagaggggctcgtgacttgtgaaaagtag

SEQ ID NO: 262693 - DNA, 1746 bp, Artificial Sequence
  derived and/or modified sequence
atgacatccgctgtggtggactctggaggaactattttggaattgagctcaaacggagtggaaaatcaagaggagagtgaaaaagtctccgaatacccggcagtgattgttgaacctgtgccctccgccagactggagcaaggttatgccgctcaagttttagtgtacgacgatgagacctacatgatgcaagacgttgccgaagaacaagaagtcgagactgaaaacgtggagacggtagaagcaagcgtgcactctagcaacgcacactgcactgataagaccatcgaagctgcggaagcccttttacacatggagtctcccacttgtcttcgggattcccgcagtcccgagtttattcacgctgccatgaggcccgatgttataaccgaaacagtggtagaagtctctacagaggaaagcgagcccatggacacctccccaatccctactagcccagactcccatgagcccatgaaaaagaagaaggtaggaaggaagcccaaaacccaacagtcacctatatctaatggctcccccgagctgggaataaaaaaaaagcctcgggagggaaagggtaacactacttatctgtgggagtttctgttggacttgcttcaggacaagaatacatgtccacgctacattaaatggacacagcgcgagaagggcattttcaaattggtggatagcaaggctgtgtcaaagttgtggggaaaacataagaacaagccagatatgaattatgaaaccatgggccgagctctgagatactactatcagcgcggtatcctcgcaaaagtggagggtcagcgactggtgtaccagttcaaggatatgcctaaaaacatcgtcgtgatcgacgacgataagagtgaaacttgtaacgaagacctggccggtacgacagacgagaaatccctagaaagagtgtctcttagcgcagagagtctgcttaaagctgcctccagcgtgcgttccggcaaaaattcaagccccattaattgctctagggccgagaaaggcgtggcaagagttgtgaatattacttctcctgggcacgatgcttcgagtagatctccaacaaccactgctagcgtgagcgccacagctgctcctagaacagtgagggtcgccatgcaagtcccagtggttatgaccagcttaggccagaaaatttccacggtggctgtgcagtcagtgaatgcaggcgcacctctgatcacatctacttcgcctaccaccgccacctccccgaaagtcgtaatacagacaatccctacagttatgccggcatccacggagaatggcgacaagataaccatgcagcccgctaagattattaccattccggctacacagctggcacaatgccagttgcaaactaaaagtaatttaacaggaagtggcagtattaatattgtggggacccccctcgccgtgcgcgctctaacccccgtctcaatcgcccacggaacaccagtgatgcgcttatccatgcctacacaacaggctagtggacaaacccctcctagggttatctcagctgtgatcaagggacccgaagtgaagtccgaagccgtggccaaaaagcaggagcacgatgttaaaaccttgcaactggtagaagagaagcctgcggatgggaataaaacagtgacacacgtcgtggttgtgagcgctccaagcgccatcgcgttgccggtgaccatgaagacagaaggattggttacctgtgagaagtag

SEQ ID NO: 262694 - protein, 438 aa, Artificial Sequence
  derived and/or modified sequence
MLARVTRKMLRHAKCFQRLAIFGSVRALHKDNRTATPQNFSNYESMKQDFKLGIPEYFNFAKDVLDQWTDKEKAGKKPSNPAFWWINRNGEEMRWSFEELGSLSRKFANILSEACSLQRGDRVILILPRVPEWWLANVACLRTGTVLIPGTTQLTQKDILYRLQSSKANCIITNDVLAPAVDAVASKCENLHSKLIVSENSREGWGNLKELMKHASDSHTCVKTKHNEIMAIFFTSGTSGYPKMTAHTHSSFGLGLSVNGRFWLDLTPSDVMWNTSDTGWAKSAWSSVFSPWIQGACVFTHHLPRFEPTSILQTLSKYPITVFCSAPTVYRMLVQNDITSYKFKSLKHCVSAGEPITPDVTEKWRNKTGLDIYEGYGQTETVLICGNFKGMKIKPGSMGKPSPAFDVKVCTSPSRRMFNNPICTLPTYRLPPYKLSLL

SEQ ID NO: 262695 - DNA, 1317 bp, Artificial Sequence
  derived and/or modified sequence
atgttagcccgcgttacccggaaaatgttgcgacacgccaaatgcttccagagactggccatcttcggcagtgtgcgagcccttcacaaggacaatcggactgccacacctcaaaactttagcaattacgagagtatgaaacaggacttcaaactgggaattcccgaatatttcaatttcgcaaaggacgttttggatcagtggaccgacaaagagaaggctggtaaaaagcccagtaacccggctttttggtggattaacaggaacggggaagaaatgcggtggagtttcgaagaactcgggagtctctcccgcaagtttgccaacattttgtccgaagcctgttccttgcagcgcggggatcgagttatccttatccttcctagagtgccggaatggtggctcgccaacgttgcatgtttgcggacaggcacggttctgattccaggaaccacccagctaacccaaaaagatatcctatatcggttgcaatcttctaaggcaaactgtatcatcaccaatgatgtccttgcccccgcagtggacgcagtcgctagtaaatgcgaaaacctccacagtaagctcatcgtctctgagaacagtcgggaaggctggggtaacttgaaggaactgatgaaacatgccagcgattcacatacttgtgtgaaaacaaaacataatgaaatcatggctatttttttcacctcgggaacaagcggctaccctaaaatgaccgctcatacccactccagttttggcctcggcttgtctgtgaacgggcgtttctggttggacctcactccctctgacgtcatgtggaatacctcagataccggctgggcaaagtctgcctggagctccgtgttttctccatggatacagggggcctgcgtatttacccatcacttgccacggttcgagccgacatccattttacaaacgttatcaaagtatcctattactgtgttttgcagcgcccctacggtgtacaggatgctggttcagaatgatatcacctcctataagttcaagtccttaaagcactgcgtgagtgctggtgagccgatcacccccgatgtcacggagaagtggagaaacaagacgggtctcgatatttatgaaggatacggtcaaacggaaaccgtcctaatctgcggaaactttaaagggatgaagattaaacccgggagtatgggcaagccctctcccgcttttgacgtcaaggtgtgcacatctccttcacggcgcatgtttaacaaccctatttgtaccctgccgacttatagactgcccccttacaagttgagtttactgtag

SEQ ID NO: 262696 - DNA, 1317 bp, Artificial Sequence
  derived and/or modified sequence
atgctggcccgggtgaccaggaagatgctgcggcatgccaagtgcttccagaggctggccatcttcggctctgtgcgggccctgcacaaggacaacagaacagccaccccccagaacttcagcaactatgaatccatgaagcaggacttcaagctgggcatccctgagtacttcaactttgccaaggatgtgctggaccagtggacagacaaggagaaggccggcaagaagcccagcaacccagccttctggtggatcaacagaaatggagaggagatgcgctggagctttgaggagctgggcagcctgagcaggaagtttgccaacatcctgtctgaggcctgcagcctgcagagaggagacagagtcatcctgatcctgccccgggtgcctgagtggtggctggccaacgtggcctgcctgaggactggaacagtgctgatccctggcaccacccagctgacccagaaggacatcctgtaccgcctgcagagcagcaaggccaactgcatcatcaccaatgatgtgctggccccagctgtggatgctgtggccagcaaatgtgagaacctgcacagcaagctgattgtgtctgagaacagccgggagggctggggcaacctgaaggagctgatgaagcacgccagtgacagccacacctgtgtgaagaccaagcacaatgagatcatggccatcttcttcaccagcggcaccagcggctaccccaagatgacagcccacacccacagcagctttggcctgggcctgtctgtgaatggccgcttctggctggacctgacccccagtgatgtgatgtggaacaccagtgacaccggctgggccaagagcgcctggagctctgtgttcagcccctggatccagggcgcctgtgtgttcacccaccacctgcccaggtttgagcccaccagcatcctgcagaccctgagcaagtaccccatcaccgtcttctgcagcgcccccaccgtgtacaggatgctggtgcagaatgacatcaccagctacaagttcaagagcctgaagcactgtgtgtctgctggggagcccatcaccccagatgtgacagagaagtggaggaacaagacaggcctggacatctatgagggctacggccagacagaaacagtgctgatctgtggcaacttcaagggcatgaagatcaagccaggctccatgggcaagcccagccctgcctttgatgtgaaggtgtgcaccagccccagcaggaggatgttcaacaaccccatctgcaccctgcccacctaccgcctgcccccctacaagctgagcctgctgtag

SEQ ID NO: 262697 - DNA, 1317 bp, Artificial Sequence
  derived and/or modified sequence
atgctggcccgggtgacccggaagatgctgcggcacgccaagtgctttcagcggctggccatctttggctcagtccgggccctccacaaagacaaccgcactgcgactccgcaaaactttagcaattatgagagcatgaagcaggacttcaagctgggaatacctgagtactttaattttgctaaagacgttctcgaccaatggactgataaagagaaggccgggaaaaaaccatcaaatccagctttttggtggattaaccgaaatggtgaggagatgagatggtcttttgaagagttgggcagtctttcccgcaaatttgctaacatcctgtcagaagcttgctcccttcaaaggggagatagagtgatcctcatactcccccgagttcctgaatggtggctagccaatgtggcttgtctccggaccggcaccgtgcttatcccggggacgacccagctaacccaaaaggatatcctgtatcgtttgcagtccagtaaggccaattgcataatcactaacgatgtcttggctcctgccgtcgatgccgtcgccagtaaatgcgagaatcttcactccaagctgatcgtgtctgagaacagccgagaagggtggggcaatctcaaagagttgatgaaacatgcctcggactctcacacatgcgtgaagaccaagcacaacgaaatcatggccatttttttcacctccggaacatcagggtaccccaagatgactgcgcacactcacagctcctttggtttgggactgtccgttaacgggagattttggttggacctgacgccctcagacgtcatgtggaatacatcagataccggatgggcgaagagtgcctggtcatccgtcttttctccgtggattcaaggtgcctgcgtgttcacacaccacttacctcgctttgaaccaaccagcatactgcagactctgtcaaaatacccgatcacagttttttgcagcgctcccactgtgtatcgcatgcttgtacagaacgacataacttcctacaagttcaaatctctgaaacattgtgtgtcggcgggcgagccaatcacacccgatgtgacagagaagtggaggaacaagacaggcctggatatctacgaaggctacgggcaaacagaaaccgtgttaatatgcggcaatttcaaaggaatgaaaattaagcctggttccatgggaaagcctagccccgccttcgacgtgaaggtgtgcacttcccccagcaggcggatgtttaacaaccccatctgcaccttgcccacttataggctgcctccgtacaagctcagcctgctttag

SEQ ID NO: 262698 - DNA, 1317 bp, Artificial Sequence
  derived and/or modified sequence
atgcttgccagggtaactcggaaaatgttgaggcacgcgaaatgctttcagcggctcgctattttcggtagtgtgcgtgccttacacaaagataatcggactgccaccccccagaacttttccaactacgaatccatgaaacaggattttaagctgggaatccctgagtattttaacttcgcaaaggatgtgctggatcagtggaccgataaagaaaaggctggcaaaaaaccctcgaaccctgccttttggtggattaaccgaaacggggaggagatgagatggtctttcgaggagctcgggtccctttcccgcaagttcgctaacatcctcagtgaggcttgttccctgcaacgcggagaccgcgtgattctgatactgcctcgagtaccagagtggtggctggccaacgttgcctgcctgcgaacagggaccgtgctgatccctgggactacacaactgacgcagaaagatattctctatcggctgcaaagttccaaggccaactgcataataacaaatgacgtgttagcccctgcagtggatgcagttgcgagtaagtgcgagaatcttcatagcaaactgattgtgtccgagaactcccgcgaaggttggggtaatttgaaggagctcatgaagcacgcttcggattcacacacatgcgtaaagactaagcacaatgagataatggccatcttcttcacaagtggcacgtcaggctaccctaagatgaccgcccacacacattcaagctttgggcttggactgtcagtcaatggcagattctggttagacctcaccccctcagacgttatgtggaatacatcagataccggatgggcgaagtcagcttggtcaagtgtcttttcaccttggatccagggagcatgtgtgtttacacatcacttgcctagatttgagcccacctcgattttgcagacccttagcaagtatccgattaccgtgttctgtagtgccccaactgtctaccgaatgctggtccagaatgacatcacctcttataaatttaagtcattaaagcattgcgtgtctgcaggcgaaccaattacaccagatgtgacggaaaaatggcgcaacaagaccggcctggacatttatgaaggttatggccaaaccgaaaccgtgctcatctgcggcaattttaaagggatgaaaattaaacccggatccatgggtaaaccgtctccggcattcgatgttaaagtgtgcacctcccctagtaggcgaatgtttaacaacccaatctgcaccctcccaacctaccggctgccgccttacaagctgtcattactgtag

SEQ ID NO: 262699 - DNA, 1317 bp, Artificial Sequence
  derived and/or modified sequence
atgctggccagagtgaccagaaagatgctgagacacgccaagtgcttccagagactggccatcttcggcagcgtgagagccctgcacaaggacaacagaaccgccaccccccagaacttcagcaactacgagagcatgaagcaggacttcaagctgggcatccccgagtacttcaacttcgccaaggacgtgctggaccagtggaccgacaaggagaaggccggcaagaagcccagcaaccccgccttctggtggatcaacagaaacggcgaggagatgagatggagcttcgaggagctgggcagcctgagcagaaagttcgccaacatcctgagcgaggcctgcagcctgcagagaggcgacagagtgatcctgatcctgcccagagtgcccgagtggtggctggccaacgtggcctgcctgagaaccggcaccgtgctgatccccggcaccacccagctgacccagaaggacatcctgtacagactgcagagcagcaaggccaactgcatcatcaccaacgacgtgctggcccccgccgtggacgccgtggccagcaagtgcgagaacctgcacagcaagctgatcgtgagcgagaacagcagagagggctggggcaacctgaaggagctgatgaagcacgccagcgacagccacacctgcgtgaagaccaagcacaacgagatcatggccatcttcttcaccagcggcaccagcggctaccccaagatgaccgcccacacccacagcagcttcggcctgggcctgagcgtgaacggcagattctggctggacctgacccccagcgacgtgatgtggaacaccagcgacaccggctgggccaagagcgcctggagcagcgtgttcagcccctggatccagggcgcctgcgtgttcacccaccacctgcccagattcgagcccaccagcatcctgcagaccctgagcaagtaccccatcaccgtgttctgcagcgcccccaccgtgtacagaatgctggtgcagaacgacatcaccagctacaagttcaagagcctgaagcactgcgtgagcgccggcgagcccatcacccccgacgtgaccgagaagtggagaaacaagaccggcctggacatctacgagggctacggccagaccgagaccgtgctgatctgcggcaacttcaagggcatgaagatcaagcccggcagcatgggcaagcccagccccgccttcgacgtgaaggtgtgcaccagccccagcagaagaatgttcaacaaccccatctgcaccctgcccacctacagactgcccccctacaagctgagcctgctgtag

SEQ ID NO: 262700 - DNA, 1569 bp, Artificial Sequence
  derived and/or modified sequence
cggattgtcagactgctcctccctcttctttagactgccacgaggaaaaagcagatgtgagaactcaaggttcagggctgctcttctaagaaacaagtctgccataatctccatctgtgttggaatctgttaactaatgaactggtctctgtgcaaatcctgagtgctaaagcttccaacaagactgatgctagctcgtgtcaccaggaagatgctacgtcatgccaagtgttttcagcgcctagcaatttttggttctgtgagggcactgcataaagataatagaacagcaacccctcagaatttctccaactatgaatccatgaaacaggacttcaaactggggattccagagtatttcaactttgctaaagatgtcctggaccaatggactgataaggaaaaggctggaaagaaaccttcaaatccagccttctggtggatcaacagaaatggagaagagatgcgatggagttttgaggaactgggatctctgtccagaaaatttgccaatatactttcagaagcctgttccctacaaagaggagatcgggtaattctgattctgcccagggtcccagagtggtggcttgcaaatgtggcctgtctgcgaacagggacagttttaattccaggaaccactcagctgacccagaaagacattctctacagactacaatcttcaaaagcaaactgcattatcaccaatgatgttttagccccagcagtagacgctgttgcatccaaatgtgaaaatctgcactccaagctgattgtatcagagaactccagagaggggtgggggaacctcaaggagttgatgaaacatgccagtgacagccacacctgtgtgaagacaaaacacaatgagatcatggccatattctttaccagtggaacaagtggatatccgaaaatgactgcacacacccacagcagttttggtttaggattatctgtaaatggaaggttctggctagatttgacaccctcagatgtgatgtggaatacctcagatacgggctgggcaaagtctgcatggagtagtgttttttctccgtggatccagggagcatgtgtattcacacaccatttaccccgttttgagccgacttctatcttgcaaacactctccaagtaccccatcacagtcttctgttcagcaccaactgtataccgaatgcttgtacagaatgatataaccagctataagtttaaaagcttaaagcactgtgtgagtgctggggaaccaattacccctgacgtgactgaaaaatggagaaacaagacgggcctggatatctacgaaggatatggacagactgaaacggtgctaatctgtggaaattttaagggaatgaaaattaaacctggctcaatgggaaaaccttctcctgctttcgatgttaaggtttgcacatccccttccaggagaatgtttaacaacccaatctgtacactacctacctaccgcttacccccatataaactttctttgttatgatggtgattccattttacttccatgatactttaatttttataaatatgtgaaaatgattagaaatg

SEQ ID NO: 262701 - protein, 801 aa, Artificial Sequence
  derived and/or modified sequence
MKTSPRRPLILKRRRLPLPVQNAPSETSEEEPKRSPAQQESNQAEASKEVAESNSCKFPAGIKIINHPTMPNTQVVAIPNNANIHSIITALTAKGKESGSSGPNKFILISCGGAPTQPPGLRPQTQTSYDAKRTEVTLETLGPKPAARDVNLPRPPGALCEQKRETCADGEAAGCTINNSLSNIQWLRKMSSDGLGSRSIKQEMEEKENCHLEQRQVKVEEPSRPSASWQNSVSERPPYSYMAMIQFAINSTERKRMTLKDIYTWIEDHFPYFKHIAKPGWKNSIRHNLSLHDMFVRETSANGKVSFWTIHPSANRYLTLDQVFKPLDPGSPQLPEHLESQQKRPNPELRRNMTIKTELPLGARRKMKPLLPRVSSYLVPIQFPVNQSLVLQPSVKVPLPLAASLMSSELARHSKRVRIAPKVFGEQVVFGYMSKFFSGDLRDFGTPITSLFNFIFLCLSVLLAEEGIAPLSSAGPGKEEKLLFGEGFSPLLPVQTIKEEEIQPGEEMPHLARPIKVESPPLEEWPSPAPSFKEESSHSWEDSSQSPTPRPKKSYSGLRSPTRCVSEMLVIQHRERRERSRSRRKQHLLPPCVDEPELLFSEGPSTSRWAAELPFPADSSDPASQLSYSQEVGGPFKTPIKETLPISSTPSKSVLPRTPESWRLTPPAKVGGLDFSPVQTSQGASDPLPDPLGLMDLSTTPLQSAPPLESPQRLLSSEPLDLISVPFGNSSPSDIDVPKPGSPEPQVSGLAANRSLTEGLVLDTMNDSLSKILLDISFPGLDEDPLGPDNINWSQFIPELQ

SEQ ID NO: 262702 - DNA, 3475 bp, Artificial Sequence
  derived and/or modified sequence
ggttggaggagcccggagcccgccttcggagctacggcctaacggcggcggcgactgcagtctggagggtccacacttgtgattctcaatggagagtgaaaacgcagattcataatgaaaactagcccccgtcggccactgattctcaaaagacggaggctgccccttcctgttcaaaatgccccaagtgaaacatcagaggaggaacctaagagatcccctgcccaacaggagtctaatcaagcagaggcctccaaggaagtggcagagtccaactcttgcaagtttccagctgggatcaagattattaaccaccccaccatgcccaacacgcaagtagtggccatccccaacaatgctaatattcacagcatcatcacagcactgactgccaagggaaaagagagtggcagtagtgggcccaacaaattcatcctcatcagctgtgggggagccccaactcagcctccaggactccggcctcaaacccaaaccagctatgatgccaaaaggacagaagtgaccctggagaccttgggaccaaaacctgcagctagggatgtgaatcttcctagaccacctggagccctttgcgagcagaaacgggagacctgtgcagatggtgaggcagcaggctgcactatcaacaatagcctatccaacatccagtggcttcgaaagatgagttctgatggactgggctcccgcagcatcaagcaagagatggaggaaaaggagaattgtcacctggagcagcgacaggttaaggttgaggagccttcgagaccatcagcgtcctggcagaactctgtgtctgagcggccaccctactcttacatggccatgatacaattcgccatcaacagcactgagaggaagcgcatgactttgaaagacatctatacgtggattgaggaccactttccctactttaagcacattgccaagccaggctggaagaactccatccgccacaacctttccctgcacgacatgtttgtccgggagacgtctgccaatggcaaggtctccttctggaccattcaccccagtgccaaccgctacttgacattggaccaggtgtttaagccactggacccagggtctccacaattgcccgagcacttggaatcacagcagaaacgaccgaatccagagctccgccggaacatgaccatcaaaaccgaactccccctgggcgcacggcggaagatgaagccactgctaccacgggtcagctcatacctggtacctatccagttcccggtgaaccagtcactggtgttgcagccctcggtgaaggtgccattgcccctggcggcttccctcatgagctcagagcttgcccgccatagcaagcgagtccgcattgcccccaaggtttttggggaacaggtggtgtttggttacatgagtaagttctttagtggcgatctgcgagattttggtacacccatcaccagcttgtttaattttatctttctttgtttatcagtgctgctagctgaggaggggatagctcctctttcttctgcaggaccagggaaagaggagaaactcctgtttggagaagggttttctcctttgcttccagttcagactatcaaggaggaagaaatccagcctggggaggaaatgccacacttagcgagacccatcaaagtggagagccctcccttggaagagtggccctccccggccccatctttcaaagaggaatcatctcactcctgggaggattcgtcccaatctcccaccccaagacccaagaagtcctacagtgggcttaggtccccaacccggtgtgtctcggaaatgcttgtgattcaacacagggagaggagggagaggagccggtctcggagaaaacagcatctactgcctccctgtgtggatgagccggagctgctcttctcagaggggcccagtacttcccgctgggccgcagagctcccgttcccagcagactcctctgaccctgcctcccagctcagctactcccaggaagtgggaggaccttttaagacacccattaaggaaacgctgcccatctcctccaccccgagcaaatctgtcctccccagaacccctgaatcctggaggctcacgcccccagccaaagtagggggactggatttcagcccagtacaaacctcccagggtgcctctgaccccttgcctgaccccctggggctgatggatctcagcaccactcccttgcaaagtgctcccccccttgaatcaccgcaaaggctcctcagttcagaacccttagacctcatctccgtcccctttggcaactcttctccctcagatatagacgtccccaagccaggctccccggagccacaggtttctggccttgcagccaatcgttctctgacagaaggcctggtcctggacacaatgaatgacagcctcagcaagatcctgctggacatcagctttcctggcctggacgaggacccactgggccctgacaacatcaactggtcccagtttattcctgagctacagtagagccctgcccttgcccctgtgctcaagctgtccaccatcccgggcactccaaggctcagtgcaccccaagcctctgagtgaggacagcaggcagggactgttctgctcctcatagctccctgctgcctgattatgcaaaagtagcagtcacaccctagccactgctgggaccttgtgttccccaagagtatctgattcctctgctgtccctgccaggagctgaagggtgggaacaacaaaggcaatggtgaaaagagattaggaaccccccagcctgtttccattctctgcccagcagtctcttaccttccctgatctttgcagggtggtccgtgtaaatagtataaattctccaaattatcctctaattataaatgtaagcttatttccttagatcattatccagagactgccagaaggtgggtaggatgacctggggtttcaattgacttctgttccttgcttttagttttgatagaagggaagacctgcagtgcacggtttcttccaggctgaggtacctggatcttgggttcttcactgcagggacccagacaagtggatctgcttgccagagtcctttttgcccctccctgccacctccccgtgtttccaagtcagctttcctgcaagaagaaatcctggttaaaaaagtcttttgtattgggtcaggagttgaatttggggtgggaggatggatgcaactgaagcagagtgtgggtgcccagatgtgcgctattagatgtttctctgataatgtccccaatcataccagggagactggcattgacgagaactcaggtggaggcttgagaaggccgaaagggcccctgacctgcctggcttccttagcttgcccctcagctttgcaaagagccaccctaggccccagctgaccgcatgggtgtgagccagcttgagaacactaactactcaataaaagcgaaggtggaca

SEQ ID NO: 262703 - DNA, 2406 bp, Artificial Sequence
  derived and/or modified sequence
atgaagacctctcccagacgccccctcattctaaagcggcggcgactgcctctccctgtgcaaaatgccccctccgagactagcgaggaggaaccgaaacgtagtccagcccaacaggagagtaaccaggctgaagccagcaaggaggtcgcagaatctaattcttgtaagttccctgccgggatcaagatcattaaccaccccaccatgccaaatacccaagtggtggcaatccccaacaatgccaacatacattcaataatcactgcactgaccgctaaggggaaggaatcagggtcgtctggtcctaataaattcatcctcatcagttgcggcggcgcaccaacacagcctccggggttaagaccgcagacacagacgtcctatgatgcgaagagaactgaggtcacactggagacactgggacctaagcctgcggcacgcgatgttaacttgccacgccccccaggagcactgtgcgaacagaagcgcgaaacatgcgccgacggcgaggccgctggatgcacaattaataattcgctctctaacatccaatggctccggaagatgagtagcgatgggctgggatcaaggagtatcaagcaggagatggaggagaaagagaactgtcatttggagcagagacaggtgaaagtggaagaaccttcccgcccttcagcaagctggcagaatagtgtgtcggaacgccctccatattcatacatggccatgattcagtttgctattaattctacggagcggaaaagaatgacattgaaggacatatatacttggatcgaagaccacttcccctacttcaaacacatcgcaaagcccggatggaaaaatagtatcaggcataatctctcactgcacgacatgttcgtgcgagagacgtcagcaaacggcaaggtctccttctggacaattcacccatcggctaacagatacttgacgctggatcaggttttcaagccgctggatccagggagccctcaacttcccgagcacctcgagtctcagcaaaagaggccaaatcccgagctgcgcaggaacatgactataaagacagagttgcctcttggagccaggcgaaaaatgaagcctctacttccccgggtatccagctacttggtgcctattcaatttcctgtgaaccagtctctggtactgcagccaagtgtcaaggtccccctgccactcgctgcttccctaatgtcctcagagctggcgcggcattctaagcgcgtgaggatcgcacctaaggtgtttggcgagcaggtcgtgtttgggtatatgtctaagtttttctccggtgacctgcgggactttgggactccgataactagcctctttaattttatctttctgtgcctgtcggtgctcctcgccgaagaggggatcgctccgttgtcttccgcaggccccggcaaggaggagaagcttctctttggagagggtttctcacctttgctacctgtccagactatcaaggaggaggagatccagcccggtgaagagatgccgcacctcgccaggccgattaaagtagagagcccccccttggaagaatggccctcccccgccccgtcatttaaagaggagagtagccattcctgggaggactcttcccagtcccccaccccgcggcccaaaaaatcttattctggtttgcgctccccaactaggtgtgttagcgaaatgttagtgattcaacatcgagagcggcgtgaaagaagccggtccaggaggaaacagcacttgttgccaccttgcgtggatgagccggagctcctcttttcagaagggccatccaccagcaggtgggccgccgaactcccttttcccgcagactcgtctgatccagcaagtcagctgtcctactcccaagaggtaggggggccatttaaaactcctattaaagaaactctccctatctcctctactcctagcaagtctgtgctgccgcgcacacctgagtcttggcgcctgacacctcccgccaaggtcggcggcctggatttttcacctgtccagactagccaaggggcaagcgaccccttgcctgacccgctgggtctgatggacctgagtacgacccccctccagtcagccccacccctggagtcacctcagaggctgctttccagcgagcccctagatctcatatccgtccctttcggcaatagtagcccaagtgatattgatgttcctaaacccgggtctcccgaacctcaggtaagcggcttagccgccaaccgctccctcaccgaaggactggtcttggacactatgaatgacagtctctctaagatattacttgacatcagtttccccgggctggatgaggatccgctcgggcccgataatatcaattggtcacagtttatccctgagcttcagtag

SEQ ID NO: 262704 - DNA, 2406 bp, Artificial Sequence
  derived and/or modified sequence
atgaagaccagcccccggcggcccctcatcctgaagagaagaaggctgcccctgcctgtgcagaatgcccccagcgagaccagcgaggaggagcccaagaggagccctgcccagcaggagagcaaccaggccgaggccagcaaggaggtggccgagagcaacagctgcaagtttcctgctggcatcaagatcatcaaccaccccaccatgcccaacacccaggtggtggccatccccaacaatgccaacatccacagcatcatcacagccctgacagccaagggcaaggagagcggcagcagcggccccaacaagttcatcctgatcagctgtggcggggcccccacccagcccccaggcctgcggccccagacccagaccagctatgatgccaagaggacagaggtgaccctggagaccctgggccccaagccagctgccagagatgtgaacctgcccaggcctcctggggccctgtgtgagcagaagcgggagacctgtgctgatggagaggccgccggctgcaccatcaacaacagcctgagcaacatccagtggctgaggaagatgagcagtgatggcctgggcagccgcagcatcaagcaggagatggaggagaaggagaactgccacctggagcagaggcaggtgaaggtggaggagcccagccggcccagcgcctcctggcagaacagcgtgtctgagaggcctccctacagctacatggccatgatccagtttgccatcaacagcacagagaggaagaggatgaccctgaaggacatctacacctggattgaggaccacttcccctacttcaagcacatcgccaagccaggctggaagaacagcatccgccacaacctgagcctgcatgacatgtttgtgcgggagaccagcgccaacgggaaggtgtccttctggaccatccaccccagcgccaaccgctacctgaccctggaccaggtgttcaagcccctggaccccggcagcccccagctgcctgagcacctggagagccagcagaagaggcccaaccctgagctgcggaggaacatgaccatcaagacagagctgcccctgggcgcccggaggaagatgaagcccctgctgccccgggtgagcagctacctggtgcccatccagtttcctgtgaaccagagcctggtgctgcagcccagcgtgaaggtgcccctgcccctggccgccagcctgatgagcagcgagctggcccggcacagcaagagggtgagaattgcccccaaggtgtttggagagcaggtggtgtttggctacatgagcaagttcttcagcggggacctgcgggactttggcacccccatcaccagcctcttcaacttcatcttcctgtgcctgtctgtgctgctggccgaggagggcatcgcccccctgagcagcgctggccctgggaaggaggagaagctgctgtttggagagggcttcagccccctgctgcctgtgcagaccatcaaggaggaggagatccagcccggggaggagatgccccacctggcccggcccatcaaggtggagagcccccccctggaggagtggcccagccctgcccccagcttcaaggaggagagcagccacagctgggaggacagcagccagagccccaccccccggcccaagaagagctacagcggcctgcggagccccacccgctgtgtgtctgagatgctggtgatccagcaccgggagcggcgggagaggagccgcagcaggaggaagcagcacctgctgcccccctgtgtggatgagcctgagctgctcttcagcgagggccccagcaccagccgctgggccgctgagctgcccttccctgctgacagcagtgaccctgccagccagctgagctacagccaggaggtgggcggccccttcaagacccccatcaaggagaccctgcccatcagcagcacccccagcaagtctgtgctgcccaggaccccagagagctggaggctgaccccaccagccaaggtgggcggcctggacttcagccctgtgcagaccagccagggcgccagtgaccccctgcctgaccccctgggcctgatggacctgagcaccacccccctgcagagcgccccacccctggagagcccccagaggctgctgagcagcgagcccctggacctgatctctgtgccctttggaaacagcagccccagcgacattgatgtgcccaagccaggcagccctgagccccaggtgtctggcctggccgccaacagaagcctgacagagggcctggtgctggacaccatgaatgacagcctgagcaagatcctgctggacatctccttccctggcctggatgaggaccccctgggccctgacaacatcaactggagccagttcatccctgagctgcagtag

SEQ ID NO: 262705 - DNA, 2406 bp, Artificial Sequence
  derived and/or modified sequence
atgaagaccagcccccggcggcccctgatcctgaagcggcggcggctcccactccccgttcagaatgcaccatcggagaccagcgaggaggagcccaagcgcagtccggctcagcaggagtcaaatcaggccgaggcctcaaaggaggttgcagaaagcaatagctgcaagttcccggccgggataaagatcatcaaccatcccactatgccgaacacccaggttgttgcgattcctaacaatgcaaacattcactctattattaccgcactcaccgccaaaggaaaggagagcgggagctccggccccaacaaatttattctgatctcatgcggcggagctcctactcagccacctggactcaggccccagactcagacatcatacgatgccaaaaggactgaggttacactcgagaccctaggccctaaacccgctgctcgcgatgttaacctacctagaccgccgggcgctttgtgcgagcagaaaagggagacttgcgccgacggagaggccgcgggatgtactatcaataattctctgtcaaacatccaatggctccggaaaatgagcagtgatggcttggggtcaagaagtatcaagcaggagatggaggaaaaggagaattgccacctggaacaaagacaagttaaggttgaagagcccagcaggcccagtgcaagctggcagaactccgtgtcagagcgcccaccctatagctacatggccatgatacagttcgcaattaattcaaccgaacggaagcggatgacccttaaagatatctacacatggatcgaagaccatttcccctatttcaagcatatagctaagccagggtggaagaactctattcggcataacctgagcctgcacgatatgttcgtcagagagactagtgcaaacggtaaggtctccttttggaccattcatccaagtgctaatcggtaccttacactggaccaggtctttaaacctctggatccgggcagcccacaattacctgaacacttagaatcccagcaaaaacgccctaacccggaactgcggcggaatatgacaatcaagactgagctcccactgggcgccagaagaaagatgaagccgctgctgcctcgggtgagctcttacctcgtccccatccagttccccgtcaaccagtcactggtgctgcagccctccgtaaaggtgcctctgcctctagccgcctccctcatgtcatccgaactcgcgcggcattctaaacgggttaggatcgcaccaaaggtgtttggtgaacaggttgtcttcggatatatgtccaagttcttcagtggcgatcttcgggacttcggaactccaatcaccagtctatttaatttcatttttctctgcctgagcgtgttattggcggaggagggcattgctccactgagttccgccggtcccggcaaagaagagaaacttctatttggcgaaggcttctcacctcttctccctgtgcagaccatcaaagaggaagagattcaacctggagaggagatgccacatctggccaggcccattaaagtggagagccctcccctggaagaatggccgagccccgccccatcttttaaggaagaatctagtcacagctgggaggactcgtctcaatctccaacaccacgacccaaaaaatcttacagcgggctacggtcccctactagatgcgtctcggagatgctggtaatccaacacagagagcgtcgcgaacggtccaggtctcgaaggaagcaacatctcttgcccccttgtgtggatgagcctgagctgctgtttagcgaaggtcccagtacctctcgttgggccgcggagcttcctttccctgccgactcctccgacccggcatctcagcttagctactcgcaggaagtgggtggtccattcaaaacccctatcaaagagactcttcccatctcatccacccctagcaagtccgtactgcctcggacaccggaatcgtggcgcctaacaccgcccgcaaaagttggcggccttgatttctccccagttcaaacgagtcagggggcctccgatccccttcccgacccactgggattaatggatttgtctacaacacccctgcaatctgctccacccctggagagcccacaacggctgctcagcagtgaacccctggatctgatctcagtaccgttcgggaacagtagtccatcggacatagacgtccctaagccaggtagcccggaaccacaggttagcgggctggccgccaatagatcgctaaccgagggcctggttctggataccatgaatgacagcttgtctaaaattcttctcgatatatctttccccggattggatgaagacccactgggacctgacaatatcaactggtcccagtttatccctgagctgcagtag

SEQ ID NO: 262706 - DNA, 2406 bp, Artificial Sequence
  derived and/or modified sequence
atgaaaacctcccccaggcggcctctgattctcaaaaggcgccgactgccactgcctgtgcagaacgcgccttcagagacatcagaggaggaacccaagcgttcaccggctcagcaggagtccaatcaagccgaagcttcgaaggaggtcgccgagtccaactcctgcaagttcccggctgggatcaaaataatcaaccatccaactatgccaaatactcaggtcgttgcgattcccaacaatgctaatatacacagtatcataaccgcccttaccgccaagggcaaagaatccggatccagtggaccaaataagtttattctcatctcttgcggcggagccccaacgcagcccccagggttgagaccacaaacccagacaagttatgacgctaagagaactgaagtgacgctggagacgttaggcccaaagcctgcagcacgggacgtcaatctccccaggcctcccggtgcactctgcgagcagaaacgggagacgtgcgccgatggggaagcagctggctgtaccatcaataacagtttgtctaatattcagtggctccggaagatgagtagcgatgggctgggatctcggtcaataaagcaggaaatggaggagaaggagaattgtcaccttgagcaacgacaggtgaaggtggaagaacctagtcggccatctgcatcatggcagaattcagtcagtgagcggcctccgtattcatatatggccatgatacaattcgctatcaactccacggagcggaagcgcatgactcttaaggacatctatacatggattgaggaccactttccgtacttcaagcacatcgcaaagcccggatggaaaaactcgattaggcacaacctctctctgcatgacatgtttgtgagagagacaagcgccaacggaaaggtctctttttggacgatccacccttctgctaaccgatatttgaccctggatcaggttttcaagccgctcgacccaggttctccacagcttcccgagcatctagagtcgcaacagaagcgaccaaaccctgagttgcgcaggaatatgacaatcaaaacagagctccccctgggcgctcgaaggaagatgaagccacttttgccccgagtgtctagttatctagtgcccatccaattcccagtaaaccagtcacttgtgttgcagccttccgtcaaggtccctcttcctcttgccgcatctcttatgagctccgaactagcgcgacatagcaagagagtgcgcatcgcccctaaggtatttggtgaacaggttgtattcggatatatgtctaagttctttagtggcgatctccgggacttcgggacacccataacatctctgtttaatttcatttttctgtgtctcagcgtgctgctagcagaagaagggatcgctcctttgtcttctgccggtcccggaaaggaggagaagctcctctttggtgaaggattctctcccttgttacctgtgcaaacgatcaaggaggaggagatccagccaggcgaggaaatgccacatctagctcgacccattaaagtggaatccccccctctggaagaatggccatcacctgccccatcttttaaagaagaaagttcccatagctgggaagatagctctcagtctccaacgccacgacctaagaaaagttacagcggcctccgaagcccaaccagatgcgtgagcgaaatgttggtgatccaacacagggagcgacgggaacggtcccggtccagaagaaagcagcatctgctgcccccatgcgttgacgagcctgagctcttattctcagagggcccatccacttcccggtgggccgctgaactaccattccctgccgattctagtgaccctgccagtcagctgtcttattcccaggaagtgggagggccatttaagaccccgatcaaagaaacgctcccgatcagcagcaccccctctaagagtgtcctgcctaggacaccagagtcctggcggctaaccccacctgctaaagtgggaggcttagattttagtcccgtccagacgtctcaaggcgcttctgaccctctccccgatccattgggcctgatggatctgtccacaacccccctgcagagcgctccacctttggagagcccgcagcggttactgtcttccgagcccctcgatctcataagtgtgccctttggtaactcttcccccagcgatatcgatgtgcctaaacccggttctcctgagccccaagtctcgggtctggctgcgaatcgctccctgaccgagggactggtgctcgacaccatgaacgacagcctttccaagattttgctcgacatttcattcccagggctcgacgaggacccgttagggccagacaatatcaattggagccagttcataccagagcttcaatag

SEQ ID NO: 262707 - DNA, 2406 bp, Artificial Sequence
  derived and/or modified sequence
atgaagaccagccccagaagacccctgatcctgaagagaagaagactgcccctgcccgtgcagaacgcccccagcgagaccagcgaggaggagcccaagagaagccccgcccagcaggagagcaaccaggccgaggccagcaaggaggtggccgagagcaacagctgcaagttccccgccggcatcaagatcatcaaccaccccaccatgcccaacacccaggtggtggccatccccaacaacgccaacatccacagcatcatcaccgccctgaccgccaagggcaaggagagcggcagcagcggccccaacaagttcatcctgatcagctgcggcggcgcccccacccagccccccggcctgagaccccagacccagaccagctacgacgccaagagaaccgaggtgaccctggagaccctgggccccaagcccgccgccagagacgtgaacctgcccagaccccccggcgccctgtgcgagcagaagagagagacctgcgccgacggcgaggccgccggctgcaccatcaacaacagcctgagcaacatccagtggctgagaaagatgagcagcgacggcctgggcagcagaagcatcaagcaggagatggaggagaaggagaactgccacctggagcagagacaggtgaaggtggaggagcccagcagacccagcgccagctggcagaacagcgtgagcgagagacccccctacagctacatggccatgatccagttcgccatcaacagcaccgagagaaagagaatgaccctgaaggacatctacacctggatcgaggaccacttcccctacttcaagcacatcgccaagcccggctggaagaacagcatcagacacaacctgagcctgcacgacatgttcgtgagagagaccagcgccaacggcaaggtgagcttctggaccatccaccccagcgccaacagatacctgaccctggaccaggtgttcaagcccctggaccccggcagcccccagctgcccgagcacctggagagccagcagaagagacccaaccccgagctgagaagaaacatgaccatcaagaccgagctgcccctgggcgccagaagaaagatgaagcccctgctgcccagagtgagcagctacctggtgcccatccagttccccgtgaaccagagcctggtgctgcagcccagcgtgaaggtgcccctgcccctggccgccagcctgatgagcagcgagctggccagacacagcaagagagtgagaatcgcccccaaggtgttcggcgagcaggtggtgttcggctacatgagcaagttcttcagcggcgacctgagagacttcggcacccccatcaccagcctgttcaacttcatcttcctgtgcctgagcgtgctgctggccgaggagggcatcgcccccctgagcagcgccggccccggcaaggaggagaagctgctgttcggcgagggcttcagccccctgctgcccgtgcagaccatcaaggaggaggagatccagcccggcgaggagatgccccacctggccagacccatcaaggtggagagcccccccctggaggagtggcccagccccgcccccagcttcaaggaggagagcagccacagctgggaggacagcagccagagccccacccccagacccaagaagagctacagcggcctgagaagccccaccagatgcgtgagcgagatgctggtgatccagcacagagagagaagagagagaagcagaagcagaagaaagcagcacctgctgcccccctgcgtggacgagcccgagctgctgttcagcgagggccccagcaccagcagatgggccgccgagctgcccttccccgccgacagcagcgaccccgccagccagctgagctacagccaggaggtgggcggccccttcaagacccccatcaaggagaccctgcccatcagcagcacccccagcaagagcgtgctgcccagaacccccgagagctggagactgaccccccccgccaaggtgggcggcctggacttcagccccgtgcagaccagccagggcgccagcgaccccctgcccgaccccctgggcctgatggacctgagcaccacccccctgcagagcgccccccccctggagagcccccagagactgctgagcagcgagcccctggacctgatcagcgtgcccttcggcaacagcagccccagcgacatcgacgtgcccaagcccggcagccccgagccccaggtgagcggcctggccgccaacagaagcctgaccgagggcctggtgctggacaccatgaacgacagcctgagcaagatcctgctggacatcagcttccccggcctggacgaggaccccctgggccccgacaacatcaactggagccagttcatccccgagctgcagtag

SEQ ID NO: 262708 - protein, 748 aa, Artificial Sequence
  derived and/or modified sequence
MKTSPRRPLILKRRRLPLPVQNAPSETSEEEPKRSPAQQESNQAEASKEVAESNSCKFPAGIKIINHPTMPNTQVVAIPNNANIHSIITALTAKGKESGSSGPNKFILISCGGAPTQPPGLRPQTQTSYDAKRTEVTLETLGPKPAARDVNLPRPPGALCEQKRETCADGEAAGCTINNSLSNIQWLRKMSSDGLGSRSIKQEMEEKENCHLEQRQVKVEEPSRPSASWQNSVSERPPYSYMAMIQFAINSTERKRMTLKDIYTWIEDHFPYFKHIAKPGWKNSIRHNLSLHDMFVRETSANGKVSFWTIHPSANRYLTLDQVFKQQKRPNPELRRNMTIKTELPLGARRKMKPLLPRVSSYLVPIQFPVNQSLVLQPSVKVPLPLAASLMSSELARHSKRVRIAPKVLLAEEGIAPLSSAGPGKEEKLLFGEGFSPLLPVQTIKEEEIQPGEEMPHLARPIKVESPPLEEWPSPAPSFKEESSHSWEDSSQSPTPRPKKSYSGLRSPTRCVSEMLVIQHRERRERSRSRRKQHLLPPCVDEPELLFSEGPSTSRWAAELPFPADSSDPASQLSYSQEVGGPFKTPIKETLPISSTPSKSVLPRTPESWRLTPPAKVGGLDFSPVQTSQGASDPLPDPLGLMDLSTTPLQSAPPLESPQRLLSSEPLDLISVPFGNSSPSDIDVPKPGSPEPQVSGLAANRSLTEGLVLDTMNDSLSKILLDISFPGLDEDPLGPDNINWSQFIPELQ

SEQ ID NO: 262709 - DNA, 3370 bp, Artificial Sequence
  derived and/or modified sequence
gggacccggccggtccggcgcgagcccccgtccggggccctggctcggcccccaggttggaggagcccggagcccgccttcggagctacggcctaacggcggcggcgactgcagtctggagggtccacacttgtgattctcaatggagagtgaaaacgcagattcataatgaaaactagcccccgtcggccactgattctcaaaagacggaggctgccccttcctgttcaaaatgccccaagtgaaacatcagaggaggaacctaagagatcccctgcccaacaggagtctaatcaagcagaggcctccaaggaagtggcagagtccaactcttgcaagtttccagctgggatcaagattattaaccaccccaccatgcccaacacgcaagtagtggccatccccaacaatgctaatattcacagcatcatcacagcactgactgccaagggaaaagagagtggcagtagtgggcccaacaaattcatcctcatcagctgtgggggagccccaactcagcctccaggactccggcctcaaacccaaaccagctatgatgccaaaaggacagaagtgaccctggagaccttgggaccaaaacctgcagctagggatgtgaatcttcctagaccacctggagccctttgcgagcagaaacgggagacctgtgcagatggtgaggcagcaggctgcactatcaacaatagcctatccaacatccagtggcttcgaaagatgagttctgatggactgggctcccgcagcatcaagcaagagatggaggaaaaggagaattgtcacctggagcagcgacaggttaaggttgaggagccttcgagaccatcagcgtcctggcagaactctgtgtctgagcggccaccctactcttacatggccatgatacaattcgccatcaacagcactgagaggaagcgcatgactttgaaagacatctatacgtggattgaggaccactttccctactttaagcacattgccaagccaggctggaagaactccatccgccacaacctttccctgcacgacatgtttgtccgggagacgtctgccaatggcaaggtctccttctggaccattcaccccagtgccaaccgctacttgacattggaccaggtgtttaagcagcagaaacgaccgaatccagagctccgccggaacatgaccatcaaaaccgaactccccctgggcgcacggcggaagatgaagccactgctaccacgggtcagctcatacctggtacctatccagttcccggtgaaccagtcactggtgttgcagccctcggtgaaggtgccattgcccctggcggcttccctcatgagctcagagcttgcccgccatagcaagcgagtccgcattgcccccaaggtgctgctagctgaggaggggatagctcctctttcttctgcaggaccagggaaagaggagaaactcctgtttggagaagggttttctcctttgcttccagttcagactatcaaggaggaagaaatccagcctggggaggaaatgccacacttagcgagacccatcaaagtggagagccctcccttggaagagtggccctccccggccccatctttcaaagaggaatcatctcactcctgggaggattcgtcccaatctcccaccccaagacccaagaagtcctacagtgggcttaggtccccaacccggtgtgtctcggaaatgcttgtgattcaacacagggagaggagggagaggagccggtctcggagaaaacagcatctactgcctccctgtgtggatgagccggagctgctcttctcagaggggcccagtacttcccgctgggccgcagagctcccgttcccagcagactcctctgaccctgcctcccagctcagctactcccaggaagtgggaggaccttttaagacacccattaaggaaacgctgcccatctcctccaccccgagcaaatctgtcctccccagaacccctgaatcctggaggctcacgcccccagccaaagtagggggactggatttcagcccagtacaaacctcccagggtgcctctgaccccttgcctgaccccctggggctgatggatctcagcaccactcccttgcaaagtgctcccccccttgaatcaccgcaaaggctcctcagttcagaacccttagacctcatctccgtcccctttggcaactcttctccctcagatatagacgtccccaagccaggctccccggagccacaggtttctggccttgcagccaatcgttctctgacagaaggcctggtcctggacacaatgaatgacagcctcagcaagatcctgctggacatcagctttcctggcctggacgaggacccactgggccctgacaacatcaactggtcccagtttattcctgagctacagtagagccctgcccttgcccctgtgctcaagctgtccaccatcccgggcactccaaggctcagtgcaccccaagcctctgagtgaggacagcaggcagggactgttctgctcctcatagctccctgctgcctgattatgcaaaagtagcagtcacaccctagccactgctgggaccttgtgttccccaagagtatctgattcctctgctgtccctgccaggagctgaagggtgggaacaacaaaggcaatggtgaaaagagattaggaaccccccagcctgtttccattctctgcccagcagtctcttaccttccctgatctttgcagggtggtccgtgtaaatagtataaattctccaaattatcctctaattataaatgtaagcttatttccttagatcattatccagagactgccagaaggtgggtaggatgacctggggtttcaattgacttctgttccttgcttttagttttgatagaagggaagacctgcagtgcacggtttcttccaggctgaggtacctggatcttgggttcttcactgcagggacccagacaagtggatctgcttgccagagtcctttttgcccctccctgccacctccccgtgtttccaagtcagctttcctgcaagaagaaatcctggttaaaaaagtcttttgtattgggtcaggagttgaatttggggtgggaggatggatgcaactgaagcagagtgtgggtgcccagatgtgcgctattagatgtttctctgataatgtccccaatcataccagggagactggcattgacgagaactcaggtggaggcttgagaaggccgaaagggcccctgacctgcctggcttccttagcttgcccctcagctttgcaaagagccaccctaggccccagctgaccgcatgggtgtgagccagcttgagaacactaactactcaataaaagcgaaggtggaca

SEQ ID NO: 262710 - DNA, 2247 bp, Artificial Sequence
  derived and/or modified sequence
atgaagacctcgccaagaagacctctcattttaaaaaggcggaggctgcccttacccgtccaaaacgcgccaagcgagacatccgaagaggaacctaaaaggtcaccagcccagcaggagagcaatcaagccgaggcaagtaaggaggtggctgagtccaactcttgtaagttccctgcgggaattaaaatcatcaaccacccaactatgcccaatacacaggtcgtggccattcctaacaatgctaatatccactccattatcaccgctctgacggcaaagggcaaggaaagcggatcgtcgggacctaataaatttatcttgattagctgcgggggcgctccgactcagcctcctgggttgcgccctcaaacccagacctcctatgacgcaaaaagaaccgaggtcacgcttgaaaccctcggcccaaagcccgccgcaagagatgtaaatctcccgcgtccccctggcgctctctgtgagcagaaacgagagacgtgtgccgatggagaagccgcggggtgcacgatcaacaatagcctgtctaacatccagtggctgagaaagatgagctctgacgggctaggctctaggtccattaagcaagagatggaagagaaagagaactgccaccttgaacagcgtcaggtgaaggtagaagagccttccaggccgtcagcttcctggcagaactcagtgtcagagagaccaccctactcttatatggcaatgattcaattcgccatcaattcaaccgaaagaaaaaggatgactttaaaagacatctatacctggatcgaagatcattttccatacttcaagcatatcgctaagcctggttggaagaacagcattagacacaacctgagcctgcacgatatgtttgtgcgcgagacatccgctaacggcaaagtctcgttttggactatacatccatccgccaatcggtatctgacgctcgatcaggtatttaagcaacagaaaaggccgaatccagagcttcggaggaatatgacgatcaagactgaactgcctctgggcgcccgtcgaaagatgaagccactcctccctcgggttagcagttacctggtgcctatacagttccccgtcaaccagtcactagttcttcagccatccgtaaaggttccgttacctctggccgccagcctgatgagttccgaattggctagacactctaaacgtgtgagaatagcgcctaaggtgctcctagcagaagaaggcatagcccccttatccagcgcaggaccagggaaggaagaaaagctactttttggagagggatttagccccctattgcctgttcagaccattaaggaggaggaaatccagcccggagaagagatgccccacctggcccgtcccatcaaggttgaaagtccaccccttgaggagtggcccagcccagctccttccttcaaggaggaaagtagccatagctgggaggactcgtcacagagtcctacaccgcggccaaaaaaatcatactcagggttgcggtcacccactaggtgtgtctcggagatgctggtaatacagcatagagagcgcagagaacggtccaggtcccgacgcaaacaacatctgcttcctccatgtgtggatgaacctgagttacttttctccgagggcccttcaacaagccgttgggccgcagaacttccattcccagccgattctagtgacccagcctcccagctgagctacagccaggaggtgggggggcccttcaaaactcctattaaagaaacactgcccatatctagtacaccttccaagagtgtgctgccaagaacccccgagagctggagactgacccctcctgcgaaagtcggcggcttggatttctcaccagtgcagactagtcagggcgctagcgaccctctgcctgaccccttggggctgatggacctatccactacacctttacaatccgccccacctctagagtctccacagcgcctattatcgagcgagcctttggacctgatttctgtgcctttcggtaacagctccccatctgatatcgacgttcctaagccaggtagtccagagccgcaggtgtctggtctggccgccaatcggtcattgactgaggggctcgtactggacactatgaatgatagtttaagcaaaattctcctggacatctcctttcctggactggatgaggacccactcggcccagacaatatcaactggtcccaatttattccggaactacaatag

SEQ ID NO: 262711 - DNA, 2247 bp, Artificial Sequence
  derived and/or modified sequence
atgaagaccagcccccggcggcccctcatcctgaagagaagaaggctgcccctgcctgtgcagaatgcccccagcgagaccagcgaggaggagcccaagaggagccctgcccagcaggagagcaaccaggccgaggccagcaaggaggtggccgagagcaacagctgcaagtttcctgctggcatcaagatcatcaaccaccccaccatgcccaacacccaggtggtggccatccccaacaatgccaacatccacagcatcatcacagccctgacagccaagggcaaggagagcggcagcagcggccccaacaagttcatcctgatcagctgtggcggggcccccacccagcccccaggcctgcggccccagacccagaccagctatgatgccaagaggacagaggtgaccctggagaccctgggccccaagccagctgccagagatgtgaacctgcccaggcctcctggggccctgtgtgagcagaagcgggagacctgtgctgatggagaggccgccggctgcaccatcaacaacagcctgagcaacatccagtggctgaggaagatgagcagtgatggcctgggcagccgcagcatcaagcaggagatggaggagaaggagaactgccacctggagcagaggcaggtgaaggtggaggagcccagccggcccagcgcctcctggcagaacagcgtgtctgagaggcctccctacagctacatggccatgatccagtttgccatcaacagcacagagaggaagaggatgaccctgaaggacatctacacctggattgaggaccacttcccctacttcaagcacatcgccaagccaggctggaagaacagcatccgccacaacctgagcctgcatgacatgtttgtgcgggagaccagcgccaacgggaaggtgtccttctggaccatccaccccagcgccaaccgctacctgaccctggaccaggtgttcaagcagcagaagaggcccaaccctgagctgcggaggaacatgaccatcaagacagagctgcccctgggcgcccggaggaagatgaagcccctgctgccccgggtgtcctcctacctggtgcccatccagtttcctgtgaaccagagcctggtgctgcagcccagcgtgaaggtgcccctgcccctggccgccagcctgatgagcagcgagctggcccggcacagcaagagggtgcgcatcgcccccaaggtgctgctggccgaggagggcatcgcccccctgagcagcgctggccctgggaaggaggagaagctgctgtttggagagggcttcagccccctgctgcctgtgcagaccatcaaggaggaggagatccagcctggagaggagatgccccacctggcccggcccatcaaggtggagagcccccccctggaggagtggcccagccctgcccccagcttcaaggaggagagcagccacagctgggaggacagcagccagagccccaccccccggcccaagaagagctacagcggcctgcggagccccacccgctgtgtgtctgagatgctggtgatccagcaccgggagcggcgggagaggagccgcagcaggaggaagcagcacctgctgcccccctgtgtggatgagcctgagctgctcttcagcgagggccccagcaccagccgctgggccgctgagctgcccttccctgctgacagcagtgaccctgccagccagctgagctacagccaggaggtgggcggccccttcaagacccccatcaaggagaccctgcccatcagcagcacccccagcaagtctgtgctgcccaggaccccagagagctggaggctgaccccaccagccaaggtgggcggcctggacttcagccctgtgcagaccagccagggcgccagtgaccccctgcctgaccccctgggcctgatggacctgagcaccacccccctgcagagcgccccacccctggagagcccccagaggctgctgagcagcgagcccctggacctgatctctgtgcccttcggcaacagcagccccagcgacattgatgtgcccaagccaggcagccctgagccccaggtgtctggcctggccgccaacagaagcctgacagagggcctggtgctggacaccatgaatgacagcctgagcaagatcctgctggacatctccttccctggcctggatgaggaccccctgggccctgacaacatcaactggagccagttcatccctgagctgcagtag

SEQ ID NO: 262712 - DNA, 2247 bp, Artificial Sequence
  derived and/or modified sequence
atgaagaccagcccccggcggcccctgatcctgaagcggcggcggctgccccttccagtacagaatgccccaagcgaaacaagcgaagaggagcctaagagaagccctgcccagcaggagtcaaaccaagccgaggcttctaaggaggtggcagaatccaactcctgcaagttcccagccgggatcaaaatcatcaatcaccccactatgcccaacacacaggtggtggcaatccctaacaatgctaacatccactctatcattacagctttgactgccaagggcaaggagagcggcagcagcggccccaataagttcatactgatcagctgtgggggtgctccgacccagcccccagggctacgtccacagacacaaacatcttatgacgccaagcgtactgaagtgacactggaaaccctgggacccaaacccgcagctcgggacgtaaacctcccacggcccccaggagccctctgtgaacagaaaagagagacatgcgccgatggggaagctgccggctgcactattaacaattcgctctcaaacatccagtggctgaggaagatgtcttcggatgggttaggctcacgatccattaagcaagagatggaggaaaaggagaactgccacttagagcaacgccaggttaaggtggaagaaccaagccgcccgagcgccagctggcagaattcagtcagtgagcgccctccatactcgtacatggcaatgatacagttcgcaataaacagtacagagcgtaaacgcatgactctgaaggacatttacacatggattgaggaccacttcccttactttaaacatatcgccaaacccggctggaagaattcgatccgccacaacctctcactacatgacatgtttgtgagggaaacatcagccaacgggaaagttagcttttggacaattcacccaagtgccaatcgctatctaactttggaccaggtgttcaaacagcagaagcgcccgaacccagaactccgcagaaatatgaccattaaaacagaactgcctctgggggcacgaagaaaaatgaaacctcttcttccacgcgtgagctcctacctggtgcctattcagttccccgttaaccaaagtctggtattgcaaccttccgtaaaggttccactccctctcgctgcctccctcatgtcctccgaactggcgcgccattctaaaagggtgagaatcgccccgaaagtgttgctggcggaagaaggcatcgcccccttgagcagcgccggcccagggaaggaggagaagctgctgtttggagagggcttctcccctctgctgcccgttcagacaatcaaggaggaggagatccagcctggtgaagagatgcctcatctcgcacgcccgataaaggtagaaagcccaccgcttgaggagtggccatcccctgcaccttctttcaaggaagagagcagtcactcatgggaggatagctcccaaagccctactccccggcccaagaaatcctatagcggcctccggtcccccacccgatgcgttagtgaaatgctggttattcagcatcgcgagagacgggagcgctcccgttcccgaagaaaacagcatttgctaccaccatgcgtcgacgagccagaactgctgttctctgaaggaccctccaccagccggtgggcagcagaattaccttttcctgccgattccagtgaccccgcctcccagctgtcgtatagccaggaagttgggggaccatttaagaccccaattaaggaaacacttcctatctcctccacccctagtaagagcgtcctgccccgaacccccgaaagttggagactcacccccccagcaaaagtgggagggctggacttttctccagtgcaaacctctcaaggtgccagtgaccctctccccgatcctctgggattaatggacctgagtaccactccactgcagagtgccccgcccctggagagcccacagcggctactgagctcagagccgctggaccttattagcgttccatttggcaatagtagccccagcgatatcgatgtgccaaagccagggtcccccgagccccaggtgtctggactagccgcaaatcgctccctaaccgagggcctggttctagacactatgaacgatagcctgtcaaagatcttgcttgatataagttttccaggactggacgaggaccctctgggtcccgacaatattaattggtctcagttcattcctgaactgcaatag

SEQ ID NO: 262713 - DNA, 2247 bp, Artificial Sequence
  derived and/or modified sequence
atgaaaacttcacctcggaggccactcatcttgaaacgacgaagactgcccctaccggttcagaatgccccaagcgagacctccgaagaagaaccgaaacgctctcccgctcaacaggagagcaatcaggccgaggcttcaaaggaggtggctgagtccaattcttgcaagttccccgctggtatcaagatcattaaccacccgaccatgccaaatacccaggtggtagctattcctaataacgcaaacattcactctattatcacagccctgaccgccaagggcaaggaaagtggaagttccggcccaaacaaatttattctgatctcttgcggcggtgcccctactcagcccccaggcctgaggccccagacacagaccagctatgacgcaaaacggaccgaggtgacattagaaaccctgggccctaaaccggcagccagagacgttaacttgccacgcccaccaggggcactgtgcgagcagaaacgggaaacctgcgctgacggcgaggcggctggctgtacaataaacaactctctctcgaacatccaatggctgcggaagatgtcaagcgatgggttgggttccagatcaatcaagcaggaaatggaagaaaaagaaaactgccatttagagcagcgacaggtcaaggtcgaagagcctagccggccatccgcttcttggcagaactctgtgtccgaaagacccccttattcctatatggccatgattcaattcgcgatcaactctaccgagcgcaaacggatgactttgaaggatatttatacctggattgaagaccacttcccatactttaagcatatagctaaaccagggtggaaaaatagtatacgccacaatctatccctgcacgatatgtttgtccgggagacgtctgctaacgggaaagtgagcttttggacaatccacccaagcgctaatcgttatcttaccttagatcaggtgtttaagcagcaaaaaagacctaatcccgagttacggagaaacatgactattaaaactgagctcccactaggagccagacgcaagatgaagcccctcctcccccgagtctctagctatttggtacccatccagttccctgtgaatcaatcactggtgctgcaaccctcggtcaaagttcctctaccactggctgcttccctgatgagctcagaactcgcccgacactcaaagcgcgtcaggatcgccccaaaagtcctcctcgctgaggagggtattgcacctctgtcctccgctggtcccggtaaggaagagaaactgctctttggggaaggtttcagtcctctgctgccggtgcaaactattaaagaggaggaaatacagccgggagaggaaatgcctcacctggcccgacctattaaggtggagtctccacctctggaagagtggccgtccccagctccgtcttttaaagaagagtcaagccattcatgggaagatagctcccagagtccgactcccagaccaaaaaagtcatactcaggcctgaggtcgcccaccagatgtgtctccgaaatgcttgtgattcagcatagggagcgcagggagcggagcagaagtcggagaaagcagcacctacttccaccctgtgtagacgaacctgaactgcttttcagtgaaggccctagcaccagtaggtgggcagccgaactgcccttccccgcagactcctcagacccagcaagtcagctctcatacagtcaagaggtggggggtccattcaagacccccatcaaggaaaccctgcctatatcatcgactcctagcaaatctgttttaccgcgaactcctgaatcctggaggctcacaccgccagctaaagtaggcggactggactttagtccagtgcaaaccagccagggcgcttcagatccactgcctgaccccctgggcctaatggatctgagtacaaccccactccaaagcgcacccccacttgagtcaccccagaggttgttatcatcagagccacttgaccttatctcagtgcccttcgggaatagctccccctccgatatcgacgttccaaagcctgggagccccgagccccaggtttctggattggccgctaaccgaagtctcacagaaggacttgtcctggacactatgaatgatagcctctctaagattctcctggatatcagctttcccggactggacgaagatccactgggaccagacaacataaactggagccaatttatccccgaattacagtag

SEQ ID NO: 262714 - DNA, 2247 bp, Artificial Sequence
  derived and/or modified sequence
atgaagaccagccccagaagacccctgatcctgaagagaagaagactgcccctgcccgtgcagaacgcccccagcgagaccagcgaggaggagcccaagagaagccccgcccagcaggagagcaaccaggccgaggccagcaaggaggtggccgagagcaacagctgcaagttccccgccggcatcaagatcatcaaccaccccaccatgcccaacacccaggtggtggccatccccaacaacgccaacatccacagcatcatcaccgccctgaccgccaagggcaaggagagcggcagcagcggccccaacaagttcatcctgatcagctgcggcggcgcccccacccagccccccggcctgagaccccagacccagaccagctacgacgccaagagaaccgaggtgaccctggagaccctgggccccaagcccgccgccagagacgtgaacctgcccagaccccccggcgccctgtgcgagcagaagagagagacctgcgccgacggcgaggccgccggctgcaccatcaacaacagcctgagcaacatccagtggctgagaaagatgagcagcgacggcctgggcagcagaagcatcaagcaggagatggaggagaaggagaactgccacctggagcagagacaggtgaaggtggaggagcccagcagacccagcgccagctggcagaacagcgtgagcgagagacccccctacagctacatggccatgatccagttcgccatcaacagcaccgagagaaagagaatgaccctgaaggacatctacacctggatcgaggaccacttcccctacttcaagcacatcgccaagcccggctggaagaacagcatcagacacaacctgagcctgcacgacatgttcgtgagagagaccagcgccaacggcaaggtgagcttctggaccatccaccccagcgccaacagatacctgaccctggaccaggtgttcaagcagcagaagagacccaaccccgagctgagaagaaacatgaccatcaagaccgagctgcccctgggcgccagaagaaagatgaagcccctgctgcccagagtgagcagctacctggtgcccatccagttccccgtgaaccagagcctggtgctgcagcccagcgtgaaggtgcccctgcccctggccgccagcctgatgagcagcgagctggccagacacagcaagagagtgagaatcgcccccaaggtgctgctggccgaggagggcatcgcccccctgagcagcgccggccccggcaaggaggagaagctgctgttcggcgagggcttcagccccctgctgcccgtgcagaccatcaaggaggaggagatccagcccggcgaggagatgccccacctggccagacccatcaaggtggagagcccccccctggaggagtggcccagccccgcccccagcttcaaggaggagagcagccacagctgggaggacagcagccagagccccacccccagacccaagaagagctacagcggcctgagaagccccaccagatgcgtgagcgagatgctggtgatccagcacagagagagaagagagagaagcagaagcagaagaaagcagcacctgctgcccccctgcgtggacgagcccgagctgctgttcagcgagggccccagcaccagcagatgggccgccgagctgcccttccccgccgacagcagcgaccccgccagccagctgagctacagccaggaggtgggcggccccttcaagacccccatcaaggagaccctgcccatcagcagcacccccagcaagagcgtgctgcccagaacccccgagagctggagactgaccccccccgccaaggtgggcggcctggacttcagccccgtgcagaccagccagggcgccagcgaccccctgcccgaccccctgggcctgatggacctgagcaccacccccctgcagagcgccccccccctggagagcccccagagactgctgagcagcgagcccctggacctgatcagcgtgcccttcggcaacagcagccccagcgacatcgacgtgcccaagcccggcagccccgagccccaggtgagcggcctggccgccaacagaagcctgaccgagggcctggtgctggacaccatgaacgacagcctgagcaagatcctgctggacatcagcttccccggcctggacgaggaccccctgggccccgacaacatcaactggagccagttcatccccgagctgcagtag

SEQ ID NO: 262715 - protein, 236 aa, Artificial Sequence
  derived and/or modified sequence
MFCTLNTHKVDMDKLLGGQIGLEDFIFAHVKGQRKEVEVFKSEDALGLTITDNGAGYAFIKRIKEGSVIDHIHLISVGDMIEAINGQSLLGCRHYEVARLLKELPRGRTFTLKLTEPRKAFDMISQRSAGGRPGSGPQLGTGRGTLRLRSRGPATVEDLPSAFEEKAIEKVDDLLESYMGIRDTELAATMVELGKDKRNPDELAEALDERLGDFAFPDEFVFDVWGAIGDAKVGRY

SEQ ID NO: 262716 - DNA, 711 bp, Artificial Sequence
  derived and/or modified sequence
atgttctgcaccctgaacacccacaaggtggacatggacaagctgctgggcggccagatcggcctggaggacttcatcttcgcccacgtgaagggccagagaaaggaggtggaggtgttcaagagcgaggacgccctgggcctgaccatcaccgacaacggcgccggctacgccttcatcaagagaatcaaggagggcagcgtgatcgaccacatccacctgatcagcgtgggcgacatgatcgaggccatcaacggccagagcctgctgggctgcagacactacgaggtggccagactgctgaaggagctgcccagaggcagaaccttcaccctgaagctgaccgagcccagaaaggccttcgacatgatcagccagagaagcgccggcggcagacccggcagcggcccccagctgggcaccggcagaggcaccctgagactgagaagcagaggccccgccaccgtggaggacctgcccagcgccttcgaggagaaggccatcgagaaggtggacgacctgctggagagctacatgggcatcagagacaccgagctggccgccaccatggtggagctgggcaaggacaagagaaaccccgacgagctggccgaggccctggacgagagactgggcgacttcgccttccccgacgagttcgtgttcgacgtgtggggcgccatcggcgacgccaaggtgggcagatactag

SEQ ID NO: 262717 - DNA, 1466 bp, Artificial Sequence
  derived and/or modified sequence
ggcccggtctggagtttgcggagggccgagccgggtgcgcacggggaggcggaggcagcggcggcggcggcggcggcggcggcggcggcggagcaggtgatgttctgcaccctgaacacccacaaagtggacatggacaagctcctggggggccagatcgggctggaggacttcatcttcgcccacgtgaaggggcagcgcaaggaggtggaggtgttcaagtcggaggatgcactcgggctcaccatcacggacaacggggctggctacgccttcatcaagcgcatcaaggagggcagcgtgatcgaccacatccacctcatcagcgtgggcgacatgatcgaggccattaacgggcagagcctgctgggctgccggcactacgaggtggcccggctgctcaaggagctgccccgaggccgtaccttcacgctgaagctcacggagcctcgcaaggccttcgacatgatcagccagcgttcagcgggtggccgccctggctctggcccacaactgggcactggccgagggaccctgcggctccgatcccggggccccgccacggtggaggatctgccctctgcctttgaagagaaggccattgagaaggtggatgacctgctggagagttacatgggtatcagggacacggagctggcggccaccatggtggagctgggaaaggacaaaaggaacccggatgagctggccgaggccctggacgaacggctgggtgactttgccttccctgacgagttcgtctttgacgtctggggcgccattggggacgccaaggtcggccgctactaggactgcccccggaccctgcgatgatgacccgggcgcaacctggtgggggcccccagcagggacactgacgtcaggacccgagcctccagcctgagcctagctcagcagcccaaggacgatggtgaggggaggtggggccaggccccctgccccgctccaatcggtaccatcccctccctggttcccagtctggccggggtccccggcccccctgtgccctgttccccacctacctcagctgggtcaggcacagggaggggagggatcagccaaattgggcggccacccccgcctccaccactttccaccatcagctgccaaactggtccctctgtctccctggggccttgggttctgtttgggggtcatgaccttcctagtttcctgacgcagggaatacaggggagagggttgtccttccccccagcaaatgcaataatgccctcacccctcctgagaggagccccctccctgtggagcctgttacctccgcatttgacacgagtctgctgtgaaccccgcaacctcctccccacctcccatctctccttccaggcccatccctggcccagagcaggagggagggagggacgatggcggtgggtttttgtatctgaatttgctgtcttgaacataaagaatctatctgctgttgg

SEQ ID NO: 262718 - DNA, 1610 bp, Artificial Sequence
  derived and/or modified sequence
ggcccggtctggagtttgcggagggccgagccgggtgcgcacggggaggcggaggcagcggcggcggcggcggcggcggcggcggcggcggagcagatgaagaaactgaggccctgtgatgtgaagtgacttgccccccagccacacagctggaccattctggctgctgtctggacaagaagtcgtagggggtgagggtggaagctgggaaacccacaggaggcaaccacactagtttaggtgatgttctgcaccctgaacacccacaaagtggacatggacaagctcctggggggccagatcgggctggaggacttcatcttcgcccacgtgaaggggcagcgcaaggaggtggaggtgttcaagtcggaggatgcactcgggctcaccatcacggacaacggggctggctacgccttcatcaagcgcatcaaggagggcagcgtgatcgaccacatccacctcatcagcgtgggcgacatgatcgaggccattaacgggcagagcctgctgggctgccggcactacgaggtggcccggctgctcaaggagctgccccgaggccgtaccttcacgctgaagctcacggagcctcgcaaggccttcgacatgatcagccagcgttcagcgggtggccgccctggctctggcccacaactgggcactggccgagggaccctgcggctccgatcccggggccccgccacggtggaggatctgccctctgcctttgaagagaaggccattgagaaggtggatgacctgctggagagttacatgggtatcagggacacggagctggcggccaccatggtggagctgggaaaggacaaaaggaacccggatgagctggccgaggccctggacgaacggctgggtgactttgccttccctgacgagttcgtctttgacgtctggggcgccattggggacgccaaggtcggccgctactaggactgcccccggaccctgcgatgatgacccgggcgcaacctggtgggggcccccagcagggacactgacgtcaggacccgagcctccagcctgagcctagctcagcagcccaaggacgatggtgaggggaggtggggccaggccccctgccccgctccaatcggtaccatcccctccctggttcccagtctggccggggtccccggcccccctgtgccctgttccccacctacctcagctgggtcaggcacagggaggggagggatcagccaaattgggcggccacccccgcctccaccactttccaccatcagctgccaaactggtccctctgtctccctggggccttgggttctgtttgggggtcatgaccttcctagtttcctgacgcagggaatacaggggagagggttgtccttccccccagcaaatgcaataatgccctcacccctcctgagaggagccccctccctgtggagcctgttacctccgcatttgacacgagtctgctgtgaaccccgcaacctcctccccacctcccatctctccttccaggcccatccctggcccagagcaggagggagggagggacgatggcggtgggtttttgtatctgaatttgctgtcttgaacataaagaatctatctgctgttgg

SEQ ID NO: 262719 - DNA, 711 bp, Artificial Sequence
  derived and/or modified sequence
atgttctgcaccctgaatacacacaaagtggacatggacaaactgctggggggccagatcggattggaggattttatcttcgcacatgttaagggccagcgcaaggaagtggaggtgttcaaaagcgaggatgcactcggcctgacgataaccgacaatggagcgggatacgcctttatcaagaggatcaaagagggctcagtgatcgaccacatccacctcatttccgtgggcgatatgatcgaagcgatcaacgggcagtcactgctgggctgtcgtcactatgaggtggcgaggctgctgaaggagctgccgcgcggcaggacatttactctcaaactcaccgaacctcgcaaagctttcgatatgatctcccagaggtctgctggtggccggccaggtagcggaccacagctcggtactggccgcggtacactgaggttacgctcccgagggcctgccacggtcgaggatctgcccagtgcatttgaggaaaaggctatcgagaaagtggatgacctgcttgaaagctacatgggcatccgtgatacagagctggcagcgaccatggtcgaactgggaaaggacaagcggaatccagacgagctcgccgaggccctggatgagagacttggtgacttcgccttcccagacgagttcgtctttgacgtctggggagccatcggcgacgctaaggtgggacggtattag

SEQ ID NO: 262720 - DNA, 711 bp, Artificial Sequence
  derived and/or modified sequence
atgttctgtactctgaatacacacaaggtggatatggataaactcctcggaggtcagatcggcttagaggattttatatttgcccacgtgaaggggcagaggaaggaggttgaggtctttaagtccgaagatgcccttggcttaaccattacagacaatggagccggttacgcttttatcaagcgaatcaaagaaggatcagtaatcgatcacatacacctgattagtgtcggcgacatgatcgaagctatcaatggccagtccctgcttggctgtaggcattacgaggtcgcacgcttgttgaaagagctgccccgcggacgcacatttacacttaagctgactgagcctcggaaagcatttgacatgatatcacagcgaagcgctggaggtcgcccaggcagtggcccccaacttggaactggaagaggaaccctgcggctgagatctcgcggtccagccactgtggaggatctgcctagtgcgtttgaagagaaagcgatagaaaaggtggatgatctccttgagtcttatatgggcatccgcgacaccgagcttgccgccactatggtggaacttggcaaagataaaagaaaccccgacgagctggcagaggctttagacgagcgcttaggcgacttcgccttccccgatgagtttgtgttcgacgtttggggggcaattggggatgccaaggtgggccgctattag

SEQ ID NO: 262721 - DNA, 711 bp, Artificial Sequence
  derived and/or modified sequence
atgttctgcaccctgaacacccacaaggtggacatggacaagctgctgggcggccagatcggcctggaggacttcatctttgcccacgtgaagggccagaggaaggaggtggaggtgttcaagtcagaagatgccctgggcctgaccatcacagacaatggagctggctacgccttcatcaagaggatcaaggagggctctgtgattgaccacatccacctgatctctgtgggggacatgattgaggccatcaatggccagagcctgctgggctgccgccactatgaggtggcccggctgctgaaggagctgccccggggccgcaccttcaccctgaagctgacagagcccaggaaggcctttgacatgatcagccagaggtctgctgggggccggcccggcagcggcccccagctgggcaccggccggggcaccctgcggctgcggagccggggccctgccaccgtggaggacctgcccagcgcctttgaggagaaggccatcgagaaggtggatgacctgctggagagctacatgggcatccgggacacagagctggccgccaccatggtggagctgggcaaggacaagaggaacccagatgagctggccgaggccctggatgagcggctgggggactttgccttcccagatgaatttgtgtttgatgtgtggggcgccatcggagatgccaaggtgggccgctactag

SEQ ID NO: 262722 - DNA, 711 bp, Artificial Sequence
  derived and/or modified sequence
atgttctgcaccctgaacacccacaaggtggacatggacaagctgttgggcggacagattggcctggaggactttattttcgcccatgtgaagggacagagaaaagaggtagaggtttttaagtcagaggacgctttggggctgaccatcaccgacaacggagccggctatgcttttattaaaaggatcaaggagggatcagtaatcgatcacattcatttaatatccgtgggcgacatgatagaagctataaatggccagagtttgcttgggtgccgtcactatgaagttgcccgcctgttgaaagagctccccagggggcggacgttcactctgaagctgacggaacctcggaaggcctttgacatgatctctcaaagatcggccggtggccgcccaggctctgggccacagcttggcaccgggaggggcacactccggctccgatccagaggcccagcaactgtcgaggatctaccttccgcgtttgaagaaaaagccatcgagaaggtggatgatttgttggagagctacatgggtatacgtgacacagagctggccgcgacaatggtggagctcggcaaagataagaggaatccagacgaattggctgaggccctggacgagaggttaggggactttgcatttccggatgaattcgtgttcgacgtttggggtgccataggtgacgccaaagttgggaggtattag

SEQ ID NO: 262723 - DNA, 711 bp, Artificial Sequence
  derived and/or modified sequence
atgttctgcaccctgaacacccacaaggtggacatggacaagctgcttggcggacaaatcgggttagaggacttcattttcgcccatgtaaaagggcagaggaaagaggtggaggtgtttaaaagtgaagacgctctcggactgacgattactgacaacggggcaggctacgcctttattaaaagaatcaaggaaggctccgtaatcgaccatattcatctgatctcagtcggcgacatgatcgaggcaattaacggacaaagcctcctcggatgccggcattatgaggtagcccgcctcctgaaggaactgcccagagggaggacattcacattgaagctcaccgagccccgtaaggcttttgacatgatctctcaacgttccgccggtggccgcccggggtccggaccacagctgggcactggcaggggtacactaagactgcggtcccgagggcctgctaccgtcgaagacctccccagcgcctttgaggagaaggcaattgagaaagtggatgatctgctagaaagctacatgggcatccgtgataccgaactggccgccaccatggttgaactgggtaaggataaacgaaatccggatgagctggccgaagcactcgacgaacgtctgggggattttgccttcccagatgaatttgtcttcgatgtgtggggtgccataggggatgcaaaggtgggacgctattag

SEQ ID NO: 262724 - DNA, 711 bp, Artificial Sequence
  derived and/or modified sequence
atgttctgtaccctcaatacgcacaaggtagatatggataaactgttgggcggacagatcggactcgaggacttcattttcgctcatgtgaagggtcagcggaaggaggtggaggtctttaaaagcgaggacgccctcggtttgacaattacagacaacggtgcaggctacgccttcattaagaggatcaaagaagggtcagtgatcgaccacattcacctcatatctgtgggagacatgattgaggcaattaatgggcagtctctccttggatgcagacactatgaggtcgcacgactcttgaaggagcttcccaggggcagaacgttcactctgaaacttacagaaccacgcaaagcctttgacatgatatcccagagatccgccggaggcagacccggttcaggccctcagctgggcaccggcagggggaccttgcgattgaggtcccgcggacccgctacagttgaggacttgccttcagccttcgaagaaaaggccattgagaaggtcgacgacttgctggaaagctacatgggaattagagatacagagcttgcagccacaatggtggaactcgggaaggacaagaggaaccctgatgaactggccgaggctctcgacgaaaggctcggggactttgcatttccagatgaatttgttttcgacgtgtggggcgctataggcgacgcgaaggtaggaaggtattag

SEQ ID NO: 262725 - DNA, 711 bp, Artificial Sequence
  derived and/or modified sequence
atgttttgtacactcaacactcacaaagtggacatggataagcttctcgggggtcagatcgggttggaggatttcatttttgcccatgtcaagggacagcggaaggaggtcgaggtgttcaagagcgaagacgctttaggacttaccatcactgacaacggggctggttacgctttcatcaagcggattaaggaaggaagcgtaatcgatcacatccatcttataagtgtgggagatatgatagaggccatcaatggccagagcctactgggatgcaggcattacgaggtcgctcgtctgcttaaagaacttccccgagggagaacctttacactgaagctgactgagccacgcaaggcctttgacatgatctcccagaggtcagctggtggcagacccggttccgggccacagctgggcaccggacgtggcaccttgaggcttcgttcccgtggcccagcaaccgtggaggacctcccaagcgcctttgaggaaaaggctattgaaaaagtggacgacctgctggagagttacatgggtatccgggatactgagttagccgctacaatggtggaattaggcaaggataagaggaatcctgatgaactggccgaagctctcgacgaacgtctgggggattttgcttttccggacgagtttgtgtttgacgtgtggggcgctattggcgacgctaaagtgggccgatactag

SEQ ID NO: 262726 - protein, 450 aa, Artificial Sequence
  derived and/or modified sequence
MVSADAMVSADAMVSADAMVSADAMVSADAMVSADAMVSADAMVSADAMHTDPDYSAAYVVIETDAEDGIKGCGITFTLGKGTEVVVCAVNALAHHVLNKDLKDIVGDFRGFYRQLTSDGQLRWIGPEKGVVHLATAAVLNAVWDLWAKQEGKPVWKLLVDMDPRMLVSCIDFRYITDVLTEEDALEILQKGQIGKKEREKQMLAQGYPAYTTSCAWLGYSDDTLKQLCAQALKDGWTRFKVKVGADLQDDMRRCQIIRDMIGPEKTLMMDANQRWDVPEAVEWMSKLAKFKPLWIEEPTSPDDILGHATISKCHNRVIFKQLLQAKALQFLQIDSCRLGSVNENLSVLLMAKKFEIPVCPHAGGVGLCELVQHLIIFDYISVSASLENRVCEYVDHLHEHFKYPVMIQRASYMPPKDPGYSTEMKEESVKKHQYPDGEVWKKLLPAQEN

SEQ ID NO: 262727 - DNA, 1353 bp, Artificial Sequence
  derived and/or modified sequence
atggtgagcgccgatgccatggtctccgccgatgccatggtttcagcagacgctatggttagtgctgatgctatggttagcgccgacgcaatggtctctgcggatgcaatggtgtccgcagatgctatggttagcgcagacgctatgcacacagaccctgactactccgccgcatacgtggttattgaaacggatgccgaggatggcattaagggttgtggcatcacttttacgctaggtaagggcactgaagtggtggtatgcgctgtgaacgctctggcccatcatgttctgaataaggacctgaaagatattgtgggggacttccgaggcttttataggcagcttacttccgacgggcagctgaggtggatcggtcccgagaaaggcgttgtccacctggcaactgctgccgtgctgaatgctgtatgggacctttgggcaaagcaggagggcaaaccagtgtggaaattactggtcgatatggacccaaggatgctggtgagctgcatcgattttagatacataactgacgtgctgaccgaggaggacgctctggaaattctgcaaaaaggccaaattggtaagaaagagcgggaaaagcagatgttagcccaagggtatccagcgtatacaacatcatgcgcctggttagggtattctgatgacacgttaaagcagctgtgtgcccaagctctgaaagatggatggacgcgttttaaagtgaaagtgggagctgacctccaagacgacatgcggcgatgtcagataattagagatatgatcgggcccgagaaaacactgatgatggacgccaatcaacgttgggacgtgccggaggccgtcgaatggatgtccaagttggcaaaatttaaaccgctatggattgaagagccaactagccccgacgatatcctcggacatgctaccatctcgaaatgtcacaatcgcgtgattttcaaacagctgttacaggccaaggctctccagtttctgcagatcgactcctgccgtttaggatccgtcaatgagaatctctcggtgctcctcatggcaaaaaaatttgagattcctgtatgcccacatgccggcggggtggggctgtgcgaactcgtgcagcacctgatcatcttcgactacatctccgtaagtgcctccttggaaaaccgtgtgtgtgagtacgtggatcatttgcatgagcacttcaagtatcccgtgatgattcagcgcgcgagctacatgcctccaaaagaccccggatattccaccgagatgaaggaggaaagtgtgaagaagcaccagtatcccgacggagaggtgtggaagaagcttcttcctgcacaggagaactag

SEQ ID NO: 262728 - DNA, 1353 bp, Artificial Sequence
  derived and/or modified sequence
atggtgtctgcagatgccatggtgtctgcagatgccatggtgtctgcagatgccatggtgtctgcagatgccatggtgtctgcagatgccatggtgtctgcagatgccatggtgtctgcagatgccatggtgtctgcagatgccatgcacacagatcctgactacagcgctgcctacgtggtgattgaaacagatgctgaagatggcatcaagggctgcggcatcaccttcaccctgggcaaaggaacagaggtggtggtgtgtgctgtgaatgccctggcccaccacgtgctgaacaaggacctgaaggacatcgtgggggacttccggggcttctaccggcagctgaccagtgatggccagctgcgctggattggccctgagaagggcgtggtgcacctggccacagctgctgtgctgaatgctgtgtgggacctgtgggccaagcaggagggcaagcctgtgtggaagctgctggtggacatggaccccaggatgctggtgtcctgcatcgacttccgctacatcacagatgtgctgacagaagaagatgccctggagatcctgcagaagggccagatcggcaagaaggagcgggagaagcagatgctggcccagggctacccagcctacaccaccagctgtgcctggctgggctacagtgatgacaccctgaagcagctgtgtgcccaggccctgaaggatggctggacccgcttcaaggtgaaggtgggcgctgacctgcaggatgacatgaggcgctgccagatcatccgggacatgattggccctgagaagaccctgatgatggatgccaaccagcgctgggatgtgcctgaggccgtggagtggatgagcaagctggccaagttcaagcccctgtggattgaggagcccaccagcccagatgacatcctgggccacgccaccatcagcaagtgccacaacagagtcatcttcaagcagctgctgcaggccaaggccctgcagttcctgcagattgacagctgccgcctgggctctgtgaatgaaaacctgtctgtgctgctgatggccaagaagtttgagatccctgtgtgcccccatgctggaggagtgggcctgtgtgagctggtgcagcacctgatcatctttgactacatctctgtgtctgccagcctggagaacagagtgtgtgaatatgtggaccacctgcacgagcacttcaagtaccctgtgatgatccagagggccagctacatgccacccaaggaccccggctacagcacagagatgaaggaggagagcgtgaagaagcaccagtacccagatggagaggtgtggaagaagctgctgcctgcccaggagaactag

SEQ ID NO: 262729 - DNA, 1353 bp, Artificial Sequence
  derived and/or modified sequence
atggtgagcgccgacgccatggtgagcgccgacgccatggtgagcgctgatgcaatggtctccgcggacgccatggtgtcggccgacgccatggtgtccgccgacgccatggtcagcgcagatgccatggtcagcgctgacgcgatgcatacagacccagactattccgccgcttatgtggtgattgaaactgatgccgaggacggcatcaagggatgtggaattactttcacattgggcaagggtacggaggtggtagtctgcgctgttaacgcattggcacatcacgtgctaaacaaggatctgaaagatatcgttggcgattttcggggcttttataggcagctgacctcagatggccaactcaggtggatcggccctgagaaaggtgtcgtgcatctggcgactgccgccgtccttaacgccgtttgggacttgtgggcaaagcaggagggtaagccagtctggaagctgcttgtcgacatggacccccgcatgctggtctcttgcatagatttcaggtacattacagatgtattgacagaagaggacgccctggaaattttgcaaaaggggcaaataggcaagaaggaacgtgagaagcagatgctcgcacagggataccctgcatacactacatcatgcgcctggctgggatacagcgacgacacactcaagcagctgtgtgcacaggctcttaaagatgggtggactcggttcaaggtgaaggtaggcgctgacctgcaagatgatatgaggcgatgccaaatcatccgggacatgattgggccggagaagacactcatgatggatgctaatcagcgctgggacgtgcctgaagctgtagagtggatgtccaaactggctaagtttaagcccttatggatagaggaacccaccagcccagatgacattttgggccatgctacaatctccaaatgtcacaacagagtcatttttaagcagctcttgcaggccaaagccctgcagtttctgcagattgatagctgcagactcggcagtgtaaatgaaaatttgagtgtcctgcttatggccaagaagtttgagatacccgtatgtcctcacgccggcggcgtggggctgtgcgagttggttcagcatctcatcattttcgactatatcagtgtgtctgcaagccttgaaaaccgcgtgtgcgagtacgttgaccacctgcacgagcatttcaagtaccctgtcatgatccaacgggcgtcttatatgcctcccaaagatcctggttatagtacagaaatgaaggaggagtccgtgaaaaaacatcagtatcccgacggcgaggtgtggaagaaactgctgcctgcccaggaaaactag

SEQ ID NO: 262730 - DNA, 1353 bp, Artificial Sequence
  derived and/or modified sequence
atggtcagtgccgacgcaatggtgtctgctgacgccatggtgtccgctgatgccatggtgtccgcagatgccatggtgagtgccgacgcgatggtaagcgccgatgccatggtctctgccgacgccatggtaagcgctgacgctatgcataccgatccagactactccgcggcttacgtggtgattgagaccgacgcagaggacggaataaagggctgtggcatcactttcactttgggcaaaggaactgaggtggtggtgtgcgcggttaacgcactcgctcatcacgttctgaataaagatctcaaagacatcgtgggcgacttcagaggtttttatcgacaactcacgtcagacggccagctcagatggatcggtcctgaaaagggagttgtacatcttgccacagcggcagttctcaacgctgtctgggatttatgggcaaaacaggaaggaaagccagtctggaaactgttggtggacatggacccgagaatgcttgtgtcgtgcatcgatttccggtatattaccgacgtgctgactgaggaggatgcccttgaaatcctgcagaaggggcaaatcggaaagaaagagagagagaagcagatgctggctcaaggctacccagcctacacaacctcttgcgcctggcttgggtattcagatgacaccttaaaacagctttgtgcacaagccttgaaggatggctggacgcggtttaaagttaaagtcggcgcagacctgcaggatgacatgcgaaggtgccagattataagagacatgattgggccagaaaaaactttgatgatggatgctaaccaacgctgggacgtgccagaggcggtagaatggatgtcaaagctcgctaaatttaaaccgctgtggatcgaagaacctacctctcccgatgacatcttgggtcacgctacaatctcaaaatgccacaaccgggtcatcttcaagcagctcctccaggctaaggccctgcagttcctgcagatcgacagctgccggttggggtcagtgaatgagaacttgtccgtactgctcatggcaaagaaattcgagattccggtttgcccacatgctggcggtgtcggtctgtgtgagctggtccagcatcttatcatcttcgactatatttccgtatccgcctctctggaaaatagagtctgtgagtacgttgaccacttgcacgagcactttaagtatcctgtgatgatccagcgggcaagctacatgccccctaaggacccaggatattccaccgagatgaaagaagagtctgtcaagaagcatcagtacccagacggagaggtttggaagaaactacttccagctcaggagaactag

SEQ ID NO: 262731 - DNA, 1353 bp, Artificial Sequence
  derived and/or modified sequence
atggtgagcgccgacgccatggtgagcgccgacgccatggtgagcgccgacgccatggtgagcgccgacgccatggtgagcgccgacgccatggtgagcgccgacgccatggtgagcgccgacgccatggtgagcgccgacgccatgcacaccgaccccgactacagcgccgcctacgtggtgatcgagaccgacgccgaggacggcatcaagggctgcggcatcaccttcaccctgggcaagggcaccgaggtggtggtgtgcgccgtgaacgccctggcccaccacgtgctgaacaaggacctgaaggacatcgtgggcgacttcagaggcttctacagacagctgaccagcgacggccagctgagatggatcggccccgagaagggcgtggtgcacctggccaccgccgccgtgctgaacgccgtgtgggacctgtgggccaagcaggagggcaagcccgtgtggaagctgctggtggacatggaccccagaatgctggtgagctgcatcgacttcagatacatcaccgacgtgctgaccgaggaggacgccctggagatcctgcagaagggccagatcggcaagaaggagagagagaagcagatgctggcccagggctaccccgcctacaccaccagctgcgcctggctgggctacagcgacgacaccctgaagcagctgtgcgcccaggccctgaaggacggctggaccagattcaaggtgaaggtgggcgccgacctgcaggacgacatgagaagatgccagatcatcagagacatgatcggccccgagaagaccctgatgatggacgccaaccagagatgggacgtgcccgaggccgtggagtggatgagcaagctggccaagttcaagcccctgtggatcgaggagcccaccagccccgacgacatcctgggccacgccaccatcagcaagtgccacaacagagtgatcttcaagcagctgctgcaggccaaggccctgcagttcctgcagatcgacagctgcagactgggcagcgtgaacgagaacctgagcgtgctgctgatggccaagaagttcgagatccccgtgtgcccccacgccggcggcgtgggcctgtgcgagctggtgcagcacctgatcatcttcgactacatcagcgtgagcgccagcctggagaacagagtgtgcgagtacgtggaccacctgcacgagcacttcaagtaccccgtgatgatccagagagccagctacatgccccccaaggaccccggctacagcaccgagatgaaggaggagagcgtgaagaagcaccagtaccccgacggcgaggtgtggaagaagctgctgcccgcccaggagaactag

SEQ ID NO: 262732 - DNA, 1658 bp, Artificial Sequence
  derived and/or modified sequence
gcttccccacgtcgcttgggggccacggcgcggacgccatggtaagcgcggacgccatggtaagcgcggacgccatggtaagcgcggacgccatggtaagcgcggacgccatggtaagcgcggacgccatggtaagcgcggacgccatggtaagcgcggacgccatggtaagcgcggacgccatgcacacggaccctgactactcggctgcctatgtcgtcatagaaactgatgcagaagatggaatcaaggggtgtggaattaccttcactctgggaaaaggcactgaagttgttgtctgtgctgtgaatgccctcgcccaccatgtgctcaacaaggacctcaaggacattgttggtgacttcagaggcttctataggcagctcacaagtgatgggcagctcagatggattggtccagaaaagggcgtggtgcacctggcgacagcggccgtcctaaacgcggtgtgggacttgtgggccaagcaggagggaaagcctgtctggaagttacttgtggacatggatcccaggatgctggtatcctgcatagatttcaggtacatcactgatgtcctgactgaggaggatgccctagaaatactgcagaaaggtcaaattggtaaaaaagaaagagagaagcaaatgctggcacaaggataccctgcttacacgacatcgtgcgcctggctggggtactcagatgacacgttgaagcagctctgtgcccaggcgctgaaggatggctggaccaggtttaaagtaaaggtgggtgctgatctccaggatgacatgcgaagatgccaaatcatccgagacatgattggaccggaaaagactttgatgatggatgccaaccagcgctgggatgtgcctgaggcggtggagtggatgtccaagctggccaagttcaagccattgtggattgaggagccaacctcccctgatgacattctggggcacgccaccatttccaagtgccacaatagagtgatatttaagcaactcctacaggcgaaggccctgcagttcctccagattgacagttgcagactgggcagtgtcaatgagaacctctcagtattgctgatggccaaaaagtttgaaattcctgtttgcccccatgctggtggagttggcctctgtgaactggtgcagcacctgattatatttgactacatatcagtttctgcaagccttgaaaatagggtgtgtgagtatgttgaccacctgcatgagcatttcaagtatcccgtgatgatccagcgggcttcctacatgcctcccaaggatcccggctactcaacagaaatgaaggaggaatctgtaaagaaacaccagtatccagatggtgaagtttggaagaaactccttcctgctcaagaaaattaagtgctcagccccaacaacttttttctttctgaagtgaaagggcttaaaatttcttggaaatagttttacaaaaatggatttaaaaaatcctaccgatcaagatgagttcagctagaagtcataccaccctcaggaatcagctaagtaattattacttgattcttttagcaaatcaatgcacgttatcctacttaatccttaaataagtttagatttaactaacccaaagtccaggaggatgttcttacaaaaatagctatatcaagg

SEQ ID NO: 262733 - protein, 485 aa, Artificial Sequence
  derived and/or modified sequence
MGGCRKFGERPPPKRLTREAMRNYLKERGDQTVLILHAKVAQKSYGNEKRFFCPPPCVYLMGSGWKKKKEQMERDGCSEQESQPCAFIGIGNSDQEMQQLNLEGKNYCTAKTLYISDSDKRKHFMLSVKMFYGNSDDIGVFLSKRIKVISKPSKKKQSLKNADLCIASGTKVALFNRLRSQTVSTRYLHVEGGNFHASSQQWGAFFIHLLDDDESEGEEFTVRDGYIHYGQTVKLVCSVTGMALPRLIIRKVDKQTALLDADDPVSQLHKCAFYLKDTERMYLCLSQERIIQFQATPCPKEPNKEMINDGASWTIISTDKAEYTFYEGMGPVLAPVTPVPVVESLQLNGGGDVAMLELTGQNFTPNLRVWFGDVEAETMYRCGESMLCVVPDISAFREGWRWVRQPVQVPVTLVRNDGIIYSTSLTFTYTPEPGPRPHCSAAGAILRANSSQVPPNESNTNSEGSYTNASTNSTSVTSSTATVVS

SEQ ID NO: 262734 - DNA, 1458 bp, Artificial Sequence
  derived and/or modified sequence
atgggagggtgccgaaagtttggtgaacggcctccacctaaaaggcttacacgcgaggctatgcgaaactatttgaaagagcggggcgaccagactgtgcttatcttgcacgctaaagtggcccagaaatcctatggcaatgagaaaaggttcttttgcccgccgccctgcgtctacctcatggggagcggatggaaaaaaaagaaagagcaaatggaacgcgatgggtgctccgaacaggaaagtcaaccctgcgcatttattgggattgggaactccgaccaggagatgcagcagctcaatttagagggcaaaaattactgcacagccaagacactgtatattagcgatagcgacaaacgtaagcactttatgctaagcgttaaaatgttttacgggaatagtgacgatattggggttttcttgagcaaaagaatcaaggtaatatcaaaacccagtaagaaaaaacaatctttgaagaatgcagacctgtgcatcgcgtctggtacgaaagttgcattgttcaacaggttgcgatcgcagaccgtgagtacaagatatttacatgtggagggggggaatttccatgccagctcccaacaatggggtgcattcttcattcacctgctcgatgatgacgagtcagagggagaggagtttacagtaagggacggctatattcattacggtcaaacggtgaaactagtttgctccgtgacaggcatggccctccccaggctaattattaggaaagtcgacaaacagactgctcttctcgatgctgatgatcctgtgagccaacttcacaagtgtgctttctaccttaaagatacggagcggatgtatttgtgcttaagtcaagagcgtattattcaattccaggctaccccatgccccaaagagcccaacaaggagatgataaatgacggcgcgtcttggacaattatctccactgacaaagctgagtacacattctacgagggaatgggccctgttttggcacctgtgacccccgtacctgtagtggagtcgctgcagttgaacggcggtggagatgtagcaatgttggagttaacggggcagaacttcactcccaatctcagagtgtggtttggagatgtggaggccgaaactatgtatcgctgtggagaatccatgctgtgcgttgtgccagatataagcgcctttcgagaggggtggcgttgggtgcggcagcctgtacaggtgcccgtgaccctcgttaggaacgatggaattatttatagcacttctttgacgttcacatacactcctgagcctggcccccgcccacattgctctgctgccggtgcaattcttagagctaactcgtcccaggttccccctaatgaaagtaacacaaactcagaaggctcatacaccaacgcaagcacaaactctacaagcgtgacatcctccactgccactgttgtatcttag

SEQ ID NO: 262735 - DNA, 1458 bp, Artificial Sequence
  derived and/or modified sequence
atgggcggctgcaggaagtttggagagcggcccccacccaagaggctgacccgggaggccatgaggaactacctgaaggagcggggggaccagacagtgctgatcctgcacgccaaggtggcccagaagagctatggaaatgagaagcgcttcttctgccccccaccctgtgtgtacctgatgggcagcggctggaagaagaagaaggagcagatggagagagatggctgcagcgagcaggagagccagccctgtgccttcatcggcatcggcaacagcgaccaggagatgcagcagctgaacctggagggcaagaactactgcacagccaagaccctgtacatcagtgacagcgacaagaggaagcacttcatgctgtctgtgaagatgttctacggcaacagtgatgacatcggggtcttcctgagcaagaggatcaaggtgatcagcaagcccagcaagaagaagcagagcctgaagaatgctgacctgtgcatcgccagcggcaccaaggtggccctcttcaaccggctgcggagccagacagtgtccacccgctacctgcacgtggagggcggcaacttccacgccagcagccagcagtggggcgccttcttcatccacctgctggatgatgatgaaagtgaaggagaggagttcaccgtgagagatggctacatccactacggccagacagtgaagctggtgtgcagcgtgacaggcatggccctgcccaggctcatcatcaggaaggtggacaagcagacagccctgctggatgctgatgatcctgtgtcccagctgcacaagtgtgccttctacctgaaggacacagagaggatgtacctgtgcctgagccaggagcgcatcatccagttccaggccaccccctgccccaaggagcccaacaaggagatgatcaatgatggagcctcctggaccatcatcagcacagacaaggccgagtacaccttctatgagggcatgggccctgtgctggcccctgtgacccctgtgcctgtggtggagagcctgcagctgaatggaggaggagatgtggccatgctggagctgaccggccagaacttcacccccaacctgcgggtgtggtttggagatgtggaggccgagaccatgtaccgctgtggggagagcatgctgtgtgtggtgcctgacatcagcgccttccgggagggctggcgctgggtgcggcagcctgtgcaggtgcctgtgaccctggtgagaaatgatggcatcatctacagcaccagcctgaccttcacctacaccccagagcccggcccccggccccactgcagcgctgctggggccatcctgcgggccaacagcagccaggtgcccccaaatgaaagcaacaccaacagcgagggcagctacaccaatgccagcaccaacagcacctctgtgaccagcagcacagccaccgtggtgtcctag

SEQ ID NO: 262736 - DNA, 1458 bp, Artificial Sequence
  derived and/or modified sequence
atgggcggctgccggaagttcggcgagcggcccccccccaagcggctcacccgggaagctatgcggaattacctgaaggagcggggtgatcaaacagttctcatcttacacgctaaggtggctcagaagtcgtacggtaatgaaaagagattcttctgcccgcccccatgtgtctatctgatggggagtggatggaagaaaaaaaaggagcaaatggaaagagacggatgctctgagcaggaatctcagccatgtgcttttatcggaatcggcaatagcgatcaggagatgcagcaactgaacctcgaaggaaagaactactgcactgcaaaaacactttatatttctgatagtgacaagaggaaacatttcatgttatcggttaagatgttttacggcaacagtgatgacatcggcgtcttcctgagcaaacggataaaggtgatatctaagcccagcaagaaaaaacagtctcttaagaacgcagatctgtgcattgcctccggcactaaggtggccctgtttaatcggttgcgctcacagaccgtcagcactaggtatttgcacgtggagggaggaaatttccatgcgtcatctcaacagtggggagcttttttcatacacctcctggacgacgacgaaagcgaaggcgaggaattcacagtcagggacggttacattcactatggccagaccgtgaagctcgtttgctccgtgactggaatggcattgcctcggctgattatccgaaaagtggacaaacagacggcgctgctagacgcagacgaccccgtttctcagctgcacaagtgtgcgttttatttgaaggacaccgaacggatgtatttgtgcctgtctcaagaacgaattattcaatttcaggctactccatgtcccaaggaacccaacaaggaaatgatcaacgatggggcgtcgtggactataatttcgacagataaagctgagtacacattctatgagggaatggggcctgttttggccccggtgacacccgttcccgtggtcgagagcctgcagttgaatggtgggggagacgtcgcaatgctcgagctaactggccagaacttcacaccgaatctccgggtgtggttcggcgatgttgaggccgagacaatgtataggtgcggtgagtccatgttatgtgtcgtccccgatatatccgccttcagggaaggatggagatgggtgcgtcagcccgtgcaggtgcctgtaacgttggtgaggaacgatgggattatttattctacatccctgactttcacatacacccctgaaccaggcccacggccgcattgcagcgccgcaggggccatcctgagagcaaattcctcacaggtcccccccaacgaatccaatactaacagtgaaggctcttataccaatgcgagcactaactctacaagcgttacatcgagtaccgccactgtggtcagctag

SEQ ID NO: 262737 - DNA, 1458 bp, Artificial Sequence
  derived and/or modified sequence
atggggggttgcagaaagtttggcgagcgccctccccctaagagactgacccgcgaagccatgaggaactaccttaaagaacgcggagaccaaaccgtcctgatcctccatgccaaggtcgcacagaagagctacggaaatgagaagaggttcttttgtcccccaccctgtgtgtacctgatgggtagtggctggaagaagaagaaagaacaaatggaacgcgatggttgttctgagcaggaaagccagccctgcgccttcattgggatcggcaactcagaccaagaaatgcagcagcttaacctggagggcaagaactactgtaccgcaaaaactctttatatatccgactctgataaacgcaagcacttcatgttgtccgtgaaaatgttctacggtaacagcgacgacattggcgttttcctttcgaaacggattaaggtgattagcaagcctagcaagaaaaagcagtcccttaagaacgcagacctgtgtatcgccagtgggaccaaggtggcactgtttaatagactgcgttcgcaaactgtatcaacgagatatctgcatgtggaaggtgggaatttccatgccagctcccagcagtggggcgctttttttattcacttattggatgacgatgagtcagaaggtgaggaatttacagtaagagatgggtatatccactacggacagaccgtgaaattggtgtgctcagtcacaggcatggcgttgccacggctgatcatcagaaaagtggataagcagacagcgttgttggatgcagatgaccctgtcagtcagctgcacaagtgcgctttttatctcaaggatacagagcggatgtacctttgcctcagccaagagagaatcattcagttccaagcaactccctgcccaaaggaacctaacaaggaaatgattaatgatggcgctagttggactatcattagtactgacaaggcggaatacaccttttatgaaggaatgggccctgtgctggccccagttaccccggtaccggtggtggagagcctccaactcaacggcggtggggacgtcgctatgctcgagctgacaggacaaaactttactcccaaccttagagtctggtttggcgatgtggaggctgaaacaatgtaccgttgtggggagtctatgctatgtgtcgtgcctgacatctccgcattccgcgaaggctggcgatgggtgcggcagcctgtccaggtccctgtgactttggtccggaacgacggtattatctactcgacctccctgacgttcacctatacccccgagccagggccacggcctcactgttcagctgcgggtgccatcttaagagcaaattcttcccaggtaccccctaatgagtctaatactaactctgagggcagttatacgaatgcgagcactaattcaacttctgtcactagctcaaccgccacagtggtcagctag

SEQ ID NO: 262738 - DNA, 1682 bp, Artificial Sequence
  derived and/or modified sequence
attgggtacatgcgcagtgccgctcgcgcgggccgcgccaatcctgcagcgccttcaacaggtttcgggcggcgaattccagttctccgggttttggggctccctgcgggaggcagtgctggatctgggaatctctaggaaaggaaagagcaaaggaggggaaagatggggggctgcaggaaatttggtgagcggcctccacctaaacgacttactagggaagctatgcgaaattatttaaaagagcgaggggatcaaacagtacttattcttcatgcaaaagttgcacagaagtcatatggaaatgaaaaaaggtttttttgcccacctccttgtgtatatcttatgggcagtggatggaagaaaaaaaaagaacaaatggaacgcgatggttgttctgaacaagagtctcaaccgtgtgcatttattgggataggaaatagtgaccaagaaatgcagcagctaaacttggaaggaaagaactattgcacagccaaaacattgtatatatctgactcagacaagcgaaagcacttcatgttgtctgtaaagatgttctatggcaacagtgatgacattggtgtgttcctcagcaagcggataaaagtcatctccaaaccttccaaaaagaagcagtcattgaaaaatgctgacttatgcattgcctcaggaacaaaggtggctctgtttaatcgactacgatcccagacagttagtaccagatacttgcatgtagaaggaggtaattttcatgccagttcacagcagtggggagccttttttattcatctcttggatgatgatgaatcagaaggagaagaattcacagtccgagatggctacatccattatggacaaacagtcaaacttgtgtgctcagttactggcatggcactcccaagattgataattaggaaagttgataagcagaccgcattattggatgcagatgatcctgtgtcacaactccataaatgtgcattttaccttaaggatacagaaagaatgtatttgtgcctttctcaagaaagaataattcaatttcaggccactccatgtccaaaagaaccaaataaagagatgataaatgatggcgcttcctggacaatcattagcacagataaggcagagtatacattttatgagggaatgggccctgtccttgccccagtcactcctgtgcctgtggtagagagccttcagttgaatggcggtggggacgtagcaatgcttgaacttacaggacagaatttcactccaaatttacgagtgtggtttggggatgtagaagctgaaactatgtacaggtgtggagagagtatgctctgtgtcgtcccagacatttctgcattccgagaaggttggagatgggtccggcaaccagtccaggttccagtaactttggtccgaaatgatggaatcatttattccaccagccttacctttacctacacaccagaaccagggccgcggccacattgcagtgcagcaggagcaatccttcgagccaattcaagccaggtgccccctaacgaatcaaacacaaacagcgagggaagttacacaaacgccagcacaaattcaaccagtgtcacatcatctacagccacagtggtatcctaactaccgtctttttgctaggacttaaactgacttgagtgtggcaaaaagttaacaaaaaa

SEQ ID NO: 262739 - DNA, 731 bp, Artificial Sequence
  derived and/or modified sequence
tacagatacactggctgaggtgttttgaggtgcatcgaagtgttccaagctgtgacttaccttaacatgttcttgaagtaccatggcgtggattaaaagggtcttgctctgtcatccaggctagagtggactggtgcgatctcagctcactgcagcctcgacttcctggactcaatcttgcttcaaggtctttttcaagtgctgtgtcttcactgtctcagaagtttacacttcctatttcagaggaaataacaggaaatttggtgagcggcctccacctaaacgacttactagggaagctatgcgaaattatttaaaagagcgaggggatcaaacagtacttattcttcatgcaaaagttgcacagaagtcatatggaaatgaaaaaaggtttttttgcccacctccttgtgtatatcttatgggcagtggatggaagaaaaaaaaagaacaaatggaacgcgatggttgttctgaacaagagtctcaaccgtgtgcatttattgggataggaaatagtgaccaagaaatgcagcagctaaacttggaaggaaagaactattgcacagccaaaacattgtatatatctgactcagacaagcgaaagcacttcatgttgtctgtaaagatgttctatggcaacagtgatgacattggtgtgttcctcagcaagcggataaaagtcatctccaaaccttccaaaaagaagcagtcattgaaaaatgctgact

SEQ ID NO: 262740 - DNA, 607 bp, Artificial Sequence
  derived and/or modified sequence
ttagaaggaggctcaagatgtatatatgtgtttttctgttagtgtttgagaatagtttcagatagccacaatggatattcatttggcgtgaaatttggtgagcggcctccacctaaacgacttactagggaagctatgcgaaattatttaaaagagcgaggggatcaaacagtacttattcttcatgcaaaagttgcacagaagtcatatggaaatgaaaaaaggtttttttgcccacctccttgtgtatatcttatgggcagtggatggaagaaaaaaaaagaacaaatggaacgcgatggttgttctgaacaagagtctcaaccgtgtgcatttattgggataggaaatagtgaccaagaaatgcagcagctaaacttggaaggaaagaactattgcacagccaaaacattgtatatatctgactcagacaagcgaaagcacttcatgttgtctgtaaagatgttctatggcaacagtgatgacattggtgtgttcctcagcaagcggataaaagtcatctccaaaccttccaaaaagaagcagtcattgaaaaatgctgacttatgcattgcctcaggaacaaaggtggctctgtttaatcgac

SEQ ID NO: 262741 - DNA, 698 bp, Artificial Sequence
  derived and/or modified sequence
gtgtttgttattgtgaatccctaagggtgactgttttttcagcagggcgagttaggacggcacaaactgagagtttctgttctggaaatttggtgagcggcctccacctaaacgacttactagggaagctatgcgaaattatttaaaagagcgaggggatcaaacagtacttattcttcatgcaaaagttgcacagaagtcatatggaaatgaaaaaaggtttttttgcccacctccttgtgtatatcttatgggcagtggatggaagaaaaaaaaagaacaaatggaacgcgatggttgttctgaacaagagtctcaaccgtgtgcatttattgggataggaaatagtgaccaagaaatgcagcagctaaacttggaaggaaagaactattgcacagccaaaacattgtatatatctgactcagacaagcgaaagcacttcatgttgtctgtaaagatgttctatggcaacagtgatgacattggtgtgttcctcagcaagcggataaaagtcatctccaaaccttccaaaaagaagcagtcattgaaaaatgctgacttatgcattgcctcaggaacaaaggtggctctgtttaatcgactacgatcccagacagttagtaccagatacttgcatgtagaaggaggtaattttcatgccagttcacagcagtggggagccttttttattcatctct

SEQ ID NO: 262742 - DNA, 1458 bp, Artificial Sequence
  derived and/or modified sequence
atgggcggctgcagaaagttcggcgagagacccccccccaagagactgaccagagaggccatgagaaactacctgaaggagagaggcgaccagaccgtgctgatcctgcacgccaaggtggcccagaagagctacggcaacgagaagagattcttctgcccccccccctgcgtgtacctgatgggcagcggctggaagaagaagaaggagcagatggagagagacggctgcagcgagcaggagagccagccctgcgccttcatcggcatcggcaacagcgaccaggagatgcagcagctgaacctggagggcaagaactactgcaccgccaagaccctgtacatcagcgacagcgacaagagaaagcacttcatgctgagcgtgaagatgttctacggcaacagcgacgacatcggcgtgttcctgagcaagagaatcaaggtgatcagcaagcccagcaagaagaagcagagcctgaagaacgccgacctgtgcatcgccagcggcaccaaggtggccctgttcaacagactgagaagccagaccgtgagcaccagatacctgcacgtggagggcggcaacttccacgccagcagccagcagtggggcgccttcttcatccacctgctggacgacgacgagagcgagggcgaggagttcaccgtgagagacggctacatccactacggccagaccgtgaagctggtgtgcagcgtgaccggcatggccctgcccagactgatcatcagaaaggtggacaagcagaccgccctgctggacgccgacgaccccgtgagccagctgcacaagtgcgccttctacctgaaggacaccgagagaatgtacctgtgcctgagccaggagagaatcatccagttccaggccaccccctgccccaaggagcccaacaaggagatgatcaacgacggcgccagctggaccatcatcagcaccgacaaggccgagtacaccttctacgagggcatgggccccgtgctggcccccgtgacccccgtgcccgtggtggagagcctgcagctgaacggcggcggcgacgtggccatgctggagctgaccggccagaacttcacccccaacctgagagtgtggttcggcgacgtggaggccgagaccatgtacagatgcggcgagagcatgctgtgcgtggtgcccgacatcagcgccttcagagagggctggagatgggtgagacagcccgtgcaggtgcccgtgaccctggtgagaaacgacggcatcatctacagcaccagcctgaccttcacctacacccccgagcccggccccagaccccactgcagcgccgccggcgccatcctgagagccaacagcagccaggtgccccccaacgagagcaacaccaacagcgagggcagctacaccaacgccagcaccaacagcaccagcgtgaccagcagcaccgccaccgtggtgagctag

SEQ ID NO: 262743 - protein, 486 aa, Artificial Sequence
  derived and/or modified sequence
MAWIKRKFGERPPPKRLTREAMRNYLKERGDQTVLILHAKVAQKSYGNEKRFFCPPPCVYLMGSGWKKKKEQMERDGCSEQESQPCAFIGIGNSDQEMQQLNLEGKNYCTAKTLYISDSDKRKHFMLSVKMFYGNSDDIGVFLSKRIKVISKPSKKKQSLKNADLCIASGTKVALFNRLRSQTVSTRYLHVEGGNFHASSQQWGAFFIHLLDDDESEGEEFTVRDGYIHYGQTVKLVCSVTGMALPRLIIRKVDKQTALLDADDPVSQLHKCAFYLKDTERMYLCLSQERIIQFQATPCPKEPNKEMINDGASWTIISTDKAEYTFYEGMGPVLAPVTPVPVVESLQLNGGGDVAMLELTGQNFTPNLRVWFGDVEAETMYRCGESMLCVVPDISAFREGWRWVRQPVQVPVTLVRNDGIIYSTSLTFTYTPEPGPRPHCSAAGAILRANSSQVPPNESNTNSEGSYTNASTNSTSVTSSTATVVS

SEQ ID NO: 262744 - protein, 28 aa, Artificial Sequence
  derived and/or modified sequence
MAWIKRKFGERPPPKRLTREAMRNYLKE

SEQ ID NO: 262745 - protein, 97 aa, Artificial Sequence
  derived and/or modified sequence
MAWIKRKFGERPPPKRLTREAMRNYLKERGDQTVLILHAKVAQKSYGNEKRFFCPPPCVYLMGSGWKKKKEQMERDGCSEQESQPCAFIGIGNSDQE

SEQ ID NO: 262746 - protein, 49 aa, Artificial Sequence
  derived and/or modified sequence
MAWIKRKFGERPPPKRLTREAMRNYLKERGDQTVLILHAKVAQKSYGNE

SEQ ID NO: 262747 - protein, 107 aa, Artificial Sequence
  derived and/or modified sequence
MAWIKRKFGERPPPKRLTREAMRNYLKERGDQTVLILHAKVAQKSYGNEKRFFCPPPCVYLMGSGWKKKKEQMERDGCSEQESQPCAFIGIGNSDQEMQQLNLEGKN

SEQ ID NO: 262748 - protein, 94 aa, Artificial Sequence
  derived and/or modified sequence
MAWIKRKFGERPPPKRLTREAMRNYLKERGDQTVLILHAKVAQKSYGNEKRFFCPPPCVYLMGSGWKKKKEQMERDGCSEQESQPCAFIGIGNS

SEQ ID NO: 262749 - protein, 110 aa, Artificial Sequence
  derived and/or modified sequence
MAWIKRKFGERPPPKRLTREAMRNYLKERGDQTVLILHAKVAQKSYGNEKRFFCPPPCVYLMGSGWKKKKEQMERDGCSEQESQPCAFIGIGNSDQEMQQLNLEGKNYCT

SEQ ID NO: 262750 - protein, 113 aa, Artificial Sequence
  derived and/or modified sequence
MAWIKRKFGERPPPKRLTREAMRNYLKERGDQTVLILHAKVAQKSYGNEKRFFCPPPCVYLMGSGWKKKKEQMERDGCSEQESQPCAFIGIGNSDQEMQQLNLEGKNYCTAKT

SEQ ID NO: 262751 - protein, 48 aa, Artificial Sequence
  derived and/or modified sequence
MAWIKRKFGERPPPKRLTREAMRNYLKERGDQTVLILHAKVAQKSYGN

SEQ ID NO: 262752 - DNA, 1461 bp, Artificial Sequence
  derived and/or modified sequence
atggcctggataaagcggaaattcggagaaaggccgccaccgaagcgccttacaagggaggccatgaggaactatctgaaggagcgtggtgatcagaccgtattaatactgcacgctaaggtcgcccaaaagtcatatggtaacgagaaacggttcttctgtcctcccccctgtgtgtatctcatgggatcaggatggaagaaaaagaaagagcagatggaacgggacggctgtagcgaacaagaatcacagccctgtgcatttattggaatcggaaactctgatcaagaaatgcagcagcttaatctggaagggaagaactactgcactgctaaaaccctttacatatctgacagcgataagaggaaacatttcatgttgagcgttaagatgttttatgggaactccgacgatatcggggtctttctgtccaagcgcatcaaagtaatctccaagccctccaaaaaaaagcagagtcttaaaaacgcagatctgtgtattgccagcggaacgaaggtcgccctgtttaatcggctgaggtcgcagaccgtcagtacgcggtatttgcatgtcgaaggcgggaactttcatgcttctagtcagcagtggggcgccttctttatacatttgctcgatgacgacgagtctgagggtgaagagtttacagttagagatggctatattcattatggccagactgtcaaattagtctgctccgtgaccggcatggcactgcctaggctgattattagaaaagtagataagcaaaccgcgttacttgacgccgacgaccccgtctcccagctgcacaagtgcgctttttatctcaaggataccgaaagaatgtacctttgtctttcccaagaacgcatcattcagttccaggctacaccctgtcctaaagagccgaataaagagatgattaacgatggggcaagttggaccataatctccactgataaagctgagtacactttttatgagggtatgggtcctgtcctagcccctgtaacaccagtccccgttgtcgaatcactccagctgaacgggggcggagacgtggccatgctcgagttgactggccagaattttacccccaacttgcgtgtatggtttggtgacgtggaggcggagacaatgtacaggtgcggtgaatcaatgctgtgcgttgtccccgacatctcagcctttcgggagggctggcgctgggtgagacagccggtacaggtacctgtgaccttggtgcgcaatgatggcattatttacagcactagtctcacgtttacatacactcctgagccaggcccgaggccccactgctcagcagccggtgctatcttgcgggccaacagtagccaggtcccaccaaacgaatcaaacactaactctgagggttcttacacaaacgccagcacaaactccacctcagttactagcagcacggcgaccgtggtttcatag

SEQ ID NO: 262753 - DNA, 1461 bp, Artificial Sequence
  derived and/or modified sequence
atggcttggatcaaaagaaaattcggagaacgccccccccctaaaaggctcacccgggaggcaatgcggaattatttgaaagaacggggagaccagactgtgctgattttgcacgcaaaggttgctcagaaaagctacggaaacgagaagcgttttttctgcccaccaccctgcgtttatctgatgggaagtgggtggaaaaagaagaaggagcagatggaaagagacggctgctccgagcaagagtcgcagccttgcgcatttattggcattggcaatagcgaccaggaaatgcaacagcttaatctggaggggaaaaactactgtaccgcgaaaactctttacatatcagactctgacaagcgtaaacacttcatgcttagtgtcaaaatgttctacggcaattccgacgatatcggcgtgttcctctctaaaagaattaaggtaatcagcaagccctcgaaaaagaaacagtcactcaagaatgccgacctgtgtattgcctccggaaccaaggttgcccttttcaatagactacgttcacagaccgtctcaacacgctacctgcacgttgaaggcggaaacttccatgcaagcagccagcagtggggtgccttcttcatccaccttctcgatgatgacgagagtgagggcgaggagtttaccgtgcgcgacggctacattcattatgggcagaccgtcaagctggtgtgctccgtgaccgggatggctttgccgcgactcatcatacgaaaggttgataagcagacagctctcttggacgccgatgaccccgtctcacagctgcataagtgtgcattctacctcaaggacactgaacgaatgtatctgtgtttgtcccaggaaaggatcattcagtttcaagctacaccgtgccctaaggaacctaataaagagatgatcaatgatggtgctagctggacaattatatcaactgacaaagcggagtacactttttatgaagggatggggcctgtcctggcccccgtgaccccagtgcccgttgtggagagcctccagctgaacggtggcggagacgttgcaatgctcgagctgacaggccagaacttcactccaaacctgcgcgtgtggttcggcgatgtggaggctgaaaccatgtatcgctgcggtgagagtatgttgtgtgtggtacctgacatcagcgccttcagagaggggtggaggtgggtgcgccagcctgttcaagtgcccgtcacactggtgaggaacgatggaatcatttatagtaccagtttgacattcacatacacacctgagcctggcccaagaccacactgcagcgccgctggcgccatccttcgggcaaacagcagccaggtgcctcctaacgagtccaatactaactcagaagggtcatacacaaatgcctctaccaattctacaagtgtgacttctagcactgccactgtggtgagctag

SEQ ID NO: 262754 - DNA, 87 bp, Artificial Sequence
  derived and/or modified sequence
atggcgtggattaagaggaagttcggcgagcggccacccccaaagagactgacgcgtgaagctatgagaaactatctgaaagagtag

SEQ ID NO: 262755 - DNA, 294 bp, Artificial Sequence
  derived and/or modified sequence
atggcttggattaaacgcaaattcggagaaagacccccacccaagaggctgactagggaagctatgagaaactatctgaaagaacgtggagaccagaccgtcctgatcttgcatgcaaaagtcgctcaaaagagctacggaaacgagaagcgattcttctgtccacccccctgcgtgtacttgatgggatctggatggaaaaagaaaaaggaacagatggagcgggacggctgctcagagcaagagagtcagccttgcgctttcatcggcattggaaactctgaccaggaatag

SEQ ID NO: 262756 - DNA, 1398 bp, Artificial Sequence
  derived and/or modified sequence
atgcgaaactatctgaaggaaagaggcgaccaaaccgtgctaatacttcatgcaaaggtggctcagaagagctacggtaacgaaaaaaggttcttttgtcctccaccatgcgtgtacctgatggggtccggatggaagaagaagaaggaacaaatggagcgagacggctgctccgagcaggaatctcagccttgcgcatttataggcatcggaaattctgatcaggagatgcagcagcttaatctggagggcaaaaactactgtactgcaaagacattatacatttccgatagcgacaagagaaaacatttcatgctgtcagtcaaaatgttctatggaaattccgacgacatcggagtctttctaagtaagagaattaaagtgatcagcaaaccttctaaaaagaaacagtctctgaagaatgccgacttatgcatcgcttcaggcactaaagtcgcactgtttaaccgactgaggagtcaaacagtctccactcggtatcttcatgtggagggaggcaattttcatgccagttcacagcagtggggagccttctttatccatctgctggacgatgacgaaagcgagggtgaagagtttacagttagagatggatacatccactatggtcagaccgtgaaactggtatgctcggtcaccggcatggcacttcctaggttgatcattcgaaaagtcgataagcagaccgccctcctggatgcagatgacccagtgtctcagctccataagtgcgctttctatctgaaagacacagagcgtatgtatctgtgtctctcccaggagcgcattatccagttccaggcaacgccctgtcctaaagaaccaaacaaggagatgatcaatgatggagcaagctggaccatcatcagcactgacaaggccgaatacacattttacgagggaatggggccagtgctcgctccagtgacacccgtgcccgtggttgaatcgttgcagctcaatggcggaggtgacgttgcgatgctggagctgaccggccagaacttcacaccaaatctgcgcgtatggttcggggacgtggaagcggagaccatgtacaggtgcggagagagcatgctgtgcgtggtgccagatataagtgcatttagggaaggttggaggtgggtacggcaaccggtccaggttcccgtgaccttggttcggaacgacggaatcatctactctacgtctttgaccttcacttacacaccggaaccgggcccacgcccgcactgctccgcagcaggggccatcctgagagctaatagttctcaagttcctcccaacgagtctaacacaaattctgaaggttcctataccaatgctagtaccaatagtactagcgttacatcatccactgcgacagtggtgagctag

SEQ ID NO: 262757 - DNA, 150 bp, Artificial Sequence
  derived and/or modified sequence
atggcctggatcaagcgcaaatttggggagcgtcccccacccaagcgactcacaagggaggcaatgcggaattatctgaaagagaggggcgatcagacagtactgatcctgcacgccaaagtggcgcagaagtcctatggaaatgagtag

SEQ ID NO: 262758 - DNA, 324 bp, Artificial Sequence
  derived and/or modified sequence
atggcttggatcaagcgtaagtttggggagaggcctcctccaaagaggctgactagagaggctatgcgcaactatttgaaagaacggggagaccagacggtcttgatactgcatgccaaggttgcccagaaatcctacggtaacgagaagcgctttttttgcccaccaccttgcgtgtatttgatgggctctgggtggaaaaagaagaaggagcaaatggagcgggacggctgtagtgaacaggaatcccaaccttgtgcttttatagggatcggcaactcagatcaggagatgcaacagctcaacctcgagggcaaaaattag

SEQ ID NO: 262759 - DNA, 285 bp, Artificial Sequence
  derived and/or modified sequence
atggcatggattaagcgaaagttcggtgagcgcccgccacctaaaagactcaccagggaggcgatgcggaactacctgaaggaacgcggcgatcagaccgtattaatcctgcatgccaaggtggcccagaagagctacggcaacgaaaagcgctttttttgccctcctccatgcgtgtacctgatgggcagtggatggaaaaagaagaaagagcagatggagcgggacgggtgctccgaacaggagagccaaccttgtgcctttataggcatcggaaacagctag

SEQ ID NO: 262760 - DNA, 333 bp, Artificial Sequence
  derived and/or modified sequence
atggcttggataaaaaggaagtttggagagcggcctccccccaaacggcttactagagaggctatgcgcaattacctgaaggaaaggggagaccaaactgtgttaatcctgcatgccaaagtcgctcagaagtcatatggaaacgaaaaacgatttttctgccccccaccctgcgtctacctgatgggcagcggatggaagaagaaaaaggagcagatggagcgggatgggtgctctgagcaggaaagccagccatgtgccttcattggcataggcaacagtgatcaagaaatgcagcagttgaatctggagggaaaaaattattgcacatag

SEQ ID NO: 262761 - DNA, 342 bp, Artificial Sequence
  derived and/or modified sequence
atggcttggatcaagagaaagttcggcgaacgtccccctcctaaacggctgactcgcgaagccatgcgcaattatctcaaggagaggggtgaccagacggtgctgatcttacacgcgaaagtggctcagaagagttacggcaacgaaaaaaggttcttttgcccccctccctgcgtataccttatgggctctggctggaaaaagaaaaaagaacagatggagagggacggctgctctgaacaggaatcccagccctgtgcgtttattggcatcggcaattcagatcaggagatgcaacagctgaacttggagggcaaaaattactgcacagccaagacgtag

SEQ ID NO: 262762 - DNA, 147 bp, Artificial Sequence
  derived and/or modified sequence
atggcttggataaagcgaaagttcggcgagaggcctcccccaaaaaggctgaccagggaagcaatgagaaactacctgaaggagaggggagaccaaacggtgctgattttacacgccaaagtggcccagaagagctacggaaactag

SEQ ID NO: 262763 - DNA, 1461 bp, Artificial Sequence
  derived and/or modified sequence
atggcctggatcaagaggaagtttggagagcggcccccacccaagaggctgacccgggaggccatgaggaactacctgaaggagcggggggaccagacagtgctgatcctgcacgccaaggtggcccagaagagctatggaaatgagaagcgcttcttctgccccccaccctgtgtgtacctgatgggcagcggctggaagaagaagaaggagcagatggagagagatggctgcagcgagcaggagagccagccctgtgccttcatcggcatcggcaacagcgaccaggagatgcagcagctgaacctggagggcaagaactactgcacagccaagaccctgtacatcagtgacagcgacaagaggaagcacttcatgctgtctgtgaagatgttttatggcaacagtgatgacattggagtcttcctgagcaagaggatcaaggtgatcagcaagcccagcaagaagaagcagagcctgaagaatgctgacctgtgcatcgccagcggcaccaaggtggccctcttcaaccggctgcggagccagacagtgtccacccgctacctgcacgtggagggcggcaacttccacgccagcagccagcagtggggcgccttcttcatccacctgctggatgatgatgagagcgagggggaggagttcaccgtgagagatggctacatccactacggccagacagtgaagctggtgtgcagcgtgacaggcatggccctgcccaggctcatcatcaggaaggtggacaagcagacagccctgctggatgctgatgatcctgtgtcccagctgcacaagtgtgccttctacctgaaggacacagagaggatgtacctgtgcctgagccaggagcgcatcatccagttccaggccaccccctgccccaaggagcccaacaaggagatgatcaatgatggagcctcctggaccatcatcagcacagacaaggccgagtacaccttctatgagggcatgggccctgtgctggcccctgtgacccctgtgcctgtggtggagagcctgcagctgaatggaggaggagatgtggccatgctggagctgaccggccagaacttcacccccaacctgcgggtgtggtttggagatgtggaggccgagaccatgtaccgctgtggggagagcatgctgtgtgtggtgcctgacatcagcgccttccgggagggctggcgctgggtgcggcagcctgtgcaggtgcctgtgaccctggtgagaaatgatggcatcatctacagcaccagcctgaccttcacctacaccccagagcccggcccccggccccactgcagcgctgctggggccatcctgcgggccaacagcagccaggtgcccccaaatgaaagcaacaccaacagcgagggcagctacaccaatgccagcaccaacagcacctctgtgaccagcagcacagccaccgtggtgtcctag

SEQ ID NO: 262764 - DNA, 87 bp, Artificial Sequence
  derived and/or modified sequence
atggcctggatcaagaggaagtttggagagcggcccccacccaagaggctgacccgggaggccatgaggaactacctgaaggagtag

SEQ ID NO: 262765 - DNA, 294 bp, Artificial Sequence
  derived and/or modified sequence
atggcctggatcaagaggaagtttggagagcggcccccacccaagaggctgacccgggaggccatgaggaactacctgaaggagcggggggaccagacagtgctgatcctgcacgccaaggtggcccagaagagctatggaaatgagaagcgcttcttctgccccccaccctgtgtgtacctgatgggcagcggctggaagaagaagaaggagcagatggagagagatggctgcagcgagcaggagagccagccctgtgccttcatcggcatcggcaacagcgaccaggagtag

SEQ ID NO: 262766 - DNA, 1398 bp, Artificial Sequence
  derived and/or modified sequence
atgaggaactacctgaaggagcggggggaccagacagtgctgatcctgcacgccaaggtggcccagaagagctatggaaatgagaagcgcttcttctgccccccaccctgtgtgtacctgatgggcagcggctggaagaagaagaaggagcagatggagagagatggctgcagcgagcaggagagccagccctgtgccttcatcggcatcggcaacagcgaccaggagatgcagcagctgaacctggagggcaagaactactgcacagccaagaccctgtacatcagtgacagcgacaagaggaagcacttcatgctgtctgtgaagatgttctacggcaacagtgatgacatcggggtcttcctgagcaagaggatcaaggtgatcagcaagcccagcaagaagaagcagagcctgaagaatgctgacctgtgcatcgccagcggcaccaaggtggccctcttcaaccggctgcggagccagacagtgtccacccgctacctgcacgtggagggcggcaacttccacgccagcagccagcagtggggcgccttcttcatccacctgctggatgatgatgaaagtgaaggagaggagttcaccgtgagagatggctacatccactacggccagacagtgaagctggtgtgcagcgtgacaggcatggccctgcccaggctcatcatcaggaaggtggacaagcagacagccctgctggatgctgatgatcctgtgtcccagctgcacaagtgtgccttctacctgaaggacacagagaggatgtacctgtgcctgagccaggagcgcatcatccagttccaggccaccccctgccccaaggagcccaacaaggagatgatcaatgatggagcctcctggaccatcatcagcacagacaaggccgagtacaccttctatgagggcatgggccctgtgctggcccctgtgacccctgtgcctgtggtggagagcctgcagctgaatggaggaggagatgtggccatgctggagctgaccggccagaacttcacccccaacctgcgggtgtggtttggagatgtggaggccgagaccatgtaccgctgtggggagagcatgctgtgtgtggtgcctgacatcagcgccttccgggagggctggcgctgggtgcggcagcctgtgcaggtgcctgtgaccctggtgagaaatgatggcatcatctacagcaccagcctgaccttcacctacaccccagagcccggcccccggccccactgcagcgctgctggggccatcctgcgggccaacagcagccaggtgcccccaaatgaaagcaacaccaacagcgagggcagctacaccaatgccagcaccaacagcacctctgtgaccagcagcacagccaccgtggtgtcctag

SEQ ID NO: 262767 - DNA, 150 bp, Artificial Sequence
  derived and/or modified sequence
atggcctggatcaagaggaagtttggagagcggcccccacccaagaggctgacccgggaggccatgaggaactacctgaaggagcggggggaccagacagtgctgatcctgcacgccaaggtggcccagaagagctatggaaatgaatag

SEQ ID NO: 262768 - DNA, 324 bp, Artificial Sequence
  derived and/or modified sequence
atggcctggatcaagaggaagtttggagagcggcccccacccaagaggctgacccgggaggccatgaggaactacctgaaggagcggggggaccagacagtgctgatcctgcacgccaaggtggcccagaagagctatggaaatgagaagcgcttcttctgccccccaccctgtgtgtacctgatgggcagcggctggaagaagaagaaggagcagatggagagagatggctgcagcgagcaggagagccagccctgtgccttcatcggcatcggcaacagcgaccaggagatgcagcagctgaacctggagggcaagaactag

SEQ ID NO: 262769 - DNA, 285 bp, Artificial Sequence
  derived and/or modified sequence
atggcctggatcaagaggaagtttggagagcggcccccacccaagaggctgacccgggaggccatgaggaactacctgaaggagcggggggaccagacagtgctgatcctgcacgccaaggtggcccagaagagctatggaaatgagaagcgcttcttctgccccccaccctgtgtgtacctgatgggcagcggctggaagaagaagaaggagcagatggagagagatggctgcagcgagcaggagagccagccctgtgccttcatcggcatcggcaacagctag

SEQ ID NO: 262770 - DNA, 333 bp, Artificial Sequence
  derived and/or modified sequence
atggcctggatcaagaggaagtttggagagcggcccccacccaagaggctgacccgggaggccatgaggaactacctgaaggagcggggggaccagacagtgctgatcctgcacgccaaggtggcccagaagagctatggaaatgagaagcgcttcttctgccccccaccctgtgtgtacctgatgggcagcggctggaagaagaagaaggagcagatggagagagatggctgcagcgagcaggagagccagccctgtgccttcatcggcatcggcaacagcgaccaggagatgcagcagctgaacctggagggcaagaactactgcacctag

SEQ ID NO: 262771 - DNA, 342 bp, Artificial Sequence
  derived and/or modified sequence
atggcctggatcaagaggaagtttggagagcggcccccacccaagaggctgacccgggaggccatgaggaactacctgaaggagcggggggaccagacagtgctgatcctgcacgccaaggtggcccagaagagctatggaaatgagaagcgcttcttctgccccccaccctgtgtgtacctgatgggcagcggctggaagaagaagaaggagcagatggagagagatggctgcagcgagcaggagagccagccctgtgccttcatcggcatcggcaacagcgaccaggagatgcagcagctgaacctggagggcaagaactactgcacagccaagacctag

SEQ ID NO: 262772 - DNA, 147 bp, Artificial Sequence
  derived and/or modified sequence
atggcctggatcaagaggaagtttggagagcggcccccacccaagaggctgacccgggaggccatgaggaactacctgaaggagcggggggaccagacagtgctgatcctgcacgccaaggtggcccagaagagctatggcaactag

SEQ ID NO: 262773 - DNA, 1461 bp, Artificial Sequence
  derived and/or modified sequence
atggcctggatcaagcggaagttcggcgagcggcccccccccaagcgactcacccgagaagctatgcgtaactacctgaaggaaaggggcgatcagaccgttctcatcctccacgccaaagtcgcccaaaaatcttacggaaatgagaagcgcttcttttgccctcccccctgtgtgtatctgatgggcagtggatggaaaaaaaagaaggaacagatggagcgagacggctgctcagagcaggagtctcagccctgtgcgttcatcggaatcgggaactctgaccaagagatgcaacagctgaatttagagggcaagaattattgcacagccaagaccctttatatctctgactcggataaacgcaaacactttatgttgtccgtcaagatgttctacggcaattctgacgacattggcgtgttcctcagtaagcggataaaggttatcagtaaacccagtaagaagaaacaatccctgaaaaacgccgacctttgcatcgcgagcggtacaaaagtagcgctcttcaaccgccttagaagtcagacggtctctacgcgctatctgcacgtagaaggaggaaacttccacgcgagctcacaacagtggggagccttcttcatacatctactggatgatgatgaatcagagggcgaagaatttacagtccgggacggatatattcactacggccaaaccgttaagcttgtctgcagtgttactggtatggcacttccacggcttataatcaggaaagttgacaaacagaccgctttgctggatgcggacgatccggtgagccagttgcataagtgcgcattctacctgaaagatactgaacgaatgtacctgtgtttgtctcaggaacggatcattcagttccaggctacaccatgtccaaaggaacctaacaaggaaatgattaatgacggagcctcatggacgattatttctactgacaaggctgaatataccttctacgagggcatggggccggtgctagccccagtcacgcccgtgccagtggtcgagtcgcttcaacttaatgggggaggcgatgtggcaatgctggagcttaccggtcagaattttacaccaaacctgcgggtctggttcggcgacgtggaagctgagactatgtatcgctgcggtgagagcatgctctgcgtggtgcccgacatctccgcattccgcgaaggttggcgatgggtgagacaaccagtacaagtgcctgtgacccttgtcaggaatgacggcattatctactccacctcccttacctttacatatacccctgaaccgggtccaagaccgcactgtagtgccgcaggcgcaattcttcgtgcaaactcctctcaggtgccccccaatgagtcgaacaccaattctgaaggtagttataccaacgccagtactaattctaccagcgtcacgagtagcacggcaacggttgtgagctag

SEQ ID NO: 262774 - DNA, 1461 bp, Artificial Sequence
  derived and/or modified sequence
atggcctggatcaagcggaagttcggcgagcggcccccccccaagcgcctgacgcgcgaagccatgcggaactatcttaaggaaagaggcgaccaaactgtgttgatacttcatgctaaggttgcacagaagtcatacggcaacgagaaaagatttttttgcccaccaccctgcgtttacctgatgggctccggatggaagaagaagaaggaacaaatggagcgcgacggctgttcagagcaagagtcccagccatgtgcgttcatcggaatcgggaattccgatcaagagatgcagcagcttaatctagaaggcaagaactactgtacagccaagaccctatacatttcggactcagataagagaaagcatttcatgctctcagtcaaaatgttctacggaaactctgatgacatcggtgtttttctcagtaaaaggattaaagtcatcagcaaaccaagcaagaagaagcagtcactcaagaacgccgatctttgcattgctagcgggacaaaagtcgcactcttcaaccgtttaaggtcacaaactgtcagcacacggtacctacacgttgagggaggaaatttccacgctagctcacagcagtggggggccttttttatccacctgcttgacgacgacgagagcgagggtgaggaattcacagtgcgcgatggatacatacactacggccagacggtcaagttagtgtgctctgtgacaggaatggcactacctcgcctcattatccgcaaagttgataagcagacggcgctgttggatgccgacgatcccgtgagccagctccataagtgcgcgttttatctgaaggatactgagagaatgtacctctgcctgagccaggagaggataattcagttccaagccacaccatgtccaaaggagcctaataaggagatgattaatgacggagcttcctggaccattatcagtaccgataaagccgagtacaccttctacgagggcatggggcccgtcctggcgccagttacaccagtcccagttgtagaaagtcttcagctcaacgggggcggcgatgtcgccatgttggagctgacggggcagaacttcacgcccaatctacgggtctggttcggcgatgtcgaggcagaaacaatgtataggtgtggtgaatcaatgctgtgtgtggtccccgatataagcgccttccgagaaggatggcggtgggtgaggcaaccagtgcaggttccagtgactttggttaggaatgacggcataatctattctacttcattaacctttacgtacacccccgaacccggaccaagaccacactgctctgcagccggcgcgattcttagagctaatagcagccaggtcccaccaaatgaatccaacaccaactctgagggcagttatacaaatgcttctacaaattcgacctccgtcacctccagcacagctacggtcgtctcgtag

SEQ ID NO: 262775 - DNA, 87 bp, Artificial Sequence
  derived and/or modified sequence
atggcctggatcaagcggaagttcggcgagcggcccccccccaagcggcttacccgtgaagcaatgcggaactacctaaaggaatag

SEQ ID NO: 262776 - DNA, 294 bp, Artificial Sequence
  derived and/or modified sequence
atggcctggatcaagcggaagttcggcgagcggcccccccccaagcgcctgactcgagaggctatgaggaattaccttaaagagaggggcgatcagactgtgctgatcctgcatgctaaggtggcccagaagtcctatggtaacgagaagaggttcttttgtcctcccccctgcgtttacttaatgggaagcgggtggaagaagaaaaaggagcaaatggagagagacggctgctccgagcaggagagccaaccttgcgccttcatcggcatcggcaacagtgaccaggagtag

SEQ ID NO: 262777 - DNA, 1398 bp, Artificial Sequence
  derived and/or modified sequence
atgcggaactacctgaaggagcggggcgaccagaccgtgctgatcctacatgctaaggtggcccaaaagagttacgggaacgaaaaacgatttttttgcccacccccgtgcgtgtatctgatgggaagcggttggaaaaagaagaaagaacaaatggaaagagatggatgctcagagcaggagtcccagccttgcgctttcattggcattggaaacagcgatcaggaaatgcagcagttgaaccttgagggtaaaaattactgtacagctaaaaccctgtatatatcagactccgacaagcggaagcacttcatgctgtccgtgaaaatgttctatggcaactccgatgacatcggtgtctttctctccaagagaattaaagtgatttctaagccctcaaagaaaaaacagagtctcaaaaacgcagatctgtgtatcgcctcaggaacaaaagtagcactgttcaataggctccgaagccagaccgtgagtaccaggtatcttcacgtggagggaggcaactttcacgcctcaagtcagcagtggggggccttctttattcatcttttggatgacgatgaaagcgaaggcgaagagttcacagtgcgtgatggctatatccactacggccagaccgttaagctggtatgcagcgtaacaggaatggccctgccccgccttataatacggaaggtggataagcagactgctctattggatgccgacgaccccgtgagccagttgcacaagtgtgcattctacctgaaagacacagaacgcatgtacttatgtctgtctcaggaaaggatcatccagtttcaggcaacaccctgccccaaggagcctaataaggagatgatcaatgatggagcgagctggacgattataagtactgacaaggccgaatatactttctatgaaggtatggggccagtgctcgcgcccgtcaccccagtgccggtggttgaatccctccagctgaatggaggcggcgatgtggccatgttagagctgacaggccaaaactttacccctaatctgagagtttggtttggagacgttgaggccgagactatgtatcggtgcggagagtccatgttgtgtgtcgtgccagatatctccgccttccgcgagggatggagatgggtcagacagcctgttcaggttccggtgacccttgtacggaacgacgggatcatttactccacttctctgacgtttacttacacccccgaaccaggacccaggccccattgttctgcggctggggctatcctgagagcgaactcatcccaggtgcccccgaacgagtcaaatactaattctgagggcagctacactaacgccagcaccaactcaacctccgtcacttcgtcaactgctacggtcgtgtcatag

SEQ ID NO: 262778 - DNA, 150 bp, Artificial Sequence
  derived and/or modified sequence
atggcctggatcaagcggaagttcggcgagcggcccccccccaagcgcctgaccagagaggccatgagaaactatctgaaagagagaggagaccagactgtgctgattctacacgccaaggtggcacagaaaagctacggaaatgagtag

SEQ ID NO: 262779 - DNA, 324 bp, Artificial Sequence
  derived and/or modified sequence
atggcctggatcaagcggaagttcggcgagcggcccccccccaagagattgactagagaagctatgaggaattacctgaaggaacggggcgaccagaccgtgctgattctgcacgccaaggttgcccagaagagctatgggaacgagaaaaggttcttttgccctcccccctgtgtgtatttgatgggctctggctggaaaaaaaaaaaagagcagatggaaagggatggatgctctgagcaggaatcccaaccatgcgccttcattggcatcggcaacagtgatcaggaaatgcagcagctcaatttagagggcaaaaattag

SEQ ID NO: 262780 - DNA, 285 bp, Artificial Sequence
  derived and/or modified sequence
atggcctggatcaagcggaagttcggcgagcggcccccccccaagcgcttgacccgggaggctatgaggaattatctaaaggaacgaggcgaccagacggtgctaattttgcacgcaaaggtggctcagaagagctatgggaatgaaaaaaggtttttttgcccacctccttgcgtctatcttatgggaagtgggtggaagaagaagaaggagcagatggagagggacggttgttcagaacaggagtctcagccatgcgcatttattggcatcggtaacagctag

SEQ ID NO: 262781 - DNA, 333 bp, Artificial Sequence
  derived and/or modified sequence
atggcctggatcaagcggaagttcggcgagcggcccccccccaagcggcttacacgcgaggctatgaggaactatttgaaagagcgcggggatcaaaccgttctgatattacatgcaaaagtggcccagaagtcctacggtaacgaaaagcggttcttctgccctcctccatgcgtctatctcatgggctcagggtggaagaagaagaaggagcagatggagagagacggctgctctgagcaggagtctcagccctgtgcctttatcggcatcggaaattcagatcaggaaatgcagcagctgaacctggaaggcaagaactactgtacctag

SEQ ID NO: 262782 - DNA, 342 bp, Artificial Sequence
  derived and/or modified sequence
atggcctggatcaagcggaagttcggcgagcggcccccccccaagcggctcacaagagaggctatgcgcaattacctcaaagaaagaggggatcagacagtgctcatcctgcacgccaaagtcgcccagaaaagttatggtaacgaaaaaaggtttttttgtcctcccccatgtgtctacctgatggggtcaggctggaaaaaaaagaaggagcagatggagcgtgatgggtgctctgagcaggagtcccagccatgtgccttcatagggatcgggaattcagaccaggaaatgcagcagctgaacctggaggggaaaaactattgcaccgctaaaacctag

SEQ ID NO: 262783 - DNA, 147 bp, Artificial Sequence
  derived and/or modified sequence
atggcctggatcaagcggaagttcggcgagcggcccccccccaagcggctcacacgcgaggccatgcggaattacctcaaagagcgtggtgatcagaccgttctgatcctccacgccaaggtcgcccagaagagctatggaaactag

SEQ ID NO: 262784 - DNA, 1461 bp, Artificial Sequence
  derived and/or modified sequence
atggcctggatcaagagaaaattcggtgaacgacccccaccaaagcggctaacgcgggaagcaatgagaaactacttgaaggagcgtggtgaccagaccgttctcattttgcatgcgaaagtcgcccaaaagtcgtatggaaatgagaaaaggtttttctgcccaccaccctgtgtttacttaatgggatcaggttggaaaaagaagaaggagcagatggaacgagacggctgctccgagcaggaatcacagccctgtgccttcattggcattgggaactcagaccaagaaatgcagcagttgaacctcgaggggaagaactactgtacagccaaaactctgtacatctctgattccgataagagaaagcactttatgctgtctgttaaaatgttctatggcaactccgacgacatcggggtgtttctgagtaaaaggatcaaggtaatcagtaaaccttcaaagaaaaagcaaagtttaaaaaatgctgacctgtgcatagcctccggcaccaaggtggcactgttcaacaggctaagatcgcagaccgtgagcacacggtacttacatgtggaaggcggtaatttccatgcgtcgtcgcagcaatggggagccttctttatacatctgctggacgacgacgagtctgaaggtgaggagttcaccgtgagagacggatacattcactacggccaaaccgtgaagctggtgtgcagtgtgactggcatggcattgcccaggctcattatacgaaaggtggataaacagactgccctgctcgacgccgatgatccagtgagccagctccacaagtgtgccttttacctaaaagacacagagagaatgtacctgtgtctatcccaggagcgaattatccagtttcaggcaacgccatgcccaaaggagccaaataaagaaatgataaacgacggagctagctggaccatcatctcgacagataaggccgagtatactttttatgaaggcatgggaccggttcttgccccagtcacacctgttcccgtcgttgaatccctgcagttaaacggcggtggcgatgtcgccatgctggagctgacagggcagaactttaccccaaatctcagagtctggttcggagacgtggaagcagaaaccatgtaccggtgcggtgaaagtatgctgtgcgtagtgcccgatatcagtgcattccgcgagggatggcgctgggtccgccagccagtgcaggtgccagttactttagtaagaaacgatggaattatctattccactagcttaacattcacctatactcctgaacccggtccccgtccacattgcagcgccgcaggcgcaattctcagggccaacagctcacaggtccccccaaacgaaagtaacacaaattcagaaggatcctataccaatgcaagtaccaactcaacatcggtgacctcctctaccgccacagtagtcagttag

SEQ ID NO: 262785 - DNA, 1461 bp, Artificial Sequence
  derived and/or modified sequence
atggcttggataaaacggaaatttggcgagcgaccccctccaaagagacttactagggaagcgatgcgtaactacttgaaggaacgcggtgaccagaccgttctgattctgcatgcaaaggtggcacagaaaagctacggcaatgaaaagcgcttcttctgtccacctccatgcgtataccttatgggaagtggatggaagaagaaaaaggaacagatggaacgagacggctgtagcgagcaagagtctcagccttgtgcatttatcggaatcggaaatagtgaccaagaaatgcagcaactcaacctggaggggaagaattactgcacagcaaaaaccctgtacatcagtgatagtgacaaacgcaagcacttcatgctgtcggtgaagatgttttatggaaacagtgacgacattggtgtcttcctgagcaaacgaatcaaggtcataagcaaaccaagcaagaaaaagcaaagcctgaaaaatgcagacctctgtattgcctctggaacaaaggtcgctttattcaaccggctaaggtcacaaacagtgtctactaggtacctgcatgtggaggggggaaacttccacgcctcaagccaacagtggggggcattctttatccacctactggatgacgatgagtctgagggtgaagagttcactgtccgagacgggtacatacattacggccaaacagttaaactggtgtgtagtgtgaccggcatggcactgccgagactgataattaggaaagtggacaagcagactgctctgttagacgctgatgatcccgtcagtcagctgcataaatgtgccttctaccttaaagatactgagaggatgtatctgtgcctttcacaggagaggattatacagtttcaagctaccccctgccccaaggaaccaaataaagaaatgatcaacgatggcgcttcttggactattatcagtacggataaagcggaatacaccttttacgaaggtatggggcctgttctcgccccagtcacacccgtccctgttgttgagagcctgcagctcaacggaggaggcgatgtcgctatgcttgagctcacaggacagaattttacccccaatctgcgcgtgtggtttggggacgtagaggcggagaccatgtacaggtgcggggagtccatgctctgcgtggtacctgatatcagcgcctttagagaaggctggagatgggttaggcagcccgtgcaagtgcctgttaccctggttcggaatgacggtatcatctactctacttcgctgactttcacctacacgccagagccaggccctaggcctcactgtagcgcggctggcgctatcttgagggcgaatagctcacaagtgccacctaacgagagcaacaccaatagtgaaggttcctatactaacgccagtaccaactccacctctgtgactagttccactgcaactgtggtctcttag

SEQ ID NO: 262786 - DNA, 87 bp, Artificial Sequence
  derived and/or modified sequence
atggcttggataaaacggaaattcggcgaacgcccaccacctaagcgcttaacgcgggaagccatgcgcaattaccttaaggaatag

SEQ ID NO: 262787 - DNA, 294 bp, Artificial Sequence
  derived and/or modified sequence
atggcgtggataaagcggaagtttggagagaggccaccaccaaagaggctaacccgggaggctatgaggaattacctgaaggagaggggggaccagacagtcctcatcctacacgcaaaagtcgcacaaaaatcctacgggaacgagaaacgattcttttgcccaccaccctgtgtgtacctgatggggtcgggttggaagaaaaaaaaggagcagatggagagagatgggtgctctgagcaggaatctcaaccctgtgccttcatcggcattgggaacagcgatcaagagtag

SEQ ID NO: 262788 - DNA, 1398 bp, Artificial Sequence
  derived and/or modified sequence
atgcgcaattatctgaaagagcgcggagatcagacagtcctgattctccatgctaaggtggctcagaagagctacgggaacgagaagaggttcttttgcccaccgccttgcgtgtatctgatgggctcgggatggaaaaagaagaaggaacagatggagagagacgggtgttcggagcaggaatcacaaccatgcgcgttcatagggatcggcaactcagaccaggagatgcagcagttgaacctcgagggaaaaaactattgcaccgcaaagactctgtacatctctgatagcgacaaacgcaagcattttatgttgtccgtcaagatgttttacggaaacagcgacgatatcggagtcttcttatccaagaggatcaaagtcatttctaagccatccaaaaaaaaacagtcactgaagaacgcagatctgtgtattgcttcggggactaaagtggccctcttcaacagacttagaagccagactgtttctacccgctaccttcatgtggaaggagggaatttccatgcctcgtctcagcaatggggagctttctttattcacttactagacgacgacgagagtgaaggagaagaatttaccgtgcgcgacggatatatccactatgggcaaaccgttaagctcgtgtgttcagtgacaggtatggctctccctagattgatcatcaggaaggtggataaacagacggccctcttagacgcggatgatcctgttagccagctccacaaatgcgccttctacttgaaggacacagagcgcatgtatctatgcctgtcacaggaacgaattatccagtttcaagctaccccttgccctaaggaaccaaataaagaaatgatcaacgacggagcatcatggaccattatttcgaccgataaagcggagtataccttttacgaaggcatgggccctgtgcttgcaccagtgacaccagttcctgttgttgaatccctgcagctcaacggcggaggagatgtggccatgctggagttgacaggccagaactttacaccaaacctgcgggtgtggtttggggacgtcgaggctgagaccatgtaccggtgcggcgagagtatgctctgcgttgttcccgatatctccgctttcagggagggctggaggtgggtccgccagccagtgcaagtcccggtgacgctggtacggaatgacggcatcatatatagcacaagtctcactttcacttacacacctgaaccagggcctagaccgcactgcagtgcagccggagctattctccgagccaattcttcacaagtccctccaaatgagtccaacaccaattcggagggcagctacaccaacgcttccaccaatagtacttccgtgacaagttctactgccaccgtggtttcttag

SEQ ID NO: 262789 - DNA, 150 bp, Artificial Sequence
  derived and/or modified sequence
atggcctggatcaagagaaaattcggcgagcgaccaccgcctaagagattaactagggaagccatgaggaattatttaaaggagcgcggtgatcagaccgttctgattcttcacgctaaggtggcccagaagtcatacggtaatgagtag

SEQ ID NO: 262790 - DNA, 324 bp, Artificial Sequence
  derived and/or modified sequence
atggcttggatcaaacggaagtttggagaaaggcctccgccaaagagactcacaagggaggctatgagaaattacctgaaagaacgaggagatcagacggttcttattctgcacgccaaagtggcgcagaaaagttacggaaatgaaaaacgatttttctgtcctccaccatgcgtgtacctgatggggtcaggatggaaaaagaagaaggagcagatggagagggacgggtgttcagagcaggaaagtcagccttgtgcctttattggaatcggtaatagtgatcaggagatgcagcaactgaacctggaaggcaaaaactag

SEQ ID NO: 262791 - DNA, 285 bp, Artificial Sequence
  derived and/or modified sequence
atggcttggatcaagagaaaatttggcgagaggccccctcctaaaagattgacgagggaagcgatgaggaattaccttaaggagagaggtgaccagacagtccttatcttgcatgccaaggttgctcagaaaagctatggcaatgaaaagagattcttttgccccccaccttgtgtgtacttgatgggtagcgggtggaagaagaagaaagaacagatggagcgagacggttgttccgagcaggaatcacagccctgcgctttcattggtatcggaaactcctag

SEQ ID NO: 262792 - DNA, 333 bp, Artificial Sequence
  derived and/or modified sequence
atggcctggatcaagaggaaattcggggaacgccctcctcccaagcgtctgacccgggaggcaatgcgcaactatcttaaagaacgtggtgatcagactgtgttaatcctgcacgcaaaggtggctcagaagtcgtacggaaacgagaaaaggttcttttgcccccctccttgcgtttatctgatgggcagtggatggaagaaaaaaaaggagcagatggagagagatgggtgttctgaacaggaatcacagccttgtgcctttataggcatcggaaattccgaccaagagatgcagcagcttaatctggagggtaagaattattgcacctag

SEQ ID NO: 262793 - DNA, 342 bp, Artificial Sequence
  derived and/or modified sequence
atggcctggattaaacgtaagttcggtgagagacccccaccaaagcggctcacacgggaggccatgcgcaactatctcaaggagcggggtgaccagacagtgctgattctgcacgcaaaggtcgcacagaaatcctacggcaatgaaaagaggttcttctgccccccaccttgcgtatacctgatgggctcaggttggaagaagaagaaagagcaaatggagcgtgacggatgttcggagcaggagagccaaccgtgtgcatttatagggatcgggaacagtgaccaggaaatgcagcagttgaacctggaaggaaaaaattactgtacggctaaaacctag

SEQ ID NO: 262794 - DNA, 147 bp, Artificial Sequence
  derived and/or modified sequence
atggcctggataaaacgaaagtttggagagagaccacccccaaaacgcctgacaagagaggccatgagaaactatcttaaggaacgtggcgaccagacagtgttaatcctgcatgcaaaggtggctcagaagtcctacggtaattag

SEQ ID NO: 262795 - DNA, 5549 bp, Artificial Sequence
  derived and/or modified sequence
tgtttttaagtcattgaaattatgagactatcattcaaatggaagcattatagttcttcggaaccattatgatctcaaaacgaaaggagaatgatacagatacactggctgaggtgttttgaggtgcatcgaagtgttccaagctgtgacttaccttaacatgttcttgaagtaccatggcgtggattaaaaggaaatttggtgagcggcctccacctaaacgacttactagggaagctatgcgaaattatttaaaagagcgaggggatcaaacagtacttattcttcatgcaaaagttgcacagaagtcatatggaaatgaaaaaaggtttttttgcccacctccttgtgtatatcttatgggcagtggatggaagaaaaaaaaagaacaaatggaacgcgatggttgttctgaacaagagtctcaaccgtgtgcatttattgggataggaaatagtgaccaagaaatgcagcagctaaacttggaaggaaagaactattgcacagccaaaacattgtatatatctgactcagacaagcgaaagcacttcatgttgtctgtaaagatgttctatggcaacagtgatgacattggtgtgttcctcagcaagcggataaaagtcatctccaaaccttccaaaaagaagcagtcattgaaaaatgctgacttatgcattgcctcaggaacaaaggtggctctgtttaatcgactacgatcccagacagttagtaccagatacttgcatgtagaaggaggtaattttcatgccagttcacagcagtggggagccttttttattcatctcttggatgatgatgaatcagaaggagaagaattcacagtccgagatggctacatccattatggacaaacagtcaaacttgtgtgctcagttactggcatggcactcccaagattgataattaggaaagttgataagcagaccgcattattggatgcagatgatcctgtgtcacaactccataaatgtgcattttaccttaaggatacagaaagaatgtatttgtgcctttctcaagaaagaataattcaatttcaggccactccatgtccaaaagaaccaaataaagagatgataaatgatggcgcttcctggacaatcattagcacagataaggcagagtatacattttatgagggaatgggccctgtccttgccccagtcactcctgtgcctgtggtagagagccttcagttgaatggcggtggggacgtagcaatgcttgaacttacaggacagaatttcactccaaatttacgagtgtggtttggggatgtagaagctgaaactatgtacaggtgtggagagagtatgctctgtgtcgtcccagacatttctgcattccgagaaggttggagatgggtccggcaaccagtccaggttccagtaactttggtccgaaatgatggaatcatttattccaccagccttacctttacctacacaccagaaccagggccgcggccacattgcagtgcagcaggagcaatccttcgagccaattcaagccaggtgccccctaacgaatcaaacacaaacagcgagggaagttacacaaacgccagcacaaattcaaccagtgtcacatcatctacagccacagtggtatcctaactaccgtctttttgctaggacttaaactgacttgagtgtggcaaaaagttaacaaaaaaggagaaaaaatgaacaatcgtttgtggtttcttgggaaaacttttcataccaggtgatactattcaaaaaccccgttgtctccctgcaagtgctgatttgaaatgcagaagccacagtaaaaaaaaaaaaaaaaaaaaaaaaaaagaaaaaaaaatcaaaatgtataaatattggaaatcaagtttttcagctgttttgttggttggttggttggtttttgtttggttttgtttaaatgggcaagaagtaaataatgtggctggaatacaagttgaacaaactagaagacacaaatctaacatagtttttatggaccaaggaacttgtatattgtataagctttagtaaaaggtacattttcaccatacctttttttatatcacggtattatagtacaccttgttaccaaataggttgttctcttccccacccacctttgagcttttgctctaaaatacattcaggttccaagcctgaccatccttgtttaatctatcatactcttccaggttttttttttttggtctaaggctggaacttttttcttttttttcagctgaagtcttatgacttttcatgagtcaaaattgtttggatttcagcaagtcaaatcttgcaaaggcctgcatattttttttaagattatatgaagtctgtgcaaaagctttaaaaaaatgcctctgccttgcctgcaatacatgcaatgtatgttaacttagtctctcttctcagacactgttggtagttatttctgtgttttcctttttttaaaaaaaaatatggacttattgtggttatctgagaggttctaacattcacatgcaatttggtgtggccatttagctattaatgagttaatggcgcagaacttgttgatatttgaagtgttctctccccttttcccatgacgtaaatacataggtgtgttccaggatttgttcaggtttttcccccctcctaatcttgtacataacttgtattatgtgtaagttaaacattttattttgaacttggaatgttcccagtgatttcattcagcagggtattttctgccttgttggcaagtgacaaaaaatatgggaagtatttgctaccagttggtagatggtgcccttaatggtagaatgaggaaaatgtccgcaaaagcatgttttattatctttacttttttggggggttggagggggtagcctagccagaacatcattgtaatcttaaaacataagatgcttttattagatgatcaactaaaatagctggaagacagtactttagaaacagatagttgtaagattataaaatgcaaatgtaacttatgttttcatttttttctctgccttttttgtttgtttgttttctcttttccagtactgagcatctccacaaatgtctcctaactcagaaaatgtttcttttcttttcagttgagatttggttgcattcagggttgtaggttggccttgcttgctaaccccgccggttttaccgtgctttcattcctgaactttgtttatgcctttgtttggtttcttcgaaattgcagcagactcattgggctacatttagtacaggaaccacgtgtgtaatgttatacaacacagtctagtaatacaatcatccctcttagagtaaaaactacctctagattgtggtaagcttttactgtcccataaaacaggagccacagtaccttatgaatgcaaaactgtaacttcctacagtgtttccctacagaacattgtctttctggtgtcctgggctgttttgaaaaagtttccattaatagactttttagaaattattattagtagcattttttttccagctttgctgtcttcatcactcactctatgctcagactatgccactgtaaatattcttcctaacatctttaaatcgccttttcctcagttttcaaggggaaggtcatttgtaaagcacgttaggtggttaaatcagttattgcggttttctcttactgcaagcctttttaatcacccccaggctgcattttattctatatcgccttttttcttcaaatctgctccaatcactcacttctctcttataagctaatcctgcctcacaccttaaatctgtttcagtgatcaagggcagaactcattgtggccttatctttctttgttgtaattgttcactgtctctttcttacagaccacttatttctgagtagtagttattcctctctatggagtcatggcaggaatcattacacagtgcttttgttcagagcatggacatgttcctagtgctgctttgctttaacggccacaagtttcctccacttcctaggtttggtatttagttaaggaatcatattaaattaaccaataacaaaagagatacttttgaagaacaaactattccttacccatttttgtagctcaaaaataatttttcaagttcatgaccttattaaaatgaacttgtgtttttttaacaaacatgtatgttttattttgatagtttctttccgtaagataattgaaatattatactgtaaacccttttcttttctttttttgaaaagtccaagaatgtacttatacaggcatttttccccacctatttttggccattctcataccacagactaaagagtgaaatgatttgtccattgtagcttattgtttatcagtagttcttttgtcagctgcttacattttttctttcatggttttgtgaatcattttcagtatgtaatttataggaaccttgtcctctggttatagtagactgtgtgccctcctccagtgatggcattattagacatgctggtcatttaccctcagaaagactctcttattagaatggtgagtgcttcagttatagtatgtttgaatttttaaaaaattctgttttagaaatgtatcttatgctctcatgactatgcagtttctaaacatacacatagaagctgagtctctgatccaatatgtttttatttgttccatttaatttatcacatagattgggaaggcaagctaaaagccttaaaaatgccctttatattttgagtgatttcagcgttgaacactagtatactatctaaatttgctgctcactttctttaaactgtggcaattaaaggcatgtttatacatgacttaatcgtgaaatgtttgtcactcttactgcacagacttatctgcaatcataactggttagtttttttgttttgttttgttttattgtttttaatgaaactggtaccatctgtgctttcacaaaaaacttccaatgccatttttgagaactaacctaactagtcatgctaaccagaaaatccactggggaggaggttccttttgaaacaaaatgctgttcagttagtaaccaagttactttgattgcaaaagcagctgtgtttctgataagtactgaacaaatgtgtgtaattttctgtgccagacttatgactttgttttcaagcactgtaatgtgggatggatggttagaaacaataatatattagggtttctgtttaaccctttcaggactgaactgtatctccttttgttaattttcccctgtgttgtgataaatgtttgccagcattcagtactgtgttggtccagatgtaggtttatatgctcatttttagcttatttcttgtaccttgcagcatgctctacgcattcagtccttaaggggtttattttacaaactgtgcgcctgtaaggtttattagcaataagatagaaaattgagcaagtttataccataattttgtagaaaaaaagaatctgctcagttccatatttcatccgtgaaaaacttgcaatacgagcagtttcaaggaataaataaaaaggaaatgtaaaccattgt

SEQ ID NO: 262796 - DNA, 2499 bp, Artificial Sequence
  derived and/or modified sequence
agggaaggcagcgagcaggatcccctactctgcgggcggcgcgaggcgtctggctcttcgcggcggcggcgaggggaaagggagcgcgggggctgggtggaatcgaggagtgaggaaaaagggaaggggcgggggagagggaccagggaaggcgtcggggggaatctcgcgagggttggagttttggcgagagtttgtggaagatggcgcctgttgtgacaggtcattgaaattatgagactatcattcaaatggaagcattatagttcttcggaaccattatgatctcaaaacgaaaggagaatgatacagatacactggctgaggtgttttgaggtgcatcgaagtgttccaagctgtgacttaccttaacatgttcttgaagtaccatggcgtggattaaaaggaaatttggtgagcggcctccacctaaacgacttactagggaagctatgcgaaattatttaaaagagcgaggggatcaaacagtacttattcttcatgcaaaagttgcacagaagtcatatggaaatgaaaaaaggtttttttgcccacctccttgtgtatatcttatgggcagtggatggaagaaaaaaaaagaacaaatggaacgcgatggttgttctgaacaagagtctcaaccgtgtgcatttattgggataggaaatagtgaccaagaaatgcagcagctaaacttggaaggaaagaactattgcacagccaaaacattgtatatatctgactcagacaagcgaaagcacttcatgttgtctgtaaagatgttctatggcaacagtgatgacattggtgtgttcctcagcaagcggataaaagtcatctccaaaccttccaaaaagaagcagtcattgaaaaatgctgacttatgcattgcctcaggaacaaaggtggctctgtttaatcgactacgatcccagacagttagtaccagatacttgcatgtagaaggaggtaattttcatgccagttcacagcagtggggagccttttttattcatctcttggatgatgatgaatcagaaggagaagaattcacagtccgagatggctacatccattatggacaaacagtcaaacttgtgtgctcagttactggcatggcactcccaagattgataattaggaaagttgataagcagaccgcattattggatgcagatgatcctgtgtcacaactccataaatgtgcattttaccttaaggatacagaaagaatgtatttgtgcctttctcaagaaagaataattcaatttcaggccactccatgtccaaaagaaccaaataaagagatgataaatgatggcgcttcctggacaatcattagcacagataaggcagagtatacattttatgagggaatgggccctgtccttgccccagtcactcctgtgcctgtggtagagagccttcagttgaatggcggtggggacgtagcaatgcttgaacttacaggacagaatttcactccaaatttacgagtgtggtttggggatgtagaagctgaaactatgtacaggtgtggagagagtatgctctgtgtcgtcccagacatttctgcattccgagaaggttggagatgggtccggcaaccagtccaggttccagtaactttggtccgaaatgatggaatcatttattccaccagccttacctttacctacacaccagaaccagggccgcggccacattgcagtgcagcaggagcaatccttcgagccaattcaagccaggtgccccctaacgaatcaaacacaaacagcgagggaagttacacaaacgccagcacaaattcaaccagtgtcacatcatctacagccacagtggtatcctaactaccgtctttttgctaggacttaaactgacttgagtgtggcaaaaagttaacaaaaaaggagaaaaaatgaacaatcgtttgtggtttcttgggaaaacttttcataccaggtgatactattcaaaaaccccgttgtctccctgcaagtgctgatttgaaatgcagaagccacagtaaaaaaaaaaaaaaaaaaaaaaaaaaagaaaaaaaaatcaaaatgtataaatattggaaatcaagtttttcagctgttttgttggttggttggttggtttttgtttggttttgtttaaatgggcaagaagtaaataatgtggctggaatacaagttgaacaaactagaagacacaaatctaacatagtttttatggaccaaggaacttgtatattgtataagctttagtaaaaggtacattttcaccatacctttttttatatcacggtattatagtacaccttgttaccaaataggttgttctcttccccacccacctttgagcttttgctctaaaatacattcaggttccaagcctgaccatccttgtttaatctatcatactcttccaggttttttttttttggtctaaggctggaacttttttcttttttttcagctgaagtcttatgacttttcatgagtcaaaatt

SEQ ID NO: 262797 - DNA, 758 bp, Artificial Sequence
  derived and/or modified sequence
gggggccccgtgcatctttgttcctcgcggccgttgtcgccgcttcgccccgctagtgcccccggccccgggcgctttgtctttcaccgctacccgctgcgactctctacccccggccctttgtttcgccgccttgggcgctttgtccgacccgtggcgtcccgcatcccctctccatctcctcccctccgctgtccttcctcccgtgcccctttgttgtgccacactcttgtcgttagcccagtgacctgccacagcccgggcaccagatttctgccttaattgttcttccattgtctttctcctgtgggtcccctctcacctttctgtatggtcctggatcaccccccgaggctttgtctcccccatccacgggcttattctctcggcacccccttcctctcccgtcatcggttgatttatccacaacccacggtgtacgtctgctgaactgtctcagccccggggactccatctgctgcttctaagtgcacacaagactctacgtcattgaaattatgagactatcattcaaatggaagcattatagttcttcggaaccattatgatctcaaaacgaaaggagaatgatacagatacactggctgaggtgttttgaggtgcatcgaagtgttccaagctgtgacttaccttaacatgttcttgaagtaccatggcgtggattaaaaggaaatttggtgagcggcctccacctaaacgacttactagggaagctatgcgaaattatttaaaagagc

SEQ ID NO: 262798 - DNA, 566 bp, Artificial Sequence
  derived and/or modified sequence
agtggaaggcggtgggaaggaggtgtagcgtgagactggactgcccgcattgggtacatgcgcagtgccgctcgcgcgggccgcgccaatcctgcagcgccttcaacagtcattgaaattatgagactatcattcaaatggaagcattatagttcttcggaaccattatgatctcaaaacgaaaggagaatgatacagatacactggctgaggtgttttgaggtgcatcgaagtgttccaagctgtgacttaccttaacatgttcttgaagtaccatggcgtggattaaaaggaaatttggtgagcggcctccacctaaacgacttactagggaagctatgcgaaattatttaaaagagcgaggggatcaaacagtacttattcttcatgcaaaagttgcacagaagtcatatggaaatgaaaaaaggtttttttgcccacctccttgtgtatatcttatgggcagtggatggaagaaaaaaaaagaacaaatggaacgcgatggttgttctgaacaagagtctcaaccgtgtgcatttattgggataggaaatagtgaccaagaa

SEQ ID NO: 262799 - DNA, 1689 bp, Artificial Sequence
  derived and/or modified sequence
agcccagtgacctgccacagcccgggcaccagatttctgccttaattgttcttccattgtctttctcctgaaatttggtgagcggcctccacctaaacgacttactagggaagctatgcgaaattatttaaaagagcgaggggatcaaacagtacttattcttcatgcaaaagttgcacagaagtcatatggaaatgaaaaaaggtttttttgcccacctccttgtgtatatcttatgggcagtggatggaagaaaaaaaaagaacaaatggaacgcgatggttgttctgaacaagagtctcaaccgtgtgcatttattgggataggaaatagtgaccaagaaatgcagcagctaaacttggaaggaaagaactattgcacagccaaaacattgtatatatctgactcagacaagcgaaagcacttcatgttgtctgtaaagatgttctatggcaacagtgatgacattggtgtgttcctcagcaagcggataaaagtcatctccaaaccttccaaaaagaagcagtcattgaaaaatgctgacttatgcattgcctcaggaacaaaggtggctctgtttaatcgactacgatcccagacagttagtaccagatacttgcatgtagaaggaggtaattttcatgccagttcacagcagtggggagccttttttattcatctcttggatgatgatgaatcagaaggagaagaattcacagtccgagatggctacatccattatggacaaacagtcaaacttgtgtgctcagttactggcatggcactcccaagattgataattaggaaagttgataagcagaccgcattattggatgcagatgatcctgtgtcacaactccataaatgtgcattttaccttaaggatacagaaagaatgtatttgtgcctttctcaagaaagaataattcaatttcaggccactccatgtccaaaagaaccaaataaagagatgataaatgatggcgcttcctggacaatcattagcacagataaggcagagtatacattttatgagggaatgggccctgtccttgccccagtcactcctgtgcctgtggtagagagccttcagttgaatggcggtggggacgtagcaatgcttgaacttacaggacagaatttcactccaaatttacgagtgtggtttggggatgtagaagctgaaactatgtacaggtgtggagagagtatgctctgtgtcgtcccagacatttctgcattccgagaaggttggagatgggtccggcaaccagtccaggttccagtaactttggtccgaaatgatggaatcatttattccaccagccttacctttacctacacaccagaaccagggccgcggccacattgcagtgcagcaggagcaatccttcgagccaattcaagccaggtgccccctaacgaatcaaacacaaacagcgagggaagttacacaaacgccagcacaaattcaaccagtgtcacatcatctacagccacagtggtatcctaactaccgtctttttgctaggacttaaactgacttgagtgtggcaaaaagttaacaaaaaaggagaaaaaatgaacaatcgtttgtggtttcttgggaaaacttttcataccaggtgatactattcaaaaaccccgttgtctccctgcaagtgctgatttgaaatgcagaagccacag

SEQ ID NO: 262800 - DNA, 555 bp, Artificial Sequence
  derived and/or modified sequence
atcgcctgggtaggtttccagggaaggcagcgagcaggatcccctactctgcgggcggcgcgaggcgtctggctcttcgcggcggcggcgaggggaaagggagcgcgggggctgggtggaatcgaggagtgaggaaaaagggaaggggcgggggagagggaccagggaaggcgtcggggggaatctcgcgagggttggagttttggcgagagtttgtggaagatggcgcctgttgtgacaggtcattgaaattatgagactatcattcaaatggaagcattatagttcttcggaaccattatgatctcaaaacgaaaggagaatgatacagatacactggctgaggtgttttgaggtgcatcgaagtgttccaagctgtgacttaccttaacatgttcttgaagtaccatggcgtggattaaaaggaaatttggtgagcggcctccacctaaacgacttactagggaagctatgcgaaattatttaaaagagcgaggggatcaaacagtacttattcttcatgcaaaagttgcacagaagtcatatggaaatgaa

SEQ ID NO: 262801 - DNA, 572 bp, Artificial Sequence
  derived and/or modified sequence
gagcgggccggggcgggcgtggcgtgggtgtgccaggagctccgcggttgccgcgaagcgagctggagctgaccctcggcgtccctcattgaaattatgagactatcattcaaatggaagcattatagttcttcggaaccattatgatctcaaaacgaaaggagaatgatacagatacactggctgaggtgttttgaggtgcatcgaagtgttccaagctgtgacttaccttaacatgttcttgaagtaccatggcgtggattaaaaggaaatttggtgagcggcctccacctaaacgacttactagggaagctatgcgaaattatttaaaagagcgaggggatcaaacagtacttattcttcatgcaaaagttgcacagaagtcatatggaaatgaaaaaaggtttttttgcccacctccttgtgtatatcttatgggcagtggatggaagaaaaaaaaagaacaaatggaacgcgatggttgttctgaacaagagtctcaaccgtgtgcatttattgggataggaaatagtgaccaagaaatgcagcagctaaacttggaaggaaagaac

SEQ ID NO: 262802 - DNA, 609 bp, Artificial Sequence
  derived and/or modified sequence
ttcattctgacatttttacttcctttgttgccaggcaaagtggccaccagattgggtggaaggggctctttctacggcatttcatgactgagcctccaagaacaacctgtattgagtttctctttgagatgattggactgctctatccagcatcattgagtcattgaaattatgagactatcattcaaatggaagcattatagttcttcggaaccattatgatctcaaaacgaaaggagaatgatacagatacactggctgaggtgttttgaggtgcatcgaagtgttccaagctgtgacttaccttaacatgttcttgaagtaccatggcgtggattaaaaggaaatttggtgagcggcctccacctaaacgacttactagggaagctatgcgaaattatttaaaagagcgaggggatcaaacagtacttattcttcatgcaaaagttgcacagaagtcatatggaaatgaaaaaaggtttttttgcccacctccttgtgtatatcttatgggcagtggatggaagaaaaaaaaagaacaaatggaacgcgatggttgttctgaacaagagtctcaaccgtgtgcatttattgggataggaaatagtg

SEQ ID NO: 262803 - DNA, 578 bp, Artificial Sequence
  derived and/or modified sequence
tatatttaccaggattactatgctgaaggtattcttcaagagtttgttttttttctactggttgatctctacttttagaagtcattgaaattatgagactatcattcaaatggaagcattatagttcttcggaaccattatgatctcaaaacgaaaggagaatgatacagatacactggctgaggtgttttgaggtgcatcgaagtgttccaagctgtgacttaccttaacatgttcttgaagtaccatggcgtggattaaaaggaaatttggtgagcggcctccacctaaacgacttactagggaagctatgcgaaattatttaaaagagcgaggggatcaaacagtacttattcttcatgcaaaagttgcacagaagtcatatggaaatgaaaaaaggtttttttgcccacctccttgtgtatatcttatgggcagtggatggaagaaaaaaaaagaacaaatggaacgcgatggttgttctgaacaagagtctcaaccgtgtgcatttattgggataggaaatagtgaccaagaaatgcagcagctaaacttggaaggaaagaactattgcacag

SEQ ID NO: 262804 - DNA, 569 bp, Artificial Sequence
  derived and/or modified sequence
gcaatctaggctgcctgaggatgattggagggtatcgtaggacggttagaaggaggctcaagattcattgaaattatgagactatcattcaaatggaagcattatagttcttcggaaccattatgatctcaaaacgaaaggagaatgatacagatacactggctgaggtgttttgaggtgcatcgaagtgttccaagctgtgacttaccttaacatgttcttgaagtaccatggcgtggattaaaaggaaatttggtgagcggcctccacctaaacgacttactagggaagctatgcgaaattatttaaaagagcgaggggatcaaacagtacttattcttcatgcaaaagttgcacagaagtcatatggaaatgaaaaaaggtttttttgcccacctccttgtgtatatcttatgggcagtggatggaagaaaaaaaaagaacaaatggaacgcgatggttgttctgaacaagagtctcaaccgtgtgcatttattgggataggaaatagtgaccaagaaatgcagcagctaaacttggaaggaaagaactattgcacagccaaaaca

SEQ ID NO: 262805 - DNA, 340 bp, Artificial Sequence
  derived and/or modified sequence
gagccgcctgcgcatgctccatcgcctggtcattgaaattatgagactatcattcaaatggaagcattatagttcttcggaaccattatgatctcaaaacgaaaggagaatgatacagatacactggctgaggtgttttgaggtgcatcgaagtgttccaagctgtgacttaccttaacatgttcttgaagtaccatggcgtggattaaaaggaaatttggtgagcggcctccacctaaacgacttactagggaagctatgcgaaattatttaaaagagcgaggggatcaaacagtacttattcttcatgcaaaagttgcacagaagtcatatggaaatg

SEQ ID NO: 262806 - DNA, 1461 bp, Artificial Sequence
  derived and/or modified sequence
atggcctggatcaagagaaagttcggcgagagacccccccccaagagactgaccagagaggccatgagaaactacctgaaggagagaggcgaccagaccgtgctgatcctgcacgccaaggtggcccagaagagctacggcaacgagaagagattcttctgcccccccccctgcgtgtacctgatgggcagcggctggaagaagaagaaggagcagatggagagagacggctgcagcgagcaggagagccagccctgcgccttcatcggcatcggcaacagcgaccaggagatgcagcagctgaacctggagggcaagaactactgcaccgccaagaccctgtacatcagcgacagcgacaagagaaagcacttcatgctgagcgtgaagatgttctacggcaacagcgacgacatcggcgtgttcctgagcaagagaatcaaggtgatcagcaagcccagcaagaagaagcagagcctgaagaacgccgacctgtgcatcgccagcggcaccaaggtggccctgttcaacagactgagaagccagaccgtgagcaccagatacctgcacgtggagggcggcaacttccacgccagcagccagcagtggggcgccttcttcatccacctgctggacgacgacgagagcgagggcgaggagttcaccgtgagagacggctacatccactacggccagaccgtgaagctggtgtgcagcgtgaccggcatggccctgcccagactgatcatcagaaaggtggacaagcagaccgccctgctggacgccgacgaccccgtgagccagctgcacaagtgcgccttctacctgaaggacaccgagagaatgtacctgtgcctgagccaggagagaatcatccagttccaggccaccccctgccccaaggagcccaacaaggagatgatcaacgacggcgccagctggaccatcatcagcaccgacaaggccgagtacaccttctacgagggcatgggccccgtgctggcccccgtgacccccgtgcccgtggtggagagcctgcagctgaacggcggcggcgacgtggccatgctggagctgaccggccagaacttcacccccaacctgagagtgtggttcggcgacgtggaggccgagaccatgtacagatgcggcgagagcatgctgtgcgtggtgcccgacatcagcgccttcagagagggctggagatgggtgagacagcccgtgcaggtgcccgtgaccctggtgagaaacgacggcatcatctacagcaccagcctgaccttcacctacacccccgagcccggccccagaccccactgcagcgccgccggcgccatcctgagagccaacagcagccaggtgccccccaacgagagcaacaccaacagcgagggcagctacaccaacgccagcaccaacagcaccagcgtgaccagcagcaccgccaccgtggtgagctag

SEQ ID NO: 262807 - DNA, 87 bp, Artificial Sequence
  derived and/or modified sequence
atggcctggatcaagagaaagttcggcgagagacccccccccaagagactgaccagagaggccatgagaaactacctgaaggagtag

SEQ ID NO: 262808 - DNA, 294 bp, Artificial Sequence
  derived and/or modified sequence
atggcctggatcaagagaaagttcggcgagagacccccccccaagagactgaccagagaggccatgagaaactacctgaaggagagaggcgaccagaccgtgctgatcctgcacgccaaggtggcccagaagagctacggcaacgagaagagattcttctgcccccccccctgcgtgtacctgatgggcagcggctggaagaagaagaaggagcagatggagagagacggctgcagcgagcaggagagccagccctgcgccttcatcggcatcggcaacagcgaccaggagtag

SEQ ID NO: 262809 - DNA, 1398 bp, Artificial Sequence
  derived and/or modified sequence
atgagaaactacctgaaggagagaggcgaccagaccgtgctgatcctgcacgccaaggtggcccagaagagctacggcaacgagaagagattcttctgcccccccccctgcgtgtacctgatgggcagcggctggaagaagaagaaggagcagatggagagagacggctgcagcgagcaggagagccagccctgcgccttcatcggcatcggcaacagcgaccaggagatgcagcagctgaacctggagggcaagaactactgcaccgccaagaccctgtacatcagcgacagcgacaagagaaagcacttcatgctgagcgtgaagatgttctacggcaacagcgacgacatcggcgtgttcctgagcaagagaatcaaggtgatcagcaagcccagcaagaagaagcagagcctgaagaacgccgacctgtgcatcgccagcggcaccaaggtggccctgttcaacagactgagaagccagaccgtgagcaccagatacctgcacgtggagggcggcaacttccacgccagcagccagcagtggggcgccttcttcatccacctgctggacgacgacgagagcgagggcgaggagttcaccgtgagagacggctacatccactacggccagaccgtgaagctggtgtgcagcgtgaccggcatggccctgcccagactgatcatcagaaaggtggacaagcagaccgccctgctggacgccgacgaccccgtgagccagctgcacaagtgcgccttctacctgaaggacaccgagagaatgtacctgtgcctgagccaggagagaatcatccagttccaggccaccccctgccccaaggagcccaacaaggagatgatcaacgacggcgccagctggaccatcatcagcaccgacaaggccgagtacaccttctacgagggcatgggccccgtgctggcccccgtgacccccgtgcccgtggtggagagcctgcagctgaacggcggcggcgacgtggccatgctggagctgaccggccagaacttcacccccaacctgagagtgtggttcggcgacgtggaggccgagaccatgtacagatgcggcgagagcatgctgtgcgtggtgcccgacatcagcgccttcagagagggctggagatgggtgagacagcccgtgcaggtgcccgtgaccctggtgagaaacgacggcatcatctacagcaccagcctgaccttcacctacacccccgagcccggccccagaccccactgcagcgccgccggcgccatcctgagagccaacagcagccaggtgccccccaacgagagcaacaccaacagcgagggcagctacaccaacgccagcaccaacagcaccagcgtgaccagcagcaccgccaccgtggtgagctag

SEQ ID NO: 262810 - DNA, 150 bp, Artificial Sequence
  derived and/or modified sequence
atggcctggatcaagagaaagttcggcgagagacccccccccaagagactgaccagagaggccatgagaaactacctgaaggagagaggcgaccagaccgtgctgatcctgcacgccaaggtggcccagaagagctacggcaacgagtag

SEQ ID NO: 262811 - DNA, 324 bp, Artificial Sequence
  derived and/or modified sequence
atggcctggatcaagagaaagttcggcgagagacccccccccaagagactgaccagagaggccatgagaaactacctgaaggagagaggcgaccagaccgtgctgatcctgcacgccaaggtggcccagaagagctacggcaacgagaagagattcttctgcccccccccctgcgtgtacctgatgggcagcggctggaagaagaagaaggagcagatggagagagacggctgcagcgagcaggagagccagccctgcgccttcatcggcatcggcaacagcgaccaggagatgcagcagctgaacctggagggcaagaactag

SEQ ID NO: 262812 - DNA, 285 bp, Artificial Sequence
  derived and/or modified sequence
atggcctggatcaagagaaagttcggcgagagacccccccccaagagactgaccagagaggccatgagaaactacctgaaggagagaggcgaccagaccgtgctgatcctgcacgccaaggtggcccagaagagctacggcaacgagaagagattcttctgcccccccccctgcgtgtacctgatgggcagcggctggaagaagaagaaggagcagatggagagagacggctgcagcgagcaggagagccagccctgcgccttcatcggcatcggcaacagctag

SEQ ID NO: 262813 - DNA, 333 bp, Artificial Sequence
  derived and/or modified sequence
atggcctggatcaagagaaagttcggcgagagacccccccccaagagactgaccagagaggccatgagaaactacctgaaggagagaggcgaccagaccgtgctgatcctgcacgccaaggtggcccagaagagctacggcaacgagaagagattcttctgcccccccccctgcgtgtacctgatgggcagcggctggaagaagaagaaggagcagatggagagagacggctgcagcgagcaggagagccagccctgcgccttcatcggcatcggcaacagcgaccaggagatgcagcagctgaacctggagggcaagaactactgcacctag

SEQ ID NO: 262814 - DNA, 342 bp, Artificial Sequence
  derived and/or modified sequence
atggcctggatcaagagaaagttcggcgagagacccccccccaagagactgaccagagaggccatgagaaactacctgaaggagagaggcgaccagaccgtgctgatcctgcacgccaaggtggcccagaagagctacggcaacgagaagagattcttctgcccccccccctgcgtgtacctgatgggcagcggctggaagaagaagaaggagcagatggagagagacggctgcagcgagcaggagagccagccctgcgccttcatcggcatcggcaacagcgaccaggagatgcagcagctgaacctggagggcaagaactactgcaccgccaagacctag

SEQ ID NO: 262815 - DNA, 147 bp, Artificial Sequence
  derived and/or modified sequence
atggcctggatcaagagaaagttcggcgagagacccccccccaagagactgaccagagaggccatgagaaactacctgaaggagagaggcgaccagaccgtgctgatcctgcacgccaaggtggcccagaagagctacggcaactag

SEQ ID NO: 262816 - protein, 458 aa, Artificial Sequence
  derived and/or modified sequence
MARMGLAGAAGRWWGLALGLTAFFLPGVHSQVVQVNDSMYGFIGTDVVLHCSFANPLPSVKITQVTWQKSTNGSKQNVAIYNPSMGVSVLAPYRERVEFLRPSFTDGTIRLSRLELEDEGVYICEFATFPTGNRESQLNLTVMAKPTNWIEGTQAVLRAKKGQDDKVLVATCTSANGKPPSVVSWETRLKGEAEYQEIRNPNGTVTVISRYRLVPSREAHQQSLACIVNYHMDRFKESLTLNVQYEPEVTIEGFDGNWYLQRMDVKLTCKADANPPATEYHWTTLNGSLPKGVEAQNRTLFFKGPINYSLAGTYICEATNPIGTRSGQVEVNITEKPRPQRGLGSAARLLAGTVAVFLILVAVLTVFFLYNRQQKSPPETDGAGTDQPLSQKPEPSPSRQSSLVPEDIQVVHLDPGRQQQQEEEDLQKLSLQPPYYDLGVSPSYHPSVRTTEPRGECP

SEQ ID NO: 262817 - DNA, 1377 bp, Artificial Sequence
  derived and/or modified sequence
atggcgagaatgggattggcaggtgccgcgggacgatggtgggggctcgctcttggcctgactgcattttttctgccaggagtgcattcccaggtggttcaagtgaatgactcaatgtatggttttataggtactgacgtggtgctacactgtagcttcgctaatccactgccttccgtgaagatcactcaggtgacgtggcagaagagtactaatggcagcaaacagaatgtagcaatctacaacccctcaatgggcgtgtcggtcctggctccctacagggagagagtagagttcctgaggccttcctttacagacggtaccatccggttgtctaggctcgaactggaagacgaaggtgtctacatctgcgaattcgcaacttttcctacaggcaaccgggagagtcagctgaacctaacagtgatggccaagcccactaactggatagagggtacccaggctgttctcagagctaaaaaagggcaagacgataaggtcctcgtcgccacttgtacatccgcaaatggcaagccaccctctgtggtcagttgggaaactcgcctgaaaggagaggccgagtatcaggagatccgaaatccgaacggtacggtaaccgtgattagccgctacaggcttgtccccagccgagaggctcatcagcaatcccttgcttgcattgtaaattaccacatggatcgattcaaggagagtctaaccctgaacgtccagtatgaaccagaggtgaccatagagggttttgatggcaattggtaccttcagaggatggacgtcaagttaacttgcaaggccgatgccaacccgcccgccaccgagtaccattggactactttgaatggcagcctgcctaaaggggtagaagctcaaaatcgcactcttttttttaaaggacccatcaactattctttagccggcacctacatatgtgaggccaccaacccaatcggaacccgcagtgggcaggtggaggtgaacataactgaaaagccgaggccccagcggggactgggatccgccgccagattgctggccggaaccgtggccgtgtttctgattctggtggctgtgcttaccgtcttcttcctgtacaacagacagcaaaaatctcccccagaaaccgatggtgcaggtacggaccagcccctaagccagaagcccgagccttctccttccaggcagtcctcccttgtgcctgaagacatccaggtcgtgcatctcgaccccggaaggcaacagcaacaggaagaagaagacctgcagaaactgagcctgcagcctccctactacgatttaggtgtaagcccctcatatcatcccagcgtgcgcacaacggaaccaagaggagaatgcccgtag

SEQ ID NO: 262818 - DNA, 1377 bp, Artificial Sequence
  derived and/or modified sequence
atggccaggatgggcctggccggggccgccggccgctggtggggcctggccctgggcctgacagccttcttcctgcccggggtgcacagccaggtggtgcaggtgaatgacagcatgtatggcttcatcggcacagatgtggtgctgcactgcagctttgccaaccccctgcccagcgtgaagatcacccaggtgacctggcagaagagcaccaacggcagcaagcagaatgtggccatctacaaccccagcatgggcgtgtctgtgctggccccctaccgggagcgggtggagttcctgcggcccagcttcacagatggcaccatccggctgagccggctggagctggaggatgagggcgtgtacatctgtgaatttgccaccttccccactggaaaccgggagagccagctgaacctgactgtgatggccaagcccaccaactggattgagggcacccaggccgtgctgcgggccaagaagggccaggatgacaaggtgctggtggccacctgcaccagcgccaacgggaagcccccatctgtggtgtcctgggagacccggctgaagggggaggccgagtaccaggagatccggaaccccaacggcaccgtgaccgtcatcagccgctaccgcctggtgcccagccgggaggcccaccagcagagcctggcctgcatcgtgaactaccacatggaccgcttcaaggagagcctgaccctgaatgtgcagtatgagcctgaggtgaccatcgagggctttgatggcaactggtacctgcagaggatggatgtgaagctgacctgcaaggcagatgccaaccccccagccacagagtaccactggaccaccctgaatggcagcctgcccaagggcgtggaggcccagaacagaaccctcttcttcaagggccccatcaactacagcctggccggcacctacatctgtgaggccaccaaccccatcggcaccaggagcggccaggtggaggtgaacatcacagagaagccccggccccagaggggcctgggcagcgctgcccggctgctggccggcaccgtggccgtgttcctgatcctggtggccgtgctgactgtgttcttcctgtacaaccggcagcagaagagccccccagagacagatggagctggaacagaccagcccctgagccagaagccagagcccagccccagccggcagagcagcctggtgcctgaggacatccaggtggtgcacctggaccccggccggcagcagcagcaggaggaggaggacctgcagaagctgagcctgcagcccccctactatgacctgggcgtgagccccagctaccaccccagcgtgaggaccacagagcccagaggagagtgcccctag

SEQ ID NO: 262819 - DNA, 1377 bp, Artificial Sequence
  derived and/or modified sequence
atggcccggatgggcctggccggcgccgccggccggtggtggggcctggctctgggcttgacagcttttttcctgccgggcgtccatagtcaagtagtccaagttaatgatagcatgtacgggtttatcggaacagacgtcgtgcttcattgttctttcgcgaatcctctgccctccgtgaagatcactcaggtgacttggcagaagtcgactaacggatcaaagcagaacgtcgccatctacaacccatcgatgggggtgagcgtgctcgcaccctatagggagcgggtcgaattccttcggcctagcttcaccgatggcacaatcaggctgtcccgcctcgagcttgaggacgagggggtgtatatttgtgaattcgctaccttccccactggaaaccgcgaaagccagctaaaccttaccgtgatggctaagccgacaaactggatcgagggaacacaggccgtcctgagggcgaaaaaaggacaggacgacaaagtactggtcgcgacctgcacgtcagctaacgggaaaccgccttcagtagttagttgggaaacccgcctgaagggtgaggcagaataccaggagatccgcaaccctaacggtacggtgaccgtgatcagcagatacagattggtaccttcaagagaagcacaccagcagtccctggcatgtatcgtgaactatcacatggaccgctttaaggagagtctgaccttgaacgtccagtacgaacccgaagtgaccatcgagggttttgatgggaactggtacctgcaaaggatggacgtgaaactgacctgtaaagctgatgccaatccccccgctacagaataccactggactactcttaatggctccttaccgaaaggggtggaggcgcagaaccggacgctcttttttaagggacccataaattactcattggccggaacatatatttgcgaggccaccaatccgattgggacccggagtggtcaggtcgaggtgaatattaccgaaaagccacgcccacagcggggcctcgggagcgccgccaggttgctggctggaacggtggccgtgtttcttattctggtggcggtgctgaccgtgttttttctgtataaccggcagcagaaatcacccccagaaaccgatggcgcgggcactgatcaaccactgtcacagaaacccgaaccttcaccctcccgacagtcttccctagtcccggaagacattcaggtggttcacctagatcccgggcgccaacagcagcaggaggaggaggacttacagaagttatccctgcaacctccatattacgacctcggagttagcccctcataccatccctcagtgaggacaacagagccgcgtggcgaatgcccttag

SEQ ID NO: 262820 - DNA, 1377 bp, Artificial Sequence
  derived and/or modified sequence
atggctcggatggggcttgcgggcgccgctggacgctggtggggactcgctctcggcttgaccgcattcttcctcccaggcgtccactcccaggtggtccaggtgaacgactccatgtatggcttcatcggcacagacgtggttctgcactgcagctttgccaacccgcttcccagcgtgaagatcacccaggtcacatggcagaagtccaccaatggctccaagcagaacgtggccatctacaacccatccatgggcgtgtccgtgctggctccctaccgcgagcgtgtggaattcctgcggccctccttcaccgatggcactatccgcctctcccgcctggagctggaggatgagggtgtctacatctgcgagtttgctaccttccctacgggcaatcgagaaagccagctcaatctcacggtgatggccaaacccaccaattggatagagggtacccaggcagtgcttcgagccaagaaggggcaggatgacaaggtcctggtggccacctgcacctcagccaatgggaagcctcccagtgtggtatcctgggaaactcggttaaaaggtgaggcagagtaccaggagatccggaaccccaatggcacagtgacggtcatcagccgctaccgcctggtgcccagcagggaagcccaccagcagtccttggcctgcatcgtcaactaccacatggaccgcttcaaggaaagcctcactctcaacgtgcagtatgagcctgaggtaaccattgaggggtttgatggcaactggtacctgcagcggatggacgtgaagctcacctgcaaagctgatgctaaccccccagccactgagtaccactggaccacgctaaatggctctctccccaagggtgtggaggcccagaacagaaccctcttcttcaagggacccatcaactacagcctggcagggacctacatctgtgaggccaccaaccccatcggtacacgctcaggccaggtggaggtcaatatcacagaaaagccccgcccccagaggggtctgggaagtgcagccaggctcctggcgggcaccgtggccgtgttcctcatcctagttgctgtgctcactgtcttcttcctgtacaaccggcagcagaagagcccaccggagacggatggggccgggaccgaccagcccctctcccagaagccggagccttctcccagcaggcaaagctcccttgtgcctgaggatatccaggttgtccacctggacccagggaggcagcagcagcaagaagaggaggacttgcagaagctgtccctgcagcccccctactatgatctgggggtctccccctcctaccacccctcggtaaggacaaccgaacctcgaggagagtgcccctag

SEQ ID NO: 262821 - DNA, 1377 bp, Artificial Sequence
  derived and/or modified sequence
atggcaaggatgggcttggccggtgccgctggcagatggtggggacttgccctgggactgaccgcattttttctgcccggagtacactcacaggtggtccaggtgaatgacagcatgtacggctttatcggaaccgatgttgtgctacattgttcttttgcgaacccccttccatcagtgaagatcactcaggtcacatggcagaagtccacaaatggatcaaagcagaacgtagctatatacaatccgtccatgggcgtgagcgtgctggccccttatagagagcgcgtggaattcttgaggccttcatttacagacgggaccattaggctatctagactcgaacttgaggacgagggagtgtacatctgcgagtttgctacgttcccaactggaaaccgagagtcgcagctaaatttaactgtaatggcgaaaccaacaaactggatagaaggcacccaggccgttttgagagccaagaaaggccaggacgataaagtcctcgtggcgacgtgcacttcggctaacgggaaacctcccagcgtcgtgtcctgggaaactagattgaagggggaagctgagtatcaagagatccgaaatccaaacggaacagttactgttatctcacgctataggctggtgccaagtagagaggcccaccagcagagcttagcttgtattgtgaattatcacatggatcgttttaaagagtcactaacattaaacgtgcagtacgaacctgaggtgacgatcgaaggttttgatggcaattggtacttgcagcggatggatgtcaaattgacatgcaaggctgacgctaatcctcccgcaactgaatatcattggacaaccctgaatggctctttacccaaaggggtggaagcacaaaaccggaccctgttcttcaaagggcctataaactactcccttgccggaacttatatctgtgaagcaaccaatcctattggaacccgcagcggccaggtcgaggtaaatattacagaaaagcccaggcctcaacgtggtctgggctccgcagcccgactgttggcgggaacagttgccgtgttccttattctcgtggcggtactgaccgtgttctttctttacaaccgccaacagaagtcccctccagaaaccgacggcgctggtaccgaccagccattgagccaaaaacccgaaccaagcccctccaggcagagttcccttgtgcccgaggacatccaggtagtgcacctggacccgggaagacaacagcagcaggaggaggaagatcttcagaaattgtccctgcaacccccttactacgatctgggagtatctcccagctaccatcccagcgttcgaaccactgagcccaggggcgaatgtccctag

SEQ ID NO: 262822 - DNA, 1377 bp, Artificial Sequence
  derived and/or modified sequence
atggccagaatgggcctggccggcgccgccggcagatggtggggcctggccctgggcctgaccgccttcttcctgcccggcgtgcacagccaggtggtgcaggtgaacgacagcatgtacggcttcatcggcaccgacgtggtgctgcactgcagcttcgccaaccccctgcccagcgtgaagatcacccaggtgacctggcagaagagcaccaacggcagcaagcagaacgtggccatctacaaccccagcatgggcgtgagcgtgctggccccctacagagagagagtggagttcctgagacccagcttcaccgacggcaccatcagactgagcagactggagctggaggacgagggcgtgtacatctgcgagttcgccaccttccccaccggcaacagagagagccagctgaacctgaccgtgatggccaagcccaccaactggatcgagggcacccaggccgtgctgagagccaagaagggccaggacgacaaggtgctggtggccacctgcaccagcgccaacggcaagccccccagcgtggtgagctgggagaccagactgaagggcgaggccgagtaccaggagatcagaaaccccaacggcaccgtgaccgtgatcagcagatacagactggtgcccagcagagaggcccaccagcagagcctggcctgcatcgtgaactaccacatggacagattcaaggagagcctgaccctgaacgtgcagtacgagcccgaggtgaccatcgagggcttcgacggcaactggtacctgcagagaatggacgtgaagctgacctgcaaggccgacgccaacccccccgccaccgagtaccactggaccaccctgaacggcagcctgcccaagggcgtggaggcccagaacagaaccctgttcttcaagggccccatcaactacagcctggccggcacctacatctgcgaggccaccaaccccatcggcaccagaagcggccaggtggaggtgaacatcaccgagaagcccagaccccagagaggcctgggcagcgccgccagactgctggccggcaccgtggccgtgttcctgatcctggtggccgtgctgaccgtgttcttcctgtacaacagacagcagaagagcccccccgagaccgacggcgccggcaccgaccagcccctgagccagaagcccgagcccagccccagcagacagagcagcctggtgcccgaggacatccaggtggtgcacctggaccccggcagacagcagcagcaggaggaggaggacctgcagaagctgagcctgcagcccccctactacgacctgggcgtgagccccagctaccaccccagcgtgagaaccaccgagcccagaggcgagtgcccctag

SEQ ID NO: 262823 - protein, 352 aa, Artificial Sequence
  derived and/or modified sequence
MARMGLAGAAGRWWGLALGLTAFFLPGVHSQVVQVNDSMYGFIGTDVVLHCSFANPLPSVKITQVTWQKSTNGSKQNVAIYNPSMGVSVLAPYRERVEFLRPSFTDGTIRLSRLELEDEGVYICEFATFPTGNRESQLNLTVMAKPTNWIEGTQAVLRAKKGQDDKVLVATCTSANGKPPSVVSWETRLKGEAEYQEIRNPNGTVTVISRYRLVPSREAHQQSLACIVNYHMDRFKESLTLNVQYEPEVTIEGFDGNWYLQRMDVKLTCKADANPPATEYHWTTLNGSLPKGVEAQNRTLFFKGPINYSLAGTYICEATNPIGTRSGQVEVNITAFCQLIYPGKGRTRARMF

SEQ ID NO: 262824 - DNA, 1059 bp, Artificial Sequence
  derived and/or modified sequence
atggcccgaatgggcttggccggggcagctggccggtggtggggtctggctctggggcttacagccttttttcttcctggagttcactctcaggtggtccaagtaaacgactctatgtacgggtttataggcaccgatgtggtgctccattgctcctttgcaaaccctctgccctcagtgaaaatcacccaggtgacctggcagaagtcgactaatggatcaaagcagaatgttgcaatctacaatccttcgatgggagtaagcgtgctcgctccataccgcgagcgcgtggagttcctacggcccagctttaccgacggtaccattaggctgtcccggctggagttggaggatgagggcgtatatatttgcgagtttgcaacttttccaactggcaatcgggaatcacagctcaacttgaccgtgatggccaaacccacgaattggatcgagggaacgcaggccgtcctaagggctaaaaagggccaggacgacaaggtcctcgtggccacgtgtacaagcgctaatggcaagccgccaagcgtggttagttgggaaactaggcttaagggcgaggccgaatatcaagagatcagaaacccaaacgggacggtgactgtaatctctaggtacagactcgtaccgagccgcgaggctcaccagcagtccctcgcttgtatagtcaactaccacatggacagatttaaggagtctctgactttaaatgtgcaatacgaaccagaagtgacgatagagggcttcgacggaaattggtatctacagcggatggatgtaaaattgacatgtaaggcagatgccaacccgccagccaccgagtatcattggacaaccctgaatgggtcactaccaaaaggggtggaggctcagaacagaaccttattcttcaagggacctattaattacagcctggccggcacttatatctgcgaggcgacaaatccgataggaaccagatctggccaggttgaagtcaacatcactgcattttgtcagttaatctaccctggaaagggcagaacccgggctaggatgttctag

SEQ ID NO: 262825 - DNA, 1059 bp, Artificial Sequence
  derived and/or modified sequence
atggccaggatgggcctggccggggccgccggccgctggtggggcctggccctgggcctgacagccttcttcctgcccggggtgcacagccaggtggtgcaggtgaatgacagcatgtatggcttcatcggcacagatgtggtgctgcactgcagctttgccaaccccctgcccagcgtgaagatcacccaggtgacctggcagaagagcaccaacggcagcaagcagaatgtggccatctacaaccccagcatgggcgtgtctgtgctggccccctaccgggagcgggtggagttcctgcggcccagcttcacagatggcaccatccggctgagccggctggagctggaggatgagggcgtgtacatctgtgaatttgccaccttccccactggaaaccgggagagccagctgaacctgactgtgatggccaagcccaccaactggattgagggcacccaggccgtgctgcgggccaagaagggccaggatgacaaggtgctggtggccacctgcaccagcgccaacgggaagcccccatctgtggtgtcctgggagacccggctgaagggggaggccgagtaccaggagatccggaaccccaacggcaccgtgaccgtcatcagccgctaccgcctggtgcccagccgggaggcccaccagcagagcctggcctgcatcgtgaactaccacatggaccgcttcaaggagagcctgaccctgaatgtgcagtatgagcctgaggtgaccatcgagggctttgatggcaactggtacctgcagaggatggatgtgaagctgacctgcaaggcagatgccaaccccccagccacagagtaccactggaccaccctgaatggcagcctgcccaagggcgtggaggcccagaacagaaccctcttcttcaagggccccatcaactacagcctggccggcacctacatctgtgaggccaccaaccccatcggcaccaggagcggccaggtggaggtgaacatcacagccttctgccagctgatctacccaggcaagggccgcacccgggccaggatgttttag

SEQ ID NO: 262826 - DNA, 1059 bp, Artificial Sequence
  derived and/or modified sequence
atggcccggatgggcctggccggcgccgccggccggtggtggggcctggctctggggttgacggctttttttttgccaggagtgcatagccaggtcgtgcaggtaaatgatagtatgtatggcttcattggcacggacgtagtgttgcattgcagctttgcaaatccactcccatccgtcaagattactcaggtcacctggcaaaagagcaccaacgggtcgaaacagaacgtggctatttacaacccaagcatgggtgtttccgtgttggccccatacagggagagggtggaattcctgcgtccgtcttttaccgacggtactatcaggctgtcaagattagaactcgaagacgagggagtgtatatctgcgagtttgccaccttccctactgggaacagagagtcacagctgaatttgacagtaatggccaagccaactaattggatcgaggggacacaagccgtcttaagggcgaaaaagggccaagatgacaaggtcttagtggcaacctgcacttcggcaaacggaaaaccgccatccgttgtttcctgggagactcgcttgaaaggggaagccgaatatcaggaaatcagaaaccctaatggcaccgtcacagtgatatcaaggtatcgcctggtgccaagtcgggaagcccaccagcaaagcctagcctgcatcgtgaactaccacatggaccggtttaaagagtccctaactttaaatgttcaatacgaacctgaagtgacaatcgaagggttcgacgggaactggtatctgcagagaatggatgtcaaattaacttgtaaagcggacgctaatcccccagccactgagtaccactggaccaccttaaatggttcacttcccaaaggcgtcgaggcccagaacaggacattatttttcaagggcccgatcaactatagcctggctggcacctacatttgtgaagctaccaacccaatcggaaccagaagtggccaggtggaagtgaacattacagctttctgccaactcatttatcctggtaaaggacggactcgagctaggatgttctag

SEQ ID NO: 262827 - DNA, 1059 bp, Artificial Sequence
  derived and/or modified sequence
atggctcggatggggcttgcgggcgccgctggacgctggtggggactcgctctcggcttgaccgcattcttcctcccaggcgtccactcccaggtggtccaggtgaacgactccatgtatggcttcatcggcacagacgtggttctgcactgcagctttgccaacccgcttcccagcgtgaagatcacccaggtcacatggcagaagtccaccaatggctccaagcagaacgtggccatctacaacccatccatgggcgtgtccgtgctggctccctaccgcgagcgtgtggaattcctgcggccctccttcaccgatggcactatccgcctctcccgcctggagctggaggatgagggtgtctacatctgcgagtttgctaccttccctacgggcaatcgagaaagccagctcaatctcacggtgatggccaaacccaccaattggatagagggtacccaggcagtgcttcgagccaagaaggggcaggatgacaaggtcctggtggccacctgcacctcagccaatgggaagcctcccagtgtggtatcctgggaaactcggttaaaaggtgaggcagagtaccaggagatccggaaccccaatggcacagtgacggtcatcagccgctaccgcctggtgcccagcagggaagcccaccagcagtccttggcctgcatcgtcaactaccacatggaccgcttcaaggaaagcctcactctcaacgtgcagtatgagcctgaggtaaccattgaggggtttgatggcaactggtacctgcagcggatggacgtgaagctcacctgcaaagctgatgctaaccccccagccactgagtaccactggaccacgctaaatggctctctccccaagggtgtggaggcccagaacagaaccctcttcttcaagggacccatcaactacagcctggcagggacctacatctgtgaggccaccaaccccatcggtacacgctcaggccaggtggaggtcaatatcacagctttctgtcaacttatctatccgggcaaagggaggacaagagctaggatgttctga

SEQ ID NO: 262828 - DNA, 1059 bp, Artificial Sequence
  derived and/or modified sequence
atggcgagaatgggcctggccggagccgcaggacgctggtggggcctggcgctcggattgacggcattctttctacctggggtccactctcaagtggttcaggtgaacgactccatgtatggctttatagggaccgatgtcgtgttgcattgtagttttgcaaatcccctcccgtctgtcaaaattacacaggtgacctggcagaaatccactaatggatctaagcagaacgtggcaatatacaacccttcgatgggagtatcggtgctagcaccctatcgtgaaagagtcgagttcctgcgtccctccttcacagatggcacaattcggcttagccgcctggagttagaagacgaaggtgtatatatttgcgaatttgccactttcccgacagggaacagggagtcacagttgaacttaacagtgatggcgaaaccaactaattggattgagggcacccaggctgtgttgcgggcaaaaaaaggccaagatgacaaagtgttggtcgctacctgcacttcagccaacggaaagccgccttccgtcgtttcgtgggagactcgactcaagggggaggcagaataccaggagattcgcaatcccaacggcaccgttaccgttatctcaaggtaccgattagtgccttctagggaggcacaccaacagagcctagcttgcatcgtcaattaccatatggaccgtttcaaagagtcacttacacttaatgtccagtatgagcctgaagtaaccatcgaagggttcgatgggaactggtacttacagagaatggatgtcaaactaacttgcaaagctgatgccaatccccctgccacagaatatcactggaccaccctgaacggctcgctccctaagggagtggaggctcagaaccgcaccctctttttcaaaggacctatcaattactcccttgcgggaacttacatctgtgaggccaccaaccctatcgggacacggtctggtcaggtagaggtgaacatcaccgccttttgccagctgatttacccgggaaaaggacgcacacgcgcaagaatgttttag

SEQ ID NO: 262829 - DNA, 1059 bp, Artificial Sequence
  derived and/or modified sequence
atggccagaatgggcctggccggcgccgccggcagatggtggggcctggccctgggcctgaccgccttcttcctgcccggcgtgcacagccaggtggtgcaggtgaacgacagcatgtacggcttcatcggcaccgacgtggtgctgcactgcagcttcgccaaccccctgcccagcgtgaagatcacccaggtgacctggcagaagagcaccaacggcagcaagcagaacgtggccatctacaaccccagcatgggcgtgagcgtgctggccccctacagagagagagtggagttcctgagacccagcttcaccgacggcaccatcagactgagcagactggagctggaggacgagggcgtgtacatctgcgagttcgccaccttccccaccggcaacagagagagccagctgaacctgaccgtgatggccaagcccaccaactggatcgagggcacccaggccgtgctgagagccaagaagggccaggacgacaaggtgctggtggccacctgcaccagcgccaacggcaagccccccagcgtggtgagctgggagaccagactgaagggcgaggccgagtaccaggagatcagaaaccccaacggcaccgtgaccgtgatcagcagatacagactggtgcccagcagagaggcccaccagcagagcctggcctgcatcgtgaactaccacatggacagattcaaggagagcctgaccctgaacgtgcagtacgagcccgaggtgaccatcgagggcttcgacggcaactggtacctgcagagaatggacgtgaagctgacctgcaaggccgacgccaacccccccgccaccgagtaccactggaccaccctgaacggcagcctgcccaagggcgtggaggcccagaacagaaccctgttcttcaagggccccatcaactacagcctggccggcacctacatctgcgaggccaccaaccccatcggcaccagaagcggccaggtggaggtgaacatcaccgccttctgccagctgatctaccccggcaagggcagaaccagagccagaatgttctag

SEQ ID NO: 262830 - protein, 221 aa, Artificial Sequence
  derived and/or modified sequence
MSSRPGREDVGAAGARRPREPPEQELQRRREQKRRRHDAQQLQQLKHLESFYEKPPPGLIKEDETKPEDCIPDVPGNEHAREFLAHAPTKGLWMPLGKEVKVMQCWRCKRYGHRTGDKECPFFIKGNQKLEQFRVAHEDPMYDIIRDNKRHEKDVRIQQLKQLLEDSTSDEDRSSSSSSEGKEKHKKKKKKEKHKKRKKEKKKKKKRKHKSSKSNEGSDSE

SEQ ID NO: 262831 - DNA, 666 bp, Artificial Sequence
  derived and/or modified sequence
atgagttctcggccaggacgggaggatgttggtgccgcgggcgccagaagaccgcgcgaacctcccgaacaggagctgcaacgcagacgggaacaaaaacgtcggagacatgacgctcagcaactccagcaactgaagcacctggagtcattctatgagaagccaccccctgggctgatcaaagaagacgagactaagccagaagattgcattcccgacgtacctgggaatgaacacgcacgcgagttcctggcacatgcgccgactaagggcctgtggatgcccttagggaaggaggtgaaagtgatgcaatgttggagatgcaagcgctatgggcaccggaccggcgataaagagtgtccgttctttataaaaggaaatcagaaactggagcagttccgggtagctcacgaggatcccatgtatgacatcattcgcgacaataagagacatgaaaaagacgtcaggatccaacaactgaagcagctgctagaggattcaaccagcgatgaggatcgctcatcatcatccagcagtgaaggaaaggaaaaacataaaaagaagaagaaaaaggagaagcacaagaagcgaaagaaggagaagaagaagaagaagaagaggaaacataaatcgtcaaagtctaacgaaggcagtgacagtgagtag

SEQ ID NO: 262832 - DNA, 666 bp, Artificial Sequence
  derived and/or modified sequence
atgagcagcaggcctggccgggaggatgtgggcgctgctggggcccggcggccccgggagcccccagagcaggagctgcagaggagaagagagcagaagagaagaagacatgatgcccagcagctgcagcagctgaagcacctggagagcttctatgagaagcccccacctggcctcatcaaggaggatgagaccaagccagaggactgcatcccagatgtgcctggaaatgaacatgcccgggagttcctggcccacgcccccaccaagggcctgtggatgcccctgggcaaggaggtgaaggtgatgcagtgctggcgctgcaagagatatggccacaggactggagacaaggaatgtcccttcttcatcaagggcaaccagaagctggagcagttccgggtggcccacgaggaccccatgtatgacatcatccgggacaacaagagacatgagaaggatgtgcgcatccagcagctgaagcagctgctggaggacagcaccagtgatgaagatagaagcagcagcagcagcagcgagggcaaggagaagcacaagaagaagaagaagaaggagaagcacaagaagaggaagaaggagaagaagaagaagaagaagaggaagcacaagagcagcaagagcaatgaaggaagtgacagcgagtag

SEQ ID NO: 262833 - DNA, 666 bp, Artificial Sequence
  derived and/or modified sequence
atgagcagccggcccggccgggaggacgtgggcgccgccggcgccagacgaccccgcgaaccgccagaacaagagctgcagcgacgaagggaacagaaaaggcgcaggcatgacgcgcagcagcttcagcagctgaagcacctcgaatctttctacgaaaagcccccacctgggctaatcaaggaggatgaaacaaaaccagaggattgtataccagacgtgccaggaaatgaacatgctcgggaattcctcgcacacgcaccaacaaaaggcctttggatgcctctgggtaaggaagtcaaggtgatgcaatgctggcggtgtaagagatatggccatcgaaccggcgataaagagtgtccattttttattaagggcaaccagaagctcgagcagttccgcgtggcccacgaagatccaatgtacgatatcatccgggacaacaagcgccatgaaaaggacgtgcgcatccagcagctgaaacagctcctggaggattctacaagcgatgaggatcgctcctccagttctagcagcgaaggaaaagaaaagcacaagaaaaagaagaaaaaagagaaacataagaagcgaaaaaaggaaaagaaaaagaagaagaagcggaaacacaagagctccaagtcaaacgaaggctccgactccgagtag

SEQ ID NO: 262834 - DNA, 666 bp, Artificial Sequence
  derived and/or modified sequence
atgagcagcaggcccggaagggaggatgttggagcggctggcgctcgcaggccgagagagcctccagagcaggagttacagcggaggagagagcaaaagagaagacgacacgatgcccagcagctccagcaactgaaacatctagagagcttctacgaaaagccccctcctgggctcatcaaggaggacgaaacgaaacccgaggattgcatcccggatgtaccagggaatgagcacgccagagaattcctggcccatgctcctactaaggggctgtggatgcctctggggaaggaggtcaaggtcatgcagtgttggaggtgcaaaaggtatggccaccgcacaggcgataaagagtgtcccttctttatcaaggggaaccagaagctggaacagtttagagtggcccacgaggatcccatgtacgatattatccgggataataagaggcatgaaaaggacgtgaggatccaacagctgaagcagttgctcgaagacagcactagcgacgaggaccgaagcagcagctccagtagcgagggcaaggagaagcataagaaaaaaaagaaaaaagagaagcacaagaagcgaaagaaggagaagaagaagaaaaaaaagcgcaagcacaagtcatcaaagagtaacgagggaagtgacagtgaatag

SEQ ID NO: 262835 - DNA, 1121 bp, Artificial Sequence
  derived and/or modified sequence
ggcgctgcgggggctgacatgtcgtcccggcctgggcgcgaggacgtgggggctgcgggcgcgcggcggccgcgtgagccgccggagcaggagctgcagcgacgtcgggagcagaagcggcggcgacacgacgcgcagcagctgcagcagctcaagcacctggagtccttttacgaaaaacctcctcctgggcttatcaaggaagatgagactaagccagaagattgcataccagatgtaccaggcaatgaacacgccagggaatttctggctcatgcaccaactaaaggactttggatgccactggggaaagaagtcaaagttatgcagtgttggcgttgcaaacgctatggtcaccgaacgggtgacaaagaatgccctttctttatcaaaggcaaccaaaagttagagcagttcagagtggcacatgaagatcccatgtatgacatcatacgagacaataaacgacatgaaaaggacgtaaggatacagcagttaaaacagttactggaggattctacctcagatgaagataggagcagctccagttcctctgaaggtaaagagaaacacaagaaaaagaagaagaaagaaaagcataagaaaaggaagaaagaaaagaaaaagaagaaaaaacggaagcacaaatcttccaagtcaaatgagggttctgactcagagtgacaaggatgtgacttgttcaacattctcttctcaaacactgaccaaggaacagaggaagatgcagtcagagaaagcagcaggatagagacgccgagagaggagtatatgtgggtcacagcagtgagctcccacccgccttgcagtgaagatgtgaccccaggagagggagtgtctccttccaggtgctagctctggacagcagctgattttaggcaggaaagtttcttcatcgttgtcctccctgctggtcacatgagtttacgattcctttgaagtgtctcccacagggtggcaggactgggagaatctctgaggcgtgtcttccaggccctcccacagcttgtgccctccacagtgtggactcaggtcccatagacatcaggctggagtcttctctgttgttgagaataataaaagctcattatttattttttaaa

SEQ ID NO: 262836 - DNA, 666 bp, Artificial Sequence
  derived and/or modified sequence
atgagcagcagacccggcagagaggacgtgggcgccgccggcgccagaagacccagagagccccccgagcaggagctgcagagaagaagagagcagaagagaagaagacacgacgcccagcagctgcagcagctgaagcacctggagagcttctacgagaagcccccccccggcctgatcaaggaggacgagaccaagcccgaggactgcatccccgacgtgcccggcaacgagcacgccagagagttcctggcccacgcccccaccaagggcctgtggatgcccctgggcaaggaggtgaaggtgatgcagtgctggagatgcaagagatacggccacagaaccggcgacaaggagtgccccttcttcatcaagggcaaccagaagctggagcagttcagagtggcccacgaggaccccatgtacgacatcatcagagacaacaagagacacgagaaggacgtgagaatccagcagctgaagcagctgctggaggacagcaccagcgacgaggacagaagcagcagcagcagcagcgagggcaaggagaagcacaagaagaagaagaagaaggagaagcacaagaagagaaagaaggagaagaagaagaagaagaagagaaagcacaagagcagcaagagcaacgagggcagcgacagcgagtag

SEQ ID NO: 262837 - protein, 210 aa, Artificial Sequence
  derived and/or modified sequence
MAVEKVLVYNNTSIVQDEILAHRLGLIPIHADPRLFEYRNQGDEEGTEIDTLQFRLQVRCTRNPHAAKDSSDPNELYVNHKVYTRHMTWIPLGNQADLFPEGTIRPVHDDILIAQLRPGQEIDLLMHCVKGIGKKVARVANPRLDTFSREIFRNEKLKKVVRLARVRDHYIFSVESTGVLPPDVLVSEAIKVLMGKCRRFLDELDAVQMD

SEQ ID NO: 262838 - protein, 346 aa, Artificial Sequence
  derived and/or modified sequence
MAASQAVEEMRSRVVLGEFGVRNVHTTDFPGNYSGYDDAWDQDRFEKNFRVDVVHMDENSLEFDMVGIDAAIANAFRRILLAEVPTMAVEKVLVYNNTSIVQDEILAHRLGLIPIHADPRLFEYRNQGDEEGTEIDTLQFRLQVRCTRNPHAAKDSSDPNELYVNHKVYTRHMTWIPLGNQADLFPEGTIRPVHDDILIAQLRPGQEIDLLMHCVKGIGKDHAKFSPVATASYRLLPDITLLEPVEGEAAEELSRCFSPGVIEVQEVQGKKVARVANPRLDTFSREIFRNEKLKKVVRLARVRDHYIFSVESTGVLPPDVLVSEAIKVLMGKCRRFLDELDAVQMD

SEQ ID NO: 262839 - DNA, 633 bp, Artificial Sequence
  derived and/or modified sequence
atggcggtcgagaaggtgttagtctacaacaatacatcaatcgtccaggatgagattctggcgcaccgcctgggtttgattcctattcacgccgaccctcgcctgttcgaatacagaaaccaaggagacgaggaaggtactgagatcgatacactgcagtttagactgcaggtgagatgcacccggaatccgcacgctgctaaagacagttctgatcctaatgaactttacgttaatcataaagtctatacgagacatatgacctggattcccttgggtaaccaggccgatctcttccctgaaggcacaattcgacctgtgcacgacgacattctcattgcccaattacggcccggccaagagatcgacctgctcatgcactgcgttaaaggaattggaaaaaaagtggctagggtggcgaacccaaggctagatacattctctagggagattttccgaaatgaaaagctcaaaaaagttgtcaggctcgcccgggttagagatcattacatcttctcagttgagtcaacgggtgttctgccgcccgatgtgctggtgagtgaggccatcaaagttctgatggggaagtgccgcagattcctggacgaactcgacgcagttcagatggactag

SEQ ID NO: 262840 - DNA, 1041 bp, Artificial Sequence
  derived and/or modified sequence
atggccgcctcccaggccgtcgaggagatgaggagcagagtggtgctgggggagttcggagtccggaacgtacataccacagattttcccggaaactattctgggtatgacgacgcttgggaccaagatagattcgaaaagaatttccgagtggacgtggtgcacatggatgagaactccctggagttcgatatggtgggcatcgatgccgccatcgccaacgcctttcgcaggatattgctagccgaagtacccactatggctgttgagaaagtcctcgtgtacaataatactagcattgtccaggatgagattctggcccatcgtctgggcttaatccctatccacgctgacccccgtcttttcgagtaccgtaaccagggtgacgaggaagggacggagatagatacactgcagtttcgactacaggtccggtgcacacgcaatccacacgccgccaaagattcaagcgaccctaatgagttgtatgtgaaccacaaggtatacactcggcacatgacctggatcccactgggtaatcaggcagacttgttccccgaggggactattaggccagtgcatgatgacatcctcatcgctcagctccgccccggtcaggagatagatctgctaatgcactgcgttaaggggatcggcaaagatcacgccaaattttcacccgtggctactgcatcttacaggctactgcccgatataaccctccttgaacccgtcgagggagaggcggctgaagagttgtcccggtgtttttctccaggagttattgaggtgcaagaagtccagggcaaaaaagtcgctagggtggccaatccaaggttggacacctttagcagggagatttttcgaaatgagaaactaaagaaggttgtgagactcgctagggtcagagaccattacatcttcagtgttgagagtaccggcgtgctgccgcccgacgtcctggtttccgaggccattaaagtcttgatgggaaagtgtagacgtttcctggacgagctcgatgccgtacaaatggattag

SEQ ID NO: 262841 - DNA, 633 bp, Artificial Sequence
  derived and/or modified sequence
atggctgtggagaaggtgctggtgtacaacaacaccagcatcgtgcaggatgagatcctggcccaccggctgggcctcatccccatccatgctgacccccggctgtttgagtacagaaaccagggagatgaggagggcacagaaattgacaccctgcagttccggctgcaggtgcgctgcaccaggaacccccacgccgccaaggacagcagtgaccccaatgagctgtatgtgaaccacaaggtgtacaccaggcacatgacctggatccccctgggcaaccaggccgacctcttccctgagggcaccatccggcctgtgcatgatgacatcctgattgcccagctgcggcccggccaggagattgacctgctgatgcactgtgtgaagggcatcggcaagaaggtggcccgggtggccaacccccggctggacaccttcagccgggagatcttcagaaatgagaagctgaagaaggtggtgcggctggcccgggtgcgggaccactacatcttctctgtggagagcactggagtgctgcccccagatgtgctggtgtctgaggccatcaaggtgctgatgggcaagtgccgccgcttcctggatgagctggatgctgtgcagatggactag

SEQ ID NO: 262842 - DNA, 1041 bp, Artificial Sequence
  derived and/or modified sequence
atggccgccagccaggccgtggaggagatgaggagccgggtggtgctgggggagtttggagtgagaaatgtgcacaccacagacttccctggcaactacagcggctatgatgatgcctgggaccaggacagatttgagaagaacttccgggtggatgtggtgcacatggatgagaacagcctggagtttgacatggtgggcattgatgctgccatcgccaatgccttccgccgcatcctgctggccgaggtgcccaccatggctgtggagaaggtgctggtgtacaacaacaccagcatcgtgcaggatgagatcctggcccaccggctgggcctcatccccatccatgctgacccccggctgtttgagtacagaaaccagggagatgaggagggcacagaaattgacaccctgcagttccggctgcaggtgcgctgcaccaggaacccccacgccgccaaggacagcagtgaccccaatgagctgtatgtgaaccacaaggtgtacaccaggcacatgacctggatccccctgggcaaccaggccgacctcttccctgagggcaccatccggcctgtgcatgatgacatcctgattgcccagctgcggcccggccaggagattgacctgctgatgcactgtgtgaagggcatcggcaaggaccacgccaagttcagccctgtggccacagccagctaccgcctgctgcctgacatcaccctgctggagcctgtggagggggaggccgctgaggagctgagccgctgcttcagccctggggtcatcgaggtgcaggaggtgcagggcaagaaggtggcccgggtggccaacccccggctggacaccttcagccgggagatcttcagaaatgagaagctgaagaaggtggtgcggctggcccgggtgcgggaccactacatcttctctgtggagagcactggagtgctgcccccagatgtgctggtgtctgaggccatcaaggtgctgatgggcaagtgccgccgcttcctggatgagctggatgctgtgcagatggactag

SEQ ID NO: 262843 - DNA, 633 bp, Artificial Sequence
  derived and/or modified sequence
atggccgtggagaaggtgctggtgtacaacaacaccagcatcgtgcaggatgaaattttggcccaccgcctcggacttatcccaatacacgctgatcccagactgtttgaatatcggaaccaaggtgacgaagaggggaccgagatagacaccctccagttcaggctgcaggtacgatgcacccgcaacccccacgccgcaaaggattctagtgatcctaatgagctctacgtgaaccacaaggtgtacactagacacatgacctggatcccactgggaaatcaggcagatttatttccagagggcacaatacgaccagtccacgatgatatcctgatcgcacagctacgcccaggacaagagattgatcttttaatgcactgtgttaaagggattggtaaaaaggttgccagggtggccaatccccggttggatacattctccagagagatatttcgcaacgaaaaactgaaaaaggtcgttcgtctagcacgggtgcgcgaccattatatcttctctgttgagtccacaggagttctgccccccgatgttctggtgtcggaggcaattaaagtcttaatgggcaaatgccggagatttcttgatgagttggacgctgtccaaatggactag

SEQ ID NO: 262844 - DNA, 1041 bp, Artificial Sequence
  derived and/or modified sequence
atggccgccagccaggccgtggaggagatgcggagccgggtggtgctaggcgagtttggagttcgcaatgtgcatacaactgactttccaggtaactactccggctacgacgacgcgtgggaccaggaccgtttcgagaagaactttcgggtcgatgtcgtacatatggacgagaattctctggaatttgatatggtgggcattgacgccgccatcgcgaacgcattcaggcgcatcttattggccgaggtaccaaccatggccgttgagaaagttttggtatacaacaatacatctatcgtgcaggacgagatcctagcacaccgacttggactcattcctattcatgccgatccgcgactgtttgagtacaggaatcagggcgatgaagaaggcaccgagattgataccttacagttccggttgcaggtccgctgtacccgtaatcctcatgctgctaaagattcaagcgatccgaacgagctctacgtgaaccacaaggtttacacccgccatatgacttggattcctctcgggaatcaggccgatcttttcccagagggcaccattagaccagtgcacgatgatattctgattgcccagctgagaccaggtcaggaaattgacctgttaatgcactgcgtgaaagggatcggaaaggaccatgcaaagtttagccctgtagcgacggcaagttaccgattgctccctgatattaccctacttgagcctgtggaaggtgaggcggcagaggagctgagccgttgcttttctcctggcgttattgaagttcaagaagtgcaaggaaagaaggtggcaagagtcgcaaacccacgcctagacaccttttcacgcgaaatctttcgcaacgaaaagctcaagaaggtggtgcgactggctagagttcgggatcattatatctttagcgtcgagtctactggcgtcttacctcctgatgtacttgtgtccgaagctatcaaggtgctgatggggaaatgtaggcgtttcctggacgagctggatgctgtccaaatggactag

SEQ ID NO: 262845 - DNA, 1150 bp, Artificial Sequence
  derived and/or modified sequence
agggctactaggacgcacgcgcgagatagaacctctagtctcgtggagagattgaagatggcggcttctcaggcggtggaggaaatgcggagccgcgtggttctgggggagtttggggttcgcaatgtccatactactgactttcccggtaactattccggttatgatgatgcctgggaccaggaccgcttcgagaagaatttccgtgtggatgtagtacacatggatgaaaactcactggagtttgacatggtgggaattgacgcagccattgccaatgcttttcgacgaattctgctagctgaggtgccaactatggctgtggagaaggtcctggtgtacaataatacatccattgttcaggatgagattcttgctcaccgtctggggctcattcccattcatgctgatccccgtctttttgagtatcggaaccaaggagatgaagaaggcacagagatagatactctacagtttcgtctccaggtcagatgcactcggaacccccatgctgctaaagattcctctgaccccaacgaactgtacgtgaaccacaaagtgtataccaggcatatgacatggatccccctggggaaccaggctgatctctttccagagggcactatccgaccagtgcatgatgatatcctcatcgctcagctgcggcctggccaagaaattgacctgctcatgcactgtgtcaagggcattggtaaaaaggtggccagagttgccaacccccggctggataccttcagcagagaaatcttccggaatgagaagctaaagaaggttgtgaggcttgcccgggttcgagatcattatatcttctctgttgagtcaacgggggtgttgccaccagatgtgctggtgagtgaagccatcaaagtactgatggggaagtgccggcgcttcttggatgaactagatgcggttcagatggactgagcttggatgcttctgaggcaagctgaagctttgggttctgactgacccaccctacaggactgctgaacagagagcccagtgtgactagggatcctgagttttctgggacaattccagctttaatcaatacattttgttaaatgtgccataaaatgagactttttacgcctttataaggccttagatgtaaataaactcaccc

SEQ ID NO: 262846 - DNA, 1355 bp, Artificial Sequence
  derived and/or modified sequence
aggaggcggtgcgttgccacggagacggagcagggctactaggacgcacgcgcgagatagaacctctagtctcgtggagagattgaagatggcggcttctcaggcggtggaggaaatgcggagccgcgtggttctgggggagtttggggttcgcaatgtccatactactgactttcccggtaactattccggttatgatgatgcctgggaccaggaccgcttcgagaagaatttccgtgtggatgtagtacacatggatgaaaactcactggagtttgacatggtgggaattgacgcagccattgccaatgcttttcgacgaattctgctagctgaggtgccaactatggctgtggagaaggtcctggtgtacaataatacatccattgttcaggatgagattcttgctcaccgtctggggctcattcccattcatgctgatccccgtctttttgagtatcggaaccaaggagatgaagaaggcacagagatagatactctacagtttcgtctccaggtcagatgcactcggaacccccatgctgctaaagattcctctgaccccaacgaactgtacgtgaaccacaaagtgtataccaggcatatgacatggatccccctggggaaccaggctgatctctttccagagggcactatccgaccagtgcatgatgatatcctcatcgctcagctgcggcctggccaagaaattgacctgctcatgcactgtgtcaagggcattggcaaagatcatgccaagttttcaccagtggcaacagccagttacaggctcctgccagacatcaccctgcttgagcccgtggaaggggaggcagctgaggagttgagcaggtgcttctcacctggtgttattgaggtgcaggaagtccaaggtaaaaaggtggccagagttgccaacccccggctggataccttcagcagagaaatcttccggaatgagaagctaaagaaggttgtgaggcttgcccgggttcgagatcattatatcttctctgttgagtcaacgggggtgttgccaccagatgtgctggtgagtgaagccatcaaagtactgatggggaagtgccggcgcttcttggatgaactagatgcggttcagatggactgagcttggatgcttctgaggcaagctgaagctttgggttctgactgacccaccctacaggactgctgaacagagagcccagtgtgactagggatcctgagttttctgggacaattccagctttaatcaatacattttgttaaatgtgccataaaatgagactttttacgcctttataaggccttagatgtaaataaactcacccaaacaaaaaaactttttgagacta

SEQ ID NO: 262847 - DNA, 633 bp, Artificial Sequence
  derived and/or modified sequence
atggccgtggaaaaggtcctggtctataataacacttcaatcgtccaggacgaaattctggcccatagactgggcctgataccaatccacgcggatcccaggttgttcgagtacagaaatcagggggacgaggagggaactgagatagacaccctccagttccgactgcaggtaaggtgcacccgtaatccccacgctgcaaaagattctagcgaccccaacgagttgtacgttaaccataaggtgtatacacgccatatgacttggattcccctcggcaatcaggctgacctgttcccagaaggaactattcgccctgtgcacgatgatatactgattgcccagctgcgcccaggccaagaaatagacctgctgatgcactgcgtgaaagggattggtaagaaagttgctagagtggccaatccgaggcttgacactttctctagagagatttttagaaatgaaaaactgaaaaaagtagttaggctcgccagagtgagggaccactacatcttctcagtcgagagcaccggagtgctccctcctgatgtattagtatcagaagccataaaggtcctgatgggcaagtgtcgacggtttctggacgagcttgatgccgtccaaatggactag

SEQ ID NO: 262848 - DNA, 1041 bp, Artificial Sequence
  derived and/or modified sequence
atggcggcttcacaagcggttgaggaaatgcgatccagagtcgttctgggcgaattcggtgtaaggaatgtgcatacaacagacttccctggtaattactctggatatgacgatgcctgggatcaggaccgttttgagaaaaactttcgagtggatgttgtgcacatggacgagaatagcctggagtttgatatggttggcatagatgccgctattgcaaacgcattcagaagaatcctgctcgcagaagtgcccaccatggctgtcgagaaagtgctggtgtacaataatacaagtatagttcaggatgagatattggcccaccggctcggtctcattcccatacacgctgaccccaggctttttgaatatcggaaccagggcgacgaagaaggtactgaaattgatacactacagttcagactgcaagtgcggtgcactcgcaatccacatgctgcaaaggatagctctgaccctaatgagctgtatgtgaaccataaagtgtatacacgtcacatgacatggattcccctcggcaaccaggccgacctctttccagaaggcaccatccgcccagtgcacgacgacatcctgatagcccagttgcgccctggccaggagattgacctactgatgcattgtgtcaaaggaattggcaaggatcatgccaagttctctccagtagcaaccgcgtcgtaccgcctcctcccagacataacactcttagagccagtcgagggcgaagccgcagaagaactgtcccggtgtttctcccccggtgtgatagaggtgcaggaagtgcaaggtaagaaagttgcccgagttgccaaccctagacttgatacgttttctagagagattttcagaaacgagaagctgaagaaggttgtccgcctggcgcgtgttagggatcattatattttctcagttgaatctactggagtgctgcctccagatgttcttgttagtgaggccatcaaggtgctaatgggaaaatgtcgccgattcctggatgagctcgacgctgtgcagatggactag

SEQ ID NO: 262849 - DNA, 633 bp, Artificial Sequence
  derived and/or modified sequence
atggccgtggagaaggtgctggtgtacaacaacaccagcatcgtgcaggacgagatcctggcccacagactgggcctgatccccatccacgccgaccccagactgttcgagtacagaaaccagggcgacgaggagggcaccgagatcgacaccctgcagttcagactgcaggtgagatgcaccagaaacccccacgccgccaaggacagcagcgaccccaacgagctgtacgtgaaccacaaggtgtacaccagacacatgacctggatccccctgggcaaccaggccgacctgttccccgagggcaccatcagacccgtgcacgacgacatcctgatcgcccagctgagacccggccaggagatcgacctgctgatgcactgcgtgaagggcatcggcaagaaggtggccagagtggccaaccccagactggacaccttcagcagagagatcttcagaaacgagaagctgaagaaggtggtgagactggccagagtgagagaccactacatcttcagcgtggagagcaccggcgtgctgccccccgacgtgctggtgagcgaggccatcaaggtgctgatgggcaagtgcagaagattcctggacgagctggacgccgtgcagatggactag

SEQ ID NO: 262850 - DNA, 1041 bp, Artificial Sequence
  derived and/or modified sequence
atggccgccagccaggccgtggaggagatgagaagcagagtggtgctgggcgagttcggcgtgagaaacgtgcacaccaccgacttccccggcaactacagcggctacgacgacgcctgggaccaggacagattcgagaagaacttcagagtggacgtggtgcacatggacgagaacagcctggagttcgacatggtgggcatcgacgccgccatcgccaacgccttcagaagaatcctgctggccgaggtgcccaccatggccgtggagaaggtgctggtgtacaacaacaccagcatcgtgcaggacgagatcctggcccacagactgggcctgatccccatccacgccgaccccagactgttcgagtacagaaaccagggcgacgaggagggcaccgagatcgacaccctgcagttcagactgcaggtgagatgcaccagaaacccccacgccgccaaggacagcagcgaccccaacgagctgtacgtgaaccacaaggtgtacaccagacacatgacctggatccccctgggcaaccaggccgacctgttccccgagggcaccatcagacccgtgcacgacgacatcctgatcgcccagctgagacccggccaggagatcgacctgctgatgcactgcgtgaagggcatcggcaaggaccacgccaagttcagccccgtggccaccgccagctacagactgctgcccgacatcaccctgctggagcccgtggagggcgaggccgccgaggagctgagcagatgcttcagccccggcgtgatcgaggtgcaggaggtgcagggcaagaaggtggccagagtggccaaccccagactggacaccttcagcagagagatcttcagaaacgagaagctgaagaaggtggtgagactggccagagtgagagaccactacatcttcagcgtggagagcaccggcgtgctgccccccgacgtgctggtgagcgaggccatcaaggtgctgatgggcaagtgcagaagattcctggacgagctggacgccgtgcagatggactag

SEQ ID NO: 262851 - protein, 865 aa, Artificial Sequence
  derived and/or modified sequence
MNISGSSCGSPNSADTSSDFKDLWTKLKECHDREVQGLQVKVTKLKQERILDAQRLEEFFTKNQQLREQQKVLHETIKVLEDRLRAGLCDRCAVTEEHMRKKQQEFENIRQQNLKLITELMNERNTLQEENKKLSEQLQQKIENDQQHQAAELECEEDVIPDSPITAFSFSGVNRLRRKENPHVRYIEQTHTKLEHSVCANEMRKVSKSSTHPQHNPNENEILVADTYDQSQSPMAKAHGTSSYTPDKSSFNLATVVAETLGLGVQEESETQGPMSPLGDELYHCLEGNHKKQPFEESTRNTEDSLRFSDSTSKTPPQEELPTRVSSPVFGATSSIKSGLDLNTSLSPSLLQPGKKKHLKTLPFSNTCISRLEKTRSKSEDSALFTHHSLGSEVNKIIIQSSNKQILINKNISESLGEQNRTEYGKDSNTDKHLEPLKSLGGRTSKRKKTEEESEHEVSCPQASFDKENAFPFPMDNQFSMNGDCVMDKPLDLSDRFSAIQRQEKSQGSETSKNKFRQVTLYEALKTIPKGFSSSRKASDGNCTLPKDSPGEPCSQECIILQPLNKCSPDNKPSLQIKEENAVFKIPLRPRESLETENVLDDIKSAGSHEPIKIQTRSDHGGCELASVLQLNPCRTGKIKSLQNNQDVSFENIQWSIDPGADLSQYKMDVTVIDTKDGSQSKLGGETVDMDCTLVSETVLLKMKKQEQKGEKSSNEERKMNDSLEDMFDRTTHEEYESCLADSFSQAADEEEELSTATKKLHTHGDKQDKVKQKAFVEPYFKGDESIMQICQQKKEKRNWLPAQDTDSATFHPTHQRIFGKLVFLPLRLVWKEVILRKILILVLVQKDVSLTTQYFLQKARSRRH

SEQ ID NO: 262852 - protein, 867 aa, Artificial Sequence
  derived and/or modified sequence
MNISGSSCGSPNSADTSSDFKDLWTKLKECHDREVQGLQVKVTKLKQERILDAQRLEEFFTKNQQLREQQKVLHETIKVLEDRLRAGLCDRCAVTEEHMRKKQQEFENIRQQNLKLITELMNERNTLQEENKKLSEQLQQKIENDQQHQAAELECEEDVIPDSPITAFSFSGVNRLRRKENPHVRYIEQTHTKLEHSVCANEMRKVSKSSTHPQHNPNENEILVADTYDQSQSPMAKAHGTSSYTPDKSSFNLATVVAETLGLGVQEESETQGPMSPLGDELYHCLEGNHKKQPFEESTRNTEDSLRFSDSTSKTPPQEELPTRVSSPVFGATSSIKSGLDLNTSLSPSLLQPGKKKHLKTLPFSNTCISRLEKTRSKSEDSALFTHHSLGSEVNKIIIQSSNKQILINKNISESLGEQNRTEYGKDSNTDKHLEPLKSLGGRTSKRKKTEEESEHEVSCPQASFDKENAFPFPMDNQFSMNGDCVMDKPLDLSDRFSAIQRQEKSQGSETSKNKFRQVTLYEALKTIPKGFSSSRKASDGNCTLPKDSPGEPCSQECIILQPLNKCSPDNKPSLQIKEENAVFKIPLRPRESLETENVLDDIKSAGSHEPIKIQTRSDHGGCELASVLQLNPCRTGKIKSLQNNQDVSFENIQWSIDPGADLSQYKMDVTVIDTKDGSQSKLGGETVDMDCTLVSETVLLKMKKQEQKGEKSSNEERKMNDSLEDMFDRTTHEEYESCLADSFSQAADEEEELSTATKKLHTHGDKQDKVKQKAFVEPYFKGDESIMQICQQKKEKRNWLPAQDTDSATFHPTHQRIFGKLVFLPLRLVWKEVILRKILILVLVQKDVSLTTQYFLQKARSRRHRR

SEQ ID NO: 262853 - DNA, 2598 bp, Artificial Sequence
  derived and/or modified sequence
atgaacatcagcggcagcagctgcggcagccccaacagcgccgacaccagcagcgacttcaaggacctgtggaccaagctgaaggagtgccacgacagagaggtgcagggcctgcaggtgaaggtgaccaagctgaagcaggagagaatcctggacgcccagagactggaggagttcttcaccaagaaccagcagctgagagagcagcagaaggtgctgcacgagaccatcaaggtgctggaggacagactgagagccggcctgtgcgacagatgcgccgtgaccgaggagcacatgagaaagaagcagcaggagttcgagaacatcagacagcagaacctgaagctgatcaccgagctgatgaacgagagaaacaccctgcaggaggagaacaagaagctgagcgagcagctgcagcagaagatcgagaacgaccagcagcaccaggccgccgagctggagtgcgaggaggacgtgatccccgacagccccatcaccgccttcagcttcagcggcgtgaacagactgagaagaaaggagaacccccacgtgagatacatcgagcagacccacaccaagctggagcacagcgtgtgcgccaacgagatgagaaaggtgagcaagagcagcacccacccccagcacaaccccaacgagaacgagatcctggtggccgacacctacgaccagagccagagccccatggccaaggcccacggcaccagcagctacacccccgacaagagcagcttcaacctggccaccgtggtggccgagaccctgggcctgggcgtgcaggaggagagcgagacccagggccccatgagccccctgggcgacgagctgtaccactgcctggagggcaaccacaagaagcagcccttcgaggagagcaccagaaacaccgaggacagcctgagattcagcgacagcaccagcaagacccccccccaggaggagctgcccaccagagtgagcagccccgtgttcggcgccaccagcagcatcaagagcggcctggacctgaacaccagcctgagccccagcctgctgcagcccggcaagaagaagcacctgaagaccctgcccttcagcaacacctgcatcagcagactggagaagaccagaagcaagagcgaggacagcgccctgttcacccaccacagcctgggcagcgaggtgaacaagatcatcatccagagcagcaacaagcagatcctgatcaacaagaacatcagcgagagcctgggcgagcagaacagaaccgagtacggcaaggacagcaacaccgacaagcacctggagcccctgaagagcctgggcggcagaaccagcaagagaaagaagaccgaggaggagagcgagcacgaggtgagctgcccccaggccagcttcgacaaggagaacgccttccccttccccatggacaaccagttcagcatgaacggcgactgcgtgatggacaagcccctggacctgagcgacagattcagcgccatccagagacaggagaagagccagggcagcgagaccagcaagaacaagttcagacaggtgaccctgtacgaggccctgaagaccatccccaagggcttcagcagcagcagaaaggccagcgacggcaactgcaccctgcccaaggacagccccggcgagccctgcagccaggagtgcatcatcctgcagcccctgaacaagtgcagccccgacaacaagcccagcctgcagatcaaggaggagaacgccgtgttcaagatccccctgagacccagagagagcctggagaccgagaacgtgctggacgacatcaagagcgccggcagccacgagcccatcaagatccagaccagaagcgaccacggcggctgcgagctggccagcgtgctgcagctgaacccctgcagaaccggcaagatcaagagcctgcagaacaaccaggacgtgagcttcgagaacatccagtggagcatcgaccccggcgccgacctgagccagtacaagatggacgtgaccgtgatcgacaccaaggacggcagccagagcaagctgggcggcgagaccgtggacatggactgcaccctggtgagcgagaccgtgctgctgaagatgaagaagcaggagcagaagggcgagaagagcagcaacgaggagagaaagatgaacgacagcctggaggacatgttcgacagaaccacccacgaggagtacgagagctgcctggccgacagcttcagccaggccgccgacgaggaggaggagctgagcaccgccaccaagaagctgcacacccacggcgacaagcaggacaaggtgaagcagaaggccttcgtggagccctacttcaagggcgacgagagcatcatgcagatctgccagcagaagaaggagaagagaaactggctgcccgcccaggacaccgacagcgccaccttccaccccacccaccagagaatcttcggcaagctggtgttcctgcccctgagactggtgtggaaggaggtgatcctgagaaagatcctgatcctggtgctggtgcagaaggacgtgagcctgaccacccagtacttcctgcagaaggccagaagcagaagacactag

SEQ ID NO: 262854 - DNA, 2604 bp, Artificial Sequence
  derived and/or modified sequence
atgaacatcagcggcagcagctgcggcagccccaacagcgccgacaccagcagcgacttcaaggacctgtggaccaagctgaaggagtgccacgacagagaggtgcagggcctgcaggtgaaggtgaccaagctgaagcaggagagaatcctggacgcccagagactggaggagttcttcaccaagaaccagcagctgagagagcagcagaaggtgctgcacgagaccatcaaggtgctggaggacagactgagagccggcctgtgcgacagatgcgccgtgaccgaggagcacatgagaaagaagcagcaggagttcgagaacatcagacagcagaacctgaagctgatcaccgagctgatgaacgagagaaacaccctgcaggaggagaacaagaagctgagcgagcagctgcagcagaagatcgagaacgaccagcagcaccaggccgccgagctggagtgcgaggaggacgtgatccccgacagccccatcaccgccttcagcttcagcggcgtgaacagactgagaagaaaggagaacccccacgtgagatacatcgagcagacccacaccaagctggagcacagcgtgtgcgccaacgagatgagaaaggtgagcaagagcagcacccacccccagcacaaccccaacgagaacgagatcctggtggccgacacctacgaccagagccagagccccatggccaaggcccacggcaccagcagctacacccccgacaagagcagcttcaacctggccaccgtggtggccgagaccctgggcctgggcgtgcaggaggagagcgagacccagggccccatgagccccctgggcgacgagctgtaccactgcctggagggcaaccacaagaagcagcccttcgaggagagcaccagaaacaccgaggacagcctgagattcagcgacagcaccagcaagacccccccccaggaggagctgcccaccagagtgagcagccccgtgttcggcgccaccagcagcatcaagagcggcctggacctgaacaccagcctgagccccagcctgctgcagcccggcaagaagaagcacctgaagaccctgcccttcagcaacacctgcatcagcagactggagaagaccagaagcaagagcgaggacagcgccctgttcacccaccacagcctgggcagcgaggtgaacaagatcatcatccagagcagcaacaagcagatcctgatcaacaagaacatcagcgagagcctgggcgagcagaacagaaccgagtacggcaaggacagcaacaccgacaagcacctggagcccctgaagagcctgggcggcagaaccagcaagagaaagaagaccgaggaggagagcgagcacgaggtgagctgcccccaggccagcttcgacaaggagaacgccttccccttccccatggacaaccagttcagcatgaacggcgactgcgtgatggacaagcccctggacctgagcgacagattcagcgccatccagagacaggagaagagccagggcagcgagaccagcaagaacaagttcagacaggtgaccctgtacgaggccctgaagaccatccccaagggcttcagcagcagcagaaaggccagcgacggcaactgcaccctgcccaaggacagccccggcgagccctgcagccaggagtgcatcatcctgcagcccctgaacaagtgcagccccgacaacaagcccagcctgcagatcaaggaggagaacgccgtgttcaagatccccctgagacccagagagagcctggagaccgagaacgtgctggacgacatcaagagcgccggcagccacgagcccatcaagatccagaccagaagcgaccacggcggctgcgagctggccagcgtgctgcagctgaacccctgcagaaccggcaagatcaagagcctgcagaacaaccaggacgtgagcttcgagaacatccagtggagcatcgaccccggcgccgacctgagccagtacaagatggacgtgaccgtgatcgacaccaaggacggcagccagagcaagctgggcggcgagaccgtggacatggactgcaccctggtgagcgagaccgtgctgctgaagatgaagaagcaggagcagaagggcgagaagagcagcaacgaggagagaaagatgaacgacagcctggaggacatgttcgacagaaccacccacgaggagtacgagagctgcctggccgacagcttcagccaggccgccgacgaggaggaggagctgagcaccgccaccaagaagctgcacacccacggcgacaagcaggacaaggtgaagcagaaggccttcgtggagccctacttcaagggcgacgagagcatcatgcagatctgccagcagaagaaggagaagagaaactggctgcccgcccaggacaccgacagcgccaccttccaccccacccaccagagaatcttcggcaagctggtgttcctgcccctgagactggtgtggaaggaggtgatcctgagaaagatcctgatcctggtgctggtgcagaaggacgtgagcctgaccacccagtacttcctgcagaaggccagaagcagaagacacagaagatag

SEQ ID NO: 262855 - DNA, 2598 bp, Artificial Sequence
  derived and/or modified sequence
atgaatatttctgggagctcctgcggtagccctaattcagcggatacgagcagcgatttcaaagatctgtggacaaagcttaaagagtgtcacgaccgggaggtacaaggattacaggtgaaagtgaccaagctgaaacaggaacgtatactcgatgcccagagactggaggaattcttcaccaagaaccagcagctgagagagcagcagaaggtgctacacgaaaccataaaggtccttgaagatcggctccgagctgggctctgtgatagatgcgctgtgacagaagagcacatgcgaaagaaacaacaggagttcgagaatattaggcagcaaaatcttaaactgataaccgagttgatgaacgagcgcaataccctgcaggaggagaataagaagctcagcgagcaacttcagcagaaaattgagaacgatcagcaacaccaagctgctgagttggagtgcgaagaagatgtgatccccgactcccctattaccgctttttcattttctggggtgaacaggttgaggcggaaggagaaccctcatgtccgctatattgagcagacccacaccaagcttgaacatagcgtgtgtgccaacgaaatgaggaaagtgtctaagtcgtccacccacccccagcacaaccctaatgagaacgagatcttagtcgctgacacctacgatcagtctcaatcgccaatggcaaaggcacacggaacgtcttcctatacccccgacaagagcagtttcaatcttgcaactgtagttgccgagacccttgggcttggggtccaagaagagtccgagacacagggccctatgagccccctgggcgacgaactttatcactgtcttgaggggaaccacaaaaagcagccgttcgaggaatctacccgaaacaccgaagatagcctccggttctcggacagtacctctaagactcccccacaagaggaactgcccaccagagtttcctccccagtctttggcgccaccagcagtattaagtctggactagacctcaatactagcctgagcccctctctgctgcagcctggaaaaaagaagcacttgaaaaccttgcccttctccaacacctgcatcagtcgattggaaaagacgaggtctaaaagcgaggactcggcactgtttactcaccatagtctaggcagtgaggttaacaaaataatcatccagtcgagcaacaaacagatactcataaataaaaatattagcgagtccctcggggagcagaaccggactgaatacggcaaggatagcaataccgataagcacctggaacctctgaaaagcctgggagggcggacttcaaaaaggaaaaaaactgaagaggagtccgagcatgaggtcagttgcccgcaagcctcatttgacaaagaaaatgcattcccatttcctatggataatcagttctccatgaatggagactgcgtgatggacaagcctctcgacttgagcgataggttcagtgctatacaacgtcaggaaaaatcacagggctcagagacgagtaagaataaattccgacaggtgacattgtacgaggccctgaagaccatccctaaggggttttcaagcagtcgaaaagcaagcgacggaaattgcactcttcctaaggattcgcctggagagccctgttctcaggaatgtatcatcctccagcctctgaataagtgttcaccagacaataagcctagcctgcagatcaaggaggaaaacgcggtcttcaagattccccttcgcccacgagagagcctcgaaacagaaaacgtcctggacgacattaagagtgcagggtcccatgagcctatcaaaatccagacccgcagcgatcatggaggctgtgagcttgctagcgtgttgcagctcaacccatgccgcaccggcaagatcaagtctctgcagaacaaccaggacgtgagttttgagaatatccaatggtcaatcgatcctggcgcggatctgagtcagtacaagatggatgtcacggtgatcgatacaaaagatggctcccagtcaaaactggggggggagaccgtcgatatggattgtacgctagtgtcagagacagttctgctcaaaatgaagaagcaagaacagaaaggcgagaagagttcaaatgaggagcgtaaaatgaacgattcactggaagatatgttcgatcgcactacgcacgaggaatatgagagttgcctcgctgatagcttcagccaagccgccgacgaagaagaggagctaagcacagccacaaaaaagctgcatacacacggcgataaacaggataaggtgaaacagaaagctttcgtggagccttacttcaagggcgacgagagcataatgcagatttgtcagcaaaaaaaggaaaaaaggaactggctaccagctcaggatactgattctgctacattccatccgacacaccagcgcatttttgggaaactggtgtttcttccacttagattagtttggaaggaagtaattctgagaaaaatcctgatcctcgtactggtgcagaaggatgtgtcactgacaacccagtacttcttacagaaggcacggtcacggcggcattag

SEQ ID NO: 262856 - DNA, 2604 bp, Artificial Sequence
  derived and/or modified sequence
atgaacatttctggctctagctgcggttcaccaaacagcgctgacacgtcttcagactttaaagatctgtggaccaagctgaaagaatgtcacgacagagaggtgcagggtctgcaggtaaaggtgaccaaactgaagcaagagagaatcctggacgctcagagattagaagagttttttaccaagaatcagcagttaagggagcaacagaaggtactgcatgagactatcaaagtcctggaggataggctccgcgccggactgtgcgaccgatgcgccgtaactgaggagcacatgaggaagaagcagcaggagttcgagaacattagacagcaaaaccttaagctcattaccgagcttatgaatgagcgaaacactctgcaggaagaaaataagaagctgtcagaacagctccagcagaagatcgaaaatgaccaacagcaccaggccgcggagcttgaatgcgaagaggacgtgattcctgatagtccgataacagctttctcgtttagcggggtcaaccgactgcgtagaaaggaaaatcctcacgtgagatatattgaacagacgcatactaagctagaacactcagtgtgtgccaacgaaatgcggaaagtgtccaagtcctcaacccacccccagcataacccgaatgagaacgaaatccttgtggccgatacctatgaccaaagccagtctccaatggctaaagcacacggtacatcgagttatactccagataagtccagtttcaacctcgctacagttgtggccgaaaccttaggcctgggcgtgcaggaggagagcgagacacagggtcctatgagtccacttggagacgagttgtaccactgcctggaaggaaatcataagaaacagccattcgaagagtcaacaagaaacaccgaagactcacttagattctcagacagtacaagtaagacacctcctcaagaagagctgcccacgcgcgtgtcttctccagttttcggagccacgagctcaattaaatcaggcctagacctgaataccagtctgagcccctccctacttcagcctggcaagaaaaagcatctcaagaccctcccgttttccaatacatgtatcagtcgcttagagaaaacacgctctaagagtgaggattcagccctctttacccaccatagtctgggaagcgaagtgaataaaataatcatccagtcaagtaataagcaaatcctgattaacaaaaacatctccgagtcgttgggagaacagaatagaacagagtatgggaaagattctaatacagacaagcacctggaaccactgaaaagtttgggcgggcgcacctctaagagaaagaaaacagaggaagagtccgaacatgaggtatcctgccctcaggcctcttttgataaagagaatgcatttcccttccctatggacaaccagttttccatgaatggggactgtgtgatggataagcctttagacctgtctgaccgatttagcgccatccaacgacaggagaagagtcagggctcagaaacttctaagaacaaatttcggcaggtcacgctttatgaggcacttaagacaatccccaaaggcttctcaagtagtagaaaggctagcgacgggaattgcaccctgccaaaggacagtcccggcgagccctgctcacaggagtgcattattcttcaacccctcaataaatgttcacccgataacaagccaagcctgcaaataaaggaagaaaacgcagtctttaagatcccactacggccaagagaaagcctggaaaccgaaaacgtgttagacgacatcaagagtgccggctcgcatgagccaattaagatccaaacccgctccgaccatggaggctgtgagctcgcctctgtcctacaactcaatccatgcagaaccggcaaaatcaagtcgctacaaaacaatcaggatgtctcattcgaaaacattcagtggtctattgatcccggggcagatctgtctcagtataaaatggatgtgactgtgatcgacacgaaggatggctctcagagcaagctcggaggggagactgttgacatggactgtaccctcgtctcagagaccgtcttgctcaagatgaagaagcaggagcagaagggggaaaaatcaagcaatgaagaacgaaagatgaatgactccttggaggacatgtttgatcgtaccacacatgaggaatatgagagttgcttggcagactcattcagtcaagccgctgacgaggaagaagagctgtccaccgccaccaagaagctacacacccatggggataagcaggataaggtgaaacaaaaggcttttgtcgagccctactttaaaggcgacgagagcataatgcaaatatgccaacagaagaaggagaaaagaaactggctacctgctcaagacacagacagcgccacatttcatccgacacatcagcggatttttgggaagctggtgtttctgccactcagattggtttggaaagaggtaattctcaggaaaatcctgatccttgtcttggtgcagaaagacgtgtccctcacgacacaatactttctgcagaaagcaaggtctcgtcgccaccgccggtag

SEQ ID NO: 262857 - DNA, 2598 bp, Artificial Sequence
  derived and/or modified sequence
atgaacatcagcggcagcagctgtggcagccccaacagcgctgacaccagcagtgacttcaaggacctgtggaccaagctgaaggaatgtcatgaccgggaggtgcagggcctgcaggtgaaggtgaccaagctgaagcaggagcgcatcctggatgcccagaggctggaggagttcttcaccaagaaccagcagctgcgggagcagcagaaggtgctgcacgagaccatcaaggtgctggaggaccggctgcgggccggcctgtgtgacagatgtgctgtgacagaggagcacatgaggaagaagcagcaggagtttgagaacatccggcagcagaacctgaagctgatcacagagctgatgaatgaaagaaacaccctgcaggaggagaacaagaagctgtctgagcagctgcagcagaagattgaaaatgaccagcagcaccaggccgctgagctggagtgtgaagaagatgtgatcccagacagccccatcacagccttctccttctctggagtgaaccggctgcggaggaaggagaacccccacgtgcgctacatcgagcagacccacaccaagctggagcacagcgtgtgtgccaatgagatgaggaaggtgtccaagagcagcacccacccccagcacaaccccaatgaaaatgagatcctggtggccgacacctatgaccagagccagagccccatggccaaggcccacggcaccagcagctacaccccagacaagagcagcttcaacctggccaccgtggtggccgagaccctgggcctgggcgtgcaggaggagagcgagacccagggccccatgagccccctgggagatgagctgtaccactgcctggagggcaaccacaagaagcagccctttgaggagagcaccaggaacacagaggacagcctgcgcttcagtgacagcaccagcaagaccccaccccaggaggagctgcccaccagggtgagcagccctgtgtttggagccaccagcagcatcaagagcggcctggacctgaacaccagcctgagccccagcctgctgcagcccgggaagaagaagcacctgaagaccctgcccttcagcaacacctgcatcagccggctggagaagaccaggagcaagtctgaggacagcgccctcttcacccaccacagcctgggcagcgaggtgaacaagatcatcatccagagcagcaacaagcagatcctgatcaacaagaacatcagcgagagcctgggggagcagaacagaacagaatatggcaaggacagcaacacagacaagcacctggagcccctgaagagcctgggcggccgcaccagcaagaggaagaagacagaggaggagagcgagcacgaggtgtcctgcccccaggccagctttgacaaggaaaatgccttccccttccccatggacaaccagttctccatgaatggagactgtgtgatggacaagcccctggacctgagtgaccgcttcagcgccatccagaggcaggagaagagccagggcagcgagaccagcaagaacaagttccggcaggtgaccctgtatgaggccctgaagaccatccccaagggcttcagcagcagcaggaaggccagtgatggcaactgcaccctgcccaaggacagccctggagagccctgcagccaggagtgcatcatcctgcagcccctgaacaagtgcagcccagacaacaagcccagcctgcagatcaaggaggagaatgctgtgttcaagatccccctgcggccccgggagagcctggagacagaaaatgtgctggatgacatcaagtctgctggcagccatgagcccatcaagatccagaccaggagtgaccacggcggctgtgagctggcctctgtgctgcagctgaacccctgcaggacaggcaagatcaagagcctgcagaacaaccaggatgtgtcctttgagaacatccagtggagcattgatcctggagctgacctgagccagtacaagatggatgtgacagtgattgacaccaaggatggcagccagagcaagctgggcggggagaccgtggacatggactgcaccctggtgtctgagaccgtgctgctgaagatgaagaagcaggagcagaagggggagaagagcagcaatgaggagaggaagatgaatgacagcctggaggacatgtttgacaggaccacccatgaggagtatgagagctgcctggccgacagcttcagccaggccgcagatgaggaggaggagctgagcacagccaccaagaagctgcacacccacggggacaagcaggacaaggtgaagcagaaggcctttgtggagccctacttcaagggagatgagagcatcatgcagatctgccagcagaagaaggagaagaggaactggctgcctgcccaggacacagacagcgccaccttccaccccacccaccagaggatctttgggaagctggtgttcctgcccctgcggctggtgtggaaggaggtgatcctgaggaagatcctgatcctggtgctggtgcagaaggatgtgtccctgaccacccagtacttcctgcagaaggcccggagcagaagacactag

SEQ ID NO: 262858 - DNA, 2604 bp, Artificial Sequence
  derived and/or modified sequence
atgaacatcagcggcagcagctgtggcagccccaacagcgctgacaccagcagtgacttcaaggacctgtggaccaagctgaaggaatgtcatgaccgggaggtgcagggcctgcaggtgaaggtgaccaagctgaagcaggagcgcatcctggatgcccagaggctggaggagttcttcaccaagaaccagcagctgcgggagcagcagaaggtgctgcacgagaccatcaaggtgctggaggaccggctgcgggccggcctgtgtgacagatgtgctgtgacagaggagcacatgaggaagaagcagcaggagtttgagaacatccggcagcagaacctgaagctgatcacagagctgatgaatgaaagaaacaccctgcaggaggagaacaagaagctgtctgagcagctgcagcagaagattgaaaatgaccagcagcaccaggccgctgagctggagtgtgaagaagatgtgatcccagacagccccatcacagccttctccttctctggagtgaaccggctgcggaggaaggagaacccccacgtgcgctacatcgagcagacccacaccaagctggagcacagcgtgtgtgccaatgagatgaggaaggtgtccaagagcagcacccacccccagcacaaccccaatgaaaatgagatcctggtggccgacacctatgaccagagccagagccccatggccaaggcccacggcaccagcagctacaccccagacaagagcagcttcaacctggccaccgtggtggccgagaccctgggcctgggcgtgcaggaggagagcgagacccagggccccatgagccccctgggagatgagctgtaccactgcctggagggcaaccacaagaagcagccctttgaggagagcaccaggaacacagaggacagcctgcgcttcagtgacagcaccagcaagaccccaccccaggaggagctgcccaccagggtgagcagccctgtgtttggagccaccagcagcatcaagagcggcctggacctgaacaccagcctgagccccagcctgctgcagcccgggaagaagaagcacctgaagaccctgcccttcagcaacacctgcatcagccggctggagaagaccaggagcaagtctgaggacagcgccctcttcacccaccacagcctgggcagcgaggtgaacaagatcatcatccagagcagcaacaagcagatcctgatcaacaagaacatcagcgagagcctgggggagcagaacagaacagaatatggcaaggacagcaacacagacaagcacctggagcccctgaagagcctgggcggccgcaccagcaagaggaagaagacagaggaggagagcgagcacgaggtgtcctgcccccaggccagctttgacaaggaaaatgccttccccttccccatggacaaccagttctccatgaatggagactgtgtgatggacaagcccctggacctgagtgaccgcttcagcgccatccagaggcaggagaagagccagggcagcgagaccagcaagaacaagttccggcaggtgaccctgtatgaggccctgaagaccatccccaagggcttcagcagcagcaggaaggccagtgatggcaactgcaccctgcccaaggacagccctggagagccctgcagccaggagtgcatcatcctgcagcccctgaacaagtgcagcccagacaacaagcccagcctgcagatcaaggaggagaatgctgtgttcaagatccccctgcggccccgggagagcctggagacagaaaatgtgctggatgacatcaagtctgctggcagccatgagcccatcaagatccagaccaggagtgaccacggcggctgtgagctggcctctgtgctgcagctgaacccctgcaggacaggcaagatcaagagcctgcagaacaaccaggatgtgtcctttgagaacatccagtggagcattgatcctggagctgacctgagccagtacaagatggatgtgacagtgattgacaccaaggatggcagccagagcaagctgggcggggagaccgtggacatggactgcaccctggtgtctgagaccgtgctgctgaagatgaagaagcaggagcagaagggggagaagagcagcaatgaggagaggaagatgaatgacagcctggaggacatgtttgacaggaccacccatgaggagtatgagagctgcctggccgacagcttcagccaggccgcagatgaggaggaggagctgagcacagccaccaagaagctgcacacccacggggacaagcaggacaaggtgaagcagaaggcctttgtggagccctacttcaagggagatgagagcatcatgcagatctgccagcagaagaaggagaagaggaactggctgcctgcccaggacacagacagcgccaccttccaccccacccaccagaggatctttgggaagctggtgttcctgcccctgcggctggtgtggaaggaggtgatcctgaggaagatcctgatcctggtgctggtgcagaaggatgtgtccctgaccacccagtacttcctgcagaaggcccggagcagaagacacagaagatag

SEQ ID NO: 262859 - DNA, 2598 bp, Artificial Sequence
  derived and/or modified sequence
atgaacatcagcggcagcagctgcggcagccccaacagcgccgacacgtcttctgactttaaggacctttggactaagctgaaggaatgccacgacagggaagtccaggggctgcaagtaaaggtgacaaagctgaaacaagaaagaattctggacgctcagcggctcgaagaatttttcaccaaaaaccagcaactcagggagcagcagaaggtgcttcatgaaacaattaaggtcctagaggataggctgagagcgggcctctgtgacagatgtgctgttacagaagaacatatgcggaaaaaacagcaggaattcgagaatattcggcagcaaaatttgaagctgataaccgagctcatgaatgaacgtaacacattacaggaggagaataaaaagctgtcagagcagttacaacagaagatcgagaatgaccagcaacaccaggcagcagaattggagtgtgaggaagatgttattccagactctcctattaccgcattttcatttagcggggtaaacagactccggcgtaaggagaacccccacgtccgttatatcgagcagacacacaccaagctcgagcactcagtgtgtgcaaacgagatgagaaaggtctccaagtcctcgacgcacccacaacacaacccaaatgaaaatgagatattggtggctgatacttacgaccagagtcaatctcctatggccaaagcacatggcacctcttcttacaccccagacaaaagctctttcaatctagctaccgtggtagccgaaaccctggggctcggtgtgcaagaggagtcagagacacagggcccaatgtcacccttaggagacgaactgtaccattgcttggaaggcaaccacaagaagcagcctttcgaggagtcaacacggaatactgaggatagtctgaggttttccgatagcacaagtaagacaccaccccaggaagaactgcctacacgggtcagctcacctgtgttcggcgccacctccagcatcaaatctggactcgatctgaacacttctttatcaccatctctcttacagccaggaaagaagaagcatctcaagaccctccccttttctaacacgtgtatctcaagactcgagaagactaggtcgaaaagcgaggattcagccctgttcacacaccactcattgggctctgaggtgaataagattatcatccagtctagcaacaaacagattctcatcaataagaacataagtgagtcactgggcgagcagaaccgcaccgagtatggcaaagacagcaataccgacaagcacctggaacccctgaaaagcctgggcggtcgtacatccaaacgcaagaagaccgaggaggaaagtgagcacgaggtcagttgcccgcaagcgagtttcgataaggagaatgcttttcccttccctatggacaaccagttttctatgaatggcgactgtgtgatggacaaaccattggacctgagcgatcgcttctcagccatccaacgccaggaaaaatcacagggtagcgaaacctctaagaataaatttcggcaagtgacgctttatgaggccctgaaaactattccgaaaggtttctcgtcctctcgcaaggcaagtgacggtaactgcaccctgcctaaggattcgccaggcgagccgtgctcacaggagtgcattatcctccaaccacttaataaatgcagccctgataacaagccatccctgcagattaaggaggagaatgccgtgtttaagatccctcttcggcctagagagtccctggagaccgagaatgtgctagatgacattaagtctgcggggagtcatgaaccaatcaagatccagacccgctctgatcacgggggatgcgaactggcatctgtgctccagctcaacccctgcagaactggaaaaatcaaatctctgcagaacaaccaggacgtttccttcgaaaatatccaatggagtattgaccccggggcagatctctcacagtacaaaatggatgtaaccgtgatcgacaccaaagatggctcccagagcaaactcggcggcgagaccgttgatatggattgcactcttgtctccgaaacagtcctcctcaagatgaagaaacaggagcagaaaggagagaaatccagtaacgaggagagaaagatgaatgactcacttgaagacatgttcgacaggactacccacgaggagtacgaatcctgtctagcggatagtttcagccaggccgctgatgaggaggaggagctgtcaactgccacaaagaagctgcacacgcatggcgacaaacaggacaaggttaaacaaaaagcatttgtcgaaccatactttaaaggcgatgagagcatcatgcagatatgccagcagaagaaagagaagaggaattggttgcctgctcaggacacagatagcgccaccttccaccctacacaccagcggatattcggcaagcttgtattcctgccattacgcctggtgtggaaagaggttatcttgagaaaaatccttatactcgttctggtgcagaaggacgtcagcttaaccacccagtattttctgcagaaggccaggagtcgccggcattag

SEQ ID NO: 262860 - DNA, 2604 bp, Artificial Sequence
  derived and/or modified sequence
atgaacatcagcggcagcagctgcggcagccccaacagcgccgacacgagctccgatttcaaagatttgtggacgaagctgaaggagtgccacgatagagaggtgcaagggttacaagtgaaagtgaccaaattgaagcaggaacgcatcctcgacgctcaacggctcgaagaattcttcactaaaaatcagcagctcagggagcagcagaaagtactgcacgaaacaattaaggtgctcgaagaccgcttgagagcagggctatgtgaccgctgtgccgtcacagaagaacacatgaggaagaagcagcaagagttcgaaaacattcgccagcagaatctgaagctgattacagaactcatgaacgaacgaaatacactgcaggaggaaaacaagaagctgagtgaacagctgcaacaaaagatcgaaaatgaccagcagcaccaggctgccgaactcgagtgcgaggaagatgttatccctgatagccctatcacagctttctcattttcgggcgttaaccgactgcggcgaaaggagaatcctcacgtgagatacatcgagcagacccatactaagttggaacacagcgtatgcgccaacgaaatgaggaaggtgagcaagtcatcgacccacccgcagcataaccccaatgagaatgagatattggttgctgacacgtacgaccagtcccagagccccatggcaaaggcccacggtacttcttcctatacgcctgacaaaagcagcttcaaccttgctaccgtagtggcggagaccttggggctgggggtgcaggaagaatcagaaacccagggacccatgtccccgctcggcgacgaactctatcattgcttggaaggaaatcacaaaaagcagcccttcgaggaaagcactagaaatactgaagactccctgaggttttccgacagcacctcaaaaacaccaccacaggaggagttgcccacaagggtctccagccccgtctttggggccacaagctccatcaaatctgggctcgatttaaacacctcccttagcccaagtctgttgcaaccagggaaaaagaaacacctgaagactttacccttctcaaacacttgtattagtcggttggagaaaacccggtcaaagtccgaggattctgcactgtttactcaccacagtctcggttccgaggtcaataagatcataattcagtcttctaataagcagatactcattaacaaaaacatcagtgagtcactcggggagcaaaatcggacagagtatggaaaagatagtaatactgacaagcacctcgagcccttgaaatccctgggggggcggacatcaaagcgcaaaaagactgaggaggagtcagagcacgaagttagctgtccgcaagcgagttttgataaagagaatgccttcccatttcctatggataaccagttctccatgaacggcgactgtgtaatggataagcccctggatctgtctgatcgattcagtgccatccagagacaggagaaatcccagggatcagaaacctccaagaataagttccgccaagtgacgctttacgaggcactgaagacaatacctaagggttttagctcctcacggaaagcaagcgatggcaactgtacactccctaaagatagtcctggcgagccgtgcagtcaggagtgcatcatactgcagccccttaacaaatgtagtccagataacaagccctccctacagattaaggaggagaacgccgtcttcaagatccccctccgcccacgggagtcccttgaaactgagaacgtcctagacgatattaagtccgccggatcacacgaaccaatcaaaatccaaacccgttctgatcacggtgggtgtgaactggcctccgtcctgcagcttaacccgtgccgcacagggaagatcaagtcgctacagaataatcaggacgtgagcttcgaaaatattcagtggagcattgatcctggtgcagacctgtcacagtacaagatggatgtcactgtcattgacaccaaggacggaagccagagtaagcttgggggcgaaaccgtggatatggattgtacgctcgtgagtgagactgtgctgctgaaaatgaaaaagcaggaacagaaaggcgagaagagctctaatgaagagcggaagatgaacgatagtctcgaagatatgttcgacagaactactcatgaggaatatgaatcatgcctcgccgattcattttcccaggccgccgacgaagaggaagagttgtcaactgctactaagaagctgcacacgcacggtgacaaacaggataaggtgaagcagaaggctttcgtggaaccatacttcaaaggcgatgagtcaatcatgcagatatgccaacaaaaaaaggaaaagagaaattggttgcctgcacaggacacagactcagcaacatttcatccaactcatcaaaggatattcgggaaacttgtattccttcccctgcggctggtgtggaaggaagtgatactgcgaaagattttgatcctcgtactcgtccaaaaggacgtgagtctaactactcagtacttcctgcagaaagccagatcccgccggcacaggagatag

SEQ ID NO: 262861 - DNA, 2598 bp, Artificial Sequence
  derived and/or modified sequence
atgaacatctcaggtagctcttgcggttcacctaactctgcagatacctcgagcgattttaaggatttatggactaaactgaaagagtgccacgacagagaagtccagggactgcaggtgaaagtgaccaaactaaagcaggaacggattcttgacgcccagagactggaggaatttttcactaagaaccaacagctacgcgagcaacaaaaggtcctccatgaaaccattaaggtactcgaagatcggttgcgggctggcctgtgtgacagatgtgcagtaacagaggagcacatgaggaagaaacagcaggagtttgaaaacatcaggcagcagaacctgaaactcattaccgagctgatgaacgagagaaatactcttcaggaggagaacaagaagctctcagaacagctccagcagaaaatagaaaatgatcagcagcatcaagcagctgaacttgagtgtgaggaagatgtgattcccgattctcctattaccgcattttcattttcgggcgtgaacaggctccggagaaaggagaaccctcatgtgcgttatatcgaacaaacccacaccaagctcgaacactcggtgtgcgccaatgaaatgcggaaagtctccaagagtagcactcaccctcagcataatcctaacgagaatgagattctggtggcagacacatatgaccagagccaaagccctatggctaaggcacacggaactagttcttatacacctgataaatcatcatttaacttggccaccgttgtcgcagagacactgggactcggggtgcaggaagaatccgagacgcaggggcctatgtctcccctaggagatgagttataccactgcttggagggtaatcacaagaaacaacctttcgaagagtccaccaggaacaccgaagatagcctgcggttcagcgattccactagcaagacacccccacaggaggaactaccaactcgggtttcatcaccggttttcggagcaacttcctctatcaagagcggactggatctcaatacctcactctccccgtcactgttgcaaccaggcaagaaaaaacacctcaagacccttccctttagcaatacctgtatcagtcggttggagaagactcgctccaaatctgaagattccgctttatttactcatcactcccttgggtcggaggtgaacaagattatcatccagtcctcaaataagcaaatcctgattaataaaaacattagcgaatcactgggcgagcagaatcgaactgaatacggcaaagacagcaatacagataagcatctggagcccctgaaatccctcggaggaagaacatcgaagcggaagaagacagaggaggaatccgagcatgaggtgagctgcccgcaggcttcctttgacaaagagaatgctttccccttccccatggacaatcagtttagcatgaacggagactgcgtgatggacaagcctttagatcttagcgataggttcagtgccattcaaaggcaggaaaaatcccagggtagtgagacctcaaaaaataaattcagacaggttacattgtacgaagctctgaaaactattccaaagggctttagctctagcaggaaggccagcgatgggaactgtacgctgccgaaagactccccaggggaaccttgtagccaggaatgcattatactgcagcctctcaataaatgctcccctgataacaagccttcattgcaaatcaaagaggaaaacgccgtgttcaagataccactgaggccacgggaaagtctcgagacagaaaacgtcctggatgacattaaatctgccggttcacacgaaccgattaagatacaaacacgatctgaccacgggggatgtgaactggccagtgtcttgcaacttaatccgtgcagaaccggcaaaatcaaatccttgcagaacaatcaggacgtgagcttcgagaacattcagtggagcattgaccctggagctgatctgtcccagtacaagatggatgtgactgtgattgacacgaaggacggttcacagagcaaactgggtggcgagacagttgacatggactgtacattagtgagcgaaactgttttactaaagatgaaaaagcaggagcagaaaggagagaagtcatccaacgaggagaggaaaatgaacgacagtctcgaagacatgtttgatcggaccacacatgaagagtatgagtcctgcctggccgatagcttttctcaagctgccgacgaagaagaggagttgtctacggcaaccaagaagctgcatacgcacggtgacaaacaagataaagtaaagcagaaagcctttgtggagccctacttcaaaggggacgagtccatcatgcagatttgccagcagaaaaaagaaaaacgaaactggcttcccgctcaggatacagattccgccacattccatccgacccaccagaggatcttcggaaagctggtgttccttcccttacgtttggtgtggaaggaggtgatccttcggaagattctgatcttggtgctcgtccagaaagacgttagtctcacgacacagtactttctgcagaaagcaaggtcaaggagacactag

SEQ ID NO: 262862 - DNA, 2604 bp, Artificial Sequence
  derived and/or modified sequence
atgaacatctccggctctagctgtggttccccaaactccgccgacacgtcctcagatttcaaagacctgtggactaaactgaaagagtgccacgacagagaagttcaaggcttacaggtgaaagtgaccaagttgaaacaagagcgaatcctggatgctcagcggctcgaggaattttttaccaagaatcaacagctaagggagcaacagaaggtcctgcacgaaacaatcaaggtgctcgaagaccgattgcgggcaggcctgtgcgacaggtgtgccgtaaccgaggaacacatgaggaaaaaacagcaggaattcgaaaacattcgacagcagaatcttaaactgataactgagctaatgaatgagcgaaataccttgcaggaagaaaataaaaaactgagcgagcagcttcagcagaaaattgagaatgatcagcagcatcaggctgctgagctggaatgtgaggaggacgtaatcccggattcgcctattaccgcattctcttttagcggcgttaatcgcctacgccgaaaagagaatcctcacgtgaggtatattgagcaaacacacactaaactggaacacagcgtgtgcgccaacgagatgcgcaaagtgtccaagagtagcacccacccccaacataatcccaacgagaacgagatcttggtagcagacacctatgatcagtcccagtctcctatggccaaagcacatggtacctctagctatacccccgataagagctccttcaacctcgcaacagtagtagctgaaaccctgggtcttggagtgcaagaggagtccgagacgcaggggcctatgagcccactgggtgacgaactgtaccactgtttggagggcaatcataagaaacagccttttgaggagtccacccgtaatacggaggattccctcaggttttccgactcaacttcgaaaacaccgcctcaggaggaattgccaactcgtgtgagctccccggttttcggagccaccagctccatcaaatctggacttgacctgaatacctctctgtccccctctctgctgcagccagggaagaaaaagcacctcaaaaccctccccttttctaacacttgcatctccagattagaaaaaactagatctaagagtgaggactccgcattgttcacacaccactcacttggtagtgaagtgaacaagattattatacagtcgtctaacaagcaaatccttataaacaaaaatatcagcgagtcactaggggaacaaaaccggacagaatatggtaaagattccaataccgacaaacaccttgaaccattaaagtccttggggggacgcacctccaagcgcaagaagacagaagaggaaagcgaacacgaggtgagctgcccacaggccagcttcgataaagaaaatgcattcccattcccaatggataatcagttttctatgaacggggattgcgtgatggataagccgctcgacctatctgatagattttccgcaatccagcgccaggagaagtctcaaggtagtgagacatcgaagaataaattccgacaggtgacactttacgaggctctcaagacaattccaaaagggttctccagcagtcgtaaggcaagcgatggtaactgtaccctgcccaaggatagccctggagagccatgttcccaggagtgcatcatattacagccccttaacaagtgctctcccgataacaaaccctcactccagattaaggaggaaaacgctgtttttaaaattcctttaagaccacgagagtctctcgagacagagaacgtcctagatgacataaagtccgctggatcacacgaaccaattaaaattcagacacgcagcgaccatgggggatgcgaacttgccagtgtcctgcaattgaacccctgtaggactgggaagatcaagtcgctgcaaaataaccaggatgtgagtttcgaaaacatccagtggtcgatcgatccaggagctgatctttcccaatacaagatggacgttaccgtaatcgatactaaagacggtagccagagcaagctgggcggtgagaccgtcgatatggactgcacactagtttctgagaccgtgctgttaaaaatgaagaaacaggagcagaaaggcgaaaaatcctctaacgaggagaggaaaatgaatgattcactggaggatatgtttgataggaccacacacgaagaatatgaatcatgtctggctgactccttttctcaagccgcagatgaagaggaggaattgtccacagccacaaaaaagctgcacacgcacggggataaacaggataaagtgaaacagaaagcatttgtcgagccctactttaaaggtgacgagtcaatcatgcagatctgccaacagaaaaaagagaaaaggaattggctgcccgctcaggatacagatagcgcaacatttcaccccacgcatcagaggatatttggaaagctggtgttcctgcccctgaggctagtctggaaggaggtgattcttcgtaaaatcttgatcttagtgctagtgcagaaggatgtctccctgacaactcagtactttcttcagaaagccagaagcaggaggcaccggcgatag

SEQ ID NO: 262863 - DNA, 3199 bp, Artificial Sequence
  derived and/or modified sequence
ggggagaaatggatggagaagggacctggctggaaagcctttgccccgctgctctgctccgcccataagaggacccctgaaatgtcccgtgcagtttgttcaagtcccctgtgtgatgaaatgtgcctctcgccttacccgtgtgagaatacctgtggtgtggcagcgagtattttggtgagcacctgcagtgtagtggtttatactaaggaatacacacaaattacaggcctttgagcccagaatgcaacttgggaggtatttgacctgtccaaagacgacttgatacctctataatgtaacagaaaaggtcagaaaatattaagcaagtagaagtgtggagcatattaagcaagatgaacatctcgggaagcagctgtggaagccctaactctgcagatacatctagtgactttaaggacctttggacaaaactaaaagaatgtcatgatagagaagtacaaggtttacaagtaaaagtaaccaagctaaaacaggaacgaatcttagatgcacaaagactagaagaattcttcaccaaaaatcaacagctgagggaacagcagaaagtccttcatgaaaccattaaagttttagaagatcggttaagagcaggcttatgtgatcgctgtgcagtaactgaagaacatatgcggaaaaaacagcaagagtttgaaaatatccggcagcagaatcttaaacttattacagaacttatgaatgaaaggaatactctacaggaagaaaataaaaagctttctgaacaactccagcagaaaattgagaatgatcaacagcatcaagcagctgagcttgaatgtgaggaagacgttattccagattcaccgataacagccttctcattttctggcgttaaccggctacgaagaaaggagaacccccatgtccgatacatagaacaaacacatactaaattggagcactctgtgtgtgcaaatgaaatgagaaaagtttccaagtcttcaactcatccacaacataatcctaatgaaaatgaaattctagtagctgacacttatgaccaaagtcaatctccaatggccaaagcacatggaacaagcagctatacccctgataagtcatcttttaatttagctacagttgttgctgaaacacttggacttggtgttcaagaagaatctgaaactcaaggtcccatgagcccccttggtgatgagctctaccactgtctggaaggaaatcacaagaaacagccttttgaggaatctacaagaaatactgaagatagtttaagattttcagattctacttcaaagactcctcctcaagaagaattacctactcgagtgtcatctcctgtatttggagctacctctagtatcaaaagtggtttagatttgaatacaagtttgtccccttctcttttacagcctgggaaaaaaaaacatctgaaaacactcccttttagcaacacttgtatatctagattagaaaaaactagatcaaaatctgaagatagtgcccttttcacacatcacagtcttgggtctgaagtgaacaagatcattatccagtcatctaataaacagatacttataaataaaaatataagtgaatccctaggtgaacagaataggactgagtacggtaaagattctaacactgataaacatttggagcccctgaaatcattgggaggccgaacatccaaaaggaagaaaactgaggaagaaagtgaacatgaagtaagctgcccccaagcttcttttgataaagaaaatgctttcccttttccaatggataatcagttttccatgaatggagactgtgtgatggataaacctctggatctgtctgatcgattttcagctattcagcgtcaagagaaaagccaaggaagtgagacttctaaaaacaaatttaggcaagtgactctttatgaggctttgaagaccattccaaagggcttttcctcaagccgtaaggcctcagatggcaactgcacgttgcccaaagattccccaggggagccctgttcacaggaatgcatcatccttcagcccttgaataaatgctctccagacaataaaccatcattacaaataaaagaagaaaatgctgtctttaaaattcctctacgtccacgtgaaagtttggagactgagaatgttttagatgacataaagagtgctggttctcatgagccaataaaaatacaaaccaggtcagaccatggaggatgtgaacttgcatcagttcttcagttaaatccatgtagaactggtaaaataaagtctctacaaaacaaccaagatgtatcctttgaaaatatccagtggagtatagatccgggagcagacctttctcagtataaaatggatgttactgtaatagatacaaaggatggcagtcagtcaaaattaggaggagagacagtggacatggactgtacattggttagtgaaaccgttctcttaaaaatgaagaagcaagagcagaagggagaaaaaagttcaaatgaagaaagaaaaatgaatgatagcttggaagatatgtttgatcggacaacacatgaagagtatgaatcctgtttggcagacagtttctcccaagcagcagatgaagaggaggaattgtctactgccacaaagaaactacacactcatggtgataaacaagacaaagtcaagcagaaagcgtttgtggagccgtattttaaaggtgatgaaagtattatgcagatatgccagcagaagaaagagaaaagaaattggcttcctgctcaagacaccgattccgctacattccacccaacacaccagagaatttttgggaagttggttttccttccactcagacttgtatggaaagaggttatattaaggaagatcttgatccttgtcctcgtccaaaaagacgtcagccttacaacgcaatattttctccaaaaggcaaggagcagaagacatagacgttgaaacagaaacagaaggatgaaggacagttttttccttcttagttatttatagttaaagttggtactaaacattgatttttttgatcttctgtaaatggatttataaatcagttttctattgaaaatgtttgtgatattttgcttttgcacctttaaaacaataaggcgctttcattttgcactctaacttaagagtttttactttatgtagtgatacctaatacaattttgaaaatacaa

SEQ ID NO: 262864 - DNA, 3221 bp, Artificial Sequence
  derived and/or modified sequence
cgcacgcggaaccggcgcgggcacctggggagaaatggatggagaagggacctggctggaaagcctttgccccgctgctctgctccgcccataagaggacccctgaaatgtcccgtgcagtttgttcaagtcccctgtgtgatgaaatgtgcctctcgccttacccgtgtgagaatacctgtggtgtggcagcgagtattttggtgagcacctgcagtgtagtggtttatactaaggaatacacacaaattacaggcctttgagcccagaatgcaacttgggaggtatttgacctgtccaaagacgacttgatacctctataatgtaacagaaaaggtcagaaaatattaagcaagtagaagtgtggagcatattaagcaagatgaacatctcgggaagcagctgtggaagccctaactctgcagatacatctagtgactttaaggacctttggacaaaactaaaagaatgtcatgatagagaagtacaaggtttacaagtaaaagtaaccaagctaaaacaggaacgaatcttagatgcacaaagactagaagaattcttcaccaaaaatcaacagctgagggaacagcagaaagtccttcatgaaaccattaaagttttagaagatcggttaagagcaggcttatgtgatcgctgtgcagtaactgaagaacatatgcggaaaaaacagcaagagtttgaaaatatccggcagcagaatcttaaacttattacagaacttatgaatgaaaggaatactctacaggaagaaaataaaaagctttctgaacaactccagcagaaaattgagaatgatcaacagcatcaagcagctgagcttgaatgtgaggaagacgttattccagattcaccgataacagccttctcattttctggcgttaaccggctacgaagaaaggagaacccccatgtccgatacatagaacaaacacatactaaattggagcactctgtgtgtgcaaatgaaatgagaaaagtttccaagtcttcaactcatccacaacataatcctaatgaaaatgaaattctagtagctgacacttatgaccaaagtcaatctccaatggccaaagcacatggaacaagcagctatacccctgataagtcatcttttaatttagctacagttgttgctgaaacacttggacttggtgttcaagaagaatctgaaactcaaggtcccatgagcccccttggtgatgagctctaccactgtctggaaggaaatcacaagaaacagccttttgaggaatctacaagaaatactgaagatagtttaagattttcagattctacttcaaagactcctcctcaagaagaattacctactcgagtgtcatctcctgtatttggagctacctctagtatcaaaagtggtttagatttgaatacaagtttgtccccttctcttttacagcctgggaaaaaaaaacatctgaaaacactcccttttagcaacacttgtatatctagattagaaaaaactagatcaaaatctgaagatagtgcccttttcacacatcacagtcttgggtctgaagtgaacaagatcattatccagtcatctaataaacagatacttataaataaaaatataagtgaatccctaggtgaacagaataggactgagtacggtaaagattctaacactgataaacatttggagcccctgaaatcattgggaggccgaacatccaaaaggaagaaaactgaggaagaaagtgaacatgaagtaagctgcccccaagcttcttttgataaagaaaatgctttcccttttccaatggataatcagttttccatgaatggagactgtgtgatggataaacctctggatctgtctgatcgattttcagctattcagcgtcaagagaaaagccaaggaagtgagacttctaaaaacaaatttaggcaagtgactctttatgaggctttgaagaccattccaaagggcttttcctcaagccgtaaggcctcagatggcaactgcacgttgcccaaagattccccaggggagccctgttcacaggaatgcatcatccttcagcccttgaataaatgctctccagacaataaaccatcattacaaataaaagaagaaaatgctgtctttaaaattcctctacgtccacgtgaaagtttggagactgagaatgttttagatgacataaagagtgctggttctcatgagccaataaaaatacaaaccaggtcagaccatggaggatgtgaacttgcatcagttcttcagttaaatccatgtagaactggtaaaataaagtctctacaaaacaaccaagatgtatcctttgaaaatatccagtggagtatagatccgggagcagacctttctcagtataaaatggatgttactgtaatagatacaaaggatggcagtcagtcaaaattaggaggagagacagtggacatggactgtacattggttagtgaaaccgttctcttaaaaatgaagaagcaagagcagaagggagaaaaaagttcaaatgaagaaagaaaaatgaatgatagcttggaagatatgtttgatcggacaacacatgaagagtatgaatcctgtttggcagacagtttctcccaagcagcagatgaagaggaggaattgtctactgccacaaagaaactacacactcatggtgataaacaagacaaagtcaagcagaaagcgtttgtggagccgtattttaaaggtgatgaaagtattatgcagatatgccagcagaagaaagagaaaagaaattggcttcctgctcaagacaccgattccgctacattccacccaacacaccagagaatttttgggaagttggttttccttccactcagacttgtatggaaagaggttatattaaggaagatcttgatccttgtcctcgtccaaaaagacgtcagccttacaacgcaatattttctccaaaaggcaaggagcagaagacatagacgttgaaacagaaacagaaggatgaaggacagttttttccttcttagttatttatagttaaagttggtactaaacattgatttttttgatcttctgtaaatggatttataaatcagttttctattgaaaatgtttgtgatattttgcttttgcacctttaaaacaataaggcgctttcattttgcactctaacttaagagtttttactttatgtagtgatacctaatacaattttgaaaat

SEQ ID NO: 262865 - protein, 118 aa, Artificial Sequence
  derived and/or modified sequence
MATPSLRGRLARFGNPRKPVLKPNKPLILANRVGERRREKGEATCITEMSVMMACWKQNEFRDDACRKEIQGFLDCAARAQEARKMRSIQETLGESGSLLPNKLNKLLQRFPNKPYLS

SEQ ID NO: 262866 - protein, 97 aa, Artificial Sequence
  derived and/or modified sequence
MATPSLRGRLARFGNPRKPVLKPNKPLILANRVGERRREKGEATCITEMSVMMACWKQNEFRDDACRKEIQGFLDCAARAQVTDGSWGAFSGKEWGR

SEQ ID NO: 262867 - DNA, 835 bp, Artificial Sequence
  derived and/or modified sequence
agcttggtgcgctatggcgacacccagcctgcggggtcgtctggcgcggtttgggaacccgcggaagcctgtgctgaagcccaataaacctctcattctagctaaccgcgtcggggagcggcgccgggagaagggcgaggcgacttgcatcacggagatgtcggtgatgatggcttgctggaagcagaatgaattccgcgacgatgcgtgcagaaaagagatccagggcttcctcgattgtgccgcgagggctcaggaagcccgaaagatgagatcaatacaggaaaccctgggagagtctgggagtttacttccaaataaattgaataagttgttacagaggtttcctaacaaaccttacctcagctgaaaatggacaagtattttcaatgactgaaatatagcttctgacaactatgcagaggcattttagagacattggcattgccatgccctctttggagggtagaagaggcaaaacacttttttcaccctttggaatcatagtatgggtagaagttatgatttatcttgaaataaaatcctctgaacagaacttggccttttgttgtgaattaggtactctcttcattcttgagcctcccctagaccctggaaattctttccttcctgatttgccctaggagcaggacaaataccgttgtattgtctttccctgcatttgaagtcttttacaccatttagtgcccttgcttttggatgcaataaggaagttgaagttgccttcgtctgtaaatacttagtgattgcctattttgtgcgtagtccctgcaaggtgctctctgaataataaagttaacaaactggtgaccta

SEQ ID NO: 262868 - DNA, 1202 bp, Artificial Sequence
  derived and/or modified sequence
cgcaaagcctgccgggagcttggtgcgctatggcgacacccagcctgcggggtcgtctggcgcggtttgggaacccgcggaagcctgtgctgaagcccaataaacctctcattctagctaaccgcgtcggggagcggcgccgggagaagggcgaggcgacttgcatcacggagatgtcggtgatgatggcttgctggaagcagaatgaattccgcgacgatgcgtgcagaaaagagatccagggcttcctcgattgtgccgcgagggctcaggtgaccgatggctcctggggtgctttctcaggaaaagaatgggggagatagaagtaatgattctccctgccttttgctaggaaaggccctttcattcatttgggaggtatattattcacgccaaagtgggaaaggttacagttttgaaggctgtgtgatcttgacggatttattcattgctctgaactttcgagttactgtacgtaaaatgaggctaaccaataccaccttaaagaatgttgtgagtgtcagatgaagtaatgaatgggaaaatcattttgaaaaatgtaaattgctgctcaagtagacattattgtgtgaaatagaactaaagagactaaaactaaataatgacaatagtttggtttcctgtctaggcttaattgttagctgagatagtagcttctgaacatagtctcatttgtaggtcccaacgcccttttgttgaaaagaggctgacatagatctctccaggctggttaacatcttcatgtgctttagggcattgtgagaactatgggcctacatcaggacaaacttgattgattgattggttttttgggtcagatcttaaaagtctggactagacaaactgtagagctgtcattcttgtatttgttttgtgttttcaggaagcccgaaagatgagatcaatacaggaaaccctgggagagtctgggagtttacttccaaataaattgaataagttgttacagaggtttcctaacaaaccttacctcagctgaaaatggacaagtattttcaatgactgaaatatagcttctgacaactatgcagaggcattttagagacattggcattgccatgccctctttggagggtagaagaggcaaaacacttttttcaccctttggaatcatagtatgggtagaagttatgatttatcttgaaataaaatcctctgaacag

SEQ ID NO: 262869 - DNA, 357 bp, Artificial Sequence
  derived and/or modified sequence
atggccacccccagcctgagaggcagactggccagattcggcaaccccagaaagcccgtgctgaagcccaacaagcccctgatcctggccaacagagtgggcgagagaagaagagagaagggcgaggccacctgcatcaccgagatgagcgtgatgatggcctgctggaagcagaacgagttcagagacgacgcctgcagaaaggagatccagggcttcctggactgcgccgccagagcccaggaggccagaaagatgagaagcatccaggagaccctgggcgagagcggcagcctgctgcccaacaagctgaacaagctgctgcagagattccccaacaagccctacctgagctag

SEQ ID NO: 262870 - DNA, 294 bp, Artificial Sequence
  derived and/or modified sequence
atggccacccccagcctgagaggcagactggccagattcggcaaccccagaaagcccgtgctgaagcccaacaagcccctgatcctggccaacagagtgggcgagagaagaagagagaagggcgaggccacctgcatcaccgagatgagcgtgatgatggcctgctggaagcagaacgagttcagagacgacgcctgcagaaaggagatccagggcttcctggactgcgccgccagagcccaggtgaccgacggcagctggggcgccttcagcggcaaggagtggggcagatag

SEQ ID NO: 262871 - DNA, 357 bp, Artificial Sequence
  derived and/or modified sequence
atggccaccccctccttgaggggacgactggcccgatttggcaatccccgaaaacccgtgctgaagcccaacaagccgctgatattggcgaacagagtgggcgaacgtcgacgggagaagggagaagccacatgcataactgaaatgtcagtgatgatggcctgctggaagcagaatgagttcagagatgatgcgtgtcggaaggagatacagggctttctggactgcgcagcccgtgctcaggaggcccggaaaatgcggtccatccaggagacattgggagagtccggttccttgctgcccaacaaattgaacaagcttctacagcggtttcccaacaaaccatatctgagttag

SEQ ID NO: 262872 - DNA, 294 bp, Artificial Sequence
  derived and/or modified sequence
atggctacaccttctctgagaggtagattggctagatttggaaaccctcggaagcctgtgctcaaaccaaataagcccttaatattagcaaatcgtgttggggagcggcgccgggaaaaaggtgaggcaacatgtattaccgagatgtcagtgatgatggcctgttggaagcagaatgagttccgcgatgacgcctgtagaaaagaaattcaaggtttcctggactgtgctgctagggctcaggtgaccgacggatcgtggggcgccttcagcggaaaagagtggggcaggtag

SEQ ID NO: 262873 - DNA, 357 bp, Artificial Sequence
  derived and/or modified sequence
atggccacccccagcctgcggggccgcctggccaggtttggaaaccccaggaagcctgtgctgaagcccaacaagcccctcatcctggccaacagagtgggggagaggagaagagagaagggggaggccacctgcatcacagagatgtctgtgatgatggcctgctggaagcagaatgagttcagagatgatgcctgcaggaaggagatccagggcttcctggactgtgccgcccgggcccaggaggccaggaagatgaggagcatccaggagaccctgggggagagcggcagcctgctgcccaacaagctgaacaagctgctgcagcgcttccccaacaagccctacctgtcctag

SEQ ID NO: 262874 - DNA, 294 bp, Artificial Sequence
  derived and/or modified sequence
atggccacccccagcctgcggggccgcctggccaggtttggaaaccccaggaagcctgtgctgaagcccaacaagcccctcatcctggccaacagagtgggggagaggagaagagagaagggggaggccacctgcatcacagagatgtctgtgatgatggcctgctggaagcagaatgagttcagagatgatgcctgcaggaaggagatccagggcttcctggactgtgccgcccgggcccaggtgacagatggctcctggggcgccttcagcggcaaggagtggggccgctag

SEQ ID NO: 262875 - DNA, 357 bp, Artificial Sequence
  derived and/or modified sequence
atggccacccccagcctgcggggccggctggcccggttcggcaacccacgcaagcccgtcctgaaacctaacaagcccctgatcttagcaaaccgggttggtgagagaaggcgcgagaagggcgaagcgacttgcataactgagatgtctgtgatgatggcctgctggaaacaaaatgaattccgtgacgacgcttgtcggaaggaaattcagggatttctggattgcgcagcccgagcccaggaggcccgtaagatgagatctattcaagaaaccttaggggagtctggaagcctgcttcctaataagttgaacaaactgctccagcggttcccaaacaaaccttacctctcttag

SEQ ID NO: 262876 - DNA, 294 bp, Artificial Sequence
  derived and/or modified sequence
atggccacccccagcctgcggggccggctggcccggttcggcaacccacgaaaacccgtactgaagcctaacaaacctctgattttggccaatcgggtgggtgagagaaggcgtgagaagggggaggccacctgcattacagaaatgtcagtcatgatggcgtgttggaaacagaatgagttccgagatgacgcatgcagaaaggagattcagggatttctggattgcgcagcgagggctcaagtgaccgatggcagctggggggccttttccgggaaagagtggggcaggtag

SEQ ID NO: 262877 - DNA, 357 bp, Artificial Sequence
  derived and/or modified sequence
atggcaaccccttccctaaggggacgactggccagattcgggaatccacgcaaaccagtgctcaaacctaataagcctctgattctcgccaatcgagtcggtgagcgacggagagaaaagggcgaggcaacctgcattaccgaaatgagcgtcatgatggcctgttggaagcaaaacgaattcagagacgacgcatgtcgcaaagagatccaaggctttctggactgcgcagctagggctcaggaggcccgaaagatgagatccattcaggaaacactgggagagtcggggtcattgttaccaaacaagctgaataagctgctgcaacggttccccaacaaaccctacctgtcatag

SEQ ID NO: 262878 - DNA, 294 bp, Artificial Sequence
  derived and/or modified sequence
atggctacgcctagcctgcggggacgattggcccgatttgggaacccgcgtaaacctgttctcaaacccaataagccacttatcctagctaaccgggtgggcgagcgcaggcgtgagaagggggaagccacatgcattaccgaaatgtctgttatgatggcatgttggaaacaaaacgagtttcgggatgacgcatgcaggaaagaaatccaggggtttctggattgcgcagctagggctcaggtaaccgatggttcatggggggctttcagcggaaaggaatggggccgatag

SEQ ID NO: 262879 - protein, 555 aa, Artificial Sequence
  derived and/or modified sequence
MLLFLSVPQPRPPGARTRAGAARVARWRRLRLQQLRRLRGLLRVLRGRPGAGSRRRGRMALCGQAAGAASLPSELIVHIFSFLPAPDRLRASASCSHWRECLFYPALWPQLRICLRVSPAEQPRLEFLMRKCGWFVRELRVEFAAENYLSGGGPGDGGGADTGTGGEEVEALQLSARWLEVLRTYLELVLCVLVSIRNNRNLQKFSLFGDISVLQQQGSLSNTYLSKVDPDGKKIKQIQQLFEEILSNSRQLKWLSCGFMLEIVTPTSLSSLSNAVANTMEHLSLLDNNIPGNSTLITAVELERFVNLHSLALDFCDFTAEMARVLTDSNHVPLQRLSLLVHNVSVMHKSLDNMPNDEHWKALSRKSTSFRVYIMAFDIKSEDMLKILKPSIPLERIHFDSYITCVSGAIVDLISRQYDKFLTHFILMNDVIDTSGFPDLSDNRNEDPLVLLAWRCTKLSLLAIHGYTVWAHNLIAIARLRGSDLKVLEVTEESIDFDQGELADQDVDPVHNLIEQVSLGLGQPWHAVMDIESLSVFTEPNRHFYREMQSFSEDI

SEQ ID NO: 262880 - DNA, 3853 bp, Artificial Sequence
  derived and/or modified sequence
tcttccggaagtcgcgccggtgcgcgccggactcctcccaccagcggcgacgtcaaactcagctcctaccacttctctgtctctgccgaccggcgcagggagggctgccttttccttacagtacgccttgaggcttccgggccgctgaagtttacgagcgagggcagtgcagttactcagtgtgccggcctcggacgcacgtgagtagagtttgagaagacagaggctggctcccggcaggccacgcccgcagaggcctttccccctctccacaacttgtgttctacttggttccgccgagacccacgacggttccgcccccttcttcctagtcattgatgttgttgttcttgtcagtgccgcagccccgaccgccgggagctcgaacccgagccggggccgcccgggtggcgcggtggcggcggctgcggctgcagcagctgcgacggctgcgggggctgctccgggtactgcgggggcggccgggagccggcagccggcggcggggccggatggctctgtgcgggcaggcggcgggcgctgcgtcgctgcccagcgagctgatcgtgcacatcttctcttttctgccggcgcccgaccggctgcgggcctcggcctcctgctcgcactggcgtgagtgcctcttctatccggccctgtggccccagctccgcatctgcctccgcgtctcgcccgcggagcagcctcggctggaattcctcatgcgcaagtgcggctggttcgtgcgagagctgcgtgttgaattcgccgccgagaactatctgagcggcggtggcccaggggacggaggtggcgcggacaccgggactggaggggaggaagtcgaggccctgcagctctcagctcgttggctggaagtgctgcgcacctacttggagctggtgctttgcgtgctggtcagcatccggaacaacaggaaccttcagaagtttagtctttttggagacataagtgttctacaacagcaaggaagtttgtcaaatacatacctcagcaaggtggaccctgatggcaaaaaaattaaacaaattcagcaactgtttgaagaaatcctgagtaatagtaggcaactgaaatggctgtcctgtgggtttatgctggaaatagtaaccccaacatcactgtcatctctctctaatgctgttgccaacaccatggagcacctcagtttactggacaataatattcctggtaacagcactcttattactgcagttgaactggagcgatttgtgaatctgcactcacttgccttggatttttgtgactttacagctgagatggcaagagtcttaactgatagcaaccatgtgcctttgcaacgactgtctcttctggttcacaatgtttctgtaatgcacaagtctctggacaacatgccaaatgatgagcattggaaagccctgtcacgaaagagcaccagctttcgggtctatataatggcttttgatatcaagagtgaagatatgttaaagattctgaaacccagtataccactagagaggattcattttgatagctatatcacttgtgtttcaggggctattgttgatcttatatccaggcaatatgacaagttcctcactcattttattttaatgaatgatgtgattgacacatctggttttccagatcttagtgacaaccgaaatgaagatccgttggttttattagcatggaggtgcacaaagctctctcttctggcaattcatggttacacggtgtgggcacacaacctcattgccattgctcgtcttcggggctctgatctgaaagtgcttgaagtcaccgaagaaagcattgattttgaccaaggtgaactggccgaccaggatgtagatccagtgcataaccttattgagcaggtatccctgggcctgggtcaaccttggcatgcagtcatggacatcgaatcactcagtgtcttcactgaaccaaatcgtcatttttacagagagatgcaaagcttcagtgaagacatttagcttttttttaatgtagaattcctgtggttacatatgcaagtagggtcctattatgtttttttttcagtagtgtgaattaatccttttgtgctgtgtttaatcagtattagctttatagaattatatatgtatattctacttcttgatcaaagaacgtagtcgggtattggtttagaagttcaaagtgacaatgtatagggctttcacggttaatggacttgttaccaaaccttaaggatatacagccgaagattgtctgaggttgctggctaactttatttttcactgagttactctgcctttttgacgtttttattctttgtgtgtcagagttcagagctcaggagccaaaatatttttatacatatatagatatatatccatagcctggtagatttatatgcaatgcactgcatccatgcattctgatagcatttcattaattttgatttcaaatggaagataaataatatcccaaatgaattatctgtaacagaaaagccaagactttaactttcattacatatctaatagttgatatcaccagttaccattttgaattttgtatagtactaggttagaacattgcttaatccttttaaaaaaaatgcatttacgtaaacacgaatactgaaattgttggattttttaactatatctgacataattttattcatcaattacattacacattcatttagcccagatttcaaatagtgggggaagaaagaaactgtatttcagagtaaaatctcctaaaggaaataaaaacacagagttgtaaatacacatgcttgcaaaaacattagtcgtgaaatccctagcaacaagtcactggatttttctctgtcagcacgcgtgtcagctgccaaagaatagacttaatgaagaagtgcccacatgctggcaggggccggcccactctggccagccagatactgctagattgtaatatttaaggtcgaatttcgacctgtggtacacagctgtgctgtggctcagtcagcaacctcagaactctgaaaaaacaaaacaaaaaaaaaaaaaaaagaaaaaaaaaacatgcacctgtttcactgtgaatagtgaatgtaaaggaaagaaaggaaaaactgaaagcttgttctatcacaggtatgagctgctatgatacatgaagaacattccatgaagtatgttttaaaaccttgttatatctgagaggctttaaaagcctattaactgtttcagggcaaccgcggtacagacgtggtctctgtgagacttccacctgaccccagttttaagtggtacgaatgttgtgcatttaatgttaaaggacagtctgcaataataaagtaagtagccaacctgggtgcccagcagtgctgagacctggctgctctattgtaagctttggaaacacaatttatgcaacagatgtccagatatgattctatttatggaaaaaagtttatatgtgttttacaaatggttttaccatcttatattaaaatgaccttttgacaggtgtgcactgttttgtctccagtgagcacataccatgcggattttatatgtacatcagtagtgtgaatccactggcacagtgtgtgtaaatgccagatgtggtgagattttatcttataaatgtgatcagataaaataactcctgacagaaactgtaaggaaaccagctgaatgtttgacctgatgactgatgttgtatggtttatgttaaatgtatattcttttaatcaatgaataaagcattaaaaatgatcattgtaatatattttattgtatatgaagcatgactacttttagtgttaaataaactgcaataatccttatattgtgtataataa

SEQ ID NO: 262881 - DNA, 405 bp, Artificial Sequence
  derived and/or modified sequence
ctcccaccagcggcgacgtcaaactcagctcctaccacttctctgtctctgccgaccggcgcagggagggctgccttttccttacagtacgccttgaggcttccgggccgctgaagtttacgagcgagggcagtgcagttactcagtgtgccggcctcggacgcacgtgagtagagtttgagaagacagaggctggctcccggcaggcggcgggcgctgcgtcgctgcccagcgagctgatcgtgcacatcttctcttttctgccggcgcccgaccggctgcgggcctcggcctcctgctcgcactggcgtgagtgcctcttctatccggccctgtggccccagctccgcatctgcctccgcgtctcgcccgcggagcagcctcggctggaattcctcatgcgca

SEQ ID NO: 262882 - DNA, 1668 bp, Artificial Sequence
  derived and/or modified sequence
atgctgctctttctctcagtgccacagcctcggcctccaggcgctcgcaccagagcaggagcagctagagtggctaggtggagaaggttgaggcttcagcagctgagaagactaagaggactgcttcgtgtgttacgagggcggccaggcgctggtagccgccgcagaggccgcatggccctgtgcgggcaggctgctggggctgctagccttccatcggagcttatcgtgcatatcttctcctttcttccagcccccgacagactacgtgcctccgccagctgctcacattggcgcgagtgtcttttttacccagccctttggccacagctccggatctgcctgcgtgtaagtcccgccgagcagccaagactcgaatttttgatgcgaaaatgcggctggttcgtcagagagttgcgagtggagtttgccgcagagaattatctgtccggcggcgggccaggggacggcggaggcgctgacactggtacggggggagaagaggtggaggcccttcagttatctgcccggtggctcgaagtcctacggacatatctggagctggtgctgtgtgtactggtttcgatacgtaataatcgcaatttgcagaaattcagtttgtttggcgatatcagtgtgttgcagcagcagggttccctcagtaacacctacctgagcaaagttgatcctgacggcaagaagataaagcagatccaacagttattcgaagagatactcagcaacagcagacagctcaagtggctgagttgcggctttatgctggaaatcgttaccccaaccagtcttagcagcttatcaaatgctgtcgcaaacactatggaacacctgagtctgcttgacaacaacatccccggcaacagcactctgattactgcagtagagctggagcgtttcgtaaacctccatagcctggcactggacttctgtgacttcaccgctgagatggccagagtcctcactgactccaaccacgtgccccttcaacgccttagtcttttagtgcataacgtgtcagtgatgcacaaatccttggataacatgccaaatgatgaacattggaaggctttgagtagaaagagtacaagctttcgggtttatataatggcctttgacattaaaagcgaggacatgctgaagatcctgaaacctagtatccccctggaaaggatacactttgattcttacatcacctgcgtgagtggggcgatcgtagatctgatctctcgtcaatacgacaaattcctgacacattttattctcatgaatgatgtcattgataccagcggctttccagacctgtcagacaaccgaaatgaagaccccctggtactcctcgcctggaggtgtacgaaactttccctgttagctatccacggctacacggtgtgggctcataacctgatcgccatcgcgcgactccgcggtagcgatctgaaggttctagaagtgacagaggagagcatagatttcgatcagggggagctggctgaccaagacgtggaccctgtgcataatctcattgagcaagtgagtttgggcttgggtcagccatggcatgccgtgatggacattgaatcactgagcgtgtttactgagccaaatcgccatttctaccgagagatgcagtcattctcagaagacatctag

SEQ ID NO: 262883 - DNA, 1668 bp, Artificial Sequence
  derived and/or modified sequence
atgctgctcttcctgtctgtgccccagccccggcccccaggggcccggaccagggctggagctgcccgggtggcccgctggaggcggctgcggctgcagcagctgcggcggctgcggggcctgctgcgggtgctgcggggccggcctggagctggcagcagaagaagaggccgcatggccctgtgtggccaggccgccggggccgccagcctgcccagcgagctgattgtgcacatcttctccttcctgcctgccccagaccggctgcgggccagcgccagctgcagccactggagggagtgcctcttctacccagccctgtggccccagctgcgcatctgcctgcgggtgtccccagctgagcagccccggctggagttcctgatgaggaaatgtggctggtttgtgcgggagctgcgggtggagtttgctgctgagaactacctgagcggcggcggccctggagatggcggcggcgctgacaccggcaccggcggggaggaggtggaggccctgcagctgagcgcccgctggctggaggtgctgcggacctacctggagctggtgctgtgtgtgctggtgtccatccggaacaacagaaacctgcagaagttcagcctgtttggagacatctctgtgctgcagcagcagggcagcctgagcaacacctacctgagcaaggtggaccctgatggcaagaagatcaagcagatccagcagctgtttgaggagatcctgagcaacagccggcagctgaagtggctgagctgtggcttcatgctggagatcgtgacccccaccagcctgagcagcctgagcaatgctgtggccaacaccatggagcacctgagcctgctggacaacaacatccctggcaacagcaccctcatcacagctgtggagctggagagatttgtgaacctgcacagcctggccctggacttctgtgacttcaccgctgagatggcccgggtgctgacagacagcaaccacgtgcccctgcagaggctgagcctgctggtgcacaacgtgtctgtgatgcacaagagcctggacaacatgcccaatgatgagcactggaaggccctgagcaggaagagcaccagcttccgggtgtacatcatggcctttgacatcaagtctgaggacatgctgaagatcctgaagcccagcatccccctggagcgcatccactttgacagctacatcacctgtgtgtctggggccatcgtggacctgatcagccggcagtatgacaagttcctgacccacttcatcctgatgaatgatgtgattgacaccagcggcttcccagacctgagtgacaacagaaatgaagaccccctggtgctgctggcctggcgctgcaccaagctgagcctgctggccatccacggctacacagtgtgggcccacaacctgattgccatcgcccggctgcggggcagtgacctgaaggtgctggaggtgacagaggagagcattgactttgaccagggcgagctggccgaccaggatgtggaccctgtgcacaacctgattgagcaggtgtccctgggcctgggccagccctggcatgctgtgatggacatcgagagcctgtctgtgttcacagagcccaacagacacttctaccgggagatgcagagcttcagcgaggacatctag

SEQ ID NO: 262884 - DNA, 1668 bp, Artificial Sequence
  derived and/or modified sequence
atgctgctgttcctgagcgtgccccagccccggccccccggcgccaggacacgagctggagcagcccgcgtagctcggtggcgacggctgaggctccagcagcttcgcaggctacgcggattgctgcgcgtgcttcgcgggcgcccaggggctgggtccaggaggcggggtcggatggcactctgtggtcaggccgccggtgctgcttcactcccctctgaactgatcgtgcatatcttctctttcctgccagcaccagacaggttgagagcttctgcgtcctgttctcattggagggaatgtctcttttatcctgccctgtggcctcagctgcgcatctgcctcagggtgtctccggcagaacagccccgacttgagttcctaatgcgaaaatgcggctggttcgtccgggaattgcgggttgagtttgcggccgagaattacctctccggagggggtcctggtgatggaggaggtgcagatacaggtacgggcggagaggaggtggaggcccttcagctgtcggcccggtggttggaggtgctccgcacttatttagaactcgtgttgtgcgtgctcgtcagcattcgcaacaatcgcaacctgcagaagttttctctgttcggagatatttctgtgctgcagcagcagggaagccttagtaacacatatctatccaaagtcgatcccgacggaaagaagataaaacaaatacagcagctgtttgaggagattctgtccaatagccgacagctgaaatggctttcgtgtggattcatgctggagatcgtgacgcccacatccctgtcgtccctttcaaacgccgtggctaatactatggagcaccttagtctcctcgataacaacatacctggcaacagtacgctaatcacagccgttgagcttgagagattcgtcaacctccactcactggccttagacttttgcgacttcactgcggagatggcgcgggtgctcacagacagcaaccacgttccattgcagcggctctcactgcttgtccataatgtcagcgtaatgcacaagagcctggataatatgcctaatgacgagcattggaaggccctctctcgtaaatcaacaagtttcagagtgtacattatggcctttgacataaagagcgaggacatgctcaaaatcttaaagcccagtatccccttagagcgcatacatttcgattcctacattacctgcgtgagcggggccatagtggacctgatctcgagacagtatgacaaattcctcacgcactttatcctcatgaatgatgtgatcgatacaagtggattcccagacctcagtgataatcggaacgaagatccactggtccttctggcatggaggtgcaccaaacttagcctcctagctatccatggctataccgtttgggcgcacaatctgatcgccattgcccgactacggggcagcgatctcaaagtgttggaagtgaccgaggagtcaatcgatttcgatcagggggaactcgcggatcaggatgtggacccggttcacaacctgattgaacaagtatcactggggttgggccagccatggcatgcagtgatggacattgagtcactgtccgtgtttacagagccaaacagacacttttatcgggagatgcagtcttttagcgaggatatctag

SEQ ID NO: 262885 - DNA, 1668 bp, Artificial Sequence
  derived and/or modified sequence
atgttattgttcttgagcgtgcctcagccgaggccccctggggctagaacacgggctggtgcagcacgcgtcgcccgatggcgccgtttgagactccagcagctccgccgactcagagggctgctcagagtactgcgtgggcgtccgggagcaggaagccgcagaaggggcaggatggccctctgtgggcaagcagctggggcagccagcctgccttccgagctgattgtgcacatattctctttcctgccagcccctgacaggttaagagcctccgcctcttgcagccactggagagaatgcctcttttaccctgcgctctggcctcagcttcgaatctgcctgagggtgagtccagccgaacagcctagactggagttcctcatgagaaaatgcggctggttcgtaagggaattgcgtgttgagtttgccgctgaaaattatctgtcgggaggtggccctggggacggcggaggggcagacaccggcaccgggggagaggaagtggaagccttacagctttccgcaaggtggcttgaggtactgcggacgtatcttgagctggtcctatgtgttctggtgtctatcagaaacaacagaaatctgcaaaagttcagtctttttggggatataagcgttctacagcagcaggggtctctgagtaatacatacctctccaaggtcgaccctgacggcaaaaagattaagcagattcagcagttatttgaagagatactaagcaacagcaggcagctaaaatggttatcttgtggcttcatgctcgagatcgttacgcctacttcactgagcagccttagcaacgcggtcgctaacacaatggaacacctgtcactcctggataataatatcccaggtaacagtacactgatcactgccgttgagctggagagatttgtgaatctgcattccctggccctagatttttgcgactttacagcagagatggctcgggtgcttacagacagcaaccacgttccactgcagcggctgtcccttctcgttcacaacgttagcgtgatgcacaaaagcctggataatatgcctaacgacgaacattggaaggcattgtcgcgaaagagcacgtctttccgcgtgtacatcatggctttcgacataaaaagtgaggatatgttgaagatcctgaaaccaagtattcccctggagcgcattcactttgattcttatatcacttgcgtatctggcgcaatcgtggatctaatatcgcggcagtatgataaattcctgactcactttatcctgatgaatgatgttatcgacacgtctgggtttcctgatctcagcgacaaccggaacgaagaccccctggtgctcctggcctggcgctgtactaagctttcccttctagccatacacggctacacggtgtgggcccataacctgatcgcaattgccagactaagaggatccgatctgaaggtgcttgaagtgaccgaggaatctattgactttgaccagggtgaactggccgatcaggacgtggacccagtacataacttgattgaacaggtcagcctgggtctgggacagccttggcatgctgtgatggatatcgagtctcttagtgtttttactgagcccaaccggcacttttaccgtgagatgcagtcctttagcgaagacatctag

SEQ ID NO: 262886 - DNA, 1668 bp, Artificial Sequence
  derived and/or modified sequence
atgctgctgttcctgagcgtgccccagcccagaccccccggcgccagaaccagagccggcgccgccagagtggccagatggagaagactgagactgcagcagctgagaagactgagaggcctgctgagagtgctgagaggcagacccggcgccggcagcagaagaagaggcagaatggccctgtgcggccaggccgccggcgccgccagcctgcccagcgagctgatcgtgcacatcttcagcttcctgcccgcccccgacagactgagagccagcgccagctgcagccactggagagagtgcctgttctaccccgccctgtggccccagctgagaatctgcctgagagtgagccccgccgagcagcccagactggagttcctgatgagaaagtgcggctggttcgtgagagagctgagagtggagttcgccgccgagaactacctgagcggcggcggccccggcgacggcggcggcgccgacaccggcaccggcggcgaggaggtggaggccctgcagctgagcgccagatggctggaggtgctgagaacctacctggagctggtgctgtgcgtgctggtgagcatcagaaacaacagaaacctgcagaagttcagcctgttcggcgacatcagcgtgctgcagcagcagggcagcctgagcaacacctacctgagcaaggtggaccccgacggcaagaagatcaagcagatccagcagctgttcgaggagatcctgagcaacagcagacagctgaagtggctgagctgcggcttcatgctggagatcgtgacccccaccagcctgagcagcctgagcaacgccgtggccaacaccatggagcacctgagcctgctggacaacaacatccccggcaacagcaccctgatcaccgccgtggagctggagagattcgtgaacctgcacagcctggccctggacttctgcgacttcaccgccgagatggccagagtgctgaccgacagcaaccacgtgcccctgcagagactgagcctgctggtgcacaacgtgagcgtgatgcacaagagcctggacaacatgcccaacgacgagcactggaaggccctgagcagaaagagcaccagcttcagagtgtacatcatggccttcgacatcaagagcgaggacatgctgaagatcctgaagcccagcatccccctggagagaatccacttcgacagctacatcacctgcgtgagcggcgccatcgtggacctgatcagcagacagtacgacaagttcctgacccacttcatcctgatgaacgacgtgatcgacaccagcggcttccccgacctgagcgacaacagaaacgaggaccccctggtgctgctggcctggagatgcaccaagctgagcctgctggccatccacggctacaccgtgtgggcccacaacctgatcgccatcgccagactgagaggcagcgacctgaaggtgctggaggtgaccgaggagagcatcgacttcgaccagggcgagctggccgaccaggacgtggaccccgtgcacaacctgatcgagcaggtgagcctgggcctgggccagccctggcacgccgtgatggacatcgagagcctgagcgtgttcaccgagcccaacagacacttctacagagagatgcagagcttcagcgaggacatctag

SEQ ID NO: 262887 - protein, 651 aa, Artificial Sequence
  derived and/or modified sequence
MPSSLGQPDGGGGGGGGGGGVGAAGEDPGPGPAPPPEGAQEAAPAPRPPPEPDDAAAALRLALDQLSALGLGGAGDTDEEGAAGDGAAAAGGADGGAAPEPVPPDGPEAGAPPTLAPAVAPGSLPLLDPNASPPPPPPPRPSPPDVFAGFAPHPAALGPPTLLADQMSVIGSRKKSVNMTECVPVPSSEHVAEIVGRQGCKIKALRAKTNTYIKTPVRGEEPVFIVTGRKEDVEMAKREILSAAEHFSIIRATRSKAGGLPGAAQGPPNLPGQTTIQVRVPYRVVGLVVGPKGATIKRIQQRTHTYIVTPGRDKEPVFAVTGMPENVDRAREEIEAHITLRTGAFTDAGPDSDFHANGTDVCLDLLGAAASLWAKTPNQGRRPPTATAGLRGDTALGAPSAPEAFYAGSRGGPSVPDPGPASPYSGSGNGGFAFGAEGPGAPVGTAAPDDCDFGFDFDFLALDLTVPAAATIWAPFERAAPLPAFSGCSTVNGAPGPPAAGARRSSGAGTPRHSPTLPEPGGLRLELPLSRRGAPDPVGALSWRPPQGPVSFPGGAAFSTATSLPSSPAAAACAPLDSGASENSRKPPSASSAPALARECVVCAEGEVMAALVPCGHNLFCMDCAVRICGKSEPECPACRTPATQAIHIFS

SEQ ID NO: 262888 - DNA, 498 bp, Artificial Sequence
  derived and/or modified sequence
tggagatggacaagttgccgaagatccgggtggggcgccctcgcaacacgcacccgaagaggccgccctggcacacctcccccgccgcggccaagtccccctgacgtgttcgcagggttcgcgccccacccagctgcgctaggaccacctacattattagccgaccagatgtccgtcataggatcccgaaaaaagtcagtgaatatgactgagtgcgttccagtgccgagttcagaacacgtggccgagatcgtcggaagacagggctgcaaaattaaagccctgcgcgctaaaactaacacatacatcaagacacctgtgcggggagaagaacctgtgttcatcgtaacaggtcgtaaggaagatgttgagatggctaaacgcgagatcctgtctgctgctgagcacttctctattatccgcgctacacgatctaaagctggcgggctgccaggcgccgcacaaggacctcccaatcttcccggccagacaacatag

SEQ ID NO: 262889 - DNA, 1956 bp, Artificial Sequence
  derived and/or modified sequence
atgccgtcatcccttgggcagccggacggcggaggcggtggtggcggtggcggcggaggcgtgggagctgccggagaggaccctggacctgggcctgcccccccacccgaaggcgcccaggaagctgcacccgcacctcggcctcccccagaacccgatgacgctgcagccgcgctgcggctggcattggatcagcttagtgcacttggcttagggggcgccggcgatacggacgaagagggcgccgctggtgacggcgccgcagccgctggaggagcggatggcggggctgccccagagccagtaccgcctgatgggcctgaggcgggtgctcctcctactttagctcccgccgttgcacccggctccctccctcttctcgaccccaacgccagcccaccgcccccgccacccccacggccctctcccccggatgtatttgctggctttgcccctcatcctgccgcactcggacctcccaccctgcttgcggaccagatgtccgtgattggctctcggaaaaaatctgtaaatatgaccgagtgtgtccctgtcccatcaagcgaacatgtggccgagattgtcggcagacagggatgcaagattaaagcactcagggcaaagaccaatacctacatcaagaccccagtgagaggcgaggagccagtgttcatcgtaactggcagaaaagaagacgtggagatggctaaacgggagatactgagcgcagccgaacacttctccattatccgcgctacaagatccaaggcggggggcttgccaggggctgctcaaggacccccgaacctgcccgggcagaccaccatacaagtcagagtaccctatcgggtggtcggtctcgtggtggggcctaaaggtgcaacaatcaagaggattcaacagcgcacccacacctacatagtcaccccaggccgcgataaagagccagtgtttgcagtgacaggtatgccggaaaacgttgatagggcgagggaggagatcgaggctcacattacgctgagaaccggcgcgtttacagatgccgggccggacagcgattttcacgctaatgggactgatgtgtgcctagatctgttaggtgccgccgcttctctttgggcaaaaaccccaaaccagggccgaagaccacctacagcaaccgccggcctgcgaggagatacagccttgggagccccttctgcacctgaagcattttatgccggctctagaggaggaccaagtgtcccagaccccggcccggcatctccttattccgggtccggcaacggcggttttgcgttcggggcagagggcccaggcgccccggtcgggacagccgcgcctgatgactgcgacttcggcttcgatttcgactttctggcactagacctaacagtgcccgccgccgctaccatttgggcccccttcgaacgagccgcccccctcccggccttttcaggatgctctactgtcaacggtgcacccggcccccctgcggccggagcaagaaggtcgagcggggccggaacacccagacatagtccaaccctgccagaacctggcgggttgaggctcgaactgccactgtcgcggcggggcgcccccgaccctgttggagccttgagctggcgccccccacagggccctgttagcttcccaggaggagctgcctttagcaccgcaaccagtctcccttcgtcacccgcagctgccgcatgtgctcccctggactccggcgcatccgaaaattcacgaaaacctccttctgccagctcagctccagccctggcgagagaatgcgtggtctgcgctgaaggtgaggtgatggccgccctcgttccttgcggtcacaacctcttttgtatggactgtgccgtgcggatttgtggaaaatctgagcccgaatgtcctgcctgccggactccagcaacccaggctattcacattttctcctag

SEQ ID NO: 262890 - DNA, 498 bp, Artificial Sequence
  derived and/or modified sequence
tggcgctggaccagctgcagaagaagtggctggggcgccctggccaccaggacccggcggggccggcccggcaccccacctccaccccggcccagccccccagatgtgtttgctggctttgccccccaccctgctgccctgggcccccccaccctgctggccgaccagatgtctgtcatcggcagcaggaagaagtctgtgaacatgacagaatgtgtgcctgtgcccagcagcgagcacgtggccgagatcgtgggccggcagggctgcaagatcaaggccctgcgggccaagaccaacacctacatcaagacccctgtgcggggggaggagcccgtcttcatcgtgactggaagaaaagaagatgtggagatggccaagcgggagatcctgtctgctgctgagcacttcagcatcatccgggccaccaggagcaaggccggcggcctgcctggagctgcccagggcccccccaacctgcccggccagaccacctag

SEQ ID NO: 262891 - DNA, 1956 bp, Artificial Sequence
  derived and/or modified sequence
atgcccagcagcctgggccagccagatggcggcggcggcggcggcggcggcggcggcggcgtgggcgccgccggggaggaccccggccctggccctgcccctcctcctgagggcgcccaggaggccgccccagccccccggcccccacctgagccagatgatgctgctgctgccctgcggctggccctggaccagctgagcgccctgggcctgggcggggccggggacacagatgaggagggcgctgctggagatggagctgctgctgctgggggcgcagatggaggagctgcccctgagcctgtgcccccagatggccctgaggccggggccccacccaccctggccccagctgtggcccctggcagcctgcccctgctggaccccaatgccagccccccacctcctcctccaccccggcccagccccccagatgtgtttgctggctttgccccccaccctgctgccctgggcccccccaccctgctggccgaccagatgtctgtcatcggcagcaggaagaagtctgtgaacatgacagaatgtgtgcctgtgcccagcagcgagcacgtggccgagatcgtgggccggcagggctgcaagatcaaggccctgcgggccaagaccaacacctacatcaagacccctgtgcggggggaggagcccgtcttcatcgtgactggaagaaaagaagatgtggagatggccaagcgggagatcctgtctgctgctgagcacttcagcatcatccgggccaccaggagcaaggccggcggcctgcctggagctgcccagggcccccccaacctgcccggccagaccaccatccaggtgcgggtgccctacagagtggtgggcctggtggtgggccccaagggggccaccatcaagaggatccagcagaggacccacacctacatcgtgaccccaggccgggacaaggagcctgtgtttgctgtgacaggcatgccagaaaatgtggaccgggcccgggaggagattgaggcccacatcaccctgaggactggagccttcacagatgctggccctgacagcgacttccacgccaatggaacagatgtgtgcctggacctgctgggcgctgctgccagcctgtgggccaagacccccaaccagggcagaagaccacccacagccacagctggcctgcggggggacacagccctgggcgcccccagcgcccctgaggccttctacgccggcagcagaggaggccccagcgtgcctgaccccggccctgccagcccctacagcggcagcggaaatggaggctttgccttcggggctgagggccctggggcccctgtgggcacagctgccccagatgactgtgactttggatttgattttgacttcctggccctggacctgactgtgcctgctgctgccaccatctgggccccctttgaaagagctgcccccctgcctgccttcagcggctgcagcacagtgaatggagcccctggccccccagctgctggggcccggcgcagcagcggggccggcacccccaggcacagccccaccctgcctgagcccggcggcctgcggctggagctgcccctgagcagaagaggagccccagaccctgtgggcgccctgtcctggaggcctccccagggccctgtgtccttccctggaggagctgccttcagcacagccaccagcctgcccagcagccctgctgctgctgcctgtgcccccctggacagcggggccagcgagaacagcaggaagcccccatctgccagcagcgccccagccctggccagagaatgtgtggtgtgtgccgagggggaggtgatggccgccctggtgccctgtggccacaacctcttctgcatggactgtgctgtgcgcatctgtgggaagtctgagccagaatgtcctgcctgcaggaccccagccacccaggccatccacatcttctcctag

SEQ ID NO: 262892 - DNA, 2847 bp, Artificial Sequence
  derived and/or modified sequence
atgcccagctcgctcggccagcccgacggcggcgggggcgggggcggcggcggcggcggcgtgggggcggcgggggaggaccccggacccggacctgcgcccccgcccgagggcgcccaggaggccgcgcccgcgccccggccgccgcccgaacccgacgacgcggccgccgcgctccgcctggcgctggaccagctgtcggcgctcgggctggggggcgctggcgacacggacgaggagggggcggccggggacggcgcagcggcggcggggggcgcggacggcggggcggctccggagcctgtgccccccgacggacctgaggccggcgcgcccccgaccctggcccccgccgtggcccccgggtcgctgccgctgctggaccccaacgcgagtcccccgccgccgccgccgccccggccgtcgccccccgacgtgttcgcgggcttcgcgccccaccccgcggccctggggcccccgacgctgctggccgaccagatgagcgtgatcggcagccgcaagaaaagcgtcaacatgaccgagtgcgtcccggtgcccagctccgagcacgtcgccgagatcgtgggtcgccagggctgcaagatcaaggccctgcgggccaagacaaacacctacatcaagaccccagtgcggggcgaggagccggtcttcatcgtgaccggccggaaggaggacgtggagatggccaagcgtgagatcctgtcggcggccgaacacttctccatcatccgcgccacgcgcagcaaggccgggggtctgcccggcgccgcccagggcccgcccaaccttcccggacagaccaccatccaggtgcgcgtgccctaccgggtggtggggctggtggtggggcccaagggcgccaccatcaagcgcatccagcagcggacgcacacctacatcgtgacgcccgggcgcgacaaggagccggtgttcgcggtcactgggatgcccgagaacgtggaccgcgcgcgcgaggagatcgaggcgcacatcacgctgcgcactggcgccttcaccgacgcgggccccgacagcgacttccacgccaacggcaccgacgtctgcctggacctgctcggggcggccgccagcctctgggccaagacccccaaccagggacgacggccccccacggccacggccggcctccgcggggacacggccctgggcgcccccagcgcccccgaggccttctacgcgggcagccgcggcggcccctccgtgccggacccaggccccgccagcccctacagcggctccggcaacgggggcttcgccttcggcgcggagggtcccggtgccccggtggggacggccgcccccgacgactgcgacttcggcttcgacttcgacttcctggcgctggacctgaccgtgcccgccgcggccaccatctgggcgccttttgagcgcgccgcccccttgcccgccttcagcggctgctccacggtcaacggagccccgggacctcccgccgccggcgcccggcgcagcagtggggccgggaccccccgccactcgcccacgctgcccgagcccggcggcctccgcctggagctcccgctgtctcgccgtggcgccccggacccggtgggcgcgctgtcctggcgacccccgcagggccccgtatccttcccaggcggcgccgccttctccacggccacctcgctgcccagcagccccgcggccgccgcctgcgcccccctggactccggcgcctccgagaacagccgcaagcccccttcggcgtcctcggccccggccctggcgcgagagtgcgtggtgtgcgccgagggcgaggtgatggctgcgctggtcccctgcggccacaacctcttctgcatggactgcgccgtccgcatctgcggcaagagcgagcccgagtgtcccgcctgccgcacgccggccacccaggccattcatatcttttcctagagcgcggaccaccacgtggccggggccatctgcgggggccaggggtgggcgcgggagacggggcgggacccggggtgggagagggacggggagggggcgaggggcggaggccgagggggcaggggggtgggcggcggccagtgtttacagatgagctttaactgccgcctcaggcgtggagacggagaccccgcagcccggcggcgcctcagcccttcaacgacagtattgagtggtcaggttacaataaaccggagagaaaaggtccgcttgcactttttttagttttcttatttttagacacccctcccctccagggtgatctttaaaaaagcaaaacaaaaaacacgacttttccagcgctcagcgttttttcctttcgtccgaagccgttttctgatttgacttttctcgccggccggtctcaggccgcacagacgttccagaggaggagggtgacatttttactccctttttggggctaaccatttatgcttttgtacatcaaccgtgcgcggccggagggggcaggggggcgggggcgaggggcgttccaatcaaatttctaactttctgttaattattaatcccctttttactgcggtttctgttgtcatttttaaaatttttttaatttttttttttttttacttttactttttacctcttgtgtatatgtagggaatttatagggaaatatgtactttatggaataaattttaagaactaaaatatattttattttaaataaagtaatggacctttaatcttacacagctaaattactgattatatatttgctgagctgatttaagggttaaaaaaattgtatcaagagttttattttttgacttcaaagccttcttaataaagcctcttttctacatgtga

SEQ ID NO: 262893 - DNA, 498 bp, Artificial Sequence
  derived and/or modified sequence
tggcggtggaccagctgccggcggagcggctggggcgccctggccaccaggacgaggaggggccggccaggcacaccccctcccccaagaccctctccgcccgacgtatttgcaggttttgccccacacccagctgctctgggacctcctactttactggcagatcagatgtcggtgatagggtccaggaaaaagagtgtgaacatgacagaatgcgtcccagtaccctccagcgagcatgtggcagaaattgttggcaggcaggggtgtaagattaaggctcttagggccaaaacaaatacatacattaaaacgccggtgcggggggaggaacctgtctttatagttactgggaggaaggaggatgtcgagatggcaaaacgtgaaatcttaagtgctgctgagcacttcagtatcattcgtgctaccagatctaaagctggtggccttccaggggcagctcagggacctcccaatctgccaggccagacaacatag

SEQ ID NO: 262894 - DNA, 1956 bp, Artificial Sequence
  derived and/or modified sequence
atgcccagcagcctgggccagcccgacggcggcggcggcggcggcggcggaggaggcggtgtgggtgctgcgggggaggaccctggccctgggccagcgccgccaccggaaggcgcacaggaagccgctccagcgccacgtcctccacccgaaccagacgatgccgccgctgcactgcggttggcgctagatcagttgtccgcactagggctgggcggcgccggcgatacggacgaggagggtgccgctggtgatggcgcggctgctgccgggggagcagacgggggagccgccccggagccagtgcctcccgacgggcctgaagccggggccccccccacccttgcacctgcagttgcaccaggaagtctccctctgctggatcccaacgccagcccacctccacctccccccccccgcccttcccctcccgacgtgttcgcaggatttgcccctcacccagccgctttgggtcccccgacccttctggccgaccaaatgagcgtgattggctcgcgaaaaaagtccgtgaatatgaccgagtgtgttcccgtgcctagttccgagcacgttgccgagattgtgggcaggcaaggttgcaagatcaaagcccttcgggccaagaccaacacctatatcaaaacccccgtgagaggtgaggagccggtgttcattgtgaccggacggaaagaggatgtagaaatggcaaaaagagaaatcttgtccgcggcagaacacttctccatcatacgggctacgcgtagtaaggccggtggccttccaggcgctgctcaggggcctccaaacctgcccggtcagacaactattcaagtgcgcgtgccctacagagttgttggattggtggtcggaccgaaaggagcaacgattaagcggatccagcagcggacacacacatacattgtgacaccagggcgtgacaaggagccggtcttcgccgttaccggtatgccagagaatgtggacagggccagagaagaaatcgaggcccacatcacattacgcaccggtgctttcacagacgctgggcccgattcggattttcatgccaatggtactgatgtgtgcctcgacttgctcggtgccgccgcgtctctctgggcaaaaactcctaatcagggcaggcgtccaccaactgcaaccgctggtctgcggggtgatacagcattgggcgccccttccgccccggaggcgttttacgcaggttccaggggaggcccgtctgtaccggatcccggcccagccagcccctactcaggatcaggaaacggtggctttgccttcggcgccgagggtcccggagctcctgtcggcaccgcagcccccgacgattgtgactttggcttcgattttgactttctggctctggacctgaccgtacccgctgctgctaccatttgggcaccttttgagagggccgctccgcttccagctttctcgggctgcagcacagttaatggtgcccctggaccccccgccgcgggggctcggcgttcaagcggcgccggcactcctcggcattcacccaccctgccggaacccggtgggttaaggctggaacttcctctgtcacgaagaggtgctccagatccagtgggagccctctcatggagacccccccagggacccgtttctttccctggcggcgccgcattctccaccgccacctcactgccgtcttctcccgcagcagcagcctgtgctcccctcgactccggagcatccgagaattctcgaaagcctccaagtgccagctcagccccagccttggcccgtgaatgcgtagtgtgcgcagaaggagaggtgatggccgcactggtgccctgtggccataacctgttttgcatggattgcgccgttcgaatttgtggcaaaagcgaaccagagtgcccagcttgcaggacccccgccacccaggcgattcacattttctcctag

SEQ ID NO: 262895 - DNA, 498 bp, Artificial Sequence
  derived and/or modified sequence
tggaggtggacgtcatgtcggaggagcggatggggggcactggcaacccgtactcgcaggggaagaccgggaactcccccacctccgagaccttctccacctgacgttttcgccggattcgcccctcatcctgctgccttggggccaccaaccttgctggccgatcagatgagtgtgatcgggagcaggaaaaagtctgtcaacatgaccgagtgtgtgcccgtgccatcctccgagcacgtggcagagattgtgggccgacagggttgtaagatcaaagctctcagagcaaagacgaatacctatatcaaaacacccgtcagaggcgaggagcccgtgtttatcgtgactggtagaaaggaagacgttgaaatggccaaaagagagatcctgtctgcagccgaacatttttcgatcatccgcgctacacgctctaaagctggcggactgcctggtgccgctcaggggccacccaatctccctggacaaacaacctag

SEQ ID NO: 262896 - DNA, 1956 bp, Artificial Sequence
  derived and/or modified sequence
atgccaagcagtctggggcaaccagatggcggaggtggtggcggtggcggaggaggcggagtgggcgctgctggagaggatcctggaccgggacctgcaccccctcccgaaggggctcaagaggccgcacctgccccacgcccaccccctgagccggatgacgcagcggctgcgctgaggctcgccttggaccagttgtctgccctgggactgggcggagcaggagataccgacgaagaaggtgccgcaggcgacggagcggctgctgccggtggcgcagatggtggagctgcacctgagcccgttccacccgatgggccagaggcaggggcaccgcctactcttgccccagctgtcgctcctggtagtttacccctgcttgatccaaacgcaagtcctccgccacctcccccaccaaggcccagtccccctgacgtgtttgcaggttttgctccccatccggcagcccttgggccaccaacactcttagcagatcagatgtctgtcatcggttctcgtaagaaatcagtgaatatgaccgagtgcgtgcccgtcccgtcttcggagcacgttgctgaaatagtaggacggcaaggatgtaagattaaggctcttcgggcaaagaccaacacctacataaaaacccctgttcgaggagaagagcccgtgttcatcgtcacggggagaaaagaggatgtcgagatggctaagcgcgaaattctaagcgcggctgagcacttttcgatcattcgggcaacaagaagcaaggcaggcggtctgccgggagcggctcagggccctcccaacctgccaggccagacgaccatccaggtcagagtcccctatcgagtagtaggcttggtggtcggtcctaaaggcgctactatcaaacgtattcagcagcgaacccacacttacatcgtgaccccgggaagagacaaggagcctgtgtttgccgttacaggtatgccagagaacgtagaccgggcaagagaggagatcgaagcccatataaccctgcgcactggtgcattcacagacgccggacctgactccgatttccacgcaaacggtacagacgtctgtctggaccttttaggcgcagccgctagtctgtgggcgaagaccccgaaccaagggagacgtccgccaacagcaaccgcaggattgaggggagacaccgctcttggagcaccatcggcgcctgaagcgttctatgccggtagtaggggtggacctagcgtgcccgacccgggaccagcaagcccctacagcggaagtggcaacggcggtttcgccttcggagctgagggaccgggagctcccgtcggaaccgcggcaccggatgattgcgattttggcttcgactttgacttcctggctttggatctcaccgtaccagctgctgccaccatttgggctccatttgaaagagctgcccctttacctgccttctccggctgcagtacggtgaacggtgctccaggaccccctgcagctggggcaaggagatcctccggcgctggaactccaagacattcacccaccctccctgagcccggtggcctgcgtttagaactacctctctctcggaggggcgctcctgatcctgtgggggctctgtcttggcggccaccacagggaccggtctcttttccgggaggcgctgccttttctacagctacttcactaccctcctcacctgccgctgcagcctgtgctcctctagactccggggctagtgagaattctaggaaaccaccctccgcgagtagtgccccagctctggcacgagagtgcgtggtatgcgcagaaggagaagtcatggcagcactggtaccctgcggccacaacctcttttgcatggattgcgctgtccggatttgtggcaaaagtgaacctgagtgcccagcctgccggacacctgctactcaggccatccatatattttcttag

SEQ ID NO: 262897 - DNA, 498 bp, Artificial Sequence
  derived and/or modified sequence
tggagatggaccagctgcagaagaagcggctggggcgccctggccaccagaaccagaagaggcagacccggcaccccccccccccccagacccagcccccccgacgtgttcgccggcttcgccccccaccccgccgccctgggcccccccaccctgctggccgaccagatgagcgtgatcggcagcagaaagaagagcgtgaacatgaccgagtgcgtgcccgtgcccagcagcgagcacgtggccgagatcgtgggcagacagggctgcaagatcaaggccctgagagccaagaccaacacctacatcaagacccccgtgagaggcgaggagcccgtgttcatcgtgaccggcagaaaggaggacgtggagatggccaagagagagatcctgagcgccgccgagcacttcagcatcatcagagccaccagaagcaaggccggcggcctgcccggcgccgcccagggcccccccaacctgcccggccagaccacctag

SEQ ID NO: 262898 - DNA, 1956 bp, Artificial Sequence
  derived and/or modified sequence
atgcccagcagcctgggccagcccgacggcggcggcggcggcggcggcggcggcggcggcgtgggcgccgccggcgaggaccccggccccggccccgcccccccccccgagggcgcccaggaggccgcccccgcccccagacccccccccgagcccgacgacgccgccgccgccctgagactggccctggaccagctgagcgccctgggcctgggcggcgccggcgacaccgacgaggagggcgccgccggcgacggcgccgccgccgccggcggcgccgacggcggcgccgcccccgagcccgtgccccccgacggccccgaggccggcgccccccccaccctggcccccgccgtggcccccggcagcctgcccctgctggaccccaacgccagccccccccccccccccccccccagacccagcccccccgacgtgttcgccggcttcgccccccaccccgccgccctgggcccccccaccctgctggccgaccagatgagcgtgatcggcagcagaaagaagagcgtgaacatgaccgagtgcgtgcccgtgcccagcagcgagcacgtggccgagatcgtgggcagacagggctgcaagatcaaggccctgagagccaagaccaacacctacatcaagacccccgtgagaggcgaggagcccgtgttcatcgtgaccggcagaaaggaggacgtggagatggccaagagagagatcctgagcgccgccgagcacttcagcatcatcagagccaccagaagcaaggccggcggcctgcccggcgccgcccagggcccccccaacctgcccggccagaccaccatccaggtgagagtgccctacagagtggtgggcctggtggtgggccccaagggcgccaccatcaagagaatccagcagagaacccacacctacatcgtgacccccggcagagacaaggagcccgtgttcgccgtgaccggcatgcccgagaacgtggacagagccagagaggagatcgaggcccacatcaccctgagaaccggcgccttcaccgacgccggccccgacagcgacttccacgccaacggcaccgacgtgtgcctggacctgctgggcgccgccgccagcctgtgggccaagacccccaaccagggcagaagaccccccaccgccaccgccggcctgagaggcgacaccgccctgggcgcccccagcgcccccgaggccttctacgccggcagcagaggcggccccagcgtgcccgaccccggccccgccagcccctacagcggcagcggcaacggcggcttcgccttcggcgccgagggccccggcgcccccgtgggcaccgccgcccccgacgactgcgacttcggcttcgacttcgacttcctggccctggacctgaccgtgcccgccgccgccaccatctgggcccccttcgagagagccgcccccctgcccgccttcagcggctgcagcaccgtgaacggcgcccccggcccccccgccgccggcgccagaagaagcagcggcgccggcacccccagacacagccccaccctgcccgagcccggcggcctgagactggagctgcccctgagcagaagaggcgcccccgaccccgtgggcgccctgagctggagacccccccagggccccgtgagcttccccggcggcgccgccttcagcaccgccaccagcctgcccagcagccccgccgccgccgcctgcgcccccctggacagcggcgccagcgagaacagcagaaagccccccagcgccagcagcgcccccgccctggccagagagtgcgtggtgtgcgccgagggcgaggtgatggccgccctggtgccctgcggccacaacctgttctgcatggactgcgccgtgagaatctgcggcaagagcgagcccgagtgccccgcctgcagaacccccgccacccaggccatccacatcttcagctag

SEQ ID NO: 262899 - DNA, 729 bp, Artificial Sequence
  derived and/or modified sequence
atgtttctgttgagtggggacccatgtttcaagacgccacccagcactgccaagagcattagcattcccgggcaggattcctcactccagctcacctgtaagggggggggaacctcgtccgggggcagcagcaccaattccctcacggggtcaagaccacccaaagccagacctaccatcctcagcagcggactgcccgaagaacctgaccagaatctctcctcccccgaggaagtgttccactccgggcacagccggaacagctcatacgcatcacagcagagcaagatctctggctatagtactgagcattccagatcttcgtcgctcagtgaccttacccatagaagaaacacttctactagctcatcagctagcggcggcctgggaatgacagtagaagggcctgagggctccgagcgcgagcatcgcccgcctgagaaacctcccagacctcctagacctctgcacctgtcagacagatcgtttagacgtaaaaaggactctgtcgaaagtcaccctacctgggtcgatgatacccgcatagacgcagatgcaatcgtggaaaagatcgtccagtcccaagattttaccgacggcagcaatacggaagacagtaatcttcgactgttcgtgagcagggacgggtccgccaccctgtctggcattcaacttgccactcgcgtatcgtctggagtctatgaaccggttgtgatcgaatcgcattag

SEQ ID NO: 262900 - DNA, 729 bp, Artificial Sequence
  derived and/or modified sequence
atgttcctgctgagcggggacccctgcttcaagaccccacccagcacagccaagagcatcagcatccctggccaggacagcagcctgcagctgacctgcaagggcggcggcaccagcagcggcggcagcagcaccaacagcctgaccggcagcaggcctcccaaggcccggcccaccatcctgagcagcggcctgcctgaggagccagaccagaacctgagcagccctgaggaggtgttccacagcggccacagcaggaacagcagctatgccagccagcagagcaagatcagcggctacagcacagagcacagccgcagcagcagcctgagtgacctgacccacagaagaaacaccagcaccagcagcagcgccagcggcggcctgggcatgacagtggagggccctgagggcagcgagcgggagcacaggcctcctgagaagccaccccggcccccccggcccctgcacctgagtgacaggagcttccggaggaagaaggacagcgtggagagccaccccacctgggtggatgacaccagaattgatgctgatgccatcgtggagaagatcgtgcagagccaggacttcacagatggcagcaacacagaggacagcaacctgcggctgtttgtgtccagagatggcagcgccaccctgagcggcatccagctggccaccagggtgtcctctggagtgtatgagcctgtggtgattgagagccactag

SEQ ID NO: 262901 - DNA, 729 bp, Artificial Sequence
  derived and/or modified sequence
atgttcctgctgagcggcgacccctgcttcaagaccccccccagcacagccaagtctatttctattcccggtcaggactcatctctgcagctcacttgtaaaggaggcggaaccagcagcggcggaagctcaactaactcacttactggctcccggcctccaaaagccaggccaaccatacttagtagcggtctgcctgaggagcccgaccagaacctcagctcccccgaggaggtttttcactctgggcactctaggaattcaagttatgcgagccagcagagtaaaatcagtggatactcaaccgagcactctcgttcgtcaagtctgtccgatctgacccacagacgcaacacgtcaacttccagctcagcaagcggtggattagggatgactgttgagggacccgaaggctcggagagggagcatcgccccccagagaagccgccgagaccaccacggccgttacacctcagtgatcgctcctttcgccgcaagaaagacagcgttgagagccatcccacttgggtggatgataccaggattgatgctgacgccatagttgagaagattgttcagtcccaggacttcactgacggcagcaacacagaggactcaaacctgaggctcttcgtttctagagacgggtccgctaccttaagtggcatccagctggcgacccgtgtgagttccggggtctatgagcccgttgttatcgagtcacattag

SEQ ID NO: 262902 - DNA, 729 bp, Artificial Sequence
  derived and/or modified sequence
atgtttctgctaagcggagacccttgctttaagaccccccctagtacagcaaaatccatctctatccccggtcaggattctagcttgcaactgacctgcaaggggggaggcactagctcgggcggaagctcaacaaattcgctaaccggttcccgccctccaaaagccagacctacgatactctcctcgggtctgccagaagagcccgatcaaaacctctcttcgcctgaggaggtttttcactctggacactcacgtaactctagctacgcctctcagcagtccaagatatccggatactctaccgagcactcaagaagtagtagtttgtcagacctgacacacagaagaaacaccagcacttccagcagcgcatcaggcggactgggtatgactgtggaaggccctgaaggaagtgagagagagcaccgtccacctgaaaagccgccaaggcctccacgtcctctacacctgtctgaccgctcgtttcggagaaaaaaagattctgtggaatcccatcctacatgggtggacgacactcgaatcgatgctgatgccattgtggaaaagattgtccagtcacaagactttaccgatggctcaaataccgaggatagcaatctccggctgtttgtcagccgggatggctccgcaacactcagtggcatacaactcgctaccagggtctcttctggcgtttacgaacccgtggtcatcgaatctcactag

SEQ ID NO: 262903 - DNA, 729 bp, Artificial Sequence
  derived and/or modified sequence
atgttcctgctgagcggcgacccctgcttcaagaccccccccagcaccgccaagagcatcagcatccccggccaggacagcagcctgcagctgacctgcaagggcggcggcaccagcagcggcggcagcagcaccaacagcctgaccggcagcagaccccccaaggccagacccaccatcctgagcagcggcctgcccgaggagcccgaccagaacctgagcagccccgaggaggtgttccacagcggccacagcagaaacagcagctacgccagccagcagagcaagatcagcggctacagcaccgagcacagcagaagcagcagcctgagcgacctgacccacagaagaaacaccagcaccagcagcagcgccagcggcggcctgggcatgaccgtggagggccccgagggcagcgagagagagcacagaccccccgagaagccccccagaccccccagacccctgcacctgagcgacagaagcttcagaagaaagaaggacagcgtggagagccaccccacctgggtggacgacaccagaatcgacgccgacgccatcgtggagaagatcgtgcagagccaggacttcaccgacggcagcaacaccgaggacagcaacctgagactgttcgtgagcagagacggcagcgccaccctgagcggcatccagctggccaccagagtgagcagcggcgtgtacgagcccgtggtgatcgagagccactag

SEQ ID NO: 262904 - protein, 343 aa, Artificial Sequence
  derived and/or modified sequence
MLATRLSRPLSRLPGKTLSACDRENGARRPLLLGSTSFIPIGRRTYASAAEPVGSKAVLVTGCDSGFGFSLAKHLHSKGFLVFAGCLMKDKGHDGVKELDSLNSDRLRTVQLNVCSSEEVEKVVEIVRSSLKDPEKGMWGLVNNAGISTFGEVEFTSLETYKQVAEVNLWGTVRMTKSFLPLIRRAKGRVVNISSMLGRMANPARSPYCITKFGVEAFSDCLRYEMYPLGVKVSVVEPGNFIAATSLYSPESIQAIAKKMWEELPEVVRKDYGKKYFDEKIAKMETYCSSGSTDTSPVIDAVTHALTATTPYTRYHPMDYYWWLRMQIMTHLPGAISDMIYIR

SEQ ID NO: 262905 - protein, 89 aa, Artificial Sequence
  derived and/or modified sequence
MLATRLSRPLSRLPGKTLSACDRENGARRPLLLGSTSFIPIGRRTYASAAEPVGSKAVLVTGCDSGFGFSLAKHLHSKGFLVFAGCLMK

SEQ ID NO: 262906 - protein, 256 aa, Artificial Sequence
  derived and/or modified sequence
MKDKGHDGVKELDSLNSDRLRTVQLNVCSSEEVEKVVEIVRSSLKDPEKGMWGLVNNAGISTFGEVEFTSLETYKQVAEVNLWGTVRMTKSFLPLIRRAKGRVVNISSMLGRMANPARSPYCITKFGVEAFSDCLRYEMYPLGVKVSVVEPGNFIAATSLYSPESIQAIAKKMWEELPEVVRKDYGKKYFDEKIAKMETYCSSGSTDTSPVIDAVTHALTATTPYTRYHPMDYYWWLRMQIMTHLPGAISDMIYIR

SEQ ID NO: 262907 - protein, 50 aa, Artificial Sequence
  derived and/or modified sequence
MLATRLSRPLSRLPGKTLSACDRENGARRPLLLGSTSFIPIGRRTYASAA

SEQ ID NO: 262908 - DNA, 1032 bp, Artificial Sequence
  derived and/or modified sequence
atgctggccaccagactgagcagacccctgagcagactgcccggcaagaccctgagcgcctgcgacagagagaacggcgccagaagacccctgctgctgggcagcaccagcttcatccccatcggcagaagaacctacgccagcgccgccgagcccgtgggcagcaaggccgtgctggtgaccggctgcgacagcggcttcggcttcagcctggccaagcacctgcacagcaagggcttcctggtgttcgccggctgcctgatgaaggacaagggccacgacggcgtgaaggagctggacagcctgaacagcgacagactgagaaccgtgcagctgaacgtgtgcagcagcgaggaggtggagaaggtggtggagatcgtgagaagcagcctgaaggaccccgagaagggcatgtggggcctggtgaacaacgccggcatcagcaccttcggcgaggtggagttcaccagcctggagacctacaagcaggtggccgaggtgaacctgtggggcaccgtgagaatgaccaagagcttcctgcccctgatcagaagagccaagggcagagtggtgaacatcagcagcatgctgggcagaatggccaaccccgccagaagcccctactgcatcaccaagttcggcgtggaggccttcagcgactgcctgagatacgagatgtaccccctgggcgtgaaggtgagcgtggtggagcccggcaacttcatcgccgccaccagcctgtacagccccgagagcatccaggccatcgccaagaagatgtgggaggagctgcccgaggtggtgagaaaggactacggcaagaagtacttcgacgagaagatcgccaagatggagacctactgcagcagcggcagcaccgacaccagccccgtgatcgacgccgtgacccacgccctgaccgccaccaccccctacaccagataccaccccatggactactactggtggctgagaatgcagatcatgacccacctgcccggcgccatcagcgacatgatctacatcagatag

SEQ ID NO: 262909 - DNA, 270 bp, Artificial Sequence
  derived and/or modified sequence
atgctggccaccagactgagcagacccctgagcagactgcccggcaagaccctgagcgcctgcgacagagagaacggcgccagaagacccctgctgctgggcagcaccagcttcatccccatcggcagaagaacctacgccagcgccgccgagcccgtgggcagcaaggccgtgctggtgaccggctgcgacagcggcttcggcttcagcctggccaagcacctgcacagcaagggcttcctggtgttcgccggctgcctgatgaagtag

SEQ ID NO: 262910 - DNA, 153 bp, Artificial Sequence
  derived and/or modified sequence
atgctggccaccagactgagcagacccctgagcagactgcccggcaagaccctgagcgcctgcgacagagagaacggcgccagaagacccctgctgctgggcagcaccagcttcatccccatcggcagaagaacctacgccagcgccgcctag

SEQ ID NO: 262911 - DNA, 3330 bp, Artificial Sequence
  derived and/or modified sequence
attgaaagaatacacagaaagcctggaaaaggtttccaggggtgtcaatacgccctgtcaactgagaattaagaggatccggctggtcacttgcctggagaggatcctgcatgctgatagtgctgaggcacctgccagctaagaaccaccgggaggaactgggccattctaacacccgttgctaccatgctggccacccgcctctccagacccctgtcacggctcccaggaaaaaccctaagtgcctgtgatagagaaaatggagcaagacgcccactattgcttggttctacttcctttatcccgattggccgtcggacttatgccagtgcggcggagccggttggcagcaaagctgtcctggtcacaggctgtgactctggatttgggttctcattggccaagcatctgcattcaaaaggcttccttgtgtttgctggctgcttgatgaaggacaaaggccatgatggggtcaaggagctggacagcctaaacagtgaccgattgagaaccgtccagctcaatgtctgcagcagcgaagaggtggagaaagtggtggagattgtccgctcgagcctgaaggaccctgagaaaggcatgtggggcctcgttaacaatgccggcatctcaacgttcggggaggtggagttcaccagcctggagacctacaagcaggtggcagaagtgaacctttggggcacagtgcggatgacgaaatcctttctccccctcatccgaagggccaaaggccgcgtcgtcaatatcagcagcatgctgggccgcatggccaacccggcccgctccccgtactgcatcaccaagttcggggtagaggctttctcggactgcctgcgctatgagatgtaccccctgggcgtgaaggtcagcgtggtggagcccggcaacttcatcgctgccaccagcctttacagccctgagagcattcaggccatcgccaagaagatgtgggaggagctgcctgaggtcgtgcgcaaggactacggcaagaagtactttgatgaaaagatcgccaagatggagacctactgcagcagtggctccacagacacgtcccctgtcatcgatgctgtcacacacgccctgaccgccaccaccccctacacccgctaccaccccatggactactactggtggctgcgaatgcagatcatgacccacttgcctggagccatctccgacatgatctacatccgctgaagagtctcgctgtggcctctgtcagggatccctggtggaaggggaggggagggaggaacccatatagtcaactcttgattatccacgtgtggattatccaccatgccaggaagacccataactggttttaacactaactagagggaatgacttctttgcatagtgagtgacttgggccttcacaaacagggtgtggagtggcaggcagaggcctctaaatctcagggcaaacatggtgaatctatctctccggagataatttcatacagagattttaagaaaacatctttatattaaaaacagatctcatttgatccttaagccagtctcatgaatgaaaaggacaggtttttttcttttgtaaatgaagcatttgcagcttaaagaggatgcatgaaataacccttttatcgcttataaatagtgccagttatgtgttcctgccacggctgtggaaatacttcacatttgcattccaggactgttttggatccatttgcccgagaatcttctgactaactctgtgtcctcatctgggcagcacacaccaagtgcccactggtacctctgcatgtccatggtgctgtgtgactggccagccagcagccagtgactcagagctggctgtatggagggggtgggaatgtttctggagatttttgtttttccagacacagtcttgctcagtcccctaggctggagtgcaatggcaccatctccgctcactgcaacctccgcctccctggttcaagcggttctcctgcctcagccttccaagtagctggggttataggcacccaccaccatgccgggctaatttttgtatttttagtagagatggggtttcaccatgttggctaggctggtcccgaactcccgacttcaagtgatccgcctgccttggcctcccaaagtgctgggattacaggcatgagatttttacttgagatttttccatcctcttttaggactcaggatagacttgtgtggaggtgctctctggctaaggggataagttgttactggtttgggtctgcttggttttgccttgggtggggccggtgtcgatggggcaggcttggcacgagcagtggtgccatggcagggcactgtggcatctcccctagcagtggatttggggtccctgcttgcctcacgtggtgcttacacacatgtacacacacacacacacacacacacacacacacaccttacacacatgtacacacacacacacacacacacacacacacacacacacacacacacacacacacacacacacacacacacacccctgttctgcagggcttcagcgtggccttcattcccgcctcgcctcggcctcttttcaattaagaagtgatgccacttgaggcagggtctgcatgatcacttcttgggtttcagtttgaaagctgccatccctgcgactgcccagggcctgtatgttgggaccgaagccaaacaccactgtcctccagggggctttcggcccggggcagggtccccagtgcccgccttcgaatcagactccgcgtttccgcctctccctgggcggacctgccgctagagggcgctcctcctccgcagccggcgccggcctccagcgccccagactcccgcgctgccgcccgagcctgaggtttctcacggcgttcgggattcgcgcttcggaaaccgggaacaaagaagcaagcagcacccttcagaaacagtgttctcgctctcctagcagctggcccgggcccggaggctggtgccaggagaaggcagaagagcccgggcagccggagtgggctacggggttcaggcagtgccaaggaagaagggcctcacaatgggcaattcagctgcctcccgggccgttgtccccgctgtcttcaaacaggggtcccctgtcccagctgccccaggaggagggggggaggcaggcagggccgaaaccctccagagcccagagggggacgcttggtggccgctgcagttacataaccataggatgcttttgtaccgtggaccttgttctagcaggatcctttcggaattgcacttttacatgttgggcgaatttgtgtccgtgctgaagtttattaaaggaaaatagatgga

SEQ ID NO: 262912 - DNA, 3455 bp, Artificial Sequence
  derived and/or modified sequence
ggaggaggcggctcggcggccccccgacagccacgccgccgtgagccccgcccagcgtagccccagcgcgcgcttcgcgtgtagaagcgtccgggtggcggaggccgcaggccgcaggagtgctggtggaggggcttccagaaagaccctgcggcagcgccccccctcggctctccccgcaggagagcgggcacctgcgcggcgccgggtgaaggcgagagcctcggcgagccctctgcagcggagccccctgcccatttggttttggaaccaccgggaggaactgggccattctaacacccgttgctaccatgctggccacccgcctctccagacccctgtcacggctcccaggaaaaaccctaagtgcctgtgatagagaaaatggagcaagacgcccactattgcttggttctacttcctttatcccgattggccgtcggacttatgccagtgcggcggagccggttggcagcaaagctgtcctggtcacaggctgtgactctggatttgggttctcattggccaagcatctgcattcaaaaggcttccttgtgtttgctggctgcttgatgaaggacaaaggccatgatggggtcaaggagctggacagcctaaacagtgaccgattgagaaccgtccagctcaatgtctgcagcagcgaagaggtggagaaagtggtggagattgtccgctcgagcctgaaggaccctgagaaaggcatgtggggcctcgttaacaatgccggcatctcaacgttcggggaggtggagttcaccagcctggagacctacaagcaggtggcagaagtgaacctttggggcacagtgcggatgacgaaatcctttctccccctcatccgaagggccaaaggccgcgtcgtcaatatcagcagcatgctgggccgcatggccaacccggcccgctccccgtactgcatcaccaagttcggggtagaggctttctcggactgcctgcgctatgagatgtaccccctgggcgtgaaggtcagcgtggtggagcccggcaacttcatcgctgccaccagcctttacagccctgagagcattcaggccatcgccaagaagatgtgggaggagctgcctgaggtcgtgcgcaaggactacggcaagaagtactttgatgaaaagatcgccaagatggagacctactgcagcagtggctccacagacacgtcccctgtcatcgatgctgtcacacacgccctgaccgccaccaccccctacacccgctaccaccccatggactactactggtggctgcgaatgcagatcatgacccacttgcctggagccatctccgacatgatctacatccgctgaagagtctcgctgtggcctctgtcagggatccctggtggaaggggaggggagggaggaacccatatagtcaactcttgattatccacgtgtggattatccaccatgccaggaagacccataactggttttaacactaactagagggaatgacttctttgcatagtgagtgacttgggccttcacaaacagggtgtggagtggcaggcagaggcctctaaatctcagggcaaacatggtgaatctatctctccggagataatttcatacagagattttaagaaaacatctttatattaaaaacagatctcatttgatccttaagccagtctcatgaatgaaaaggacaggtttttttcttttgtaaatgaagcatttgcagcttaaagaggatgcatgaaataacccttttatcgcttataaatagtgccagttatgtgttcctgccacggctgtggaaatacttcacatttgcattccaggactgttttggatccatttgcccgagaatcttctgactaactctgtgtcctcatctgggcagcacacaccaagtgcccactggtacctctgcatgtccatggtgctgtgtgactggccagccagcagccagtgactcagagctggctgtatggagggggtgggaatgtttctggagatttttgtttttccagacacagtcttgctcagtcccctaggctggagtgcaatggcaccatctccgctcactgcaacctccgcctccctggttcaagcggttctcctgcctcagccttccaagtagctggggttataggcacccaccaccatgccgggctaatttttgtatttttagtagagatggggtttcaccatgttggctaggctggtcccgaactcccgacttcaagtgatccgcctgccttggcctcccaaagtgctgggattacaggcatgagatttttacttgagatttttccatcctcttttaggactcaggatagacttgtgtggaggtgctctctggctaaggggataagttgttactggtttgggtctgcttggttttgccttgggtggggccggtgtcgatggggcaggcttggcacgagcagtggtgccatggcagggcactgtggcatctcccctagcagtggatttggggtccctgcttgcctcacgtggtgcttacacacatgtacacacacacacacacacacacacacacacacaccttacacacatgtacacacacacacacacacacacacacacacacacacacacacacacacacacacacacacacacacacacacccctgttctgcagggcttcagcgtggccttcattcccgcctcgcctcggcctcttttcaattaagaagtgatgccacttgaggcagggtctgcatgatcacttcttgggtttcagtttgaaagctgccatccctgcgactgcccagggcctgtatgttgggaccgaagccaaacaccactgtcctccagggggctttcggcccggggcagggtccccagtgcccgccttcgaatcagactccgcgtttccgcctctccctgggcggacctgccgctagagggcgctcctcctccgcagccggcgccggcctccagcgccccagactcccgcgctgccgcccgagcctgaggtttctcacggcgttcgggattcgcgcttcggaaaccgggaacaaagaagcaagcagcacccttcagaaacagtgttctcgctctcctagcagctggcccgggcccggaggctggtgccaggagaaggcagaagagcccgggcagccggagtgggctacggggttcaggcagtgccaaggaagaagggcctcacaatgggcaattcagctgcctcccgggccgttgtccccgctgtcttcaaacaggggtcccctgtcccagctgccccaggaggagggggggaggcaggcagggccgaaaccctccagagcccagagggggacgcttggtggccgctgcagttacataaccataggatgcttttgtaccgtggaccttgttctagcaggatcctttcggaattgcacttttacatgttgggcgaatttgtgtccgtgctgaagtttattaaaggaaaatagatgga

SEQ ID NO: 262913 - DNA, 3546 bp, Artificial Sequence
  derived and/or modified sequence
cccagcgcgcgcttcgcgtgtagaagcgtccgggtggcggaggccgcaggccgcaggagtgctggtggaggggcttccagaaagaccctgcggcagcgccccccctcggctctccccgcaggagagcgggcacctgcgcggcgccgggtgaaggcgagagcctcggcgagccctctgcagcggagccccctgcccatttggttttggccagtcagcctggaaatctgcctgtagtcagctgatgcagagtcaccctgcagttcctactttgaggggttgcagaagcacatatttcactatggagggccgcctgcaggcctcgcgctgacaggatcttttgtgacgctgcaaatgtcctgaaccaccgggaggaactgggccattctaacacccgttgctaccatgctggccacccgcctctccagacccctgtcacggctcccaggaaaaaccctaagtgcctgtgatagagaaaatggagcaagacgcccactattgcttggttctacttcctttatcccgattggccgtcggacttatgccagtgcggcggagccggttggcagcaaagctgtcctggtcacaggctgtgactctggatttgggttctcattggccaagcatctgcattcaaaaggcttccttgtgtttgctggctgcttgatgaaggacaaaggccatgatggggtcaaggagctggacagcctaaacagtgaccgattgagaaccgtccagctcaatgtctgcagcagcgaagaggtggagaaagtggtggagattgtccgctcgagcctgaaggaccctgagaaaggcatgtggggcctcgttaacaatgccggcatctcaacgttcggggaggtggagttcaccagcctggagacctacaagcaggtggcagaagtgaacctttggggcacagtgcggatgacgaaatcctttctccccctcatccgaagggccaaaggccgcgtcgtcaatatcagcagcatgctgggccgcatggccaacccggcccgctccccgtactgcatcaccaagttcggggtagaggctttctcggactgcctgcgctatgagatgtaccccctgggcgtgaaggtcagcgtggtggagcccggcaacttcatcgctgccaccagcctttacagccctgagagcattcaggccatcgccaagaagatgtgggaggagctgcctgaggtcgtgcgcaaggactacggcaagaagtactttgatgaaaagatcgccaagatggagacctactgcagcagtggctccacagacacgtcccctgtcatcgatgctgtcacacacgccctgaccgccaccaccccctacacccgctaccaccccatggactactactggtggctgcgaatgcagatcatgacccacttgcctggagccatctccgacatgatctacatccgctgaagagtctcgctgtggcctctgtcagggatccctggtggaaggggaggggagggaggaacccatatagtcaactcttgattatccacgtgtggattatccaccatgccaggaagacccataactggttttaacactaactagagggaatgacttctttgcatagtgagtgacttgggccttcacaaacagggtgtggagtggcaggcagaggcctctaaatctcagggcaaacatggtgaatctatctctccggagataatttcatacagagattttaagaaaacatctttatattaaaaacagatctcatttgatccttaagccagtctcatgaatgaaaaggacaggtttttttcttttgtaaatgaagcatttgcagcttaaagaggatgcatgaaataacccttttatcgcttataaatagtgccagttatgtgttcctgccacggctgtggaaatacttcacatttgcattccaggactgttttggatccatttgcccgagaatcttctgactaactctgtgtcctcatctgggcagcacacaccaagtgcccactggtacctctgcatgtccatggtgctgtgtgactggccagccagcagccagtgactcagagctggctgtatggagggggtgggaatgtttctggagatttttgtttttccagacacagtcttgctcagtcccctaggctggagtgcaatggcaccatctccgctcactgcaacctccgcctccctggttcaagcggttctcctgcctcagccttccaagtagctggggttataggcacccaccaccatgccgggctaatttttgtatttttagtagagatggggtttcaccatgttggctaggctggtcccgaactcccgacttcaagtgatccgcctgccttggcctcccaaagtgctgggattacaggcatgagatttttacttgagatttttccatcctcttttaggactcaggatagacttgtgtggaggtgctctctggctaaggggataagttgttactggtttgggtctgcttggttttgccttgggtggggccggtgtcgatggggcaggcttggcacgagcagtggtgccatggcagggcactgtggcatctcccctagcagtggatttggggtccctgcttgcctcacgtggtgcttacacacatgtacacacacacacacacacacacacacacacacaccttacacacatgtacacacacacacacacacacacacacacacacacacacacacacacacacacacacacacacacacacacacccctgttctgcagggcttcagcgtggccttcattcccgcctcgcctcggcctcttttcaattaagaagtgatgccacttgaggcagggtctgcatgatcacttcttgggtttcagtttgaaagctgccatccctgcgactgcccagggcctgtatgttgggaccgaagccaaacaccactgtcctccagggggctttcggcccggggcagggtccccagtgcccgccttcgaatcagactccgcgtttccgcctctccctgggcggacctgccgctagagggcgctcctcctccgcagccggcgccggcctccagcgccccagactcccgcgctgccgcccgagcctgaggtttctcacggcgttcgggattcgcgcttcggaaaccgggaacaaagaagcaagcagcacccttcagaaacagtgttctcgctctcctagcagctggcccgggcccggaggctggtgccaggagaaggcagaagagcccgggcagccggagtgggctacggggttcaggcagtgccaaggaagaagggcctcacaatgggcaattcagctgcctcccgggccgttgtccccgctgtcttcaaacaggggtcccctgtcccagctgccccaggaggagggggggaggcaggcagggccgaaaccctccagagcccagagggggacgcttggtggccgctgcagttacataaccataggatgcttttgtaccgtggaccttgttctagcaggatcctttcggaattgcacttttacatgttgggcgaatttgtgtccgtgctgaagtttattaaaggaaaatagatgga

SEQ ID NO: 262914 - DNA, 453 bp, Artificial Sequence
  derived and/or modified sequence
attgaaagaatacacagaaagcctggaaaaggtttccaggggtgtcaatacgccctgtcaactgagaattaagaggatccggctggtcacttgcctggagaggatcctgcatgctgatagtgctgaggcacctgccagctaagaaccaccgggaggaactgggccattctaacacccgttgctaccatgctggccacccgcctctccagacccctgtcacggctcccaggaaaaaccctaagtgcctgtgatagagaaaatggagcaagacgcccactattgcttggttctacttcctttatcccgattggccgtcggacttatgccagtgcggcggagccggttggcagcaaagctgtcctggtcacaggctgtgactctggatttgggttctcattggccaagcatctgcattcaaaaggcttccttgtgtttgctggctgcttgatgaag

SEQ ID NO: 262915 - DNA, 539 bp, Artificial Sequence
  derived and/or modified sequence
ccgggtggcggaggccgcaggccgcaggagtgctggtggaggggcttccagaaagaccctgcggcagcgccccccctcggctctccccgcaggagagcgggcacctgcgcggcgccgggtgaaggcgagagcctcggcgagccctctgcagcggagccccctgcccatttggttttgggcaggaggaggccctgggttaaacacgcggccctgcagctcccaggtgaaacgactcatcgtttcctgccggcgcatcttactgaaggggacccaggccccacgaagggaaggaaccgtcctcaaggtcacgtcgtagtcaaaggccgagcccagaccgaagccagaaccaccgggaggaactgggccattctaacacccgttgctaccatgctggccacccgcctctccagacccctgtcacggctcccaggaaaaaccctaagtgcctgtgatagagaaaatggagcaagacgcccactattgcttggttctacttcctttatcccgattggccgtcggacttatgccagtgcggcgga

SEQ ID NO: 262916 - DNA, 1032 bp, Artificial Sequence
  derived and/or modified sequence
atgttggctaccagactgagccgacccctcagtcgtctgccaggcaaaactctgtcagcctgtgatcgagagaacggtgcacgcaggccgctgctcctcgggtcaacttccttcatccccatcggaagacggacatatgctagcgctgcagagcccgtaggcagcaaggccgtgctggttactggatgcgactcaggttttggattcagtttagccaaacacttgcactctaagggcttcctggtattcgctggctgcctgatgaaggataaaggccatgatggtgtgaaggaactggactctctaaacagcgatcggctgagaaccgtacaacttaacgtctgctcaagcgaagaggtggagaaagttgtggaaatagtccggtcctctctaaaggaccccgagaaaggtatgtggggtctggtgaataacgcggggatcagcacgttcggagaggtggagttcaccagcctagaaacttataagcaggtggctgaagttaatctgtggggtactgtgcgtatgaccaagagctttctccctctgataagacgcgccaaaggcagggttgtaaatataagttccatgctcggaaggatggcgaacccagccaggtccccctattgtatcactaaatttggcgtggaagccttctctgattgcctgcgctacgaaatgtatcctcttggggtcaaagtttccgttgtggagccgggcaatttcatagcagccacatccctctattctcccgagagcattcaggcaattgcgaaaaagatgtgggaggaattacccgaggtggtgagaaaagattacggaaaaaagtacttcgacgagaagattgctaagatggaaacatattgtagctcgggcagtacagatacctctcctgtgattgacgccgtcactcatgcactgacggcaacaactccttacacccgatatcacccaatggactactactggtggctgcgcatgcagatcatgactcaccttccgggagcaatttctgacatgatttacattagatag

SEQ ID NO: 262917 - DNA, 1032 bp, Artificial Sequence
  derived and/or modified sequence
atgttggctactaggctttcccggcccctctccagactgcccgggaagaccctttcagcctgtgatagagagaatggcgctcgacgccctcttctgctgggtagtacatccttcataccaattggtcgtaggacttatgcatcggcagccgaaccggtgggctctaaggctgtactggtcaccggttgtgattccggctttgggttctcactggctaagcatcttcactccaagggattcttagtgtttgccggttgtttgatgaaggacaaaggccacgacggagtgaaggagcttgactcactgaactctgatcgactcaggactgtgcagcttaatgtatgctcttcagaggaggtcgagaaagttgtggaaattgtaagaagtagtttgaaggatcctgaaaagggaatgtggggccttgtgaataacgccggtatttccacctttggcgaggtagagtttacttccctggagacttacaaacaagtcgcggaagtgaatctgtggggcaccgtacgcatgacgaaaagcttccttccgctgatcagaagagccaaggggcgagtagttaacatctccagtatgctgggccgcatggccaatcctgctaggtccccatactgtataaccaagttcggagttgaggccttctctgattgtctgagatacgagatgtacccactaggcgtgaaagtgagcgtagttgaaccaggaaactttatcgccgccacaagcctgtactcccctgagagcattcaggccatagccaaaaaaatgtgggaagaacttccagaagtcgtgaggaaggattatggaaagaagtactttgacgagaaaatcgctaagatggagacctactgtagctccggctcaacagacacttcccctgttatagacgctgtgacccatgcactgaccgccacaaccccctacactagataccacccaatggactattactggtggctgcggatgcagatcatgactcatctgcctggcgcaatttcagacatgatttacatccgatag

SEQ ID NO: 262918 - DNA, 1032 bp, Artificial Sequence
  derived and/or modified sequence
atgctggcaaccaggctctctagaccgctgagccgtctgccaggtaaaacactttctgcctgcgaccgcgaaaatggtgctaggagacccctcctgctcggctcgacctccttcatccccatcggccggagaacatatgcgagcgccgccgaaccagtggggtctaaggctgtgcttgttacaggttgcgacagcggcttcgggttttccctggccaagcacctacactctaagggattcctggtgtttgcaggttgtctaatgaaggataaagggcatgacggcgtgaaggaactggattccctgaattccgacagactcagaactgttcaacttaacgtttgtagttcagaagaagtcgaaaaggtagttgagatcgtcaggagtagtttaaaagatcccgaaaaaggaatgtggggactggtgaataacgccggtatcagcacgtttggagaagtggagttcacaagtcttgaaacctataagcaggttgccgaggtgaacttatggggcactgtgcgcatgactaaatcatttctgcccttgatccgacgggccaaaggaagagtggtgaatatttcctcaatgttaggtcgtatggctaatccagcccgaagtccctactgcatcaccaagtttggggtcgaggccttctccgattgcctccgctacgagatgtatccactgggggttaaggtgagcgtggtagaaccaggaaattttattgcagccacatcgctgtacagccctgagtcaatacaggccattgccaagaagatgtgggaagagctgcctgaggtcgtacgcaaggactatggtaaaaaatattttgatgagaagattgccaaaatggaaacttattgttcctcgggctccactgacacctccccggtgatcgatgctgtcacccacgcattgaccgcaactactccttatacccgttaccaccctatggattattactggtggcttagaatgcaaatcatgactcacttgcctggcgccatatctgatatgatctacataaggtag

SEQ ID NO: 262919 - DNA, 270 bp, Artificial Sequence
  derived and/or modified sequence
atgctggcaacacgccttagccgtcccttgagccgcttaccaggaaaaacattgtccgcctgcgacagagaaaatggcgcaaggcggcctttgctcctgggaagtacctctttcatcccaatagggcggaggacatacgccagcgccgccgagccagtggggagcaaggcggtcttggtgacgggttgcgactcggggttcggcttttccctggccaagcaccttcatagtaagggttttctggtgtttgcaggatgtctgatgaagtag

SEQ ID NO: 262920 - DNA, 153 bp, Artificial Sequence
  derived and/or modified sequence
atgctcgccacccggctctctcgtccacttagccgactgcccgggaaaaccctgtccgcctgtgaccgagagaatggggcccgcagacccctgctgttagggtccacctctttcattcctatcggaaggcggacttacgcctcggcggcttag

SEQ ID NO: 262921 - DNA, 1032 bp, Artificial Sequence
  derived and/or modified sequence
atgctggccacccggctgagccggcccctgagccggctgcccgggaagaccctgagcgcctgtgaccgggagaatggagcccggcggcccctgctgctgggcagcaccagcttcatccccatcggccgccgcacctacgccagcgctgctgagcctgtgggcagcaaggctgtgctggtgacaggctgtgacagcggcttcggcttcagcctggccaagcacctgcacagcaagggcttcctggtgtttgctggctgcctgatgaaggacaagggccatgatggagtgaaggagctggacagcctgaacagcgaccggctgaggacagtgcagctgaatgtgtgcagcagcgaggaggtggagaaggtggtggagatcgtgcgcagcagcctgaaggaccctgagaagggcatgtggggcctggtgaacaatgccggcatcagcaccttcggggaggtggagttcaccagcctggagacctacaagcaggtggccgaggtgaacctgtggggcaccgtgaggatgaccaagagcttcctgcccctcatccggcgggccaagggccgggtggtgaacatcagctccatgctgggccgcatggccaacccagcccggagcccctactgcatcaccaagtttggagtggaggccttcagtgactgcctgcgctatgagatgtaccccctgggcgtgaaggtgtctgtggtggagcccggcaacttcatcgccgccaccagcctgtacagccctgagagcatccaggccatcgccaagaagatgtgggaggagctgcctgaggtggtgaggaaggactatggcaagaagtactttgatgagaagatcgccaagatggagacctactgcagcagcggcagcacagacaccagccctgtgattgatgctgtgacccacgccctgacagccaccaccccctacacccgctaccaccccatggactactactggtggctgaggatgcagatcatgacccacctgcccggggccatcagtgacatgatctacatcagatag

SEQ ID NO: 262922 - DNA, 270 bp, Artificial Sequence
  derived and/or modified sequence
atgctggccacccggctgagccggcccctgagccggctgcccgggaagaccctgagcgcctgtgaccgggagaatggagcccggcggcccctgctgctgggcagcaccagcttcatccccatcggccgccgcacctacgccagcgctgctgagcctgtgggcagcaaggctgtgctggtgacaggctgtgacagcggcttcggcttcagcctggccaagcacctgcacagcaagggcttcctggtgtttgctggctgcctgatgaagtag

SEQ ID NO: 262923 - DNA, 153 bp, Artificial Sequence
  derived and/or modified sequence
atgctggccacccggctgagccggcccctgagccggctgcccgggaagaccctgagcgcctgtgaccgggagaatggagcccggcggcccctgctgctgggcagcaccagcttcatccccatcggccgccgcacctacgccagcgctgcctag

SEQ ID NO: 262924 - DNA, 1032 bp, Artificial Sequence
  derived and/or modified sequence
atgctggccacccggctgagccggcccctgagccggctgcccggcaagacccttagtgcctgcgacagagagaatggggccagaaggccattactattaggcagtacaagttttataccgatcggccgccggacgtatgctagtgccgccgagcctgtaggtagtaaggcagtgctggttacgggctgcgacagcggattcggattcagcctggcaaaacacctgcatagcaagggtttcttagtgttcgcaggatgcctgatgaaagacaaaggacacgacggcgtcaaggaactggactcacttaactccgacaggctgcgaacggtgcagttgaatgtgtgctcgtccgaggaggtggagaaagtcgttgaaatcgtcaggagctccctcaaggatcctgagaagggaatgtggggactcgtgaacaacgccggaatctccaccttcggagaggtcgagttcactagtctggaaacttataagcaggtggccgaagtaaatctgtggggtactgtacgcatgactaaaagcttcctcccgttgatccgccgagccaagggcagggttgtgaacattagttccatgcttggccgcatggccaaccctgcccgaagcccatactgcattaccaaatttggcgttgaagccttcagtgattgtttgaggtatgaaatgtacccccttggtgtcaaagttagtgtcgtcgagccgggcaacttcattgcagccacttcattatactcaccagagagtatccaggctattgctaaaaaaatgtgggaagaactgcccgaggtggtgagaaaagattatgggaagaagtatttcgacgagaaaatcgcaaaaatggagacctattgcagcagtggtagcactgacacatccccagtaatagacgctgttactcatgcactaacggccaccacaccttatactagataccatccaatggactactattggtggttaagaatgcagatcatgacccacttgcccggtgcaatctctgatatgatttacatacgttag

SEQ ID NO: 262925 - DNA, 1032 bp, Artificial Sequence
  derived and/or modified sequence
atgctggccacccggctgagccggcccctgagccggctgcccggcaagaccctgtctgcctgtgatagggagaatggcgctcgaagacccctcctgctgggcagcacctcattcattccaattgggagacgcacttatgcctcagcagccgaacctgtaggttccaaggccgtactggtcaccggatgcgactccgggttcgggttctccctagctaaacacttgcactctaagggttttcttgtattcgccggttgtctgatgaaggataaggggcatgacggcgtaaaagagttagattcccttaatagtgacagactcaggacagtgcagctcaatgtgtgcagctctgaagaggtggaaaaagtggtggagatcgtgcggagctcactgaaggatcctgaaaaaggaatgtgggggctggtgaacaacgctggtatctctacattcggcgaggtggagttcacgtcgctagaaacttacaaacaagttgctgaagttaatctctggggcactgtaagaatgacaaagagctttttgccacttattagaagggcgaaaggccgcgtcgtcaacatatcttctatgctggggaggatggctaaccccgctaggagcccctattgtattacgaagtttggagtggaagctttcagcgattgtctgaggtatgaaatgtaccccctgggcgtgaaggtatcggtggttgagccaggtaactttatcgccgcaacctctctctattctccagagtccatccaggcaatcgccaagaagatgtgggaggagttgcccgaggttgtgcggaaagactacggcaagaagtatttcgatgaaaaaattgccaaaatggagacatattgttcttcaggctcaacagacacaagccctgtgatcgatgccgtgacccatgctctgacggccacgaccccctacaccaggtaccatccgatggactattactggtggctccgaatgcagatcatgacacatctacctggcgctatttcagacatgatctatattcggtag

SEQ ID NO: 262926 - DNA, 1032 bp, Artificial Sequence
  derived and/or modified sequence
atgctggccacccggctgagccggcccctgagccggctgcccggcaagacactgtccgcctgcgatagagaaaacggagctagaagaccactgctactgggcagcacatcatttattcccattggtcgtcggacttatgcttccgcagccgaaccagtcggaagcaaagctgtcctggtcactggatgcgattctggttttgggttctcgctcgccaagcatttgcactcaaagggatttctggtctttgccggttgcctgatgaaggataaaggccacgacggcgtgaaggaacttgactccctaaacagcgatcgactgcgcacagttcagctaaacgtatgctccagtgaggaagtcgagaaggtagtggagatcgtgcgatcatctttgaaggaccctgagaagggcatgtggggacttgtgaacaatgccggcatttcgacatttggcgaggttgagttcacttcactcgaaacatataaacaggtggccgaggttaacctgtggggaactgtgcggatgacgaaatcgtttctgcccctaatacgccgggccaaggggagggtcgtgaatatttcgtccatgttgggcaggatggccaaccccgcgcggtcaccttattgtatcactaaattcggcgtggaagctttttcagattgtctccgctatgagatgtatccactgggcgtcaaggtctcggtggtcgaacctgggaactttattgctgccaccagtttatattcccccgagtcaatccaggcgattgccaaaaagatgtgggaggagctgccagaagttgtgcgtaaggactatggcaaaaagtacttcgatgagaagattgctaagatggagacttactgctcttccggcagcaccgacacatcacctgttatcgatgccgtcacccacgctctgactgccaccaccccttacactcgatatcatcctatggactactattggtggctccgaatgcagatcatgactcatctcccaggggccatctccgacatgatttatatcaggtag

SEQ ID NO: 262927 - DNA, 270 bp, Artificial Sequence
  derived and/or modified sequence
atgctggccacccggctgagccggcccctgagccggctgcccggcaagaccttatcagcatgtgatagagagaacggggctcgtcgccctctgctcctcggaagtacgtccttcatccctatcggccgccgcacctacgcttccgcggctgagccggtgggcagtaaagccgttctggttacgggttgtgattctggatttggcttctcgctggccaagcacctgcactcaaagggcttcctggtgttcgcaggatgtctcatgaaatag

SEQ ID NO: 262928 - DNA, 153 bp, Artificial Sequence
  derived and/or modified sequence
atgctggccacccggctgagccggcccctgagccggctgcccggcaagaccttgtccgcgtgcgaccgggaaaatggggcacggcgcccccttctgctgggatccacatcgtttattcccatcggccgccgcacttacgctagcgccgcatag

SEQ ID NO: 262929 - DNA, 1032 bp, Artificial Sequence
  derived and/or modified sequence
atgctggcaacccgcctgtcaagacccctctctaggcttcccggaaagacactttcagcttgcgaccgagaaaatggagctcgccgacccctcttgctgggcagtacgtcatttattcccattgggaggcgtacctatgcaagcgctgctgaacctgtgggctcaaaggcagtgctagtcactggatgcgatagtggttttggtttttccctggccaaacacctgcattccaaaggcttcctcgtcttcgccggatgtctgatgaaggacaagggacatgatggggtgaaagaattggattcactgaatagcgatagacttagaacggtgcagctgaatgtgtgtagttctgaggaggtggagaaggtggttgaaatcgtgaggtcatcactcaaagatcccgagaaagggatgtgggggttagtgaataacgccggaatttctacgtttggggaggtggaatttacctccttagaaacctataaacaggtcgcagaggtaaacctctggggcacggttcggatgaccaagagcttcctgccgctgattcggcgtgccaaggggagagtggttaatatatcttccatgttgggaagaatggccaaccctgctcgtagtccgtactgcattaccaagttcggagtggaggcttttagtgattgtctgcgatatgaaatgtatcctctgggcgttaaggtctctgttgtggagcccggtaactttatcgcagccacaagtctgtatagtcctgaatccattcaggctatcgctaagaagatgtgggaagagctccctgaggtcgtccgcaaagattacggtaaaaagtatttcgacgagaagatagccaaaatggagacatactgtagttcaggctctactgacacatcccctgtaatcgacgccgttacacacgccctcactgcaactactccatacacaagatatcaccccatggactactattggtggcttaggatgcagattatgacccaccttccgggagctatttcagatatgatttacattaggtag

SEQ ID NO: 262930 - DNA, 1032 bp, Artificial Sequence
  derived and/or modified sequence
atgcttgccaccaggctttcacggcctctcagcagactgcctgggaagaccctgagcgcctgcgatcgggagaacggtgccaggagaccgctgctgcttggctctactagcttcattcctatcggacggagaacttatgccagcgcagccgagcccgtgggatcgaaggccgtgttggtcactggatgtgatagtggttttggatttagccttgcgaagcacttgcactctaaaggcttcctggtgtttgcagggtgcctgatgaaagataagggtcacgacggtgtgaaagaattggacagcctcaattccgatcgcctgcgtactgtgcagcttaacgtgtgcagctccgaagaggtggaaaaagttgttgagattgtgcggagcagcctgaaggatccggagaagggaatgtgggggctggttaataatgctgggatctctaccttcggggaggtcgagtttacgtccttggagacatacaagcaggtggcggaggtgaatttatggggtacagttagaatgaccaagtccttcctgccactcatccgcagggctaagggaagagtcgtgaacatatcctccatgctgggacggatggccaacccagcccgaagcccttattgcataaccaagttcggtgtcgaggcattttctgactgtttgcgctacgaaatgtaccccctaggcgtaaaggtgagcgttgtggagccaggaaactttattgccgctacatcgctctattcccccgaaagcatccaggcaattgcaaagaagatgtgggaggagctgcccgaggttgtcaggaaggattatggtaagaagtacttcgatgagaagatcgccaaaatggaaacctattgtagctcagggtctaccgacacatctcctgtgattgatgcggtgactcacgctttgaccgccacaactccatacacaagataccatcccatggattactactggtggctgagaatgcagatcatgacccacttacccggagctatctccgatatgatctacatccgatag

SEQ ID NO: 262931 - DNA, 1032 bp, Artificial Sequence
  derived and/or modified sequence
atgctggcaactcggctgtcacgacccttaagcagacttccagggaagaccctttccgcctgcgaccgtgagaacggagcccgtaggccactgctcctgggctcaacaagttttatccccatcggacgcaggacctacgccagtgccgcagagcctgtggggagtaaggccgtgctcgtcacaggttgtgactctggattcggattttcacttgcaaagcacttgcactcaaagggattccttgtctttgccggatgcctgatgaaggacaaaggccatgacggggtgaaagagttagacagcctgaattccgacagactgcggactgttcaactgaatgtgtgctcctcagaggaagtggagaaggtcgtggagatcgtacggagctctctcaaggacccagaaaaaggcatgtggggattagtgaataacgctggtatttcaacatttggcgaggtggaatttacaagccttgaaacatacaagcaagtggccgaggtcaatctttggggcacggtgcggatgaccaagtctttcctacctcttattaggagggctaaagggcgagtggtcaacatctcgagcatgctgggacgaatggccaatcccgctcgcagcccatactgcattaccaagtttggtgtcgaggcttttagcgactgcctgcggtatgagatgtacccactgggggtgaaagtgagcgtggtggagcctggtaacttcatcgccgcaacctctctttatagtccggagtctatacaggcgatcgcgaaaaaaatgtgggaagagttgccagaggtggtccgtaaggattacgggaaaaaatactttgatgaaaagatagccaaaatggagacctactgtagttccgggtctaccgacactagcccggtgattgacgctgtgacccacgcgcttactgccacgaccccctacacgcggtatcaccccatggactattactggtggctacggatgcaaatcatgactcaccttccaggggctatctccgacatgatctatattcgatag

SEQ ID NO: 262932 - DNA, 270 bp, Artificial Sequence
  derived and/or modified sequence
atgctagccacccgtctgagcaggcccctctccagactgcccggtaaaacactcagtgcatgcgacagggaaaatggggcaagacgccctctgctgttagggagcaccagctttattcctattggtaggcggacctatgccagtgctgcagagcctgttggttccaaagccgttctcgtgacgggatgtgacagtgggtttggattctccctggccaagcatctgcatagcaaaggcttcctggtcttcgcagggtgtctgatgaagtag

SEQ ID NO: 262933 - DNA, 153 bp, Artificial Sequence
  derived and/or modified sequence
atgctggctacgcggctctcacgccctctgtctagactccctggcaaaactctctccgcctgcgatcgcgaaaacggggctcgacgaccactcctcctggggagtacctcattcatccctataggaaggcgaacatacgcctcagctgcttag

SEQ ID NO: 262934 - protein, 1268 aa, Artificial Sequence [sequence omitted]

SEQ ID NO: 262935 - DNA, 3807 bp, Artificial Sequence
  derived and/or modified sequence
atgtcttccgtagccgtgcttacccaggaatctttcgctgaacatcgcagcgggctcgttccacaacagattaaggtggcaaccctcaactccgaagaagaaagtgaccctcctacatataaagatgccttccctccgttgcccgaaaaggcagcctgtctggagtctgctcaggaaccttctggcgcctggggaaacaaaatccgcccgataaaggcgtcagttattacccaggtttttcatgtccctcttgaggagaggaagtataaggatatgaatcagttcggggagggggaacaagctaagatctgccttgaaattatgcaaaggacaggcgctcacctcgagctttctctggccaaggaccagggcctgtccattatggtgagcgggaagttggacgccgtgatgaaagcacgaaaggacatcgttgcccgccttcaaacccaggcatcagcgacagtcgcaattccaaaagagcatcatagatttgtaatcggtaagaacggggagaaactgcaggacctggagttgaaaacagccacaaagatccagatcccacgtcccgacgatccttctaatcaaattaaaatcaccggaacaaaggagggcatagagaaagctcggcacgaggtactgctgatttctgctgagcaggacaaacgcgccgtagagcggttagaggtggaaaaggcttttcacccttttattgcagggccttacaaccgcttagtgggcgagatcatgcaggagaccgggacccgcattaacatcccaccccctagtgtgaatcgcacagaaatagttttcaccggtgagaaagagcagctcgcacaggccgtggccaggataaaaaaaatctacgaagagaaaaaaaaaaagaccactaccatcgcagtggaagtaaagaagtcccagcataagtacgtgattggacctaagggtaattctctgcaggagatacttgaacgaaccggggtgtctgtagaaattccccctagcgacagcatttctgaaaccgtcattttgcgaggcgaaccagagaagttgggccaggctctgacagaggtatacgctaaggctaattcattcactgtttctagtgtggcagcaccgtcttggttgcataggttcattatcgggaaaaaaggccagaacctcgccaagatcacacagcagatgccaaaagtacatatagagttcacagagggtgaagacaaaatcacactggagggccctaccgaggatgtgaacgtcgcccaagaacagattgaagggatggttaaggaccttatcaaccgtatggattacgttgagatcaacatcgatcataaattccaccgccaccttatcgggaagagtggagccaacattaatagaattaaggatcaatataaggtttccgtgcgcatccctcccgattctgagaagagtaatttgattcgtatcgaaggggacccccaaggagtccagcaggccaagcgcgagctcctagagctagcctcccgcatggagaatgagcgaacgaaggacctgattattgaacagcggtttcatcgcacaataataggtcagaagggagaaagaatccgggagatccgtgacaagtttcccgaagtgatcattaacttcccggatcccgcccagaaatccgacatagtccagctccgggggcctaagaatgaggtcgaaaaatgtaccaagtatatgcagaaaatggtcgccgatctggtagagaactcttactccatcagcgtcccaatctttaagcagttccacaagaatatcatcggaaaaggtggggctaatataaagaagatcagagaagaatctaacaccaagatcgacctgcccgcggagaactcaaatagcgaaactatcatcattaccgggaaaagagccaactgtgaagcagccaggtcccgcatcctgtctattcagaaggatctcgcgaatatcgcagaggtcgaggtgagcataccagctaaactccataacagcctcattggaacaaaaggccgcctgattagaagcataatggaagagtgcggcggtgtacacatccattttccagtggaaggttcaggcagcgacacagtggttatccgaggcccctcatccgacgtggagaaggccaagaagcagctgctccatctggctgaggagaaacagaccaagagtttcacggtcgatatcagagctaagcctgaatatcacaagtttttgatagggaaaggcgggggaaaaatcagaaaagtgagggactcaaccggtgctagggtcattttccctgccgcagaagacaaggatcaagacctaataactattatcgggaaggaagatgccgtgagggaagctcagaaggagctcgaagccctgatacagaacctcgataatgtcgtagaggactccatgctcgtcgatcccaaacaccaccgccatttcgtaattcggagaggtcaggtgctgcgcgaaatcgccgaagagtacggaggcgttatggtgagttttccgcggagcggcacacagtccgacaaagttacgctgaagggagctaaagactgcgtggaagccgctaagaagcgaatacaggaaatcattgaggatctggaggcacaggtgactctggaatgcgcaatcccccagaagtttcaccggtctgtaatggggcccaagggatctaggattcagcagatcacgagggattttagtgttcagatcaagttccctgaccgcgaagagaacgctgtccatagcactgagccggtggttcaagagaacggcgatgaggccggcgaaggaagggaggctaaagactgtgatcctggctccccacgccgctgcgacattatcattatctccgggaggaaggagaagtgtgaggccgccaaggaggccctggaagcccttgttccagtcactatagaggtggaggtcccatttgacttgcatcgatatgtaattggacaaaagggaagtggaatcaggaagatgatggatgagttcgaagtcaacatccacgttccggctccagaattacagtcagatattattgccattaccgggctggctgctaatctggaccgcgctaaagcaggattgcttgaacgggtgaaggagttacaggccgagcaagaagaccgtgctcttcgctcctttaagctctccgtgaccgtagaccccaagtatcatccaaaaatcatcggacgtaagggagccgtcataacccagatccgactggaacacgacgtgaatatccagttcccagataaggatgatggaaaccagcctcaagatcagatcactatcacgggatatgagaagaacaccgaggccgcccgtgacgccatactgcgcatcgtgggcgagctcgagcaaatggttagcgaggacgtaccactggaccaccgagtacatgcccgcatcattggagcccgggggaaggcgatccgcaaaattatggacgagtttaaggtagatatccgctttcctcagtcaggcgcgccagatccaaattgcgttactgtcaccggactccctgagaacgtcgaagaggccattgaccacatcctgaatttagaggaagaatatttggctgatgtcgttgacagtgaagccctgcaagtgtatatgaagccacccgcccacgaagaagcgaaagcaccttctcggggttttgtggtgagagacgcaccttggactgcttcctctagtgagaaggctccggacatgtccagctccgaggagttccctagctttggcgcacaggtcgcccccaaaactctgccctggggaccgaaaaggtag

SEQ ID NO: 262936 - DNA, 3807 bp, Artificial Sequence
  derived and/or modified sequence
atgagctccgtggccgtcctgacccaggaaagcttcgccgaacaccgtagtgggttggttcctcagcagattaaagtcgccactctgaactcggaggaagaaagcgacccccctacttataaggatgccttccccccccttccggaaaaagctgcatgcctggaatcggctcaggaaccaagtggagcctggggaaacaaaatcaggcctattaaagcatctgtcatcacccaggtttttcatgtccccctagaagagcggaaatacaaggacatgaatcagtttggagagggagagcaggctaaaatctgcttagaaattatgcagcggacgggagctcatctagagctctccttagcaaaagaccaagggctgtccatcatggtaagcgggaaattggacgccgtcatgaaggctcggaaggacattgtggcccggctgcagacacaggctagcgcgactgtcgctatcccaaaggaacaccatcgctttgtgattggtaagaatggtgagaagctacaggaccttgaactgaaaactgctaccaagattcagatccccaggcctgatgatccgagcaaccagatcaagataactggaacgaaggaagggattgaaaaggcaagacacgaagttcttctaatttccgccgagcaagacaaacgagcggtggagcggttggaagtggaaaaggccttccatcctttcatcgccggcccttataaccgcctcgtgggagaaatcatgcaagaaacaggcacccggataaatatacctcctccttccgtcaacaggaccgagatcgtctttacaggcgaaaaggagcagttggcccaggcggttgcaaggattaaaaagatttatgaagagaaaaaaaaaaagacaactaccattgccgtggaagtcaagaagtctcaacacaaatatgtaatcggcccaaagggcaactcattgcaggaaatcctggaacggacgggcgtatccgtggaaattccaccctctgacagcatttctgagactgtaatcttgcgcggggagcctgaaaagctcggacaagctctgacagaagtttacgcaaaagcgaatagcttcacagtgagctccgtggccgccccctcatggctgcaccgatttattataggcaaaaagggacagaacctggcgaagatcacgcagcagatgccaaaggtgcacatagagttcacggagggggaggataaaatcacgctggaggggcccacagaggacgttaatgtggcccaggagcaaattgaagggatggttaaggacttgattaacagaatggattacgtggagataaacatcgaccacaagttccacagacacttaattggaaagtcaggcgcgaatattaaccggatcaaagaccagtataaggtcagcgtcagaattcctcctgacagtgagaagagcaacctgattagaatagaaggggacccccagggggtacaacaggccaagcgtgagctcctggaactggccagcagaatggaaaatgagcgcaccaaggatctcatcatagagcaacggttccacaggaccattatcggtcaaaaaggagaacggatccgggagatacgagacaagttccccgaagtaataatcaatttcccggacccggcccaaaaatctgatattgtacaactccgcgggccgaagaacgaggtggagaagtgcactaaatacatgcaaaaaatggtagctgatctcgtggaaaattcatactctatctctgtcccgatctttaaacagttccacaagaacataataggtaagggcggcgctaacataaaaaagattcgggaggagagcaatacaaaaatcgacctgcccgccgagaactccaatagcgaaaccatcatcataaccggcaagcgcgcaaactgtgaggccgcaagatcacgcatcctgagcatccagaaagacctcgctaacatcgctgaggtcgaagtgagcatccccgctaagttgcataatagtttaattggcactaaagggaggctcattcgctctataatggaagaatgcggcggtgtccacattcattttcctgttgagggttccggaagtgataccgtcgtgattcgtggtccctcctctgatgtcgaaaaagccaagaagcagctgctccaccttgctgaggaaaagcagactaagagctttactgtggacatcagagcaaagcccgagtatcataaatttcttatcggcaaggggggagggaagataagaaaagtgagagactccactggagcccgcgtgatatttccagctgccgaggacaaggatcaggacctgatcactatcattggcaaggaagatgcagtgcgcgaagcccagaaggagctagaggccctcatacagaatctggataatgtggtggaagattcgatgctggtggatcccaagcatcaccgccatttcgttattcgacgaggccaagtcttgcgagagatagctgaggaatatggcggcgtcatggtgtcgttccctaggagtgggacacagtccgataaagtaacgctgaaaggcgccaaggactgtgtggaggccgccaaaaaacggatacaagagatcattgaggatctggaagcgcaggtcactctggagtgcgccatcccccaaaaatttcaccgttctgtaatgggccccaagggatccaggattcaacagatcacacgcgacttcagcgttcagattaaattccctgatcgcgaagaaaacgccgtacacagcacggagcccgtagtgcaggagaatggggacgaggccggagaaggcagggaagctaaagattgcgatcccggaagcccacgaaggtgtgacattattattatatctggcagaaaagaaaagtgcgaagccgccaaagaggccctcgaggctctcgtccccgtcactatcgaagttgaagtaccttttgatctccaccggtacgttattggacagaaaggcagtgggattcgtaagatgatggatgagttcgaggtaaatatacacgtccctgcccctgagctgcaaagtgatataatcgcaataacaggcctggcggctaatctggatcgtgctaaagccggcctgctggaacgagtgaaggagctgcaggccgaacaggaagaccgggctctccggtcttttaagctttctgtgactgtggatcccaagtatcaccctaaaattatcggccggaagggggcagtgatcacacagatcagactcgagcacgacgtgaatatccaatttcctgacaaggatgacgggaaccagccccaggaccagataacaattacaggatacgaaaaaaatacagaagcggccagagatgcaattctaaggattgtgggcgaactggagcagatggtctcagaagatgtacctttggaccaccgggtgcatgcccgaattattggcgcgagggggaaagccattcgcaaaatcatggatgaattcaaggtggacatcaggtttccgcagtctggagcgccggaccccaattgcgttacagtaactggattacctgaaaatgtggaggaagctattgaccacatcttgaacctcgaggaggagtacttggccgacgttgtggacagtgaggccctccaggtctatatgaagccacctgcccatgaggaagccaaagcaccctccagagggttcgtcgtccgcgatgcaccctggacagcgtcaagcagtgagaaagcaccagatatgtcttctagtgaagaattcccatcttttggggcacaggtcgctcccaagaccctgccatggggacctaagaggtag

SEQ ID NO: 262937 - DNA, 3807 bp, Artificial Sequence
  derived and/or modified sequence
atgtctagcgttgccgttctgactcaagagtcctttgcagagcacaggtccgggctcgtgccccagcaaattaaggtggcaaccctgaacagcgaggaggaatctgaccctcccacctataaagatgcatttcccccccttcccgagaaggctgcatgtctggaaagtgcccaggaaccttctggtgcttggggaaacaaaatcagaccaattaaggcgagcgttataacacaggtgtttcacgttcctctcgaggagcggaagtacaaagatatgaaccagtttggggagggcgaacaggcaaaaatctgcctggagattatgcagcgcacgggcgcccacctcgaactgtcactggcaaaagatcagggcctgtcgataatggtgagcggtaagttagacgccgtgatgaaagctcggaaggacatcgtggcccggttgcagacccaggcttcagccactgtcgctatcccaaaagaacaccacagatttgtcataggaaaaaatggcgagaagttacaggatctcgaactcaagacagcgacaaagatccaaattccccggccagatgatccgtccaaccaaattaaaataactggcaccaaggaagggatcgagaaagcacggcacgaagtgctgctgatatcggctgagcaggataaacgcgcagtggagaggcttgaagtggagaaggcctttcaccctttcatagccggaccatacaatcggctagtcggagaaatcatgcaggagaccggaacgcggattaacatcccccctcccagtgtcaacagaactgagatcgtctttaccggggaaaaggagcagctcgcacaggctgtggctaggataaaaaagatatatgaggagaaaaaaaagaagaccacgacaattgccgtggaagtgaagaagagccagcacaagtatgtcatcggtcctaaaggaaatagcctccaggagattctcgagcgcacaggggtctcagtggaaatcccacctagtgactctataagcgaaacagtgattctgcggggagaacccgaaaaattgggtcaggcactgaccgaggtctatgccaaagcaaacagcttcacagtttcttctgtggctgcccccagttggctccacaggttcattatagggaagaaaggccagaatctcgccaagattacacaacagatgccaaaagtgcacatagagttcactgaaggcgaagacaagatcactctggagggaccaacagaagacgtaaacgttgcgcaggagcagatcgagggcatggtcaaagatctgatcaatcggatggactacgtcgagattaatatcgatcacaagtttcaccgccacctgataggcaaatcaggcgcaaacatcaaccgtattaaagaccagtacaaggtgtcagtgcggatacctccggactcagagaagagtaatctcatccggatagaaggagacccgcagggcgtgcagcaggccaaacgagagctcctggaattagcctcgagaatggagaatgaacgaacgaaggacctgattatcgagcagcggttccaccgaaccataatcggacaaaagggcgagagaatcagggagattagggataaatttccagaggtgatcataaacttccccgatcccgctcagaagagcgatattgtccagctgcgaggccctaaaaatgaagtggaaaagtgcactaagtacatgcagaagatggtggccgacctagtcgagaactcttattctatctctgtgccaattttcaaacagttccacaagaatatcattgggaaggggggagccaacatcaaaaagatacgcgaagagagtaacaccaagatagaccttcccgccgaaaatagcaacagtgaaacgataatcattacggggaagagagccaactgtgaagccgcccggtcccggattctatccatccagaaggatcttgcaaatatcgccgaagtggaagtctctatcccagctaagctccataactcgctgataggaacgaaaggccggcttattcgcagtattatggaggaatgcgggggcgtccatatccacttccctgttgagggaagtggctccgacaccgttgttatccgagggccaagttcagacgtcgagaaggccaagaagcagcttctccacctggcagaggagaagcaaaccaagtcatttacagtggacattcgagccaaaccggaatatcacaaatttctcatcggaaagggcggtggaaagatccgaaaggtgagggattccactggcgcccgggttatcttcccagcagctgaggacaaagatcaggatctgattactatcattggtaaagaggatgcagtgagagaagcccagaaggagcttgaagctttaatccagaatctggataacgtggtggaggattcaatgctcgtggaccccaaacatcacagacactttgtaataagaagaggccaggtgctgcgcgagattgctgaagagtacggcggagtgatggtttcttttcctaggtctggaacgcaatccgataaagtgactttgaagggcgcgaaagattgcgttgaggccgctaagaagagaatacaagagatcatagaggacctcgaggcacaggtgactctggaatgcgcaatcccacagaaattccatcgaagtgttatgggtcccaaaggatcgaggatccaacagatcactcgggactttagcgtccagattaagttcccagatcgcgaagagaatgcagtacactcaactgaaccagtggtgcaggagaacggagacgaggcgggtgaggggcgcgaagcaaaggattgcgacccagggtctcctcgccgatgtgatataattatcatcagcgggagaaaggaaaaatgtgaggctgctaaggaggctctggaggcactggtgcctgtgacaattgaagtagaagttccattcgatctgcacaggtacgtcataggacaaaaagggtctggaatcagaaaaatgatggatgagttcgaagtcaatattcatgtccctgctccagagctgcagtcggacatcattgccattactggcctcgccgcaaacttggatcgtgccaaggccggacttctggagcgggtcaaggagcttcaggccgaacaggaggaccgggccctgagatccttcaagctatccgtgaccgtcgacccaaagtatcacccaaagataataggtcgaaagggggccgtgattacacagattcgcctcgagcacgacgtgaacatccagtttcctgacaaggacgatggtaaccagccccaggatcagatcactatcactggttatgagaaaaacaccgaggcagcacgggacgcaatactacggattgtgggcgagctggagcaaatggtctcagaagacgtccccttagaccacagggtgcacgcgcgcatcattggagctcgaggaaaggccatcaggaaaattatggatgaatttaaagtagatattcggttcccccagagcggtgctccggacccgaactgtgtcaccgttaccgggctgcctgagaacgtggaagaggccatagaccacatcttgaacctggaagaagaataccttgccgacgttgtggattcagaggcactgcaggtatatatgaaacctcccgctcacgaagaggctaaggccccgtctcgcggattcgtggtccgcgacgcaccctggaccgccagctcctctgaaaaagccccagacatgtcttccagcgaggagttcccatcattcggcgcccaggtcgctccgaaaaccctcccctggggtccgaagaggtag

SEQ ID NO: 262938 - DNA, 249 bp, Artificial Sequence
  derived and/or modified sequence
atgagttctgtggctgtgttgactcaagagtcatttgccgaacacagaagcggactggtgccccagcagatcaaagtagctactttaaattccgaagaggaaagtgacccaccaacctacaaggatgccttcccccctttgcccgagaaggccgcctgcctggagtctgcgcaggaaccttctggcgcctggggaaataagattcggccgataaaggcaagcgtaatcacccaggtcttccatgtttag

SEQ ID NO: 262939 - DNA, 45 bp, Artificial Sequence
  derived and/or modified sequence
atgtcctcagtggctgttctcacccaggagtccttcgccgaatag

SEQ ID NO: 262940 - DNA, 210 bp, Artificial Sequence
  derived and/or modified sequence
atgagcagcgttgcggtcttaacccaggagtcatttgctgagcaccgttctggcctggtgccccagcaaatcaaggtagcaacactcaatagtgaagaagaaagtgaccctccaacatacaaggatgcctttccccctctgccggaaaaagctgcatgcctggagtcagcacaagagccctcaggcgcatggggaaataagatcagatag

SEQ ID NO: 262941 - DNA, 246 bp, Artificial Sequence
  derived and/or modified sequence
atgagctctgtggcggtgctgacccaggagagcttcgccgaacacagatccggtttagtgccgcagcagatcaaagtggcaacactgaattcggaggaagagtcagatccccctacctacaaagacgcctttccgccactgccggagaaagcagcatgcttggagagcgcccaagagccatcgggcgcttggggcaacaaaataaggcctattaaggcctccgtgataactcaggtctttcattag

SEQ ID NO: 262942 - DNA, 240 bp, Artificial Sequence
  derived and/or modified sequence
atgagttcagttgccgtcctcactcaggaaagcttcgcagaacatagatccggtctggtacctcagcaaatcaaggtcgccacccttaattccgaagaagagtccgacccccccacttacaaggacgccttcccacctttgcctgaaaaagcggcatgtctggagagcgcccaagagcccagcggggcttggggaaataaaatccgaccaatcaaggcttccgtcatcacacaggtctag

SEQ ID NO: 262943 - DNA, 291 bp, Artificial Sequence
  derived and/or modified sequence
atgtcgtcagttgcggtgctgacacaagaaagtttcgctgagcatagatccgggctggtcccacagcagatcaaagtggcaaccctcaacagcgaggaagaatccgaccctcccacctataaagatgcctttcctccgctaccagagaaggctgcatgtctcgaatccgctcaggagccgagcggggcctggggcaacaaaatcaggccaatcaaagcttccgtgatcacacaggtcttccatgtccccctcgaggagcggaaatacaaggacatgaaccagttcggttag

SEQ ID NO: 262944 - DNA, 60 bp, Artificial Sequence
  derived and/or modified sequence
atgagctctgtcgcagtcctgacacaagaatcctttgccgagcaccgctctgggttatag

SEQ ID NO: 262945 - DNA, 54 bp, Artificial Sequence
  derived and/or modified sequence
atgtccagcgtggctgtcctgacccaggagtctttcgccgaacacagatcctag

SEQ ID NO: 262946 - DNA, 144 bp, Artificial Sequence
  derived and/or modified sequence
atgtcttcggttgctgtgctcacccaggaaagtttcgccgagcatcggtctggtctggtcccccagcagattaaagtcgctacactcaattccgaagaggagtctgatccccccacctataaggatgcctttcccccactatag

SEQ ID NO: 262947 - DNA, 4571 bp, Artificial Sequence
  derived and/or modified sequence
tttgccaactgcttcctggctcagtgcgacctggccttcttcccctcccccatgcggccggcttccgagtgcgcaagcccagagtcgtccgcgttgtccgcctctgcgcaagcgccgtgctcctcccacggcagttggccatatagaggctgggggtggggggggaggtcaagcgtagcctcttctcctttaccaagatggcggcttgtccctgtttcgccacagttcctaccttatgagctcggttttcttatgcttataagagtggaacagcaaaagctggcaggctgacagaggcggcctcaggacggaccttctggctactgaccgttttgctgtggttttcccggattgtgtgtaggtgtgagatcaaccatgagttccgttgcagttttgacccaagagagttttgctgaacaccgaagtgggctggttccgcaacaaatcaaagttgccactctaaattcagaagaggagagcgaccctccaacctacaaggatgccttccctccacttcctgagaaagctgcttgcctggaaagtgcccaggaaccctctggagcctgggggaacaagatccgacccatcaaggcttctgtcatcactcaggtgttccatgtacccctggaggagagaaaatacaaggatatgaaccagtttggagaaggtgaacaagcaaaaatctgccttgagatcatgcagagaactggtgctcacttggagctgtctttggccaaagaccaaggcctctccatcatggtgtcaggaaagctggatgctgtcatgaaagctcggaaggacattgttgctagactgcagactcaggcctcagcaactgttgccattcccaaagaacaccatcgctttgttattggcaaaaatggagagaaactgcaagacttggagctaaaaactgcaaccaaaatccagatcccacgcccagatgaccccagcaatcagatcaagatcactggcaccaaagagggcatcgagaaagctcgccatgaagtcttactcatctctgccgagcaggacaaacgtgctgtggagaggctagaagtagaaaaggcattccaccccttcatcgctgggccgtataatagactggttggcgagatcatgcaggagacaggcacgcgcatcaacatccccccacccagcgtgaaccggacagagattgtcttcactggagagaaggaacagttggctcaggctgtggctcgcatcaagaagatttatgaggagaagaaaaagaagactacaaccattgcagtggaagtgaagaaatcccaacacaagtatgtcattgggcccaagggcaattcattgcaggagatccttgagagaactggagtttccgttgagatcccaccctcagacagcatctctgagactgtaatacttcgaggcgaacctgaaaagttaggtcaggcgttgactgaagtctatgccaaggccaatagcttcaccgtctcctctgtcgccgccccttcctggcttcaccgtttcatcattggcaagaaagggcagaacctggccaaaatcactcagcagatgccaaaggttcacatcgagttcacagagggcgaagacaagatcaccctggagggccctacagaggatgtcaatgtggcccaggaacagatagaaggcatggtcaaagatttgattaaccggatggactatgtggagatcaacatcgaccacaagttccacaggcacctcattgggaagagcggtgccaacataaacagaatcaaagaccagtacaaggtgtccgtgcgcatccctcctgacagtgagaagagcaatttgatccgcatcgagggggacccacagggcgtgcagcaggccaagcgagagctgctggagcttgcatctcgcatggaaaatgagcgtaccaaggatctaatcattgagcaaagatttcatcgcacaatcattgggcagaagggtgaacggatccgtgaaattcgtgacaaattcccagaggtcatcattaactttccagacccagcacaaaaaagtgacattgtccagctcagaggacctaagaatgaggtggaaaaatgcacaaaatacatgcagaagatggtggcagatctggtggaaaatagctattcaatttctgttccgatcttcaaacagtttcacaagaatatcattgggaaaggaggcgcaaacattaaaaagattcgtgaagaaagcaacaccaaaatcgaccttccagcagagaatagcaattcagagaccattatcatcacaggcaagcgagccaactgcgaagctgcccggagcaggattctgtctattcagaaagacctggccaacatagccgaggtagaggtctccatccctgccaagctgcacaactccctcattggcaccaagggccgtctgatccgctccatcatggaggagtgcggcggggtccacattcactttcccgtggaaggttcaggaagcgacaccgttgttatcaggggcccttcctcggatgtggagaaggccaagaagcagctcctgcatctggcggaggagaagcaaaccaagagtttcactgttgacatccgcgccaagccagaataccacaaattcctcatcggcaaggggggcggcaaaattcgcaaggtgcgcgacagcactggagcacgtgtcatcttccctgcggctgaggacaaggaccaggacctgatcaccatcattggaaaggaggacgccgtccgagaggcacagaaggagctggaggccttgatccaaaacctggataatgtggtggaagactccatgctggtggaccccaagcaccaccgccacttcgtcatccgcagaggccaggtcttgcgggagattgctgaagagtatggcggggtgatggtcagcttcccacgctctggcacacagagcgacaaagtcaccctcaagggcgccaaggactgtgtggaggcagccaagaaacgcattcaggagatcattgaggacctggaagctcaggtgacattagaatgtgctataccccagaaattccatcgatctgtcatgggccccaaaggttccagaatccagcagattactcgggatttcagtgttcaaattaaattcccagacagagaggagaacgcagttcacagtacagagccagttgtccaggagaatggggacgaagctggggaggggagagaggctaaagattgtgaccccggctctccaaggaggtgtgacatcatcatcatctctggccggaaagaaaagtgtgaggctgccaaggaagctctggaggcattggttcctgtcaccattgaagtagaggtgccctttgaccttcaccgttacgttattgggcagaaaggaagtgggatccgcaagatgatggatgagtttgaggtgaacatacatgtcccggcacctgagctgcagtctgacatcatcgccatcacgggcctcgctgcaaatttggaccgggccaaggctggactgctggagcgtgtgaaggagctacaggccgagcaggaggaccgggctttaaggagttttaagctgagtgtcactgtagaccccaaataccatcccaagattatcgggagaaagggggcagtaattacccaaatccggttggagcatgacgtgaacatccagtttcctgataaggacgatgggaaccagccccaggaccaaattaccatcacagggtacgaaaagaacacagaagctgccagggatgctatactgagaattgtgggtgaacttgagcagatggtttctgaggacgtcccgctggaccaccgcgttcacgcccgcatcattggtgcccgcggcaaagccattcgcaaaatcatggacgaattcaaggtggacattcgcttcccacagagcggagccccagaccccaactgcgtcactgtgacggggctcccagagaatgtggaggaagccatcgaccacatcctcaatctggaggaggaatacctagctgacgtggtggacagtgaggcgctgcaggtatacatgaaacccccagcacacgaagaggccaaggcaccttccagaggctttgtggtgcgggacgcaccctggaccgccagcagcagtgagaaggctcctgacatgagcagctctgaggaatttcccagctttggggctcaggtggctcccaagaccctcccttggggccccaaacgataatgatcaaaaagaacagaaccctctccagcctgctgacccaaacccaaccacacaatggtttgtctcaatctgacccagcggctggaccctccgtaaattgttgacgctcttcccccttcccgaggtcccgcagggagcctagcgcctggctgtgtgtgcggccgctcctccaggcctggccgtgcccgctcaggacctgctccactgtttaacactaaaccaaggtcatgagcattcgtgctaagataacagactccagctcctggtccacccggcatgtcagtcagcactctggccttcatcacgagagctccgcagccgtggctaggattccacttcctgtgtcatgacctcaggaaataaacgtccttgactttataaaagccaaa

SEQ ID NO: 262948 - DNA, 6372 bp, Artificial Sequence
  derived and/or modified sequence
aggcgggattgggccgccgccctatatagcagccggggcccgggcgccgcgcctcggagcgtcccggcttctcccgcgcggggggcgagtaagccagcggcaggaccagcgggcgggggcccacgacaaaagctggcaggctgacagaggcggcctcaggacggaccttctggctactgaccgttttgctgtggttttcccggattgtgtgtaggtgtgagatcaaccatgagttccgttgcagttttgacccaagagagttttgctgaacaccgaagtgggctggttccgcaacaaatcaaagttgccactctaaattcagaagaggagagcgaccctccaacctacaaggatgccttccctccacttcctgagaaagctgcttgcctggaaagtgcccaggaaccctctggagcctgggggaacaagatccgacccatcaaggcttctgtcatcactcaggtgttccatgtacccctggaggagagaaaatacaaggatatgaaccagtttggagaaggtgaacaagcaaaaatctgccttgagatcatgcagagaactggtgctcacttggagctgtctttggccaaagaccaaggcctctccatcatggtgtcaggaaagctggatgctgtcatgaaagctcggaaggacattgttgctagactgcagactcaggcctcagcaactgttgccattcccaaagaacaccatcgctttgttattggcaaaaatggagagaaactgcaagacttggagctaaaaactgcaaccaaaatccagatcccacgcccagatgaccccagcaatcagatcaagatcactggcaccaaagagggcatcgagaaagctcgccatgaagtcttactcatctctgccgagcaggacaaacgtgctgtggagaggctagaagtagaaaaggcattccaccccttcatcgctgggccgtataatagactggttggcgagatcatgcaggagacaggcacgcgcatcaacatccccccacccagcgtgaaccggacagagattgtcttcactggagagaaggaacagttggctcaggctgtggctcgcatcaagaagatttatgaggagaagaaaaagaagactacaaccattgcagtggaagtgaagaaatcccaacacaagtatgtcattgggcccaagggcaattcattgcaggagatccttgagagaactggagtttccgttgagatcccaccctcagacagcatctctgagactgtaatacttcgaggcgaacctgaaaagttaggtcaggcgttgactgaagtctatgccaaggccaatagcttcaccgtctcctctgtcgccgccccttcctggcttcaccgtttcatcattggcaagaaagggcagaacctggccaaaatcactcagcagatgccaaaggttcacatcgagttcacagagggcgaagacaagatcaccctggagggccctacagaggatgtcaatgtggcccaggaacagatagaaggcatggtcaaagatttgattaaccggatggactatgtggagatcaacatcgaccacaagttccacaggcacctcattgggaagagcggtgccaacataaacagaatcaaagaccagtacaaggtgtccgtgcgcatccctcctgacagtgagaagagcaatttgatccgcatcgagggggacccacagggcgtgcagcaggccaagcgagagctgctggagcttgcatctcgcatggaaaatgagcgtaccaaggatctaatcattgagcaaagatttcatcgcacaatcattgggcagaagggtgaacggatccgtgaaattcgtgacaaattcccagaggtcatcattaactttccagacccagcacaaaaaagtgacattgtccagctcagaggacctaagaatgaggtggaaaaatgcacaaaatacatgcagaagatggtggcagatctggtggaaaatagctattcaatttctgttccgatcttcaaacagtttcacaagaatatcattgggaaaggaggcgcaaacattaaaaagattcgtgaagaaagcaacaccaaaatcgaccttccagcagagaatagcaattcagagaccattatcatcacaggcaagcgagccaactgcgaagctgcccggagcaggattctgtctattcagaaagacctggccaacatagccgaggtagaggtctccatccctgccaagctgcacaactccctcattggcaccaagggccgtctgatccgctccatcatggaggagtgcggcggggtccacattcactttcccgtggaaggttcaggaagcgacaccgttgttatcaggggcccttcctcggatgtggagaaggccaagaagcagctcctgcatctggcggaggagaagcaaaccaagagtttcactgttgacatccgcgccaagccagaataccacaaattcctcatcggcaaggggggcggcaaaattcgcaaggtgcgcgacagcactggagcacgtgtcatcttccctgcggctgaggacaaggaccaggacctgatcaccatcattggaaaggaggacgccgtccgagaggcacagaaggagctggaggccttgatccaaaacctggataatgtggtggaagactccatgctggtggaccccaagcaccaccgccacttcgtcatccgcagaggccaggtcttgcgggagattgctgaagagtatggcggggtgatggtcagcttcccacgctctggcacacagagcgacaaagtcaccctcaagggcgccaaggactgtgtggaggcagccaagaaacgcattcaggagatcattgaggacctggaagctcaggtgacattagaatgtgctataccccagaaattccatcgatctgtcatgggccccaaaggttccagaatccagcagattactcgggatttcagtgttcaaattaaattcccagacagagaggagaacgcagttcacagtacagagccagttgtccaggagaatggggacgaagctggggaggggagagaggctaaagattgtgaccccggctctccaaggaggtgtgacatcatcatcatctctggccggaaagaaaagtgtgaggctgccaaggaagctctggaggcattggttcctgtcaccattgaagtagaggtgccctttgaccttcaccgttacgttattgggcagaaaggaagtgggatccgcaagatgatggatgagtttgaggtgaacatacatgtcccggcacctgagctgcagtctgacatcatcgccatcacgggcctcgctgcaaatttggaccgggccaaggctggactgctggagcgtgtgaaggagctacaggccgagcaggaggaccgggctttaaggagttttaagctgagtgtcactgtagaccccaaataccatcccaagattatcgggagaaagggggcagtaattacccaaatccggttggagcatgacgtgaacatccagtttcctgataaggacgatgggaaccagccccaggaccaaattaccatcacagggtacgaaaagaacacagaagctgccagggatgctatactgagaattgtgggtgaacttgagcagatggtttctgaggacgtcccgctggaccaccgcgttcacgcccgcatcattggtgcccgcggcaaagccattcgcaaaatcatggacgaattcaaggtggacattcgcttcccacagagcggagccccagaccccaactgcgtcactgtgacggggctcccagagaatgtggaggaagccatcgaccacatcctcaatctggaggaggaatacctagctgacgtggtggacagtgaggcgctgcaggtatacatgaaacccccagcacacgaagaggccaaggcaccttccagaggctttgtggtgcgggacgcaccctggaccgccagcagcagtgagaaggctcctgacatgagcagctctgaggaatttcccagctttggggctcaggtggctcccaagaccctcccttggggccccaaacgataatgatcaaaaagaacagaaccctctccagcctgctgacccaaacccaaccacacaatggtttgtctcaatctgacccagcggctggaccctccgtaaattgttgacgctcttcccccttcccgaggtcccgcagggagcctagcgcctggctgtgtgtgcggccgctcctccaggcctggccgtgcccgctcaggacctgctccactgtttaacactaaaccaaggtcatgagcattcgtgctaagataacagactccagctcctggtccacccggcatgtcagtcagcactctggccttcatcacgagagctccgcagccgtggctaggattccacttcctgtgtcatgacctcaggaaataaacgtccttgactttataaaagccaaacgtttgccctcttcctttcccacctccctcctgccagtttcccttggtccagacagtcctgtttgtggagtgcaatcagcctcctccagctgccagagcgcctcagcacaggtgtcagggtgcaaggaagacctggcaatggacagcaggaggcaggttcctggagctggggggtgacctgagaggcagagggtgacgggttctcaggcagtcctgattttacctgccgtggggtctgaaagcaccaagggtccctgcccctacctccactgccagaccctcagcctgaggtctggtgagtggagcctggaggcaaggtggtaggcaccatctgggtcccctgtggccgtcacagtgtctgctgtgattgagatgcgcacaggttgggggaggtagggccttacgcttgtcctcagtgggggcagtttgccttagatgacagctgggctcttcttcacaccacctgcagcccctccctgcccctgccctagctgctgtgtgttcagttgccttctttctacctcagccggcgtggagtggtctctgtgcagttagtgccaccccacacacccgtctcttgattgagatgtttctggtggttatgggtttcccgtggagctgggggtgggcgccgtgtacctaagctggaggctggcgctctccctcagcacaggtgggtcagtggccagcaggcccatctggagtgggagtgggcacttccaccccgcccacaggccatccggctgtgcaggccagcccctaggagcaggtcccgggtgactggcagttttcacggtctagggccgagacgatggcatggggcctagagcatgaggtagagcagaatgcagaccacgccgctggatgccgagagaccctgctctccgagggaggcatctgtgtcatgctgtgagggctgaggacggggccctagtctctggttttctggtcttaacatccttatctgtgtccgccacggaggtgactgagctgctagcgagttgtcctgtcccaggtacttgagttttggaaaagctgactcacgcccatccatctcacagcccttccctggggacagtcgcttccgccttgacacctcactctcagttgaataactcaagcttggtcatcttcagactcgaattcttgagtagacccagacggcttagcccaagtctagttgcagctgcctcggcaagtccccatttgctcaggcagccctgaatgggcctgtttacaggaatggtaaattgggattggaaggaatatagcttccagcttcataggctagggtgaccacggcttaggaaacagggaaagaaagcaaggcccttttcctgcctttcccgggatctgtctactccacctccacgggggaggccagtggggaagggctgtcacctcttccccatctgcatgagttctggaactctgtcctgttggctgcttgcttccagctccccccaatctccatcgcagcgggttcctcctgtcttttctacagtgtcataaaacatcctgcccctaccctctcccaaaggtcaattttaattctcaccaagttttgcacatctctgtatgtcgcttgatgtcttagacgcgagccctttcctaaactgttcagcgctctcttttcctttgggtggttgttgcaagggtgatgacatgactgtccccaggcctgtctccctgaagcgtctgtgctgtcaggacagccctgggcagagatgaggcaggggtgaggcgtgcgtgtgcttttcctccttgttggatgtcttccatatcatctgtttccatagctacaatccatcccttggccttaactttggaatttggagattatatgcaaacatgtgtaaaggctcatgaatatggatgacactggaattttataaattctaaaataaaacccgaaaccagatgtagcatgctgggactcattttgtca

SEQ ID NO: 262949 - DNA, 4489 bp, Artificial Sequence
  derived and/or modified sequence
gatcggggggcctctctgggattggctgcgcgcacgtcacgtggggccgacgggccctgcgcagaccatcgagtcgggcgtccctccccggggacgtggccttcctgtgcccgggctggggcccgccgccccgcgggggagggcggagctggcgcggcccctagctttctccttctggtgtggggcccgagcaaaagctggcaggctgacagaggcggcctcaggacggaccttctggctactgaccgttttgctgtggttttcccggattgtgtgtaggtgtgagatcaaccatgagttccgttgcagttttgacccaagagagttttgctgaacaccgaagtgggctggttccgcaacaaatcaaagttgccactctaaattcagaagaggagagcgaccctccaacctacaaggatgccttccctccacttcctgagaaagctgcttgcctggaaagtgcccaggaaccctctggagcctgggggaacaagatccgacccatcaaggcttctgtcatcactcaggtgttccatgtacccctggaggagagaaaatacaaggatatgaaccagtttggagaaggtgaacaagcaaaaatctgccttgagatcatgcagagaactggtgctcacttggagctgtctttggccaaagaccaaggcctctccatcatggtgtcaggaaagctggatgctgtcatgaaagctcggaaggacattgttgctagactgcagactcaggcctcagcaactgttgccattcccaaagaacaccatcgctttgttattggcaaaaatggagagaaactgcaagacttggagctaaaaactgcaaccaaaatccagatcccacgcccagatgaccccagcaatcagatcaagatcactggcaccaaagagggcatcgagaaagctcgccatgaagtcttactcatctctgccgagcaggacaaacgtgctgtggagaggctagaagtagaaaaggcattccaccccttcatcgctgggccgtataatagactggttggcgagatcatgcaggagacaggcacgcgcatcaacatccccccacccagcgtgaaccggacagagattgtcttcactggagagaaggaacagttggctcaggctgtggctcgcatcaagaagatttatgaggagaagaaaaagaagactacaaccattgcagtggaagtgaagaaatcccaacacaagtatgtcattgggcccaagggcaattcattgcaggagatccttgagagaactggagtttccgttgagatcccaccctcagacagcatctctgagactgtaatacttcgaggcgaacctgaaaagttaggtcaggcgttgactgaagtctatgccaaggccaatagcttcaccgtctcctctgtcgccgccccttcctggcttcaccgtttcatcattggcaagaaagggcagaacctggccaaaatcactcagcagatgccaaaggttcacatcgagttcacagagggcgaagacaagatcaccctggagggccctacagaggatgtcaatgtggcccaggaacagatagaaggcatggtcaaagatttgattaaccggatggactatgtggagatcaacatcgaccacaagttccacaggcacctcattgggaagagcggtgccaacataaacagaatcaaagaccagtacaaggtgtccgtgcgcatccctcctgacagtgagaagagcaatttgatccgcatcgagggggacccacagggcgtgcagcaggccaagcgagagctgctggagcttgcatctcgcatggaaaatgagcgtaccaaggatctaatcattgagcaaagatttcatcgcacaatcattgggcagaagggtgaacggatccgtgaaattcgtgacaaattcccagaggtcatcattaactttccagacccagcacaaaaaagtgacattgtccagctcagaggacctaagaatgaggtggaaaaatgcacaaaatacatgcagaagatggtggcagatctggtggaaaatagctattcaatttctgttccgatcttcaaacagtttcacaagaatatcattgggaaaggaggcgcaaacattaaaaagattcgtgaagaaagcaacaccaaaatcgaccttccagcagagaatagcaattcagagaccattatcatcacaggcaagcgagccaactgcgaagctgcccggagcaggattctgtctattcagaaagacctggccaacatagccgaggtagaggtctccatccctgccaagctgcacaactccctcattggcaccaagggccgtctgatccgctccatcatggaggagtgcggcggggtccacattcactttcccgtggaaggttcaggaagcgacaccgttgttatcaggggcccttcctcggatgtggagaaggccaagaagcagctcctgcatctggcggaggagaagcaaaccaagagtttcactgttgacatccgcgccaagccagaataccacaaattcctcatcggcaaggggggcggcaaaattcgcaaggtgcgcgacagcactggagcacgtgtcatcttccctgcggctgaggacaaggaccaggacctgatcaccatcattggaaaggaggacgccgtccgagaggcacagaaggagctggaggccttgatccaaaacctggataatgtggtggaagactccatgctggtggaccccaagcaccaccgccacttcgtcatccgcagaggccaggtcttgcgggagattgctgaagagtatggcggggtgatggtcagcttcccacgctctggcacacagagcgacaaagtcaccctcaagggcgccaaggactgtgtggaggcagccaagaaacgcattcaggagatcattgaggacctggaagctcaggtgacattagaatgtgctataccccagaaattccatcgatctgtcatgggccccaaaggttccagaatccagcagattactcgggatttcagtgttcaaattaaattcccagacagagaggagaacgcagttcacagtacagagccagttgtccaggagaatggggacgaagctggggaggggagagaggctaaagattgtgaccccggctctccaaggaggtgtgacatcatcatcatctctggccggaaagaaaagtgtgaggctgccaaggaagctctggaggcattggttcctgtcaccattgaagtagaggtgccctttgaccttcaccgttacgttattgggcagaaaggaagtgggatccgcaagatgatggatgagtttgaggtgaacatacatgtcccggcacctgagctgcagtctgacatcatcgccatcacgggcctcgctgcaaatttggaccgggccaaggctggactgctggagcgtgtgaaggagctacaggccgagcaggaggaccgggctttaaggagttttaagctgagtgtcactgtagaccccaaataccatcccaagattatcgggagaaagggggcagtaattacccaaatccggttggagcatgacgtgaacatccagtttcctgataaggacgatgggaaccagccccaggaccaaattaccatcacagggtacgaaaagaacacagaagctgccagggatgctatactgagaattgtgggtgaacttgagcagatggtttctgaggacgtcccgctggaccaccgcgttcacgcccgcatcattggtgcccgcggcaaagccattcgcaaaatcatggacgaattcaaggtggacattcgcttcccacagagcggagccccagaccccaactgcgtcactgtgacggggctcccagagaatgtggaggaagccatcgaccacatcctcaatctggaggaggaatacctagctgacgtggtggacagtgaggcgctgcaggtatacatgaaacccccagcacacgaagaggccaaggcaccttccagaggctttgtggtgcgggacgcaccctggaccgccagcagcagtgagaaggctcctgacatgagcagctctgaggaatttcccagctttggggctcaggtggctcccaagaccctcccttggggccccaaacgataatgatcaaaaagaacagaaccctctccagcctgctgacccaaacccaaccacacaatggtttgtctcaatctgacccagcggctggaccctccgtaaattgttgacgctcttcccccttcccgaggtcccgcagggagcctagcgcctggctgtgtgtgcggccgctcctccaggcctggccgtgcccgctcaggacctgctccactgtttaacactaaaccaaggtcatgagcattcgtgctaagataacagactccagctcctggtccacccggcatgtcagtcagcactctggccttcatcacgagagctccgcagccgtggctaggattccacttcctgtgtcatgacctcaggaaataaacgtccttgactttataaaagccaaa

SEQ ID NO: 262950 - DNA, 3807 bp, Artificial Sequence
  derived and/or modified sequence
atgagctctgtggccgtgctgacccaggagagctttgctgagcacaggagcggcctggtgccccagcagatcaaggtggccaccctgaacagcgaggaggagagtgacccccccacctacaaggatgccttcccccccctgcctgagaaggccgcctgcctggagagcgcccaggagcccagcggggcctggggcaacaagatccggcccatcaaggccagcgtcatcacccaggtgttccacgtgcccctggaggagaggaagtacaaggacatgaaccagtttggagagggggagcaggccaagatctgcctggagatcatgcagaggactggagcccacctggagctgagcctggccaaggaccagggcctgagcatcatggtgtctgggaagctggatgctgtgatgaaggccaggaaggacatcgtggcccggctgcagacccaggccagcgccaccgtggccatccccaaggagcaccaccgcttcgtcatcggcaagaatggagagaagctgcaggacctggagctgaagacagccaccaagatccagatccccaggccagatgaccccagcaaccagatcaagatcaccggcaccaaggagggcatcgagaaggcccggcatgaggtgctgctgatctctgctgagcaggacaagagagctgtggagcggctggaggtggagaaggccttccaccccttcatcgccggcccctacaaccggctggtgggggagatcatgcaggagaccggcacccgcatcaacatccccccacccagcgtgaacagaacagagatcgtgttcaccggggagaaggagcagctggcccaggccgtggcccgcatcaagaagatctatgaggagaagaagaagaagaccaccaccatcgctgtggaggtgaagaagagccagcacaagtatgtgattggccccaagggcaacagcctgcaggagatcctggagaggactggagtgtctgtggagatcccccccagcgacagcatcagcgagaccgtcatcctgcggggggagcctgagaagctgggccaggccctgacagaggtgtatgccaaggccaacagcttcaccgtgtcctctgtggccgcccccagctggctgcaccgcttcatcatcggcaagaagggccagaacctggccaagatcacccagcagatgcccaaggtgcacatcgagttcacagaaggagaggacaagatcaccctggagggccccacagaagatgtgaatgtggcccaggagcagatcgagggcatggtgaaggacctgatcaacaggatggactatgtggagatcaacatcgaccacaagttccaccgccacctgattggcaagagcggggccaacatcaaccgcatcaaggaccagtacaaggtgtctgtgcgcatccccccagattctgagaagagcaacctgatcagaattgaaggagacccccagggcgtgcagcaggccaagcgggagctgctggagctggccagcaggatggagaatgaaagaaccaaggacctgatcatcgagcagcgcttccacaggaccatcatcggccagaagggggagcgcatccgggagatccgggacaagtttcctgaggtgatcatcaacttcccagaccctgcccagaagagtgacatcgtgcagctgcggggccccaagaatgaggtggagaagtgcaccaagtacatgcagaagatggtggccgacctggtggagaacagctacagcatctctgtgcccatcttcaagcagttccacaagaacatcattggaaaaggaggagccaacatcaagaagatccgggaggagagcaacaccaagattgacctgcctgctgagaacagcaacagcgagaccatcatcatcaccgggaagagggccaactgtgaggccgcccggagccgcatcctgagcatccagaaggacctggccaacattgctgaggtggaggtgtccatcccagccaagctgcacaacagcctgattggcaccaagggccgcctcatccgcagcatcatggaggagtgtggcggcgtgcacatccacttccctgtggagggcagcggcagtgacacagtggtgatccggggccccagcagtgatgtggagaaggccaagaagcagctgctgcacctggccgaggagaagcagaccaagagcttcaccgtggacatccgggccaagccagagtaccacaagttcctgattggaaaaggaggcggcaagatcaggaaggtgcgggacagcactggagcccgggtcatcttccctgctgctgaggacaaggaccaggacctgatcaccatcatcggcaaggaggatgctgtgcgggaggcccagaaggagctggaggccctgatccagaacctggacaacgtggtggaggacagcatgctggtggaccccaagcaccaccgccactttgtgatccggcggggccaggtgctgcgggagattgctgaggagtatggaggagtgatggtgtccttccccaggagcggcacccagagcgacaaggtgaccctgaagggggccaaggactgtgtggaggccgccaagaagaggatccaggagatcatcgaggacctggaggcccaggtgaccctggagtgtgccatcccccagaagttccacaggtctgtgatgggccccaagggcagccgcatccagcagatcacccgggacttctctgtgcagatcaagttcccagaccgggaggagaatgctgtgcacagcacagagcctgtggtgcaggagaatggagatgaagctggggagggccgggaggccaaggactgtgaccccggcagcccccggcgctgtgacatcatcatcatcagcggcaggaaggagaagtgtgaggccgccaaggaggccctggaggccctggtgcctgtgaccatcgaggtggaggtgccctttgacctgcaccgctacgtgattggccagaagggcagcggcatcaggaagatgatggatgaatttgaggtgaacatccacgtgcctgcccctgagctgcagagcgacatcatcgccatcaccggcctggccgccaacctggaccgggccaaggccggcctgctggagcgggtgaaggagctgcaggccgagcaggaggaccgggccctgcggagcttcaagctgtctgtgacagtggaccccaagtaccaccccaagatcatcggcaggaaaggagctgtgatcacccagatccggctggagcatgatgtgaacatccagttcccagacaaggatgatggcaaccagccccaggaccagatcaccatcaccggctatgagaagaacacagaggccgccagagatgccatcctgcgcatcgtgggggagctggagcagatggtgtctgaagatgtgcccctggaccaccgggtgcacgcccgcatcattggagcccggggcaaggccatcaggaagatcatggatgagttcaaggtggacatccgcttcccccagagcggggccccagaccccaactgtgtgacagtgacaggcctgcctgaaaatgtggaggaggccatcgaccacatcctgaacctggaggaggagtacctggctgatgtggtggacagcgaggccctgcaggtgtacatgaagcccccagcccacgaggaggccaaggcccccagccggggctttgtggtgagagatgccccctggacagccagcagcagcgagaaggccccagacatgagcagcagcgaggagttccccagctttggagcccaggtggcccccaagaccctgccctggggccccaagaggtag

SEQ ID NO: 262951 - DNA, 249 bp, Artificial Sequence
  derived and/or modified sequence
atgagctctgtggccgtgctgacccaggagagctttgctgagcacaggagcggcctggtgccccagcagatcaaggtggccaccctgaacagcgaggaggagagtgacccccccacctacaaggatgccttcccccccctgcctgagaaggccgcctgcctggagagcgcccaggagcccagcggggcctggggcaacaagatccggcccatcaaggccagcgtcatcacccaggtgttccacgtgtag

SEQ ID NO: 262952 - DNA, 45 bp, Artificial Sequence
  derived and/or modified sequence
atgagctctgtggccgtgctgacccaggagagctttgctgagtag

SEQ ID NO: 262953 - DNA, 210 bp, Artificial Sequence
  derived and/or modified sequence
atgagctctgtggccgtgctgacccaggagagctttgctgagcacaggagcggcctggtgccccagcagatcaaggtggccaccctgaacagcgaggaggagagtgacccccccacctacaaggatgccttcccccccctgcctgagaaggccgcctgcctggagagcgcccaggagcccagcggggcctggggcaacaagatcagatag

SEQ ID NO: 262954 - DNA, 246 bp, Artificial Sequence
  derived and/or modified sequence
atgagctctgtggccgtgctgacccaggagagctttgctgagcacaggagcggcctggtgccccagcagatcaaggtggccaccctgaacagcgaggaggagagtgacccccccacctacaaggatgccttcccccccctgcctgagaaggccgcctgcctggagagcgcccaggagcccagcggggcctggggcaacaagatccggcccatcaaggccagcgtcatcacccaggtgttccactag

SEQ ID NO: 262955 - DNA, 240 bp, Artificial Sequence
  derived and/or modified sequence
atgagctctgtggccgtgctgacccaggagagctttgctgagcacaggagcggcctggtgccccagcagatcaaggtggccaccctgaacagcgaggaggagagtgacccccccacctacaaggatgccttcccccccctgcctgagaaggccgcctgcctggagagcgcccaggagcccagcggggcctggggcaacaagatccggcccatcaaggccagcgtcatcacccaggtgtag

SEQ ID NO: 262956 - DNA, 291 bp, Artificial Sequence
  derived and/or modified sequence
atgagctctgtggccgtgctgacccaggagagctttgctgagcacaggagcggcctggtgccccagcagatcaaggtggccaccctgaacagcgaggaggagagtgacccccccacctacaaggatgccttcccccccctgcctgagaaggccgcctgcctggagagcgcccaggagcccagcggggcctggggcaacaagatccggcccatcaaggccagcgtcatcacccaggtgttccacgtgcccctggaggagaggaagtacaaggacatgaaccagtttggatag

SEQ ID NO: 262957 - DNA, 60 bp, Artificial Sequence
  derived and/or modified sequence
atgagctctgtggccgtgctgacccaggagagctttgctgagcacaggagcggcctgtag

SEQ ID NO: 262958 - DNA, 54 bp, Artificial Sequence
  derived and/or modified sequence
atgagctctgtggccgtgctgacccaggagagctttgctgagcacaggagctag

SEQ ID NO: 262959 - DNA, 144 bp, Artificial Sequence
  derived and/or modified sequence
atgagctctgtggccgtgctgacccaggagagctttgctgagcacaggagcggcctggtgccccagcagatcaaggtggccaccctgaacagcgaggaggagagtgacccccccacctacaaggatgccttcccccccctgtag

SEQ ID NO: 262960 - DNA, 3807 bp, Artificial Sequence
  derived and/or modified sequence
atgagcagcgtggccgtgctgacccaggagagcttcgccgagcaccggagtggtctggtgccccaacagataaaggtggccactctgaattctgaggaagagagcgacccccccacatacaaggatgccttccccccactgcctgagaaggcagcctgcttagagtcagcacaggaaccctctggggcttggggaaataaaatccgcccaatcaaggccagcgtgataacacaggtatttcacgtccctctcgaggaaaggaagtacaaagatatgaaccaatttggcgaaggcgaacaggccaaaatttgtctggagattatgcagagaactggcgcccacctggagctctctttggccaaggaccagggcttgagtatcatggtctccgggaaactggacgccgtcatgaaggcccgcaaggatatcgttgctaggctgcagactcaagcctccgccactgtggctatcccaaaggagcatcataggttcgtgatcggaaaaaatggcgagaaactgcaagacttggaactgaaaaccgccacgaaaattcagatcccccggcccgacgaccctagtaaccagatcaagatcactggcaccaaagaaggcatagaaaaagctcggcatgaagtgttactgatctctgccgaacaggacaagcgggccgtggagcgcttggaggtggagaaggcttttcacccgttcatagccggtccttataatagactcgtcggggaaatcatgcaggagaccgggacaagaatcaacattcctcctccctccgtgaaccgcaccgagattgtctttacaggtgagaaggaacaattagcacaagcagtcgccagaataaagaaaatttatgaagaaaagaagaagaagacaaccaccattgcagtagaggtgaaaaagtcacaacacaaatatgtcatcggaccgaaggggaatagcctccaagagattcttgagcgaacgggggtcagcgtcgaaatcccaccgtccgacagtatctccgagacagtgatcctgaggggggagccagagaagcttgggcaggccctgaccgaggtctacgcaaaggccaacagcttcactgtgtcatcagtggccgcacctagttggcttcacaggttcatcatcggcaagaagggtcagaacctggccaaaatcacccagcaaatgcctaaggtgcatatcgaattcacagagggggaggacaaaattactctggaaggtcctacagaggatgtgaacgtggcccaggagcagattgaggggatggtgaaagatctgatcaacaggatggactacgtggagattaacattgaccacaaatttcatcgccatctgataggtaaatctggtgccaacataaaccgcattaaagaccaatacaaggtttccgttaggattcctcctgatagcgaaaagagcaacctgatcaggattgagggagatcctcagggagtccagcaggcaaagcgagagctgttggagctggcctcaagaatggagaatgagcgtactaaggatctcattattgaacagagatttcacagaactattattggccagaagggggagagaattcgtgaaattcgggataaatttcctgaggttataatcaacttccccgatcctgcacagaagtcagatatcgttcaacttcgtgggcctaaaaatgaagtggaaaagtgtactaagtacatgcagaagatggtcgccgacctggtggaaaatagttatagcattagcgtgcccatttttaagcagtttcacaagaacattatcgggaaggggggggcgaatattaaaaaaatccgtgaagaaagcaatacgaaaattgacctgcccgccgaaaacagcaactctgaaaccataatcataacaggaaaacgggctaattgcgaggcagccaggagcaggattctttcaatccagaaagatctggcgaacattgcagaggtcgaggtgtcaatccccgccaaacttcataatagcctaattggaacgaagggtcgattgatccggtccattatggaagagtgtgggggtgtccacatacattttcctgtcgagggatccggaagtgatactgtggttattagggggcctagcagtgatgtcgagaaggctaagaagcagctacttcatttggctgaggaaaaacagaccaaatcttttaccgtcgacatccgggccaagccagaataccacaagttcctgatcggcaaaggcgggggcaagatcaggaaagtccgagacagtacgggcgcacgagtcatcttcccggccgcagaagataaagaccaggatcttatcaccataatcggcaaggaggatgctgtcagagaggcacaaaaagaattagaagccctgatccagaatctggataatgtggtcgaggacagtatgctcgttgacccaaaacatcacagacacttcgtcattcgtaggggccaggtcctgcgtgaaattgccgaagagtatggcggtgttatggttagcttccctaggagtggcacacagagtgataaagtcactttaaagggtgcaaaggattgtgtagaggccgctaagaaaaggattcaagagatcatagaagatctcgaagcacaagtgacgcttgaatgcgccattccccagaaatttcaccgttctgtaatggggcctaaaggatcaagaatccagcagataactagggactttagcgtgcagatcaagtttcctgacagggaggagaacgctgtacattctactgaaccagtcgtccaggaaaacggcgacgaagccggagaaggaagggaggccaaggattgcgacccgggttcccctcggcgctgcgacattatcattatatcaggccgcaaagagaaatgtgaggccgctaaggaggcgctggaggcactagtgcccgttaccattgaagtcgaagtccctttcgacttgcaccgctacgtgattggtcagaagggatccgggatacgcaagatgatggacgaatttgaggtgaacatacacgtgccggccccagaactacaaagcgatataatcgcgatcactggactggctgctaatctggaccgggcaaaggccggtctcttagagcgcgtgaaggagctgcaggcagaacaggaagaccgcgcactgcggtctttcaagctgagtgtgactgtagatcccaagtatcatcccaagatcattggacggaagggggctgtgatcacccaaatacggctcgaacacgacgttaacatccagttcccagacaaagacgatgggaaccaaccccaggatcaaattaccataacaggctacgaaaagaataccgaggctgcgagggatgcaattctccggatcgtgggggagctggaacagatggtgtccgaggacgtccccttggaccacagagtccacgcccgcattatcggagcgcggggtaaggccataagaaagatcatggacgaattcaaggtagacattcggtttccacagagcggtgccccggatcctaattgcgtcaccgtgacgggcctgccagaaaacgttgaagaagccatagaccacatcctgaacctcgaggaggaatacctcgcagatgtggtggattcggaggctctacaggtctacatgaaaccacctgcccacgaagaggcgaaagccccctcccgggggttcgtggttcgtgatgctccttggacagccagttctagcgaaaaagctccagacatgagctcctccgaggagtttccttcgttcggcgcccaagtggcaccaaaaaccctgccgtggggcccgaagcggtag

SEQ ID NO: 262961 - DNA, 3807 bp, Artificial Sequence
  derived and/or modified sequence
atgagcagcgtggccgtgctgacccaggagagcttcgccgagcaccgctccgggttggtgcctcagcagatcaaagtggctaccttgaattcagaagaggagagcgatcccccaacctataaggacgctttcccacctctgccagaaaaggcagcctgcctcgagtcagctcaggaaccatcaggcgcttggggtaataagattcgccctatcaaggcctctgtgataacacaagtgtttcatgtccccctggaagagcgcaaatataaggacatgaatcaattcggtgaaggagaacaagcgaaaatttgcttagagatcatgcagcggaccggagcccaccttgaactgtctctggctaaggaccaggggctgtctatcatggtgtcgggcaagctggatgctgtcatgaaggcccgcaaggatattgtggccaggctgcagacccaggcttctgctactgttgcaatcccaaaggagcatcaccgtttcgtgatcggtaagaatggcgagaaactccaagacctggagctcaagaccgccactaaaatccagatccccaggcctgatgatcccagcaatcagatcaagattactggtacaaaggaaggcatcgagaaggcgagacacgaagtcctcttaatctcggccgagcaggacaaacgcgccgtcgaacgattggaggtggaaaaggcgtttcacccctttatcgccggaccgtataaccgcctcgtgggagaaataatgcaggaaacaggcactcggatcaatattcctccaccatccgttaaccgaacagagattgtgtttaccggagaaaaagaacaactagcacaagccgtcgcgcggataaagaaaatttacgaagaaaaaaagaagaaaacgacaaccatcgccgtcgaagtgaagaaatcacaacataagtacgtaatcgggcccaaaggcaatagtctacaggaaatcttggagagaaccggtgtatccgtagaaattcctcctagcgactctatcagtgaaaccgtgattcttagaggggagccagagaagctggggcaggccctgacagaggtgtatgctaaagccaactcttttacagtcagttctgtggctgcccctagctggttgcacagattcatcatcggaaaaaagggacagaatctggccaaaatcacacagcagatgcccaaggtccacattgagtttacagagggggaggacaagattacgctggaaggccctacagaagatgtcaatgtcgcccaagaacaaattgagggcatggtaaaggatctgatcaataggatggattacgtcgaaattaatatcgatcataaatttcaccggcacttgattggcaaatctggagccaacatcaatcggattaaggatcagtataaagtaagcgtgcgcatccctccagattctgaaaagagtaacctgattcggatagaaggcgacccgcagggggtacagcaagccaagagggagctgctggagctggcttcacgcatggaaaatgagagaacaaaagaccttattattgagcagagattccataggactattattggccagaaaggcgagaggatccgcgagatacgcgataagttccccgaggtgatcatcaatttcccagatcctgcccagaagagcgatattgttcagctccgcgggccaaagaacgaagtggagaaatgcactaagtacatgcaaaagatggtggctgaccttgtggagaatagctatagcatcagtgtccctatcttcaaacagtttcataaaaacataattggtaaaggcggcgctaatattaagaagattcgggaggagagcaacaccaagattgatctgcccgctgaaaactctaactctgaaactattatcataactggcaagcgtgcaaactgtgaggccgcaagatctcgtatcctgtctattcaaaaagacttggctaatatcgcggaagtggaagtgagcatcccagccaagcttcacaacagcctcatcggaaccaagggcagactcatccggagcatcatggaggaatgcggaggggttcatattcatttcccagtggaaggtagtggctctgatacagtcgtgattagagggccatcctccgatgttgagaaggcgaagaaacaattgctgcatctggccgaagagaaacagactaaatctttcacggtggacattcgcgccaagcctgaatatcacaaatttctgatcgggaaaggtggggggaaaattcgcaaggtgagggactctactggtgccagagtgatctttcccgccgccgaagataaagaccaggatcttattacgattatcgggaaggaggatgccgtgcgggaagcgcagaaagaattggaggccctgatccagaatctggataatgttgtagaagatagcatgctcgtggatcctaaacaccatagacactttgtaatccgcagggggcaggttttaagagaaattgcagaagaatacggcggagtcatggtgtcctttccacgtagtggaacacaatccgataaggtgaccctcaagggggcaaaggactgcgtagaggccgctaagaaaaggatccaggagatcatcgaggatttggaggctcaggtgactctggaatgcgctattccccagaagttccatagatctgtcatgggtccaaagggatcgcgaatccaacagatcacccgcgatttttcggtacagatcaaatttcccgacagagaagagaatgccgtgcattcaaccgagcccgtagtgcaagagaatggggacgaagccggcgagggccgtgaagcaaaggactgtgatcctggatctccacgcagatgcgatattattatcatctctgggcgcaaggagaaatgtgaggccgctaaggaagcgctggaagctctcgttccagtcaccatcgaggtagaggtgcccttcgatcttcatcggtatgtgattggccagaagggttctggtatcaggaaaatgatggacgaatttgaagtaaatatccatgtgcctgcccctgaactgcaatccgatatcatcgccattacagggctggcggccaacctggacagagccaaggccggactgttggagagagtaaaggagttgcaggccgaacaagaggatagagccctaaggtcattcaagctctctgtgaccgtggacccaaaatatcatcccaaaattatcggcaggaagggagccgtgataactcagattaggttggagcatgacgtcaacatacaattcccggacaaggacgacggcaatcagcctcaggatcagataacgattacaggatatgaaaagaacacagaagccgcacgcgatgccatcctcaggatagtcggcgagttggaacagatggtctcagaggatgtcccgctcgaccatcgtgttcacgccagaattatcggtgcccgaggcaaagcaatccgcaagataatggacgaatttaaagtggatataagatttcctcagtccggcgctcctgaccctaactgcgtcacggttaccgggctgcctgaaaacgtggaagaagcgatcgaccacattctgaatttagaggaggaatatctggctgacgtggttgattctgaggccctgcaggtatacatgaagcccccagcccatgaagaggcaaaagccccatcaagaggatttgttgtgcgcgatgccccttggacagcatccagctctgagaaggcacccgatatgagcagcagcgaagagtttccctcgttcggcgcccaggtggctccaaaaaccctcccatggggccctaaaaggtag

SEQ ID NO: 262962 - DNA, 3807 bp, Artificial Sequence
  derived and/or modified sequence
atgagcagcgtggccgtgctgacccaggagagcttcgccgagcaccgaagcggactggttccccagcagatcaaggtagccacattgaactccgaggaggaaagtgacccccctacatataaagatgccttccccccattacccgaaaaggctgcctgtctggagtccgctcaggagccgtcaggcgcctggggtaataagatcagacccatcaaagccagtgtcatcacccaagtcttccacgtgccgcttgaggaacgcaagtacaaagatatgaatcagtttggcgagggcgaacaggccaaaatctgcttggagattatgcagaggactggtgcccacctggaactgtctcttgctaaagaccaaggcttatcaattatggtgagcgggaagctggacgcggtgatgaaagcacggaaggatatcgtggcacgactgcagacccaagctagcgctactgtcgcgatcccaaaggagcatcataggttcgtgatagggaagaacggagagaagctgcaggatttagagttaaagaccgcaaccaaaattcagattccccgacctgacgatcccagcaaccagataaaaataacaggcactaaagagggcatcgagaaggcgcgccatgaggtcttgttaattagtgccgagcaggataaaagggctgtggagagactggaggtcgagaaggctttccatcccttcattgcaggtccttacaaccgcctggttggagaaattatgcaggagactggtacccgaataaatatcccacctccctctgtcaataggacagagatagtttttactggagagaaagaacagctggcccaagccgtggctcgaatcaaaaaaatctatgaagaaaagaagaaaaagactactactattgctgtggaagtgaagaagtcccagcacaaatacgtaatcgggccaaagggcaacagtctgcaggagatcctggagagaaccggtgtgtccgtggaaatccccccttccgacagcatcagtgagaccgtgatcctgaggggcgagccagaaaagctgggccaggcccttactgaggtctacgcaaaggcaaactccttcactgtgagtagcgtggctgccccctcctggttgcacagattcatcataggcaagaagggacagaatctggcgaaaataacgcagcagatgcctaaagtccacatagaattcaccgagggtgaggataagattactcttgaaggccctacagaagatgttaacgtggcccaggagcagattgagggcatggtgaaggaccttattaaccgaatggactatgtggagatcaacattgatcacaagtttcaccgtcatttgattgggaagagcggagctaacattaatcgcataaaggatcagtacaaggtgtcagtgcgcataccacccgactctgagaagtcaaatttaatcaggatagagggcgatcctcagggcgtgcagcaagctaagagagagctccttgagctcgctagcaggatggagaatgagagaacaaaagacctcatcatcgagcaaagattccatcgtacaatcattggccagaaaggggagaggataagagagattcgggacaagttccccgaagtcattattaattttcctgacccagctcagaaatccgacattgtccagctgcggggccctaagaacgaggtggaaaagtgcactaaatatatgcagaagatggttgccgacctggttgagaacagctattctataagcgtgccaatcttcaagcaatttcacaaaaacattatcggaaaggggggtgccaatataaagaaaatcagagaagaaagcaacactaagatagacctaccagcagaaaacagcaacagtgaaactattatcattaccggtaagagagcgaactgtgaggctgctaggagtcggattctaagtatccaaaaggaccttgccaatatcgccgaggtggaggtgagcatacccgccaagcttcacaacagtctgatcgggactaaaggccgactgattcggagtatcatggaggaatgcggcggtgtgcacattcattttcccgtggagggaagcggctccgataccgtagtcatcaggggcccaagctcagacgtcgaaaaggctaagaagcaactcctgcatctcgccgaagagaagcagaccaaaagcttcaccgtggatataagagcgaaacccgagtaccacaaatttctgataggaaaaggtgggggcaagatcagaaaagtgagagactccactggggcaagagtgatttttccagccgctgaggataaggatcaggacctgataaccatcattgggaaggaagatgccgtgagagaggcacagaaggagctggaggcgctgatccagaatctggacaacgtcgtagaggactccatgttagttgatcctaagcaccacagacacttcgtgattaggcgtgggcaggtactcagagaaattgctgaggagtacggcggcgtcatggtatcctttccaagatccggtactcagagtgacaaggttaccctgaaaggagccaaagattgcgtagaggccgcaaaaaagcggatccaagagatcatagaggacctggaggcccaagttaccctggagtgcgctattccacagaaatttcaccggtccgtcatgggacccaaaggctctaggatccagcagattactcgcgacttcagcgtgcaaatcaaatttccggatcgagaggagaatgccgttcattcaaccgagcccgtggtgcaagaaaatggcgacgaagccggtgagggacgcgaagccaaggattgcgacccaggctccccccggcgctgtgatatcattatcatcagtggccggaaagaaaaatgcgaggctgccaaagaagccctcgaagcactggtacccgtcacgatcgaggtcgaggtgccatttgatctccacaggtatgtcattggccagaaaggaagtggcattcgcaaaatgatggacgagtttgaggtcaatattcacgtgcctgccccagagctgcagagtgatatcatcgctatcactgggctggctgccaatctggacagggctaaggcgggtttactcgagcgtgtgaaagaattacaggccgagcaggaggatagggctctcaggtccttcaaactcagcgtaacagtggacccaaagtaccatcccaaaatcattggtagaaagggcgcagtgattactcagatccgccttgaacacgacgtgaatatccaattcccagacaaggatgatgggaaccaacctcaagaccagatcactataaccggttacgagaagaataccgaggcggcaagggatgctatccttcggatcgttggggaactggagcagatggttagcgaagacgtccccctcgaccatagggtccatgcacgtataattggtgctagaggaaaagcaatccgcaagataatggatgagtttaaagtggacatccgctttccccagagcggggcccccgatccgaactgcgtgaccgtcaccggactgcccgagaatgtggaagaggctatcgatcatattctcaaccttgaggaagagtacctcgctgacgtggtggacagcgaggccctacaggtgtacatgaagccacctgcacacgaagaagccaaggcgccctccagaggcttcgtcgtgagggacgccccttggaccgcctcgtcctctgagaaggcacctgatatgtcgtcctccgaagagttcccttcttttggggctcaggtggcaccaaagactttgccttggggccctaagagatag

SEQ ID NO: 262963 - DNA, 249 bp, Artificial Sequence
  derived and/or modified sequence
atgagcagcgtggccgtgctgacccaggagagcttcgccgagcaccggtcaggcctagtgccccagcaaataaaagtggccacactgaacagcgaagaagagtccgatccgcctacctacaaggacgcgttcccaccattaccagagaaggccgcatgtttggaatccgcccaggagcctagtggagcttgggggaataagatccgaccaatcaaagcttccgtgatcacccaggtttttcacgtgtag

SEQ ID NO: 262964 - DNA, 210 bp, Artificial Sequence
  derived and/or modified sequence
atgagcagcgtggccgtgctgacccaggagagcttcgccgagcaccgcagcggcctagtcccccagcaaatcaaggtcgctacactcaattctgaagaggagtctgacccacctacctataaggacgcattcccccctttgccagaaaaagccgcttgtctggagtccgcccaggaacctagtggggcatggggtaacaagattcgttag

SEQ ID NO: 262965 - DNA, 246 bp, Artificial Sequence
  derived and/or modified sequence
atgagcagcgtggccgtgctgacccaggagagcttcgccgagcaccgcagtgggcttgtcccgcaacaaatcaaggtggccactctgaattcagaggaggagagcgacccgcccacatacaaggatgcgttccctccactgcctgagaaggccgcctgcctcgagtccgcccaggagccaagtggggcatgggggaacaaaatacggcccattaaggcgagcgtcattacccaggtctttcactag

SEQ ID NO: 262966 - DNA, 240 bp, Artificial Sequence
  derived and/or modified sequence
atgagcagcgtggccgtgctgacccaggagagcttcgccgagcacagatctggactcgtgcctcagcagatcaaggtggcgaccctaaactcagaggaggaatcagatcccccgacctacaaagacgccttcccgcctctgcctgagaaggcagcctgtctggagtcagctcaggagccctctggcgcatgggggaataagattcgaccgatcaaggcctctgtgatcacgcaggtctag

SEQ ID NO: 262967 - DNA, 291 bp, Artificial Sequence
  derived and/or modified sequence
atgagcagcgtggccgtgctgacccaggagagcttcgccgagcaccgatctggcctggttccccaacagatcaaagttgccactctgaacagcgaagaggagtcggatccccctacctataaggacgcctttccccccctccccgagaaagcggcctgtctggaaagcgcccaggaacctagcggggcatggggtaacaagatccgaccaattaaggcatccgtcatcactcaggtcttccacgttcctcttgaagagcgaaaatacaaggatatgaatcaatttgggtag

SEQ ID NO: 262968 - DNA, 60 bp, Artificial Sequence
  derived and/or modified sequence
atgagcagcgtggccgtgctgacccaggagagcttcgccgagcacagaagtggcctatag

SEQ ID NO: 262969 - DNA, 54 bp, Artificial Sequence
  derived and/or modified sequence
atgagcagcgtggccgtgctgacccaggagagcttcgccgagcaccgtagctag

SEQ ID NO: 262970 - DNA, 144 bp, Artificial Sequence
  derived and/or modified sequence
atgagcagcgtggccgtgctgacccaggagagcttcgccgagcacaggagcgggctagtgcctcaacagatcaaggtggctacattaaactctgaagaggaatccgatcctccaacgtataaagatgcttttcctcctctgtag

SEQ ID NO: 262971 - DNA, 3807 bp, Artificial Sequence
  derived and/or modified sequence
atgtcatccgtggccgtccttacgcaagagtccttcgctgaacaccgtagcggcctggttccacagcagattaaggttgccaccttgaattctgaagaagagtctgacccaccgacttataaagatgcatttccaccgcttcccgaaaaggccgcttgcctcgagagcgcgcaggaaccaagtggcgcatggggcaacaagatacgccctataaaggcatctgtgatcacccaggtgtttcatgtcccgcttgaggagcggaagtataaggacatgaaccaattcggcgaaggggagcaggctaaaatatgtctcgagattatgcagcggaccggagcacacttggagctttcactcgctaaagatcagggactgagcatcatggtcagcgggaaacttgacgctgtcatgaaagcgcgaaaagacattgtggctcgtctgcagacccaggcctcggcaacggtggctatcccgaaagaacatcatcggttcgttatcggtaaaaacggggaaaagcttcaagacctggagctgaagacggccaccaaaatccagatccccaggccggatgacccttcaaaccagattaaaattactgggaccaaagaaggcattgaaaaagctcgacacgaagtgctcttgatttcagcagagcaggacaagagagctgtagagcgcctggaagtcgagaaagcgttccacccgtttatcgctggaccttataaccggctggtcggagagattatgcaggagacgggaacacggatcaacataccccctcctagcgttaatcgaacagagattgtcttcaccggcgaaaaagagcagcttgctcaggcagtggcacgcataaagaagatatacgaagagaagaagaagaagacaactaccattgctgtggaagttaagaaaagccaacataaatacgttatagggccaaaaggcaactctctccaggagattcttgagagaaccggggtaagtgtggagatccctcctagcgatagtatatctgagactgtcatactccgcggagagcctgagaaattaggccaggcacttaccgaagtgtacgctaaggcaaatagttttacagtgagtagcgtggccgcaccatcatggcttcataggtttatcattggaaaaaaggggcagaacctagccaagatcacccagcagatgcctaaggtgcacatcgaatttacagaaggcgaagataagattacgctagaagggcctactgaagatgtcaatgtggctcaggaacagatcgagggcatggtgaaggacttgatcaaccggatggactatgtcgaaatcaacattgaccataaatttcataggcacctgattggaaaatcaggcgcaaatataaaccgaattaaggatcagtacaaagttagtgtacgaatcccccctgatagcgagaagagcaatttgatcagaatcgaaggagatccacagggcgtccagcaggctaaaagagagcttttggagctggcctcacgcatggaaaatgagcggacaaaagacttgataatcgagcagcggttccacagaaccatcattggccagaagggagagcggatacgtgagattcgagacaaatttcctgaagtgattattaacttccctgacccggctcaaaagtccgacattgtgcagttgagaggcccaaagaacgaagtggagaaatgcacaaagtatatgcagaaaatggtggctgacctagtagagaactcatattcaatatccgtcccaatttttaagcaattccacaagaacattatcggaaaaggcggtgccaacatcaaaaagattagggaagaatcaaatacaaaaatcgacctgcctgccgaaaactccaacagtgagactataatcatcaccgggaaaagggccaattgcgaggctgccagaagcaggatcctgagcattcagaaagacctagccaatatcgccgaggtcgaggtctccataccagcaaaactccacaacagtctgatagggaccaagggtcgcttgattcgctcaattatggaagagtgcggaggagtacatatacatttccccgtcgaaggatccggctctgataccgtggtcataaggggcccttcgagtgacgtggaaaaggccaaaaaacagctcctacacttagctgaagaaaagcagaccaagtctttcacggtagatattagagccaagcccgaataccataagtttctgataggcaaaggcggaggcaagatcagaaaagttagggacagcaccggagcaagagtcattttcccagccgcagaagacaaagaccaggacctgatcactatcatcggaaaggaggatgctgtccgcgaagcacagaaggaattggaagccctgatacagaatcttgataacgtcgtggaagactctatgctggtggacccaaaacaccatcgacacttcgtgataagaagaggccaggtgctccgcgagatcgcagaggagtatgggggagttatggtgtcattccctcgaagtggtacccagagcgacaaagtaaccctcaagggcgctaaagactgtgtcgaggccgcaaagaagcgtatccaagagatcatcgaggatttagaggcccaggttacactagaatgcgccatcccccaaaagttccatcgtagcgtgatgggcccaaaaggaagccggatccaacagatcactcgcgattttagcgtgcagatcaaatttcctgatcgagaggaaaatgcagtgcacagtaccgagccagtcgtacaggaaaatggggacgaggccggagagggccgtgaagctaaagactgcgaccccggaagtccacggaggtgtgatattatcatcatcagtggacggaaagaaaagtgtgaggcagctaaagaagccttagaagctctggttcccgtcaccatcgaggttgaagtcccatttgacctccaccggtacgtcattgggcagaagggctctggcatcaggaaaatgatggacgaatttgaggtgaatatccatgttccggctcctgaattacaaagcgacataatagccatcactggcctggccgctaatctcgatcgcgcaaaggccggtctgctggaacgtgtgaaggagctgcaggcagaacaggaagatcgggcactccggagctttaagttgagcgtaaccgtggatcctaagtaccatcccaaaatcataggaaggaaaggcgcagttataacccaaatcaggttagaacacgatgtgaacatacagttccccgacaaggatgacggtaatcaaccccaagaccagattaccatcactggttacgaaaaaaatacagaagccgctagggatgccattctgaggattgtgggggagctggagcagatggtgtctgaggacgttcctctcgaccatcgggtgcacgcacgaatcattggcgctcggggaaaggcgattaggaagatcatggacgagttcaaagtagacatccgctttccccaatcaggcgcacctgatcccaactgtgtgacggtgaccggcctgcccgaaaatgttgaggaggcgatcgatcatatcctgaacctcgaggaggagtaccttgccgatgtggtggacagtgaagccctccaggtttacatgaagccaccagctcatgaagaagcgaaagcaccttcaagggggtttgttgtgcgtgacgccccatggaccgcttcgtcgagcgagaaggcccctgatatgtcatcttccgaagaatttccatctttcggggctcaggtagctccaaagactttaccctggggccctaagaggtag

SEQ ID NO: 262972 - DNA, 3807 bp, Artificial Sequence
  derived and/or modified sequence
atgagcagtgtcgccgtcctcacacaggaaagctttgctgagcatcggtcgggcctcgtgccgcagcagattaaagtggcaaccttgaattcagaggaagagtcagatccccctacgtacaaagacgcattccctccactccccgagaaagctgcttgcctggagtctgcacaagaaccaagcggagcatgggggaacaaaatccgacccattaaagcttccgtgatcacccaggtgttccatgtcccactggaggagagaaagtataaggacatgaaccagttcggagagggtgagcaggcgaagatctgtctggagatcatgcaacggacaggcgctcatcttgagctgagtcttgcaaaagatcagggcctcagtatcatggttagcggaaagctggatgcagtgatgaaagcacgaaaggacatcgtggccaggttgcaaacccaagcttctgctacagttgctattccaaaagagcaccaccggttcgtcatcggaaagaatggagagaaactgcaggatctcgagctcaagacagccacaaagattcagataccgcgtcccgatgatccatccaaccagataaagatcacagggactaaagagggcatcgaaaaggctagacacgaggtgctgctgatttcagctgaacaagacaaaagggccgtggagagattggaagttgaaaaggcattccacccgtttatcgcaggtccctacaaccgcctggtgggtgagataatgcaggagactggcacgcggatcaatatcccccctccttccgttaaccggaccgagattgtgtttaccggagaaaaagagcaactggcccaggccgtcgccaggatcaagaaaatttatgaagagaaaaaaaaaaagactaccacaatcgcagtcgaagtcaaaaagtcccagcataaatatgtaatcggaccaaaaggcaattcactccaggaaatactggagagaacaggtgtctccgtggagatccccccaagcgatagcatttccgaaacagtgattctgagaggggagcccgaaaagctcggccaagcccttacagaggtttatgccaaagcgaattctttcaccgtaagcagcgtggccgcaccatcttggcttcataggttcattatcgggaagaagggacagaatctggctaaaatcacgcaacagatgcctaaagtacacattgaatttaccgagggcgaagataagatcactctggagggacccaccgaagatgtgaacgttgcacaggagcagatcgagggcatggtcaaggatctcatcaacagaatggattatgttgagataaatatcgaccataagttccacagacacttgatcggaaaatccggcgctaacattaacaggatcaaagaccagtataaggtgagcgtccggatcccccctgattctgaaaaaagtaatctcattcggatcgaaggggacccccagggcgtacagcaggctaagagggagctgctggagttggcctctcgcatggagaacgagcggactaaagacctgatcattgagcaaagatttcatagaactataatcggacaaaagggagagcgcattcgcgagatcagagacaaatttccggaggtgattattaatttccctgaccctgcccagaaatcagacattgttcagctgcgcggacctaagaatgaggtggaaaagtgcactaagtatatgcagaaaatggtggcggacctcgttgaaaattcctattcgatttcagtgcccatatttaagcagtttcataaaaatataattggcaagggtggcgctaatattaagaagatcagggaggaaagcaataccaagatcgacttacccgctgaaaacagcaactcagagaccattataataactggaaagagagctaattgcgaggccgctcgcagcagaatactgtccatacaaaaggatctagcaaatatcgctgaggtagaagtttccattcccgctaagcttcataacagtttaatcggtaccaagggacggcttatcagaagcattatggaagagtgcggaggggtgcatattcattttcctgttgaagggtccggttctgatacggtcgtgattcgaggcccatccagcgacgtggaaaaagcaaagaaacagctgctgcatttggctgaagagaaacagactaagtcgttcacagtggacataagggccaagccggagtaccataaatttctgataggtaaaggcggtggaaagataaggaaagtcagggactcaactggagctcgtgttattttccccgctgccgaggacaaggaccaagacctcatcacaatcatcgggaaagaggatgcagtgagggaagcgcagaaggagctcgaggccctcatacagaaccttgacaatgtggttgaggatagtatgctggtggaccccaagcaccatcggcacttcgtgatccgcaggggtcaagtcctcagggagattgccgaggagtatggtggagtgatggtgtcattcccacgcagcgggacccagtcagacaaagtgactcttaagggcgcaaaggattgcgtggaggccgctaagaagcgcatccaagagataattgaggatctggaggcccaagtgacattagaatgtgccatcccccagaagttccaccggagtgtaatggggcctaagggatcccgcatccaacagattaccagagatttttccgtgcagatcaagtttcccgaccgggaagagaacgcagtgcattccacagagcccgtcgtgcaggaaaacggggatgaagccggtgagggacgcgaggccaaagactgcgaccctggcagcccacggaggtgcgacattattattatatcgggcagaaaggaaaagtgcgaggcagctaaggaagcacttgaggcgctcgtgccagtgacgattgaagtagaagtgccgttcgacctgcaccgctatgttataggccagaaggggagtggtataaggaaaatgatggacgagtttgaagtcaacatccatgtccctgctccggaactccagtcagacatcatcgctatcactggactggccgctaacctggatcgggcaaaggcgggactcctcgagcgagtaaaagaactacaggccgagcaagaggacagggcccttaggtctttcaaactttctgtcacagttgatccaaaatatcatccgaaaattattgggaggaagggggcagttattacacagattagactagaacatgatgttaatattcaattccctgataaagatgatggcaaccagccccaagatcagataacaatcacgggttatgaaaaaaatacagaggcagcgcgtgatgctatccttagaatcgtgggagagctggagcagatggtttctgaagacgtccctctggatcacagagtccacgccaggataataggggctcgcggaaaagctattagaaagataatggatgaattcaaggtcgacattcgattccctcagtccggagcccctgatcccaactgcgtgaccgttacagggttgcctgagaatgtcgaggaggctatagaccatatactgaatcttgaagaggaatacctggccgacgtggtggacagtgaagccctgcaggtttacatgaaaccacccgctcacgaggaggctaaggccccatccagagggtttgtcgtgagggacgccccatggaccgcaagttcatccgagaaagccccagacatgtccagctcagaagagtttccctcatttggagcccaggtggctcccaagactttgccttggggacctaaacgttag

SEQ ID NO: 262973 - DNA, 3807 bp, Artificial Sequence
  derived and/or modified sequence
atgtctagcgtggcagtgctcacccaggagtctttcgcagaacataggtccggtctggtgccccaacagattaaagtggctacccttaactctgaagaagagtccgacccaccaacctataaggatgcattccctcctttaccagagaaagctgcttgcctcgagtccgcacaggagccttcaggggcatgggggaacaagattcggcctatcaaggcatcagtgattacacaggtctttcacgtccctttggaagaaagaaagtacaaggatatgaatcagttcggtgagggggaacaggcaaaaatctgtttggagattatgcagaggacaggggctcatctcgagctgagcttggccaaggaccagggattgtccattatggtctctgggaaactggatgcagtgatgaaggcacgcaaagacatagttgctcgactgcagactcaagcaagtgcgactgtcgctattcccaaggaacatcatcggtttgttatcggtaagaacggagagaagctccaggacctggaactcaagacagccacaaagatccagatacccaggcctgacgatccaagcaaccagatcaagattaccggaaccaaagagggtatcgagaaagccaggcacgaagtgctcttaatctctgcggaacaggataagcgggctgtggaacgtctcgaggtcgaaaaagcgtttcacccatttatcgctggtccttacaatcggctggtgggtgagatcatgcaggagacggggacccggattaacatccccccaccatccgtgaaccgcaccgaaattgtgttcaccggagagaaggagcagctggctcaagcggtggcccgaattaaaaagatctacgaggagaagaaaaaaaagaccacaaccatagccgtcgaagttaagaagtcccaacacaagtacgtgattggtccaaaaggtaatagcctgcaagagatcctcgagcgcacgggagtctctgttgagatccccccaagtgatagcatttccgagaccgtgatcctccggggtgagcctgaaaaactgggccaggcactgaccgaggtctatgccaaggccaactcattcacagtgtcatcagtagccgcaccatcctggcttcaccgcttcataattggcaagaagggccaaaacctggccaagataacccagcaaatgcctaaggttcacatcgagtttacagagggcgaagacaagataactctggaaggccctacagaagacgtgaatgtggctcaggagcagatagaggggatggtaaaagacctaattaacaggatggactacgtcgagatcaacatcgaccacaaatttcatcgtcatcttattggtaagagcggcgcaaacataaacaggattaaggatcagtataaagtgtcagtccggattcccccagattcagaaaagtccaatctcatacggatcgaaggcgatccacagggggtgcagcaggcgaagcgtgagctgcttgaactcgctagccgcatggagaacgagcgcactaaggacctcatcattgagcagcggtttcacaggacaatcatcggccagaagggcgagcgtatcagggagattcgggacaaattccctgaagttatcataaacttcccagaccctgcccaaaaatccgacattgtccagctccgaggacccaagaacgaggtggagaagtgcacaaaatacatgcaaaaaatggttgcagatctggtcgaaaactcctattccatctcagttcccatcttcaaacagttccataagaacattataggaaaaggtggcgctaatatcaaaaagattcgagaagagtccaacaccaaaattgacttacctgcagaaaacagcaacagcgagactatcatcatcactggcaagcgagcgaattgcgaagcggcacgttctagaatcttaagcatccagaaggatttagccaacatcgctgaagtagaggtatcgataccggctaaattgcacaactccctcattgggacaaaaggtcgacttatccgttctattatggaagaatgtggaggcgtccatatccacttcccagtggaaggtagtggctctgataccgtggtgatcagagggccatcttcagacgtggagaaagctaaaaaacagctgctgcacttagcagaggagaagcagacaaaatccttcaccgttgacattcgcgcaaagccagaatatcataaattccttatcggcaaagggggtggcaagatccgtaaagtaagagacagcacaggagccagggtcatcttcccggcagccgaggataaagatcaggacctgattacaattattggaaaagaagacgccgttcgcgaggcccagaaggaacttgaagcacttatccagaaccttgataacgtggtcgaggacagcatgctcgttgatccgaaacaccacagacatttcgttattaggcggggacaggtcctcagggagatcgccgaggagtacggtggagtgatggtgagcttccctcgatctggtacccagtcagacaaggtgacccttaagggtgccaaggattgtgtcgaagctgcgaaaaaaaggatccaggagatcatcgaggatttagaagctcaggtaacacttgaatgcgctatcccacaaaagtttcaccgctccgtgatggggccaaaaggctcccgtattcagcagatcaccagggactttagcgttcagataaagttcccagacagagaagagaacgccgtgcatagcaccgagccggtcgtacaggaaaatggagacgaggcaggggagggacgagaagcaaaggactgcgaccccggtagtcccagacgctgcgatatcataataatttcgggcaggaaggagaaatgcgaagccgctaaggaggcgctggaggccctagtgccagtgacaatagaggtcgaggtgcctttcgatctccacaggtatgttataggtcagaaaggatcaggtattaggaagatgatggacgaatttgaggtgaatatacacgtacctgcacccgaattacagagtgacatcatcgcaattaccggacttgccgcaaatctcgaccgtgcgaaagccggactattggaaagggtcaaagaactgcaagccgagcaggaagaccgagccctgcggtcatttaaattaagcgtcacggtggatcctaagtaccacccaaagatcataggtcgaaaaggggcagtcatcactcagattcgcctggaacatgacgtgaacatccagtttcccgacaaggacgacggcaaccagccccaggatcagatcactataaccgggtacgaaaaaaatactgaagccgctagagacgcaatcctacgcatcgtgggggagctcgagcagatggtgtcagaggatgtccctttagatcacagagttcatgcgaggatcattggggctagaggcaaggctattagaaaaatcatggacgagtttaaggtcgacatcagatttccccagtccggtgctccagatccaaattgcgtcacagtgactgggctccccgaaaatgttgaggaggccattgatcacatcctgaacttggaggaggagtatttggctgatgtcgtcgattctgaggcgttacaagtttacatgaagcctccagcacacgaggaggcgaaagctccaagtcggggatttgtagtgcgagacgctccatggactgccagcagctctgaaaaagcgcctgatatgagctcctcagaagagttcccttcttttggggcacaggtcgcccctaaaaccctgccatggggaccaaagagatag

SEQ ID NO: 262974 - DNA, 249 bp, Artificial Sequence
  derived and/or modified sequence
atgtctagcgtcgcagttctcactcaggaaagttttgctgagcaccggagcggactagtgccccagcaaattaaagtcgctactctgaactccgaggaagaatcggacccccctacctataaggacgctttccctccactcccagaaaaggccgcatgcctagaatcagcccaagaaccatccggagcgtggggtaacaagattcgccctatcaaggccagcgtgataacacaggtcttccatgtgtag

SEQ ID NO: 262975 - DNA, 45 bp, Artificial Sequence
  derived and/or modified sequence
atgagctccgtagccgtactgactcaagagtcattcgccgagtag

SEQ ID NO: 262976 - DNA, 210 bp, Artificial Sequence
  derived and/or modified sequence
atgagctctgtagccgtactgacccaggagtcttttgcagagcatagatctggcctggtgccccagcagatcaaggttgcaaccctaaattccgaggaggagagcgatccccctacttataaagacgcctttcccccactccctgaaaaagcagcgtgcctagagagcgcccaggagcccagtggtgcctggggaaataagatccgttag

SEQ ID NO: 262977 - DNA, 246 bp, Artificial Sequence
  derived and/or modified sequence
atgtccagtgtggctgttcttacgcaagagtcctttgccgagcacaggtctggcttagttccccaacagatcaaggtggctacattaaattctgaagaagaaagtgatcccccaacttataaggacgctttcccaccgttacccgaaaaggccgcttgcctggagtccgcccaggaaccatccggtgcatggggaaataaaatccgtccaatcaaggcatctgttatcacccaggtctttcactag

SEQ ID NO: 262978 - DNA, 240 bp, Artificial Sequence
  derived and/or modified sequence
atgtcgtcagttgctgtcttaacccaagaatcattcgccgagcacagatccggtctggtgccccaacagatcaaggtcgccactcttaacagcgaggaagagagcgatcctccaacctataaggacgcgtttccaccgctacccgagaaagccgcatgcttagagagtgcccaggaaccttccggagcctggggtaataaaataaggcccattaaagcatccgtgattacacaggtgtag

SEQ ID NO: 262979 - DNA, 291 bp, Artificial Sequence
  derived and/or modified sequence
atgtccagcgtggcggtcttgactcaggagtcgtttgccgagcaccgatcgggactagtgccccagcaaattaaagtggctacactcaacagtgaggaagaatctgaccctcccacatacaaagacgcttttcctcccctcccagagaaagccgcatgcctggagtccgctcaggaacctagcggagcatggggaaataagataagaccgatcaaggccagcgtgatcacgcaggtttttcatgtccccctcgaagagcgcaagtacaaagatatgaaccagtttggctag

SEQ ID NO: 262980 - DNA, 60 bp, Artificial Sequence
  derived and/or modified sequence
atgagctctgtggccgtgcttacccaggaatcctttgctgaacacagatcagggttgtag

SEQ ID NO: 262981 - DNA, 54 bp, Artificial Sequence
  derived and/or modified sequence
atgtcttctgtagccgtattaactcaggagtcatttgccgagcaccgatcctag

SEQ ID NO: 262982 - DNA, 144 bp, Artificial Sequence
  derived and/or modified sequence
atgtcaagtgtggctgtgctgacacaggagagctttgcggagcacagatcagggcttgtgcctcagcagatcaaagtggcaaccctgaatagcgaagaggaaagcgacccacctacatataaggacgcttttcccccactatag

SEQ ID NO: 262983 - DNA, 3807 bp, Artificial Sequence
  derived and/or modified sequence
atgagcagcgtggccgtgctgacccaggagagcttcgccgagcacagaagcggcctggtgccccagcagatcaaggtggccaccctgaacagcgaggaggagagcgacccccccacctacaaggacgccttcccccccctgcccgagaaggccgcctgcctggagagcgcccaggagcccagcggcgcctggggcaacaagatcagacccatcaaggccagcgtgatcacccaggtgttccacgtgcccctggaggagagaaagtacaaggacatgaaccagttcggcgagggcgagcaggccaagatctgcctggagatcatgcagagaaccggcgcccacctggagctgagcctggccaaggaccagggcctgagcatcatggtgagcggcaagctggacgccgtgatgaaggccagaaaggacatcgtggccagactgcagacccaggccagcgccaccgtggccatccccaaggagcaccacagattcgtgatcggcaagaacggcgagaagctgcaggacctggagctgaagaccgccaccaagatccagatccccagacccgacgaccccagcaaccagatcaagatcaccggcaccaaggagggcatcgagaaggccagacacgaggtgctgctgatcagcgccgagcaggacaagagagccgtggagagactggaggtggagaaggccttccaccccttcatcgccggcccctacaacagactggtgggcgagatcatgcaggagaccggcaccagaatcaacatccccccccccagcgtgaacagaaccgagatcgtgttcaccggcgagaaggagcagctggcccaggccgtggccagaatcaagaagatctacgaggagaagaagaagaagaccaccaccatcgccgtggaggtgaagaagagccagcacaagtacgtgatcggccccaagggcaacagcctgcaggagatcctggagagaaccggcgtgagcgtggagatcccccccagcgacagcatcagcgagaccgtgatcctgagaggcgagcccgagaagctgggccaggccctgaccgaggtgtacgccaaggccaacagcttcaccgtgagcagcgtggccgcccccagctggctgcacagattcatcatcggcaagaagggccagaacctggccaagatcacccagcagatgcccaaggtgcacatcgagttcaccgagggcgaggacaagatcaccctggagggccccaccgaggacgtgaacgtggcccaggagcagatcgagggcatggtgaaggacctgatcaacagaatggactacgtggagatcaacatcgaccacaagttccacagacacctgatcggcaagagcggcgccaacatcaacagaatcaaggaccagtacaaggtgagcgtgagaatcccccccgacagcgagaagagcaacctgatcagaatcgagggcgacccccagggcgtgcagcaggccaagagagagctgctggagctggccagcagaatggagaacgagagaaccaaggacctgatcatcgagcagagattccacagaaccatcatcggccagaagggcgagagaatcagagagatcagagacaagttccccgaggtgatcatcaacttccccgaccccgcccagaagagcgacatcgtgcagctgagaggccccaagaacgaggtggagaagtgcaccaagtacatgcagaagatggtggccgacctggtggagaacagctacagcatcagcgtgcccatcttcaagcagttccacaagaacatcatcggcaagggcggcgccaacatcaagaagatcagagaggagagcaacaccaagatcgacctgcccgccgagaacagcaacagcgagaccatcatcatcaccggcaagagagccaactgcgaggccgccagaagcagaatcctgagcatccagaaggacctggccaacatcgccgaggtggaggtgagcatccccgccaagctgcacaacagcctgatcggcaccaagggcagactgatcagaagcatcatggaggagtgcggcggcgtgcacatccacttccccgtggagggcagcggcagcgacaccgtggtgatcagaggccccagcagcgacgtggagaaggccaagaagcagctgctgcacctggccgaggagaagcagaccaagagcttcaccgtggacatcagagccaagcccgagtaccacaagttcctgatcggcaagggcggcggcaagatcagaaaggtgagagacagcaccggcgccagagtgatcttccccgccgccgaggacaaggaccaggacctgatcaccatcatcggcaaggaggacgccgtgagagaggcccagaaggagctggaggccctgatccagaacctggacaacgtggtggaggacagcatgctggtggaccccaagcaccacagacacttcgtgatcagaagaggccaggtgctgagagagatcgccgaggagtacggcggcgtgatggtgagcttccccagaagcggcacccagagcgacaaggtgaccctgaagggcgccaaggactgcgtggaggccgccaagaagagaatccaggagatcatcgaggacctggaggcccaggtgaccctggagtgcgccatcccccagaagttccacagaagcgtgatgggccccaagggcagcagaatccagcagatcaccagagacttcagcgtgcagatcaagttccccgacagagaggagaacgccgtgcacagcaccgagcccgtggtgcaggagaacggcgacgaggccggcgagggcagagaggccaaggactgcgaccccggcagccccagaagatgcgacatcatcatcatcagcggcagaaaggagaagtgcgaggccgccaaggaggccctggaggccctggtgcccgtgaccatcgaggtggaggtgcccttcgacctgcacagatacgtgatcggccagaagggcagcggcatcagaaagatgatggacgagttcgaggtgaacatccacgtgcccgcccccgagctgcagagcgacatcatcgccatcaccggcctggccgccaacctggacagagccaaggccggcctgctggagagagtgaaggagctgcaggccgagcaggaggacagagccctgagaagcttcaagctgagcgtgaccgtggaccccaagtaccaccccaagatcatcggcagaaagggcgccgtgatcacccagatcagactggagcacgacgtgaacatccagttccccgacaaggacgacggcaaccagccccaggaccagatcaccatcaccggctacgagaagaacaccgaggccgccagagacgccatcctgagaatcgtgggcgagctggagcagatggtgagcgaggacgtgcccctggaccacagagtgcacgccagaatcatcggcgccagaggcaaggccatcagaaagatcatggacgagttcaaggtggacatcagattcccccagagcggcgcccccgaccccaactgcgtgaccgtgaccggcctgcccgagaacgtggaggaggccatcgaccacatcctgaacctggaggaggagtacctggccgacgtggtggacagcgaggccctgcaggtgtacatgaagccccccgcccacgaggaggccaaggcccccagcagaggcttcgtggtgagagacgccccctggaccgccagcagcagcgagaaggcccccgacatgagcagcagcgaggagttccccagcttcggcgcccaggtggcccccaagaccctgccctggggccccaagagatag

SEQ ID NO: 262984 - DNA, 249 bp, Artificial Sequence
  derived and/or modified sequence
atgagcagcgtggccgtgctgacccaggagagcttcgccgagcacagaagcggcctggtgccccagcagatcaaggtggccaccctgaacagcgaggaggagagcgacccccccacctacaaggacgccttcccccccctgcccgagaaggccgcctgcctggagagcgcccaggagcccagcggcgcctggggcaacaagatcagacccatcaaggccagcgtgatcacccaggtgttccacgtgtag

SEQ ID NO: 262985 - DNA, 45 bp, Artificial Sequence
  derived and/or modified sequence
atgagcagcgtggccgtgctgacccaggagagcttcgccgagtag

SEQ ID NO: 262986 - DNA, 210 bp, Artificial Sequence
  derived and/or modified sequence
atgagcagcgtggccgtgctgacccaggagagcttcgccgagcacagaagcggcctggtgccccagcagatcaaggtggccaccctgaacagcgaggaggagagcgacccccccacctacaaggacgccttcccccccctgcccgagaaggccgcctgcctggagagcgcccaggagcccagcggcgcctggggcaacaagatcagatag

SEQ ID NO: 262987 - DNA, 246 bp, Artificial Sequence
  derived and/or modified sequence
atgagcagcgtggccgtgctgacccaggagagcttcgccgagcacagaagcggcctggtgccccagcagatcaaggtggccaccctgaacagcgaggaggagagcgacccccccacctacaaggacgccttcccccccctgcccgagaaggccgcctgcctggagagcgcccaggagcccagcggcgcctggggcaacaagatcagacccatcaaggccagcgtgatcacccaggtgttccactag

SEQ ID NO: 262988 - DNA, 240 bp, Artificial Sequence
  derived and/or modified sequence
atgagcagcgtggccgtgctgacccaggagagcttcgccgagcacagaagcggcctggtgccccagcagatcaaggtggccaccctgaacagcgaggaggagagcgacccccccacctacaaggacgccttcccccccctgcccgagaaggccgcctgcctggagagcgcccaggagcccagcggcgcctggggcaacaagatcagacccatcaaggccagcgtgatcacccaggtgtag

SEQ ID NO: 262989 - DNA, 291 bp, Artificial Sequence
  derived and/or modified sequence
atgagcagcgtggccgtgctgacccaggagagcttcgccgagcacagaagcggcctggtgccccagcagatcaaggtggccaccctgaacagcgaggaggagagcgacccccccacctacaaggacgccttcccccccctgcccgagaaggccgcctgcctggagagcgcccaggagcccagcggcgcctggggcaacaagatcagacccatcaaggccagcgtgatcacccaggtgttccacgtgcccctggaggagagaaagtacaaggacatgaaccagttcggctag

SEQ ID NO: 262990 - DNA, 60 bp, Artificial Sequence
  derived and/or modified sequence
atgagcagcgtggccgtgctgacccaggagagcttcgccgagcacagaagcggcctgtag

SEQ ID NO: 262991 - DNA, 54 bp, Artificial Sequence
  derived and/or modified sequence
atgagcagcgtggccgtgctgacccaggagagcttcgccgagcacagaagctag

SEQ ID NO: 262992 - DNA, 144 bp, Artificial Sequence
  derived and/or modified sequence
atgagcagcgtggccgtgctgacccaggagagcttcgccgagcacagaagcggcctggtgccccagcagatcaaggtggccaccctgaacagcgaggaggagagcgacccccccacctacaaggacgccttcccccccctgtag

SEQ ID NO: 262993 - protein, 630 aa, Artificial Sequence
  derived and/or modified sequence
MRERGQDSLAGLVLYVGLFGHPGMLHRAKYSRFRNESITSLDEGSSGGSVGNKGSPQPPHPALAPHLPTEDATLPSQESPTPLCTLIPRMASMKLANPATLLSLKNFCLGTKEVPRLKLQESRDPGSSGPSSPETSLSRSGTAPPPQQDLVGHRATALTPDSCPLPGPGEPTLRSRQDRHFLQHLLGMGMNYCVRYMGCVEVLQSMRSLDFGMRTQVTREAISRLCEAVPGANGAIKKRKPPVKFLSTVLGKSNLQFSGMNIKLTISTCSLTLMNLDNQQIIANHHMQSISFASGGDPDTTDYVAYVAKDPVNQRACHILECHNGMAQDVISTIGQAFELRFKQYLKNPSLNTSCESEEVHIDSHAEEREDHEYYNEIPGKQPPVGGVSDMRIKVQATEQMAYCPIQCEKLCYLPGNSKCSSVYENCLEQSRAIGNVHPRGVQSQRDTSLLKHTCRVDLFDDPCYINTQALQSTPGSAGNQRSAQPLGSPWHCGKAPETVQPGATAQPASSHSLPHIKQQLWSEECYHGKLSRKAAESLLVKDGDFLVRESATSPGQYVLSGLQGGQAKHLLLVDPEGKVRTKDHVFDNVGHLIRYHMDNSLPIISSGSEVSLKQPVRKDNNPALLHSNK

SEQ ID NO: 262994 - DNA, 1893 bp, Artificial Sequence
  derived and/or modified sequence
atgagagagagaggccaggacagcctggccggcctggtgctgtacgtgggcctgttcggccaccccggcatgctgcacagagccaagtacagcagattcagaaacgagagcatcaccagcctggacgagggcagcagcggcggcagcgtgggcaacaagggcagcccccagcccccccaccccgccctggccccccacctgcccaccgaggacgccaccctgcccagccaggagagccccacccccctgtgcaccctgatccccagaatggccagcatgaagctggccaaccccgccaccctgctgagcctgaagaacttctgcctgggcaccaaggaggtgcccagactgaagctgcaggagagcagagaccccggcagcagcggccccagcagccccgagaccagcctgagcagaagcggcaccgccccccccccccagcaggacctggtgggccacagagccaccgccctgacccccgacagctgccccctgcccggccccggcgagcccaccctgagaagcagacaggacagacacttcctgcagcacctgctgggcatgggcatgaactactgcgtgagatacatgggctgcgtggaggtgctgcagagcatgagaagcctggacttcggcatgagaacccaggtgaccagagaggccatcagcagactgtgcgaggccgtgcccggcgccaacggcgccatcaagaagagaaagccccccgtgaagttcctgagcaccgtgctgggcaagagcaacctgcagttcagcggcatgaacatcaagctgaccatcagcacctgcagcctgaccctgatgaacctggacaaccagcagatcatcgccaaccaccacatgcagagcatcagcttcgccagcggcggcgaccccgacaccaccgactacgtggcctacgtggccaaggaccccgtgaaccagagagcctgccacatcctggagtgccacaacggcatggcccaggacgtgatcagcaccatcggccaggccttcgagctgagattcaagcagtacctgaagaaccccagcctgaacaccagctgcgagagcgaggaggtgcacatcgacagccacgccgaggagagagaggaccacgagtactacaacgagatccccggcaagcagccccccgtgggcggcgtgagcgacatgagaatcaaggtgcaggccaccgagcagatggcctactgccccatccagtgcgagaagctgtgctacctgcccggcaacagcaagtgcagcagcgtgtacgagaactgcctggagcagagcagagccatcggcaacgtgcaccccagaggcgtgcagagccagagagacaccagcctgctgaagcacacctgcagagtggacctgttcgacgacccctgctacatcaacacccaggccctgcagagcacccccggcagcgccggcaaccagagaagcgcccagcccctgggcagcccctggcactgcggcaaggcccccgagaccgtgcagcccggcgccaccgcccagcccgccagcagccacagcctgccccacatcaagcagcagctgtggagcgaggagtgctaccacggcaagctgagcagaaaggccgccgagagcctgctggtgaaggacggcgacttcctggtgagagagagcgccaccagccccggccagtacgtgctgagcggcctgcagggcggccaggccaagcacctgctgctggtggaccccgagggcaaggtgagaaccaaggaccacgtgttcgacaacgtgggccacctgatcagataccacatggacaacagcctgcccatcatcagcagcggcagcgaggtgagcctgaagcagcccgtgagaaaggacaacaaccccgccctgctgcacagcaacaagtag

SEQ ID NO: 262995 - DNA, 1893 bp, Artificial Sequence
  derived and/or modified sequence
atgagagagcgcgggcaggactccctggcaggcctcgtgctgtatgttgggctattcggccatccagggatgctgcatcgggccaagtactcaaggttccggaatgagtccattacgtccctggacgagggctcttccggaggctccgtcgggaataagggcagccctcagccaccccatcccgcactagctccacacctgccgacagaagatgcaacgttaccatcccaggagagtccaaccccgttatgtactctaatacctcgaatggcctcgatgaagttagccaatcctgccacactgctgagcctaaaaaatttttgtctcggcacaaaagaggtcccacgcttaaagttacaggaatcaagggatcctggatcatctggtccttcgagcccagaaacaagcctgtccagatcaggcacagcccctcctccccaacaagatctggtcggacaccgggcgaccgctttaaccccagactcatgtccacttcccgggccaggggaaccgactctcagatcgcgccaggaccgacacttcctccaacatctgttagggatggggatgaactactgcgtgaggtacatgggctgcgtggaagtgctacagtctatgaggtccctagactttgggatgcggacccaagtaacgcgtgaagccatcagccgactttgtgaagccgtgccgggcgcgaatggtgccatcaaaaagagaaaaccaccggtcaaattcctctccaccgttctcggcaaaagcaatctccaattcagtggtatgaatattaaactaacgattagcacctgctccctgactctgatgaatttggataaccagcagatcatagctaatcatcatatgcagtcaattagcttcgcgtccggaggcgaccccgacacgacggactatgtcgcgtacgttgccaaggacccagttaatcagcgcgcatgccacatattagagtgccacaatgggatggcccaggatgtgatctctactatcggtcaggcctttgagctaagattcaaacagtacctgaagaatccgagccttaacacaagctgtgagagtgaggaagtccatatcgactcccacgccgaagagagggaagaccacgagtactacaatgagatcccaggcaaacaaccccccgtgggaggcgtgtctgatatgagaataaaggttcaggccacagagcagatggcatattgccctattcagtgcgagaaactgtgctacctgcccggaaactctaaatgttcaagcgtctacgagaactgtctcgagcagtccagggctatcggcaacgtgcaccccaggggcgtgcaatcccagcgagacacatcactgctcaagcatacctgccgggtcgatttattcgatgacccttgttacattaacactcaggctttacaatccactccaggttcagccggaaaccagaggagcgcccaaccacttggtagtccctggcactgtgggaaggctcccgagacagttcagcctggtgcgacagcccagcccgcctcttcacatagtctgccgcatatcaagcagcagctgtggtcggaggagtgctatcatggtaagctcagtcggaaggctgctgagtctctgctcgtgaaggacggggactttctcgttcgagagtcagctacttccccaggtcagtacgtcctgtcaggtctgcagggcggccaggctaagcatctgcttctggttgatcctgaaggcaaagtgcgaaccaaggaccatgtgttcgataatgtggggcacttgattcgatatcatatggacaactctctgccaattatatctagcgggagcgaagtgtctctgaagcagcccgtcagaaaagataataaccccgctcttctgcatagtaacaaatag

SEQ ID NO: 262996 - DNA, 1893 bp, Artificial Sequence
  derived and/or modified sequence
atgagggagcggggccaggacagcctggccggcctggtgctgtatgtgggcctgtttggccaccctggcatgctgcaccgggccaagtacagccgcttcagaaatgaaagcatcaccagcctggatgagggcagcagcggcggctctgtgggcaacaagggcagcccccagcccccccacccagccctggccccccacctgcccacagaagatgccaccctgcccagccaggagagccccacccccctgtgcaccctcatccccaggatggcctccatgaagctggccaacccagccaccctgctgagcctgaagaacttctgcctgggcaccaaggaggtgccccggctgaagctgcaggagagccgggaccccggcagcagcggccccagcagccctgagaccagcctgagccgcagcggcacagcccccccaccccagcaggacctggtgggccaccgggccacagccctgaccccagacagctgccccctgcccggccctggagagcccaccctgcggagccggcaggacagacacttcctgcagcacctgctgggcatgggcatgaactactgtgtgcgctacatgggctgtgtggaggtgctgcagagcatgaggagcctggactttggcatgaggacccaggtgacccgggaggccatcagccggctgtgtgaggccgtgcctggggccaatggagccatcaagaagaggaagccccctgtgaagttcctgagcacagtgctgggcaagagcaacctgcagttcagcggcatgaacatcaagctgaccatcagcacctgcagcctgaccctgatgaacctggacaaccagcagatcatcgccaaccaccacatgcagagcatcagctttgccagcggcggggaccctgacaccacagattatgtggcctacgtggccaaggaccctgtgaaccagagggcctgccacatcctggagtgccacaacggcatggcccaggatgtgatcagcaccatcggccaggcctttgagctgcgcttcaagcagtacctgaagaaccccagcctgaacaccagctgtgagagcgaggaggtgcacatcgacagccacgccgaggagcgggaggaccacgagtactacaatgagatccctgggaagcagccccctgtgggcggcgtgtctgacatgaggatcaaggtgcaggccacagagcagatggcctactgccccatccagtgtgagaagctgtgctacctgcccggcaacagcaagtgcagctctgtgtatgagaactgcctggagcagagccgggccatcggaaatgtgcacccccggggcgtgcagagccagagggacaccagcctgctgaagcacacctgccgggtggacctgtttgatgacccctgctacatcaacacccaggccctgcagagcaccccaggcagcgctggcaaccagaggtctgcccagcccctgggcagcccctggcactgcggcaaggcccctgagaccgtgcagcccggggccacagcccagcctgccagcagccacagcctgccccacatcaagcagcagctgtggagcgaggagtgctaccacggcaagctgagcaggaaggctgctgagagcctgctggtgaaggatggagacttcctggtgcgggagagcgccaccagccctggccagtatgtgctgagcggcctgcagggcggccaggccaagcacctgctgctggtggaccctgagggcaaggtgaggaccaaggaccacgtgtttgacaacgtgggccacctgatccgctaccacatggacaacagcctgcccatcatcagcagcggcagcgaggtgtccctgaagcagcctgtgaggaaggacaacaacccagccctgctgcacagcaacaagtag

SEQ ID NO: 262997 - DNA, 1893 bp, Artificial Sequence
  derived and/or modified sequence
atgcgggagcggggccaggacagcctggccggcctggtgctgtacgtggggctgttcggtcatcccggaatgctgcacagggccaagtattcccggttcagaaacgagtccatcacctctttggatgaaggctcgagcggcgggtctgttggcaacaaaggttccccccagccaccacatcctgccctcgctccccacttaccaaccgaggatgcaaccctcccatcccaggaatcccccacccccttatgtaccctcattcctcgaatggccagcatgaagttagccaacccagccaccctgctgagcttgaaaaatttctgcctgggcactaaagaagtaccccggctcaagttacaggaaagcagggatcccggttcctctggtccgtccagtccagagacttcattgtcacgctcaggaacagccccaccccctcaacaggatctggttggtcaccgtgccaccgctctgacacccgattcttgcccattgccaggacccggcgaaccgacactccgatcaagacaggatagacatttcctgcagcacctgttgggcatgggcatgaactactgcgttcgctatatgggttgtgtcgaggttttacaatctatgcggtcccttgactttggaatgaggacccaagtgacgcgtgaggccatctcaaggttgtgcgaggcagtgcccggcgccaatggagccattaaaaagaggaagcccccagtaaagtttctgtcaaccgtccttggaaaaagcaatctgcagttttccggtatgaatattaagctcactatctcgacctgctcactaacattgatgaatctagataatcagcaaattattgccaatcaccacatgcagtccatttccttcgctagtggaggggacccggatactacagattatgtcgcttacgtagcgaaggaccctgtgaaccagcgggcttgtcatattctggagtgtcacaacggaatggcccaggacgtaatcagcaccatcgggcaggctttcgaactccgcttcaagcagtatctaaagaatcctagtctcaacacttcctgcgaatctgaagaggtccacattgattcccatgcggaagagcgggaggatcatgaatattataacgaaatccccggcaagcagcctccagtcggtggagtgagcgacatgaggatcaaagtgcaggcaacagagcagatggcctactgtccaatccaatgtgaaaaactgtgttacctccccggtaactctaagtgctccagtgtctatgaaaattgccttgagcagagtcgtgctattggtaacgttcaccccagaggagtccagtcccagcgggacaccagtctgctgaagcatacgtgtcgcgtggatttgttcgacgacccctgttatatcaacacgcaagctctccagagcacgcccggcagcgctgggaatcagcgttctgctcagcccctgggcagtccctggcactgtggaaaagcccccgagaccgtccagccaggagccacggctcagcccgcttcctcccattccttgcctcacattaaacagcagttgtggtccgaagaatgctaccacggaaagttgagtcgcaaggccgcggagagtctgcttgtcaaggacggggacttccttgtgagggagtccgctactagtcctgggcagtatgtactgtccggtctccaggggggacaggcaaaacacttgctcttagtggatcctgagggcaaggtcagaaccaaggaccacgtgtttgataatgtcgggcacctcattcgataccatatggacaacagccttcctatcatctccagcggtagcgaagtatctctgaaacagccagtgcgcaaggataacaaccccgctctcctacacagcaataagtag

SEQ ID NO: 262998 - DNA, 1893 bp, Artificial Sequence
  derived and/or modified sequence
atgcgtgagcgcggacaggacagcttggccggtttggtgctgtacgttggcctcttcggccacccagggatgttgcaccgtgcaaaatacagcaggtttagaaatgaatctatcaccagcctagacgagggatcctccgggggaagtgtgggcaataagggatccccacagcccccacatcctgccctcgctccccatctgcctacggaagacgccactctcccttcccaggagagcccgacccccctctgtaccctcattccacgcatggccagcatgaagctggctaatcctgcgacattgctatccctgaaaaatttctgcctgggaaccaaagaagtgccaagactcaagctgcaagaatcgcgggaccctggcagttcaggccctagttcaccggagacgagtctgtctagaagtggcaccgctccacccccacagcaggacctcgtggggcaccgagcaactgccctcactcctgattcttgccctttgcccggtccaggtgaacccactctgcgaagtcgacaggaccggcattttctgcagcacctactagggatgggaatgaattattgtgttaggtacatggggtgcgtagaagtgttacagagtatgcgcagtctggattttgggatgcgcacccaggtgacgagagaggcgatatcgagactgtgtgaggccgtgcctggcgctaatggcgctattaaaaagcggaaaccaccggtcaagtttctcagcacagttctggggaagtctaacctgcaattcagcggcatgaacatcaaacttacgatcagcacttgctccctcaccctcatgaacctggacaaccagcaaattatcgccaaccaccacatgcagtcgattagcttcgcatccggcggagacccggacacaaccgattacgtcgcctacgtcgctaaggatcccgtgaaccaacgggcatgtcacatactagagtgtcacaacggcatggcacaggacgtcatcagcaccatcggacaggcatttgagctcaggtttaaacagtacctcaagaaccccagccttaatacttcttgcgagtctgaggaggtgcacatcgactcccacgcagaggagcgagaggatcacgaatattacaacgaaatccccggaaagcaaccgccagttgggggtgtctcagacatgcgaatcaaagttcaggcgactgagcagatggcctactgcccgatccaatgtgagaaattgtgctacttgccagggaacagcaagtgttcatcagtttatgagaactgtctcgagcagtctcgggcaatcggaaatgttcacccccgaggggttcagtcccagagggatacctccctgctgaagcacacatgcagggtggacctcttcgatgacccttgctatattaatacacaggcactgcagtccactccaggcagcgcaggaaatcagaggtccgctcaacctctcggaagcccttggcattgtggtaaagctccagaaacagtgcagccgggtgcaactgcccagccggctagttcccacagcctcccccatattaaacagcagctctggtccgaggaatgctatcacggaaagctgtccaggaaagcagccgaatctctgctagtaaaagacggggactttcttgtccgagagtccgcaaccagccccggacagtatgtactgagcggcctccagggaggccaagctaaacacctcctgctggtagaccccgaaggtaaggtgagaactaaggatcatgtgttcgataacgtgggccatctgatccgatatcatatggataatagcctgccaattatatcgtctggcagcgaagtctctttgaaacagcccgtgaggaaggacaacaatcctgcgctcctccactctaacaagtag

SEQ ID NO: 262999 - DNA, 4558 bp, Artificial Sequence
  derived and/or modified sequence
agaacagaaggctggggtgagggtgggagtcgggtgctaaatatttctactaggctcctgcaaggctagtgatgcagcgggccccccgaccggcgctcgcccgggttctgcgcctaagagttggccgtgagcgacccgcgccgccgggagcctgggtctaggctctcccgacaaggattccaaggcgagaacactggtgcctctgcctgggccagggagagactgaaatcagagcaggggaggcgtttcccccatgggctgtcacccttaaggggccgggagccgaggtgggcgagctcgagagcagagttggagaggtggctgctgtgagttgcatcgggcgttgaggtatctgatgtctgcaccgtttatctaccagacgacgaggcgatttatgcaacagtatcctgtttcagcactgccaaggctatgcgagaacgcggccaggacagcctggcaggactcgtgctgtatgtaggactcttcgggcaccccgggatgctgcacagggccaagtacagccgctttcggaacgagtcgatcacgtccttggacgaaggtagctccggaggctcggtcgggaacaagggctcgccgcagcctccccaccccgccctggcacctcacctgccgactgaagatgccaccttgccgtcgcaggagagccccaccccactgtgcaccttgatcccccgcatggcaagcatgaagctggccaacccggccactttgctgagtctgaaaaacttttgcctgggtaccaaagaggtgcctcggctgaagctccaggaaagccgggacccaggttccagcggcccctcttccccagaaaccagtttaagtaggtccgggactgcacctccaccgcagcaggacctggtgggacacagggcaaccgccctaacccctgattcgtgcccgcttcctggccctggggagccaacacttaggagcaggcaggacaggcactttctacagcacctgttggggatgggcatgaactactgtgtgaggtacatgggctgtgttgaagtgctgcaatcaatgagatcactggattttggaatgagaacccaagttacaagggaagcaataagtcgcctgtgtgaagctgtccccggggcaaatggagccattaaaaagcgaaagcctccagttaagttcctatcaacagtccttggcaaaagtaatcttcagttttcaggaatgaatataaaactgaccatctcaacatgcagtctcacattgatgaatcttgacaaccaacagattattgcaaatcatcatatgcagtctatttcatttgcctctggaggggatcctgatactacagactatgttgcctacgtagctaaagatccagttaatcaacgagcctgtcacatattggaatgccacaatggaatggcccaagacgtcataagtaccatagggcaggcttttgaactccggtttaaacagtacttgaaaaatccttctttgaatacttcttgtgaaagtgaggaggtgcatattgatagccatgccgaggagagagaagatcatgaatattacaatgaaattccagggaagcagccaccagtaggtggtgtttcagatatgcggatcaaagttcaagccacggaacaaatggcttactgccccatacagtgtgaaaagttgtgctatttgcctggaaactccaagtgcagcagtgtatatgagaactgtttagaacaaagcagggcaataggtaatgtccatccaagaggggtgcagtcccagcgagatacctcattattgaagcacacgtgccgagtggatctctttgatgacccctgctacattaatacacaggctcttcaaagtacacctggctctgctggaaatcaaaggtcagcccaaccactggggagcccatggcactgcggaaaggcaccagaaactgttcagccgggtgccacagcccagcctgccagctcacattctttgccacacattaagcagcagctgtggagcgaagaatgctatcatggcaagctgagcaggaaggcggcagagagcctcttggtaaaggatggggactttttggttcgagagagtgcaacatcccctggccaatatgtgctgagtggactacagggaggccaagcaaaacatcttctcctggtggatcctgaaggcaaggtgaggaccaaggatcatgtatttgataatgtcggccaccttatcagataccatatggataacagtttgccaatcatctcctctggaagcgaagtaagccttaaacaaccagtgagaaaagataataatccagcacttttgcattccaacaaatgacagtattgaagcaccatcacactgatatttcaagaaaccccattttgtattaggacacaaagataatttaaactttgtttgtagataaaatagagcacaaactgtgaagtgcatctttccaagaccatcatggaccaggtcctctataaaatgaagaactaacaaaaattagtcttcagaaatgaaaatcagaaaagaggaagagggttggtcattttaaaagaaattatatgtatgcacggatgtcactttttaaggccatattgcattgataacaagctaaaagcacaactaaaatttcacatgctaacgacaacttgaatgaactgctggggcagtggtatgtgcctttcaacttgataatttgggggacattttcatattgggagattaattctaagtatcttcatgttctatgactatagaaccatttgccaaaaaaaaaagcttttcttgctacaaaaaataagcaattttcttgagccttattgactttattacattttctgtttagcagcatttttcactgcaatgttaaaataaatatgacattgaattcgaactgtgtgtatgtcagtggaatcaaatcaaaagccactaacatggctgtctgtttcattggactgtcccatttgctggttaaaaggattggggcccaaatcctctggcctagcatttctcagtgtttgctattcagactgtctaaatacagcatgtgacaagctgaagaagccaaatctatcagtcatttctgatttcattatattctccccctcttcctgctaaaaagacaaaaaacaaaaaacaaaaaaaacaaaaaaaacctcatgagtgcatggatttaaaagagggcaaacaaaaccagtattcttcatatttactattcaaattggtttcattcttagtaaaagtacagaatctatttgaaattatagtaaaatttcttcttgattggctgacactgaatcatagtttctcacctacatatatccttagcacctcgtatagatatgatcagacaaaatgcagaaggaaaaaaaaacatattgaatgaagcacttggaaagattttccacatgtagaccaactggtaaactaacagagtgattaagcatggtgtacagaaaagcattacgctgagtcttaccagtgtgaccttcagcaagttgctgaatctgtttgggttccagtttccttggcaataaaatgagctaaatgggctaggtgaatttggaggactacttcagtcctaacttatagtatgagtctctaaaaagcaagtttttcatttgttagaggtcgttattgataaccagtctgtatagttaaggtaaaaaattaagcttttcttctatagtctgtgtccatactcacagaatgaatggcacacctgagatcaacattcacatagtttagactccaaaccattcagtctaaaatactgaaactttggaatatagggaatgatgataaaagtggatttggtttgagtagcagaaaactacttatgtccttttcttgcctttccaagaaaaatgttttttgtttttttttttaatcttgagttatctggatattgccttgactccatttcattttggctatgtagatacaacttagtctttgtgattgtgatatatttgctaagttttaaataaaacttcttttggatagaaatcattagaaaccaagcatactgcactctaatattttactgtaaaggcttatgatttttatttctactgccattaattttttagatggatttgtttcctcttacacaactagaattaatgtatttttcaccagttttccatataccttaggtcttgatcgtttgtccttaaaaaggggatcagcatgagtatagacagtagaaatgtatgggtagtctaaccacttttatcagagacagagcagggctgtggtctcactctagctgagcagagtattaacttggtagcaagagttcctgatacaaatagatgcaatgactgtaaatggtgtcagcagtacacatggataatcagtatttgactgtaatagtatagtagttaaatacagcacttaaaaataccacagacacagttaaagcaaaaggaaacaataaaaggaatgtctgcatgctattttaatctcacattctttatctgtcttaaagtggaaatccatttgcctataaatacctgtaaacgactttaaaaaataaatgattattgctttgtgacaattgaca

SEQ ID NO: 263000 - protein, 657 aa, Artificial Sequence
  derived and/or modified sequence
MDEQEALNSIMNDLVALQMNRRHRMPGYETMKNKDTGHSNRQKKHNSSSSALLNSPTVTTSSCAGASEKKKFLSDVRIKFEHNGERRIIAFSRPVKYEDVEHKVTTVFGQPLDLHYMNNELSILLKNQDDLDKAIDILDRSSSMKSLRILLLSQDRNHNSSSPHSGVSRQVRIKASQSAGDINTIYQPPEPRSRHLSVSSQNPGRSSPPPGYVPERQQHIARQGSYTSINSEGEFIPETSEQCMLDPLSSAENSLSGSCQSLDRSADSPSFRKSRMSRAQSFPDNRQEYSDRETQLYDKGVKGGTYPRRYHVSVHHKDYSDGRRTFPRIRRHQGNLFTLVPSSRSLSTNGENMGLAVQYLDPRGRLRSADSENALSVQERNVPTKSPSAPINWRRGKLLGQGAFGRVYLCYDVDTGRELASKQVQFDPDSPETSKEVSALECEIQLLKNLQHERIVQYYGCLRDRAEKTLTIFMEYMPGGSVKDQLKAYGALTESVTRKYTRQILEGMSYLHSNMIVHRDIKGANILRDSAGNVKLGDFGASKRLQTICMSGTGMRSVTGTPYWMSPEVISGEGYGRKADVWSLGCTVVEMLTEKPPWAEYEAMAAIFKIATQPTNPQLPSHISEHGRDFLRRIFVEARQRPSAEELLTHHFAQLMY

SEQ ID NO: 263001 - DNA, 1974 bp, Artificial Sequence
  derived and/or modified sequence
atggacgagcaggaggccctgaacagcatcatgaacgacctggtggccctgcagatgaacagaagacacagaatgcccggctacgagaccatgaagaacaaggacaccggccacagcaacagacagaagaagcacaacagcagcagcagcgccctgctgaacagccccaccgtgaccaccagcagctgcgccggcgccagcgagaagaagaagttcctgagcgacgtgagaatcaagttcgagcacaacggcgagagaagaatcatcgccttcagcagacccgtgaagtacgaggacgtggagcacaaggtgaccaccgtgttcggccagcccctggacctgcactacatgaacaacgagctgagcatcctgctgaagaaccaggacgacctggacaaggccatcgacatcctggacagaagcagcagcatgaagagcctgagaatcctgctgctgagccaggacagaaaccacaacagcagcagcccccacagcggcgtgagcagacaggtgagaatcaaggccagccagagcgccggcgacatcaacaccatctaccagccccccgagcccagaagcagacacctgagcgtgagcagccagaaccccggcagaagcagccccccccccggctacgtgcccgagagacagcagcacatcgccagacagggcagctacaccagcatcaacagcgagggcgagttcatccccgagaccagcgagcagtgcatgctggaccccctgagcagcgccgagaacagcctgagcggcagctgccagagcctggacagaagcgccgacagccccagcttcagaaagagcagaatgagcagagcccagagcttccccgacaacagacaggagtacagcgacagagagacccagctgtacgacaagggcgtgaagggcggcacctaccccagaagataccacgtgagcgtgcaccacaaggactacagcgacggcagaagaaccttccccagaatcagaagacaccagggcaacctgttcaccctggtgcccagcagcagaagcctgagcaccaacggcgagaacatgggcctggccgtgcagtacctggaccccagaggcagactgagaagcgccgacagcgagaacgccctgagcgtgcaggagagaaacgtgcccaccaagagccccagcgcccccatcaactggagaagaggcaagctgctgggccagggcgccttcggcagagtgtacctgtgctacgacgtggacaccggcagagagctggccagcaagcaggtgcagttcgaccccgacagccccgagaccagcaaggaggtgagcgccctggagtgcgagatccagctgctgaagaacctgcagcacgagagaatcgtgcagtactacggctgcctgagagacagagccgagaagaccctgaccatcttcatggagtacatgcccggcggcagcgtgaaggaccagctgaaggcctacggcgccctgaccgagagcgtgaccagaaagtacaccagacagatcctggagggcatgagctacctgcacagcaacatgatcgtgcacagagacatcaagggcgccaacatcctgagagacagcgccggcaacgtgaagctgggcgacttcggcgccagcaagagactgcagaccatctgcatgagcggcaccggcatgagaagcgtgaccggcaccccctactggatgagccccgaggtgatcagcggcgagggctacggcagaaaggccgacgtgtggagcctgggctgcaccgtggtggagatgctgaccgagaagcccccctgggccgagtacgaggccatggccgccatcttcaagatcgccacccagcccaccaacccccagctgcccagccacatcagcgagcacggcagagacttcctgagaagaatcttcgtggaggccagacagagacccagcgccgaggagctgctgacccaccacttcgcccagctgatgtactag

SEQ ID NO: 263002 - DNA, 1974 bp, Artificial Sequence
  derived and/or modified sequence
atggatgaacaggaggctctcaactccatcatgaacgatttagtcgcgctgcagatgaatcgtcgacaccgcatgcccggctatgagacaatgaagaacaaggatacaggacatagcaaccggcagaaaaaacacaattcctcgagcagcgcgctgctgaattccccgacggtcacaacgtcaagctgcgccggggcttctgaaaagaagaagtttctgagtgacgtcagaatcaaatttgagcataacggggagagaagaataatcgctttttcgagaccagtgaagtacgaggacgtagaacataaagtcacaacagtgttcggacagccattggacctccactacatgaacaacgagcttagcatcctcctgaaaaaccaggatgacctcgataaggccattgatatcctggatagatcgtcctctatgaaaagcctcaggatactgctgctgagtcaagatcgcaatcacaattcaagctcacctcactcaggagtgtctcggcaggtccgaattaaggcatctcagtccgctggagacataaataccatttatcagccccccgagccaagatccagacacctttccgtgtccagccaaaaccccggtaggagttcaccgccaccaggatatgtccctgagagacagcagcatatcgcccgccaaggctcatatacgagcattaactccgaaggcgagtttatccctgagactagcgagcagtgcatgctggaccccctgtcctccgcagagaatagtctgagcggcagctgtcagtctctggacagaagcgcagactcaccgtcctttcggaagagtagaatgtccagagcacagtcattcccggataaccgacaggagtactctgacagagaaactcagttgtacgacaaaggagtgaagggaggaacctacccaagacgttatcatgtttccgtgcaccacaaagactattcggacgggagacgcaccttccccaggattcgccggcaccagggcaacttattcacacttgtgcctagctccagatccctgtccacgaatggagaaaatatggggcttgcggtacaatacctggatccacggggtcgcttacgaagcgccgatagcgagaatgccctctccgtgcaagaaaggaatgttccgacaaagagtccaagcgcccctatcaattggagaaggggcaagctgctgggacagggtgccttcggccgcgtttacctctgctatgatgtggacaccggtagggagctcgcaagcaagcaggtgcagtttgatcccgattctcccgagacctcaaaagaggtgtctgcactggaatgcgagattcagctgctgaaaaacctgcagcacgagcgcatcgtgcagtactacggctgcctccgggatagggccgagaagacgctcacaattttcatggaatatatgccgggcggcagtgttaaggaccagcttaaggcttacggtgcccttactgaatcagtgactaggaagtacactagacagattctggaggggatgtcttatctacacagtaatatgattgtgcatagagatatcaagggggctaacattttacgtgactcagccgggaacgtcaagcttggtgacttcggagcctccaaacgtcttcagaccatttgcatgtctgggactggcatgcgatccgtgactggcactccctattggatgtccccagaggtcatctcgggggaaggctacggtcgcaaggctgatgtgtggagtctcggatgcacggtggtagagatgctcactgaaaagccaccttgggcagagtatgaggccatggccgctattttcaagatcgctacccagccaactaatccccagcttccctctcacatatcagagcacggacgcgacttcctaaggcgcatcttcgtcgaggcccgacagagacctagcgccgaggaactccttacccatcactttgctcagttaatgtattag

SEQ ID NO: 263003 - DNA, 4823 bp, Artificial Sequence
  derived and/or modified sequence
gagaacggtggccggacggagagactgcgggtctgagggactggcgggcgggcgggccgagcggcgccgccgaggccgggctgggccgagcccaggagcgcccgggatgtagcgggccaccctgccgatgccacagcgcccggccgcgggcggagccggagccggagcctggggaggcggcgggggcccagagcgcagcccgcgccccccgcgcggagccaggcccgctgccgtccccgccgcccgggcccccggcatgcagccccggctgcggaggtgacactcacggaccttagccaccgccgccgccatcgccaccatggacgaacaggaggcattgaactcaatcatgaacgatctggtggccctccagatgaaccgacgtcaccggatgcctggatatgagaccatgaagaacaaagacacaggtcactcaaataggcagaaaaaacacaacagcagcagctcagcccttctgaacagccccacagtaacaacaagctcatgtgcaggggccagtgagaaaaagaaatttttgagtgacgtcagaatcaagttcgagcacaacggggagaggcgaattatagcgttcagccggcctgtgaaatatgaagatgtggagcacaaggtgacaacagtatttggacaacctcttgatctacattacatgaacaatgagctctccatcctgctgaaaaaccaagatgatcttgataaagcaattgacattttagatagaagctcaagcatgaaaagccttaggatattgctgttgtcccaggacagaaaccataacagttcctctccccactctggggtgtccagacaggtgcggatcaaggcttcccagtccgcaggggatataaatactatctaccagccccccgagcccagaagcaggcacctctctgtcagctcccagaaccctggccgaagctcacctccccctggctatgttcctgagcggcagcagcacattgcccggcaggggtcctacaccagcatcaacagtgagggggagttcatcccagagaccagcgagcagtgcatgctggatcccctgagcagtgcagaaaattccttgtctggaagctgccaatccttggacaggtcagcagacagcccatccttccggaaatcacgaatgtcccgtgcccagagcttccctgacaacagacaggaatactcagatcgggaaactcagctttatgacaaaggggtcaaaggtggaacctacccccggcgctaccacgtgtctgtgcaccacaaggactacagtgatggcagaagaacatttccccgaatacggcgtcatcaaggcaacttgttcaccctggtgccctccagccgctccctgagcacaaatggcgagaacatgggtctggctgtgcaatacctggacccccgtgggcgcctgcggagtgcggacagcgagaatgccctctctgtgcaggagaggaatgtgccaaccaagtctcccagtgcccccatcaactggcgccggggaaagctcctgggccagggtgccttcggcagggtctatttgtgctatgacgtggacacgggacgtgaacttgcttccaagcaggtccaatttgatccagacagtcctgagacaagcaaggaggtgagtgctctggagtgcgagatccagttgctaaagaacttgcagcatgagcgcatcgtgcagtactatggctgtctgcgggaccgcgctgagaagaccctgaccatcttcatggagtacatgccagggggctcggtgaaagaccagttgaaggcttacggtgctctgacagagagcgtgacccgaaagtacacgcggcagatcctggagggcatgtcctacctgcacagcaacatgattgttcaccgggacattaagggagccaacatcctccgagactctgctgggaatgtaaagctgggggactttggggccagcaaacgcctgcagacgatctgtatgtcggggacgggcatgcgctccgtcactggcacaccctactggatgagccctgaggtgatcagcggcgagggctatggaaggaaagcagacgtgtggagcctgggctgcactgtggtggagatgctgacagagaaaccaccgtgggcagagtatgaagctatggccgccatcttcaagattgccacccagcccaccaatcctcagctgccctcccacatctctgaacatggccgggacttcctgaggcgcatttttgtggaggctcgccagagaccttcagctgaggagctgctcacacaccactttgcacagctcatgtactgagctctcacggccacacagctgccggtcgccctttgctgcatggcagggggctgctgctgggctcagtgaagttgctgcttctcccaggcaaggctgtggaccatggagtggcagcccagccagcgtcggtctgtgccccttccgccactggggctcagagccggggtggggtggctgcagcctcaggactgggagcccccagcctgtcagatccaggagctccagtgtcctgagctcagcgtggaggggtaggggctgggaacagtgtgcaaggcagccgtgggccccaccctcggggatgtgtcctgacactgcaattggcaccgaagcccagagggtctgggggcacaagactgacgccagggtatgaagagtgttattttcattcaaagtgttattttgtttttccttccaatgtctggagaccaccagggcatctctgggctggatgagctcccacaagcctgagggaaaggccagcactcgctagcagtggcaggcagaggcccaggctgccgtcccctagagtcccaggttggctctgccagtcctgtcctttaccaaagatgaatgaagcaaatgtcatgctgccttattcagggaaggaggagcctgtcctgcctgtggccatgaccctgcctctcccaggcaggggcccgcgatgtggaactgctgccactgaggggggatccagttttgtcaatgcagttgtctctgttttacaagttggagtcactcttatgctgtacccagtttctaaactggagactgtgtgtgccctctgggctctgagtacccctgctttgggcttgggcctaggctgcattgaaaagagctgaaggttgtggcctttgcgctcctggcccagcctttgttccccactggagcagaaggggagatggacgacacggtcggggcatctggcctggccagtgccctgatcccagagagcccgaggaggtgtctcaggctgcctgagtcgtgacctgctaggccagagcccactccatctggtagaagggaaagcccatatgctaccaccagctgtgtccaaaaccgccagctctgttcttcctcagccagcctcgcccatccccttgaggtctcagcccctttcccttgtagctcctcccctggagggggaatggcagcaggggttggggaaacagcatctccaagcagcttagagttggccatatttacctcagcctgggcgctggtcctttcttccggcccctcccctccaaaatgtgcctattgctagagctcctccctctcaacacccagtttccttgggagttgtcattaaaggaaaaaaaaaaaaaaaaaagccagtgcccagggatgggcatctccagggagctggggattagtgccaggcagccctgccagccatgcctacatccccatgggcacagaacaagccaaagccttcgttgtatgttgacgatgcacttttatgaatgtagtttctatcgctgtttttagccttttcacatcatgtaatgtgaggccttgtacttgttaatttatatctcagatcatatttgatggtttttatatatatcaattctagactgttacaggtgacggacgcctcaagagagagaagagaaaatgaaagcagctggttttgcagaagtgtgtgtcgcatgcgccagttgggcctggaccctcctgtgtccatccctgttcccccaggggctctatcagcccctgtaccccacactgccctctgaagacaacacaggctcctgcttccacctcggcccttgcccagggtggggcctggccctcatcttgaccaaagctgctgtgtggcagctcggcctctctacgaccccatcttggtggctgcacactcttcctggcccgcacccccatccccagtccctgttccccaagaggatacagagcacggtgctggctgactcaactgtgcgtcccaggttcagggtcttacagagctccaccccctggggtcttacctcactgggaatgtgttttgaaaatgaatttgaagacaagccaacaaaccctgcactccaaaaaagcaaaacagaccctaatttttttgtgccaaaaactgtggacatgctggctcagcatcctcaggaccaagttgttgcttaatttattgttttttaataactaatccagataaaaagttgtggggcttcagggtgacctgggcccaaaggttctgaagggcagttcctggcagccccaggcttgctgtgggaaggggccgtgccgtcactttctcatcattccatggggtgtgtctgcctgggccaactctgcatggagaggccagggctggggacagtccgcactctgccaccctcctgccccttccacccaccccagctctatgtctgtgtctgaattgtggatcgtgcagccatggttattgtggaactgtggaacctgcagccatagttatttgactatatcttgaccgagggcttgcagtgcaaagccaggccagtgttgcgcattacttacaataaaagggatcatttatatc

SEQ ID NO: 263004 - DNA, 1974 bp, Artificial Sequence
  derived and/or modified sequence
atggatgagcaggaggccctgaacagcatcatgaatgacctggtggccctgcagatgaacagaagacacaggatgcctggctatgagaccatgaagaacaaggacaccggccacagcaaccggcagaagaagcacaacagcagcagcagcgccctgctgaacagccccaccgtgaccaccagcagctgtgccggggccagcgagaagaagaagttcctgagtgatgtgcgcatcaagtttgagcacaatggagagcggcgcatcatcgccttcagcaggcctgtgaagtatgaagatgtggagcacaaggtgaccaccgtgtttggccagcccctggacctgcactacatgaacaatgagctgagcatcctgctgaagaaccaggatgacctggacaaggccatcgacatcctggacaggagcagctccatgaagagcctgcgcatcctgctgctgagccaggacaggaaccacaacagcagcagcccccacagcggcgtgtcccggcaggtgcgcatcaaggccagccagagcgctggggacatcaacaccatctaccagcccccagagcccaggagccgccacctgtctgtgagcagccagaaccctggccgcagcagccccccacctggctacgtgcctgagcggcagcagcacatcgcccggcagggcagctacaccagcatcaacagcgagggggagttcatccctgagaccagcgagcagtgcatgctggaccccctgagcagcgctgagaacagcctgagcggcagctgccagagcctggacagatctgctgacagccccagcttcaggaagagcaggatgagccgggcccagagcttcccagacaaccggcaggagtacagcgaccgggagacccagctgtatgacaagggcgtgaagggcggcacctacccccggcgctaccacgtgtctgtgcaccacaaggactacagtgatggaagaaggaccttcccccgcatccgccgccaccagggcaacctcttcaccctggtgcccagcagccgcagcctgagcaccaatggagagaacatgggcctggccgtgcagtacctggacccccggggccgcctgcggtctgctgacagtgaaaatgccctgtctgtgcaggagagaaatgtgcccaccaagagccccagcgcccccatcaactggaggcggggcaagctgctgggccagggcgccttcggccgggtgtacctgtgctatgatgtggacaccggccgggagctggccagcaagcaggtgcagtttgatcctgacagccctgagaccagcaaggaggtgtctgccctggagtgtgagatccagctgctgaagaacctgcagcacgagagaattgtgcagtactacggctgcctgcgggacagagctgagaagaccctgaccatcttcatggagtacatgcctgggggctctgtgaaggaccagctgaaggcctatggagccctgacagaatctgtgaccaggaagtacacccggcagatcctggagggcatgagctacctgcacagcaacatgattgtgcaccgggacatcaagggggccaacatcctgcgggacagcgctggaaatgtgaagctgggggactttggagccagcaagaggctgcagaccatctgcatgtctggaacaggcatgaggtctgtgacaggcaccccctactggatgagccctgaggtgatctctggagagggctacggcaggaaggcagatgtgtggagcctgggctgcaccgtggtggagatgctgacagagaagccaccctgggccgagtatgaggccatggccgccatcttcaagatcgccacccagcccaccaacccccagctgcccagccacatcagcgagcacggccgggacttcctgcggcgcatctttgtggaggcccggcagaggccttctgctgaggagctgctgacccaccactttgcccagctgatgtactag

SEQ ID NO: 263005 - DNA, 1974 bp, Artificial Sequence
  derived and/or modified sequence
atggacgagcaggaggccctgaacagcatcatgaacgacctggtggctttgcagatgaaccgccggcataggatgccaggctatgaaaccatgaaaaacaaggacacaggccatagtaatcgtcaaaaaaaacacaactctagctcaagcgcactgctcaattcccccaccgttactaccagttcatgtgctggagcttcagagaagaaaaaatttcttagtgacgtccggattaaatttgaacacaacggagaacggaggataattgccttcagccggccggttaaatacgaagacgtagagcacaaagtcacgactgtttttggtcagccactggacctgcattacatgaacaacgagctctccattctgctcaagaatcaggacgatcttgataaagcaatcgacatcctcgaccggagtagttccatgaagagcttaaggattttactcctcagccaggacaggaatcacaattcaagctctccacattccggagttagtagacaagtgaggattaaggcttcccagagcgcgggcgatattaacacaatctaccagccacctgaaccaaggagcagacacctgagcgtgtcctcccagaatcccggacgtagctcccccccccccggatacgtgcctgagcgccaacagcatatcgccaggcagggatcctacaccagcattaattctgagggggagtttattcccgagaccagtgagcaatgcatgctggatccactttccagtgcagagaactctctgtcagggagttgtcagagcctggaccggagcgccgattcaccatccttccggaagagtcggatgtccagagcccagtcatttcccgacaaccgccaggaatattcagacagggaaacccagctgtacgataaaggcgtcaagggcgggacataccctcgccggtaccatgtcagtgttcaccataaggactatagtgacggtcgcaggacattcccacgaatccgcagacatcaagggaatttgtttaccctcgtgccatctagccgaagtctctccacaaacggggagaatatggggctagccgtgcagtacctggacccaaggggtcgcttacggagcgctgactctgagaatgcactgagtgtgcaggagcggaatgtgcctaccaagtcacctagcgctcctattaattggagaaggggtaaattgctaggccagggcgccttcggcagagtctacttgtgctatgatgttgacaccgggcgggaactcgctagtaagcaggtgcaattcgatcctgactctccggaaaccagtaaggaggtctccgctctagaatgcgaaattcagcttctcaaaaatctgcagcacgaacgcattgtccagtattatggctgccttagggatcgagccgaaaaaacactgaccatctttatggaatacatgcctggggggagcgtcaaggaccagctgaaggcctatggcgctctgactgagtcggtgacccgtaaatacactaggcaaattctagagggcatgtcttatctgcactccaacatgattgtgcatcgcgatatcaaaggggcaaatattttgcgagattccgcaggcaatgttaagctgggcgattttggggccagtaaaagactccaaactatttgcatgtcgggcacagggatgaggtcagtgacaggcaccccctactggatgtcacctgaagtgatttcaggagagggttatggtcgaaaggcagacgtgtggagcctgggttgcactgtcgtggaaatgctgaccgaaaaacccccatgggccgagtatgaagccatggcagctatctttaagatcgccacacagcctactaacccccaactgcctagccatatctcagagcacgggcgtgatttcctgcggagaatattcgtggaggcccggcaacgcccgtcggcggaagaactccttactcaccacttcgcccagcttatgtactag

SEQ ID NO: 263006 - DNA, 1974 bp, Artificial Sequence
  derived and/or modified sequence
atggatgaacaggaagctctcaactcaatcatgaatgacctggtggccctacagatgaatcggaggcaccgcatgcccggatacgaaactatgaagaataaagacacaggacattcaaaccgccagaagaagcataatagtagctcatctgctctgctgaatagcccaaccgtcacaacttcatcttgtgctggcgctagcgagaagaaaaaatttctgagtgatgtccgaatcaagttcgaacacaacggcgagcggaggatcattgccttcagtaggcctgtgaaatacgaggacgtggaacataaggtaacaacagttttcggacaacctcttgatctgcattacatgaacaatgagctgtccatcctgttgaaaaaccaagacgatttagacaaggctatagatatcctcgaccgatcatcctcaatgaaatccctgcggattctgctgctctctcaggacaggaatcataattcttcttcaccccattctggtgtcagcaggcaggtcaggattaaggcatcccaaagtgccggtgacatcaataccatctaccagcccccagaacccagatcacgacacctaagcgtctcctcccagaaccccggtcgaagttctcctccgccaggttacgttccagagagacaacagcacattgcgaggcaagggagctacacctcgataaactcagagggggagtttatacctgagacctcggagcagtgtatgctggacccattgagctctgcagaaaattcactctccggttcttgtcagtcactggacaggtccgcggatagtcctagcttccgcaaatcacgcatgtcacgcgctcagtcctttccagacaaccgccaggaatattccgatcgagaaacccagctctacgataagggagtgaaagggggaacctacccacgtcgataccatgtgtctgtgcaccacaaagactactcagacggccgtcgcacgttcccaagaattcgacggcaccagggaaacctctttacactggtgccctcatcaagaagcctgagtactaatggagagaatatgggacttgccgtccagtaccttgatcccagagggaggcttcgctcggccgatagcgagaacgccctttctgtacaggagcgaaatgtacctaccaagagtccctccgcgcctattaactggaggcggggaaagcttctaggccagggcgcttttggcagagtgtacctctgctatgacgtggacacaggtagggaactcgcctccaagcaggtacaattcgaccctgattcccccgaaacatctaaagaggtgtctgctctggagtgtgaaattcagctgctgaaaaatttgcagcacgaacgtatcgtccaatattacggctgtctgcgggatagggctgagaaaactttgactatttttatggagtacatgcctggaggctcagtgaaagatcagcttaaagcctacggagcactgaccgaatcagttactcgtaagtacacccgccagatactggagggaatgagttatctgcactcaaacatgatagtgcaccgcgacataaagggggctaatatactccgggactctgccggaaacgtcaagctcggcgatttcggagctagcaaaagactccaaactatctgtatgtccggcaccggcatgagaagcgtcaccggaacgccctattggatgtccccagaagtgatctctggggagggctacggtcggaaagcggacgtctggagcctaggatgcaccgtagtggagatgttaacggaaaagccgccatgggctgagtatgaggccatggccgctattttcaaaatagcgacccagccaaccaaccctcagctgccctcgcacatcagcgagcacggcagagacttcctgagacggatattcgtggaggcaagacagcggcctagtgccgaggagcttctgactcaccatttcgcccagttgatgtattag

SEQ ID NO: 263007 - protein, 423 aa, Artificial Sequence
  derived and/or modified sequence
MDSFKVVLEGPAPWGFRLQGGKDFNVPLSISRLTPGGKAAQAGVAVGDWVLSIDGENAGSLTHIEAQNKIRACGERLSLGLSRAQPVQSKPQKVQTPDKQPLRPLVPDASKQRLMENTEDWRPRPGTGQSRSFRILAHLTGTEFMQDPDEEHLKKSSQVPRTEAPAPASSTPQEPWPGPTAPSPTSRPPWAVDPAFAERYAPDKTSTVLTRHSQPATPTPLQSRTSIVQAAAGGVPGGGSNNGKTPVCHQCHKVIRGRYLVALGHAYHPEEFVCSQCGKVLEEGGFFEEKGAIFCPPCYDVRYAPSCAKCKKKITGEIMHALKMTWHVHCFTCAACKTPIRNRAFYMEEGVPYCERDYEKMFGTKCHGCDFKIDAGDRFLEALGFSWHDTCFVCAICQINLEGKTFYSKKDRPLCKSHAFSHV

SEQ ID NO: 263008 - DNA, 1272 bp, Artificial Sequence
  derived and/or modified sequence
atggacagcttcaaggtggtgctggagggccccgccccctggggcttcagactgcagggcggcaaggacttcaacgtgcccctgagcatcagcagactgacccccggcggcaaggccgcccaggccggcgtggccgtgggcgactgggtgctgagcatcgacggcgagaacgccggcagcctgacccacatcgaggcccagaacaagatcagagcctgcggcgagagactgagcctgggcctgagcagagcccagcccgtgcagagcaagccccagaaggtgcagacccccgacaagcagcccctgagacccctggtgcccgacgccagcaagcagagactgatggagaacaccgaggactggagacccagacccggcaccggccagagcagaagcttcagaatcctggcccacctgaccggcaccgagttcatgcaggaccccgacgaggagcacctgaagaagagcagccaggtgcccagaaccgaggcccccgcccccgccagcagcaccccccaggagccctggcccggccccaccgcccccagccccaccagcagacccccctgggccgtggaccccgccttcgccgagagatacgcccccgacaagaccagcaccgtgctgaccagacacagccagcccgccacccccacccccctgcagagcagaaccagcatcgtgcaggccgccgccggcggcgtgcccggcggcggcagcaacaacggcaagacccccgtgtgccaccagtgccacaaggtgatcagaggcagatacctggtggccctgggccacgcctaccaccccgaggagttcgtgtgcagccagtgcggcaaggtgctggaggagggcggcttcttcgaggagaagggcgccatcttctgccccccctgctacgacgtgagatacgcccccagctgcgccaagtgcaagaagaagatcaccggcgagatcatgcacgccctgaagatgacctggcacgtgcactgcttcacctgcgccgcctgcaagacccccatcagaaacagagccttctacatggaggagggcgtgccctactgcgagagagactacgagaagatgttcggcaccaagtgccacggctgcgacttcaagatcgacgccggcgacagattcctggaggccctgggcttcagctggcacgacacctgcttcgtgtgcgccatctgccagatcaacctggagggcaagaccttctacagcaagaaggacagacccctgtgcaagagccacgccttcagccacgtgtag

SEQ ID NO: 263009 - DNA, 1272 bp, Artificial Sequence
  derived and/or modified sequence
atggactcgtttaaggtagtcttggagggacccgccccatgggggttcagactgcagggtggcaaggactttaatgtacccctgtctatctcacgcttgacaccgggaggcaaagcggcccaggccggggtagctgttggggattgggtgctgtcaatcgacggcgagaatgcaggctcattgacccatatcgaagctcagaacaaaattcgagcgtgtggcgaacggctcagcctcggcctgagtcgcgcacagcccgtccagtcgaaaccgcagaaggtgcaaactccagacaaacagcccttgaggccgctggtccccgacgcgagtaaacagcggctgatggagaataccgaagactggcgcccaagaccaggcacagggcagagccgttccttccgcatcctggcccatcttacaggcactgagtttatgcaggacccggatgaggaacacttgaagaaaagctcccaggtgccaaggaccgaggcacccgcaccagcttcctcaacacctcaggagccttggcccgggcctaccgctccatcacctactagtagaccaccttgggctgtcgatcccgccttcgcggaacggtatgctcctgacaagacaagtaccgtcctcacaaggcattcccagcccgctacacctacaccactgcagtctcgcacttctatcgtgcaagcagcagccggcggcgtgcccggcggcggctctaataatggcaagacccccgtgtgtcaccagtgtcacaaggtgatccggggaagatacctcgtggccctcgggcacgcttatcaccccgaagaatttgtttgttcccagtgtggaaaggtcctggaggagggtggattcttcgaggaaaaaggggccatcttctgcccaccttgctatgacgttaggtacgcaccctcgtgcgccaagtgtaaaaagaaaattactggcgagattatgcatgctctgaaaatgacctggcacgtgcattgttttacctgtgcagcatgcaagactccgatccgtaaccgcgccttctatatggaagaaggggtcccatattgcgaacgtgattatgaaaaaatgttcggcacgaagtgccacggatgcgacttcaagatcgacgcgggcgaccgatttctggaggccctgggatttagctggcacgatacgtgcttcgtctgcgctatttgtcagatcaatcttgagggaaagaccttttactccaagaaagaccgaccgctatgtaaatcacacgcatttagtcacgtgtag

SEQ ID NO: 263010 - DNA, 1272 bp, Artificial Sequence
  derived and/or modified sequence
atggacagcttcaaggtggtgctggagggccctgccccctggggcttccggctgcagggcggcaaggacttcaacgtgcccctgagcatcagccggctgaccccaggcggcaaggccgcccaggccggcgtggccgtgggggactgggtgctgagcattgatggagaaaatgccggcagcctgacccacatcgaggcccagaacaagatccgggcctgtggggagcggctgagcctgggcctgagccgggcccagcctgtgcagagcaagccccagaaggtgcagaccccagacaagcagcccctgcggcccctggtgcctgatgccagcaagcagaggctgatggagaacacagaggactggaggcccaggcctggcaccggccagagccgctccttccgcatcctggcccacctgaccggcacagagttcatgcaggaccctgatgaggagcacctgaagaagagcagccaggtgcccaggacagaggccccagccccagccagcagcaccccccaggagccctggccaggccccacagcccccagccccaccagccggcccccctgggccgtggaccctgcctttgctgagagatatgccccagacaagaccagcacagtgctgaccaggcacagccagcctgccacccccacccccctgcagagcaggaccagcatcgtgcaggccgccgccggcggcgtgcctgggggcggcagcaacaacgggaagacccctgtgtgccaccagtgccacaaggtgatccggggccgctacctggtggccctgggccacgcctaccaccctgaggagtttgtgtgcagccagtgtgggaaggtgctggaggagggcggcttctttgaggagaagggggccatcttctgccccccctgctatgatgtgcgctatgcccccagctgtgccaagtgcaagaagaagatcactggagagatcatgcacgccctgaagatgacctggcacgtgcactgcttcacctgtgccgcctgcaagacccccatccggaacagagccttctacatggaggagggcgtgccctactgtgagcgggactatgagaagatgtttggcaccaagtgccacggctgtgacttcaagattgatgctggggaccgcttcctggaggccctgggcttctcctggcatgacacctgctttgtgtgtgccatctgccagatcaacctggagggcaagaccttctacagcaagaaggaccggcccctgtgcaagagccacgccttcagccacgtgtag

SEQ ID NO: 263011 - DNA, 1272 bp, Artificial Sequence
  derived and/or modified sequence
atggacagcttcaaggtggtgctggagggccccgccccctggggcttcaggctgcagggaggcaaagactttaatgtacctctcagtattagcaggcttaccccagggggcaaggcagcacaggctggcgtggccgtgggggactgggtactgtcgattgatggagaaaacgcaggctccctgactcatattgaggctcaaaataagattcgggcttgtggtgaacggctatcacttggcctgagcagagcgcagccggtgcagagcaaacctcagaaggtccagacgccagacaaacaaccattgcgaccgctagtgcccgatgcgtcaaagcagcgtcttatggagaacacagaggactggagaccgcgacccgggactggccagtcacggtccttccgcattctggctcatctgaccgggactgagttcatgcaggatcccgatgaggagcacctcaaaaaatctagccaggtaccccgtacagaggcccctgccccagcaagtagtaccccgcaagaaccctggcccggccctacggccccatctcctacatccagacctccttgggcagtggatccagcctttgctgagcggtatgcccccgacaagacctctacagttcttacacggcacagccagccagccactcccacgcctctgcagagtcgcacaagtatcgtgcaggcagcagccggcggagtgcccggcggaggctctaacaatggaaagacgccggtttgtcaccagtgtcataaggtgattagagggcgctacctcgtcgcgctgggccatgcttatcacccagaagaattcgtgtgtagccaatgcggaaaagtgttggaagagggcggctttttcgaggagaaaggcgcaatcttctgccccccttgctatgacgtccgctacgcaccctcatgtgctaagtgcaagaagaagattaccggagaaatcatgcacgcattgaagatgacatggcacgtgcactgcttcacttgtgctgcatgtaaaaccccgattcggaacagagccttctacatggaagagggagtcccatattgcgaaagggactacgaaaaaatgttcgggaccaagtgtcatggatgcgattttaagattgacgctggagatcgcttcttggaggctcttggcttttcctggcacgacacttgctttgtttgcgcaatctgccaaatcaatcttgaaggtaagaccttctacagtaaaaaggacaggcctttgtgtaaaagccacgccttttctcacgtctag

SEQ ID NO: 263012 - DNA, 1272 bp, Artificial Sequence
  derived and/or modified sequence
atggattcttttaaagtcgtgctcgaagggcctgccccttgggggtttcgactccagggcggaaaggatttcaacgtgccattgtcgatatccagactcacccctggcggtaaagccgcacaggccggagtggccgtaggagactgggttctgtcgatcgacggggagaatgctggtagtctgactcacatagaggcacagaacaaaatccgggcatgtggagaacggttaagtctcgggctgtcacgcgctcagcctgtccaatctaaaccacagaaggtgcaaacccccgacaagcagcccctgaggcccctggtcccagacgcctccaagcagcgcctgatggaaaatacagaagattggagaccccgtcccggaactggtcagagtcggtccttccgcattttggcacacctgacgggtacggagtttatgcaggacccagacgaagaacatctgaaaaagagcagccaagtgccacgtacagaagctccagcaccagcctctagcaccccccaagagccctggccgggtcctactgctcctagccctacatccaggccaccatgggccgttgatccggcttttgcggaacggtatgctcctgataaaacgtccacagtgcttacgcggcattcccagcccgcaacccccacacctcttcagtccaggacgtcgatcgttcaagccgcagctgggggagtgcccggtggcggtagtaataacggaaaaactccagtgtgtcaccaatgtcacaaggtgattcggggacgatatctggtcgcccttggtcacgcctatcatcccgaagagttcgtgtgctcacagtgcgggaaagtgctcgaagaaggtggtttttttgaagaaaaaggcgcaattttctgtcccccatgctacgacgtgaggtatgccccatcttgtgctaagtgcaagaagaagatcacgggcgaaatcatgcacgcgttaaaaatgacgtggcatgtgcactgtttcacctgcgccgcatgcaaaacccccatacgaaatcgtgctttttatatggaggagggtgtaccctactgtgagcgggactacgagaagatgttcgggacaaagtgccatggatgtgacttcaagatcgacgctggagaccgctttcttgaggctctcggatttagctggcacgatacttgtttcgtctgcgctatctgtcaaatcaatcttgaaggcaagaccttctacagtaagaaggaccggcctctgtgtaagagtcacgcctttagtcacgtgtag

SEQ ID NO: 263013 - DNA, 1567 bp, Artificial Sequence
  derived and/or modified sequence
cgacgcagagcagcgccctggccgggccaagcaggagccggcatcatggattccttcaaagtagtgctggaggggccagcaccttggggcttccggctgcaagggggcaaggacttcaatgtgcccctctccatttcccggctcactcctgggggcaaagcggcgcaggccggagtggccgtgggtgactgggtgctgagcatcgatggcgagaatgcgggtagcctcacacacatcgaagctcagaacaagatccgggcctgcggggagcgcctcagcctgggcctcagcagggcccagccggttcagagcaaaccgcagaaggtgcagacccctgacaaacagccgctccgaccgctggtcccagatgccagcaagcagcggctgatggagaacacagaggactggcggccgcggccggggacaggccagtcgcgttccttccgcatccttgcccacctcacaggcaccgagttcatgcaagacccggatgaggagcacctgaagaaatcaagccaggtgcccaggacagaagccccagccccagcctcatctacaccccaggagccctggcctggccctaccgcccccagccctaccagccgcccgccctgggctgtggaccctgcgtttgccgagcgctatgccccggacaaaacgagcacagtgctgacccggcacagccagccggccacgcccacgccgctgcagagccgcacctccattgtgcaggcagctgccggaggggtgccaggagggggcagcaacaacggcaagactcccgtgtgtcaccagtgccacaaggtcatccggggccgctacctggtggcgctgggccacgcgtaccacccggaggagtttgtgtgtagccagtgtgggaaggtcctggaagagggtggcttctttgaggagaagggcgccatcttctgcccaccatgctatgacgtgcgctatgcacccagctgtgccaagtgcaagaagaagattacaggcgagatcatgcacgccctgaagatgacctggcacgtgcactgctttacctgtgctgcctgcaagacgcccatccggaacagggccttctacatggaggagggcgtgccctattgcgagcgagactatgagaagatgtttggcacgaaatgccatggctgtgacttcaagatcgacgctggggaccgcttcctggaggccctgggcttcagctggcatgacacctgcttcgtctgtgcgatatgtcagatcaacctggaaggaaagaccttctactccaagaaggacaggcctctctgcaagagccatgccttctctcatgtgtgagccccttctgcccacagctgccgcggtggcccctagcctgaggggcctggagtcgtggccctgcatttctgggtagggctggcaatggttgccttaaccctggctcctggcccgagcctggggctccctgggccctgccccacccaccttatcctcccaccccactccctccaccaccacagcacaccggtgctggccacaccagccccctttcacctccagtgccacaataaacctgtacccagctgtg

SEQ ID NO: 263014 - protein, 792 aa, Artificial Sequence
  derived and/or modified sequence
MELKSPEEEVVAALPEGMRPDSNLYGFPWELVICAAVVGFFAVLFFLWRSFRSVRSRLYVGREKKLALMLSGLIEEKSKLLEKFSLVQKEYEGYEVESSLKDASFEKEATEAQSLEATCEKLNRSNSELEDEILCLEKELKEEKSKHSEQDELMADISKRIQSLEDESKSLKSQVAEAKMTFKIFQMNEERLKIAIKDALNENSQLQESQKQLLQEAEVWKEQVSELNKQKVTFEDSKVHAEQVLNDKESHIKTLTERLLKMKDWAAMLGEDITDDDNLELEMNSESENGAYLDNPPKGALKKLIHAAKLNASLKTLEGERNQIYIQLSEVDKTKEELTEHIKNLQTEQASLQSENTHFENENQKLQQKLKVMTELYQENEMKLHRKLTVEENYRLEKEEKLSKVDEKISHATEELETYRKRAKDLEEELERTIHSYQGQIISHEKKAHDNWLAARNAERNLNDLRKENAHNRQKLTETELKFELLEKDPYALDVPNTAFGREHSPYGPSPLGWPSSETRAFLSPPTLLEGPLRLSPLLPGGGGRGSRGPGNPLDHQITNERGESSCDRLTDPHRAPSDTGSLSPPWDQDRRMMFPPPGQSYPDSALPPQRQDRFCSNSGRLSGPAELRSFNMPSLDKMDGSMPSEMESSRNDTKDDLGNLNVPDSSLPAENEATGPGFVPPPLAPIRGPLFPVDARGPFLRRGPPFPPPPPGAMFGASRDYFPPGDFPGPPPAPFAMRNVYPPRGFPPYLPPRPGFFPPPPHSEGRSEFPSGLIPPSNEPATEHPEPQQET

SEQ ID NO: 263015 - protein, 672 aa, Artificial Sequence
  derived and/or modified sequence
MELKSPEEEVVAALPEGMRPDSNLYGFPWELVICAAVVGFFAVLFFLWRSFRSVRSRLYVGREKKLALMLSGLIEEKSKLLEKFSLVQKEATCEKLNRSNSELEDEILCLEKELKEEKSKHSEQDELMADISKRIQSLEDESKSLKSQVAEAKMTFKIFQMNEERLKIAIKDALNENSQLQESQKQLLQEAEVWKEQVSELNKQKVTFEDSKVHAEQVLNDKESHIKTLTERLLKMKDWAAMLGEDITDDDNLELEMNSESENGAYLDNPPKGALKKLIHAAKLNASLKTLEGERNQIYIQLSEVDKTKEELTEHIKNLQTEQASLQSENTHFENENQKLQQKLKVMTELYQENEMKLHRKLTVEENYRLEKEEKLSKVDEKISHATEELETYRKRAKDLEEELERTIHSYQGQIISHEKKAHDNWLAARNAERNLNDLRKENAHNRQKLTETELKFELLEKDPYALDVPNTAFGREHSPYGPSPLGWPSSETRAFLSPPTLLEGPLRLSPLLPGGGGRGSRGPGNPLDHQITNERGESSCDRLTDPHRAPSDTGSLSPPWDQDRRMMFPPPGQSYPDSALPPQRQDRFCSNSGRLSGPAELRSFNMPPGPPPAPFAMRNVYPPRGFPPYLPPRPGFFPPPPHSEGRSEFPSGLIPPSNEPATEHPEPQQET

SEQ ID NO: 263016 - protein, 775 aa, Artificial Sequence
  derived and/or modified sequence
MRPDSNLYGFPWELVICAAVVGFFAVLFFLWRSFRSVRSRLYVGREKKLALMLSGLIEEKSKLLEKFSLVQKEYEGYEVESSLKDASFEKEATEAQSLEATCEKLNRSNSELEDEILCLEKELKEEKSKHSEQDELMADISKRIQSLEDESKSLKSQVAEAKMTFKIFQMNEERLKIAIKDALNENSQLQESQKQLLQEAEVWKEQVSELNKQKVTFEDSKVHAEQVLNDKESHIKTLTERLLKMKDWAAMLGEDITDDDNLELEMNSESENGAYLDNPPKGALKKLIHAAKLNASLKTLEGERNQIYIQLSEVDKTKEELTEHIKNLQTEQASLQSENTHFENENQKLQQKLKVMTELYQENEMKLHRKLTVEENYRLEKEEKLSKVDEKISHATEELETYRKRAKDLEEELERTIHSYQGQIISHEKKAHDNWLAARNAERNLNDLRKENAHNRQKLTETELKFELLEKDPYALDVPNTAFGREHSPYGPSPLGWPSSETRAFLSPPTLLEGPLRLSPLLPGGGGRGSRGPGNPLDHQITNERGESSCDRLTDPHRAPSDTGSLSPPWDQDRRMMFPPPGQSYPDSALPPQRQDRFCSNSGRLSGPAELRSFNMPSLDKMDGSMPSEMESSRNDTKDDLGNLNVPDSSLPAENEATGPGFVPPPLAPIRGPLFPVDARGPFLRRGPPFPPPPPGAMFGASRDYFPPGDFPGPPPAPFAMRNVYPPRGFPPYLPPRPGFFPPPPHSEGRSEFPSGLIPPSNEPATEHPEPQQET

SEQ ID NO: 263017 - DNA, 2379 bp, Artificial Sequence
  derived and/or modified sequence
atggagctgaagagccccgaggaggaggtggtggccgccctgcccgagggcatgagacccgacagcaacctgtacggcttcccctgggagctggtgatctgcgccgccgtggtgggcttcttcgccgtgctgttcttcctgtggagaagcttcagaagcgtgagaagcagactgtacgtgggcagagagaagaagctggccctgatgctgagcggcctgatcgaggagaagagcaagctgctggagaagttcagcctggtgcagaaggagtacgagggctacgaggtggagagcagcctgaaggacgccagcttcgagaaggaggccaccgaggcccagagcctggaggccacctgcgagaagctgaacagaagcaacagcgagctggaggacgagatcctgtgcctggagaaggagctgaaggaggagaagagcaagcacagcgagcaggacgagctgatggccgacatcagcaagagaatccagagcctggaggacgagagcaagagcctgaagagccaggtggccgaggccaagatgaccttcaagatcttccagatgaacgaggagagactgaagatcgccatcaaggacgccctgaacgagaacagccagctgcaggagagccagaagcagctgctgcaggaggccgaggtgtggaaggagcaggtgagcgagctgaacaagcagaaggtgaccttcgaggacagcaaggtgcacgccgagcaggtgctgaacgacaaggagagccacatcaagaccctgaccgagagactgctgaagatgaaggactgggccgccatgctgggcgaggacatcaccgacgacgacaacctggagctggagatgaacagcgagagcgagaacggcgcctacctggacaacccccccaagggcgccctgaagaagctgatccacgccgccaagctgaacgccagcctgaagaccctggagggcgagagaaaccagatctacatccagctgagcgaggtggacaagaccaaggaggagctgaccgagcacatcaagaacctgcagaccgagcaggccagcctgcagagcgagaacacccacttcgagaacgagaaccagaagctgcagcagaagctgaaggtgatgaccgagctgtaccaggagaacgagatgaagctgcacagaaagctgaccgtggaggagaactacagactggagaaggaggagaagctgagcaaggtggacgagaagatcagccacgccaccgaggagctggagacctacagaaagagagccaaggacctggaggaggagctggagagaaccatccacagctaccagggccagatcatcagccacgagaagaaggcccacgacaactggctggccgccagaaacgccgagagaaacctgaacgacctgagaaaggagaacgcccacaacagacagaagctgaccgagaccgagctgaagttcgagctgctggagaaggacccctacgccctggacgtgcccaacaccgccttcggcagagagcacagcccctacggccccagccccctgggctggcccagcagcgagaccagagccttcctgagcccccccaccctgctggagggccccctgagactgagccccctgctgcccggcggcggcggcagaggcagcagaggccccggcaaccccctggaccaccagatcaccaacgagagaggcgagagcagctgcgacagactgaccgacccccacagagcccccagcgacaccggcagcctgagccccccctgggaccaggacagaagaatgatgttccccccccccggccagagctaccccgacagcgccctgcccccccagagacaggacagattctgcagcaacagcggcagactgagcggccccgccgagctgagaagcttcaacatgcccagcctggacaagatggacggcagcatgcccagcgagatggagagcagcagaaacgacaccaaggacgacctgggcaacctgaacgtgcccgacagcagcctgcccgccgagaacgaggccaccggccccggcttcgtgcccccccccctggcccccatcagaggccccctgttccccgtggacgccagaggccccttcctgagaagaggcccccccttccccccccccccccccggcgccatgttcggcgccagcagagactacttcccccccggcgacttccccggccccccccccgcccccttcgccatgagaaacgtgtacccccccagaggcttccccccctacctgccccccagacccggcttcttccccccccccccccacagcgagggcagaagcgagttccccagcggcctgatcccccccagcaacgagcccgccaccgagcaccccgagccccagcaggagacctag

SEQ ID NO: 263018 - DNA, 2019 bp, Artificial Sequence
  derived and/or modified sequence
atggagctgaagagccccgaggaggaggtggtggccgccctgcccgagggcatgagacccgacagcaacctgtacggcttcccctgggagctggtgatctgcgccgccgtggtgggcttcttcgccgtgctgttcttcctgtggagaagcttcagaagcgtgagaagcagactgtacgtgggcagagagaagaagctggccctgatgctgagcggcctgatcgaggagaagagcaagctgctggagaagttcagcctggtgcagaaggaggccacctgcgagaagctgaacagaagcaacagcgagctggaggacgagatcctgtgcctggagaaggagctgaaggaggagaagagcaagcacagcgagcaggacgagctgatggccgacatcagcaagagaatccagagcctggaggacgagagcaagagcctgaagagccaggtggccgaggccaagatgaccttcaagatcttccagatgaacgaggagagactgaagatcgccatcaaggacgccctgaacgagaacagccagctgcaggagagccagaagcagctgctgcaggaggccgaggtgtggaaggagcaggtgagcgagctgaacaagcagaaggtgaccttcgaggacagcaaggtgcacgccgagcaggtgctgaacgacaaggagagccacatcaagaccctgaccgagagactgctgaagatgaaggactgggccgccatgctgggcgaggacatcaccgacgacgacaacctggagctggagatgaacagcgagagcgagaacggcgcctacctggacaacccccccaagggcgccctgaagaagctgatccacgccgccaagctgaacgccagcctgaagaccctggagggcgagagaaaccagatctacatccagctgagcgaggtggacaagaccaaggaggagctgaccgagcacatcaagaacctgcagaccgagcaggccagcctgcagagcgagaacacccacttcgagaacgagaaccagaagctgcagcagaagctgaaggtgatgaccgagctgtaccaggagaacgagatgaagctgcacagaaagctgaccgtggaggagaactacagactggagaaggaggagaagctgagcaaggtggacgagaagatcagccacgccaccgaggagctggagacctacagaaagagagccaaggacctggaggaggagctggagagaaccatccacagctaccagggccagatcatcagccacgagaagaaggcccacgacaactggctggccgccagaaacgccgagagaaacctgaacgacctgagaaaggagaacgcccacaacagacagaagctgaccgagaccgagctgaagttcgagctgctggagaaggacccctacgccctggacgtgcccaacaccgccttcggcagagagcacagcccctacggccccagccccctgggctggcccagcagcgagaccagagccttcctgagcccccccaccctgctggagggccccctgagactgagccccctgctgcccggcggcggcggcagaggcagcagaggccccggcaaccccctggaccaccagatcaccaacgagagaggcgagagcagctgcgacagactgaccgacccccacagagcccccagcgacaccggcagcctgagccccccctgggaccaggacagaagaatgatgttccccccccccggccagagctaccccgacagcgccctgcccccccagagacaggacagattctgcagcaacagcggcagactgagcggccccgccgagctgagaagcttcaacatgccccccggccccccccccgcccccttcgccatgagaaacgtgtacccccccagaggcttccccccctacctgccccccagacccggcttcttccccccccccccccacagcgagggcagaagcgagttccccagcggcctgatcccccccagcaacgagcccgccaccgagcaccccgagccccagcaggagacctag

SEQ ID NO: 263019 - DNA, 2912 bp, Artificial Sequence
  derived and/or modified sequence
gagtgcaggatatattagaatctgaaatctttctcaaggatatgaggtgcctggtagaactttatttacatgttaggaaattttaacatgagcttttcaagaaatggaattgaaaagtccagaggaagaggttgtggcagcactgcctgaaggtatgagaccagattctaatctttatggttttccatgggaattggtgatatgtgcagctgttgttggattttttgctgttctcttttttttgtggagaagttttagatcggttaggagtcggctttatgtgggacgagagaaaaagcttgctctaatgctttctggactaattgaagaaaaaagtaaactacttgaaaaatttagccttgttcaaaaagagtatgaaggctatgaagtagagtcatctttaaaggatgccagctttgagaaggaggcaacagaagcacaaagtttggaggcaacctgtgaaaagctgaacaggtccaattctgaacttgaggatgaaatactctgtctagaaaaagagttaaaagaagagaaatccaaacattctgaacaagatgaattgatggcggatatttcaaaaaggatacagtctctagaagatgagtcaaaatccctcaaatcacaagtagctgaagccaaaatgaccttcaagatatttcaaatgaatgaagaacgactgaagatagcaataaaagatgctttgaatgaaaattctcaacttcaggaaagccagaaacagcttttgcaagaagctgaagtatggaaagaacaagtgagtgaacttaataaacagaaagtaacatttgaagactccaaagtacatgcagaacaagttctaaatgataaagaaagtcacatcaagactctgactgaacgcttgttaaagatgaaagattgggctgctatgcttggagaagacataacggatgatgataacttggaattagaaatgaacagtgaatcggaaaatggtgcttacttagataatcctccaaaaggagctttgaagaaactgattcatgctgctaagttaaatgcttctttaaaaaccttagaaggagaaagaaaccaaatttatattcagttgtctgaagttgataaaacaaaggaagagcttacagagcatattaaaaatcttcagactgaacaagcatctttgcagtcagaaaacacacattttgaaaatgagaatcagaagcttcaacagaaacttaaagtaatgactgaattatatcaagaaaatgaaatgaaactccacaggaaattaacagtagaggaaaattatcggttagagaaagaagagaaactttctaaagtagatgaaaagatcagccatgccactgaagagctggagacctatagaaagcgagccaaagatcttgaagaagaattggagagaactattcattcttatcaagggcagattatttcccatgagaaaaaagcacatgataattggttggcagctcggaatgctgaaagaaacctcaatgatttaaggaaagaaaatgctcacaacagacaaaaattaactgaaacagagcttaaatttgaacttttagaaaaagatccttatgcactcgatgttccaaatacagcatttggcagagagcattccccatatggtccctcaccattgggttggccttcatctgaaacaagagcttttctctctcctccaactttgttggagggtccactcagactctcacctttgcttccagggggaggaggaagaggctcacgaggcccagggaatcctctggaccatcagattaccaatgaaagaggagaatcaagctgtgataggttaaccgatcctcatagggctccctctgacactgggtctctgtcacctccatgggaccaggaccgtaggatgatgtttcctccgccaggacaatcatatcctgattcagcccttcctccacaaaggcaagacagattttgttctaattctggtagactgtctggaccagcagaactcagaagttttaatatgccttctttggataaaatggatgggtcaatgccttcagaaatggaatccagtagaaatgataccaaagatgatcttggtaatttaaatgtgcctgattcatctctccctgctgaaaatgaagccactggccctggctttgttcctccacctcttgctccaatcagaggtccattgtttccagtggatgcaagaggcccattcttgagaagaggacctcctttccccccacctcctccaggagccatgtttggagcttctcgagattattttccaccaggggatttcccaggtccaccacctgctccatttgcaatgagaaatgtctatccaccgaggggttttcctccttaccttcccccaagacctggatttttccccccacccccacattctgaaggtagaagtgagttcccctcaggtttgattccaccttcaaatgagcctgctactgaacatccagaaccacagcaagaaacctgacaatatttttgctctcttcaaaagtaattttgactgatctcattttcagtttaagtaactgctgttacttaagtgattacacttttgctcaaattgaagcttaatggaattataattctcaggatagtattttgtaaataaagatgatttaaatatgaatcttatgagtaaattatttcaattttattttagacggtataactatttcaatttgattaatccactattatataaacaatagtgggagttttatatatgtaatctttcaggtggggaggctttaaattctgaagtctgtgtctttatgccaagaactgtatttactgtggttgtggacaaatgtgaaagtaactttatgcttaaataaattatagttgatttaaagatttgtttggcattgataataataaaatcagtagtttttctataa

SEQ ID NO: 263020 - DNA, 2948 bp, Artificial Sequence
  derived and/or modified sequence
atggaattgaaaagtccagaggaagaggttgtggcagcactgcctgaaggtatgagaccagattctaatctttatggttttccatgggaattggtgatatgtgcagctgttgttggattttttgctgttctcttttttttgtggagaagttttagatcggttaggagtcggctttatgtgggacgagagaaaaagcttgctctaatgctttctggactaattgaagaaaaaagtaaactacttgaaaaatttagccttgttcaaaaagaggcaacctgtgaaaagctgaacaggtccaattctgaacttgaggatgaaatactctgtctagaaaaagagttaaaagaagagaaatccaaacattctgaacaagatgaattgatggcggatatttcaaaaaggatacagtctctagaagatgagtcaaaatccctcaaatcacaagtagctgaagccaaaatgaccttcaagatatttcaaatgaatgaagaacgactgaagatagcaataaaagatgctttgaatgaaaattctcaacttcaggaaagccagaaacagcttttgcaagaagctgaagtatggaaagaacaagtgagtgaacttaataaacagaaagtaacatttgaagactccaaagtacatgcagaacaagttctaaatgataaagaaagtcacatcaagactctgactgaacgcttgttaaagatgaaagattgggctgctatgcttggagaagacataacggatgatgataacttggaattagaaatgaacagtgaatcggaaaatggtgcttacttagataatcctccaaaaggagctttgaagaaactgattcatgctgctaagttaaatgcttctttaaaaaccttagaaggagaaagaaaccaaatttatattcagttgtctgaagttgataaaacaaaggaagagcttacagagcatattaaaaatcttcagactgaacaagcatctttgcagtcagaaaacacacattttgaaaatgagaatcagaagcttcaacagaaacttaaagtaatgactgaattatatcaagaaaatgaaatgaaactccacaggaaattaacagtagaggaaaattatcggttagagaaagaagagaaactttctaaagtagatgaaaagatcagccatgccactgaagagctggagacctatagaaagcgagccaaagatcttgaagaagaattggagagaactattcattcttatcaagggcagattatttcccatgagaaaaaagcacatgataattggttggcagctcggaatgctgaaagaaacctcaatgatttaaggaaagaaaatgctcacaacagacaaaaattaactgaaacagagcttaaatttgaacttttagaaaaagatccttatgcactcgatgttccaaatacagcatttggcagagagcattccccatatggtccctcaccattgggttggccttcatctgaaacaagagcttttctctctcctccaactttgttggagggtccactcagactctcacctttgcttccagggggaggaggaagaggctcacgaggcccagggaatcctctggaccatcagattaccaatgaaagaggagaatcaagctgtgataggttaaccgatcctcatagggctccctctgacactgggtctctgtcacctccatgggaccaggaccgtaggatgatgtttcctccgccaggacaatcatatcctgattcagcccttcctccacaaaggcaagacagattttgttctaattctggtagactgtctggaccagcagaactcagaagttttaatatgcctcctggtccaccacctgctccatttgcaatgagaaatgtctatccaccgaggggttttcctccttaccttcccccaagacctggatttttccccccacccccacattctgaaggtagaagtgagttcccctcaggtttgattccaccttcaaatgagcctgctactgaacatccagaaccacagcaagaaacctgacaatatttttgctctcttcaaaagtaattttgactgatctcattttcagtttaagtaactgctgttacttaagtgattacacttttgctcaaattgaagcttaatggaattataattctcaggatagtattttgtaaataaagatgatttaaatatgaatcttatgagtaaattatttcaattttattttagacggtataactatttcaatttgattaatccactattatataaacaatagtgggagttttatatatgtaatctttcaggtggggaggctttaaattctgaagtctgtgtctttatgccaagaactgtatttactgtggttgtggacaaatgtgaaagtaactttatgcttaaataaattatagttgatttaaagatttgtttggcattgataataataaaatcagtagtttttctataactatggctctattaacttttttccttttaccaataactttgaggtgcaaaactcaaacttatgtgggtcttttgtgttcaattatgttatgacaaatgtgctctctttcttgtaaatagacatgagtggcccaaagcaacaaattaatacacttttaaaagtcaaaattgattatattttaaagataaccaggatattatctaatggtgaattgtagaattttgatcttcttattcactgagtttcttgcacggtttctttattgcttttttttccccgcctgttcttttgtaaggtatttactattttctgtggaggatattgagatgtactacaggataactgtagtgaatgatgtgtcatcattttgagctttggactcaatatctttagtgtttccctaaatcagatttgtaggtcatgttaagcttcttgcacattaatatgattatggaaggaaaggcagtgaagcataactaataaacatcataatacttaa

SEQ ID NO: 263021 - DNA, 2379 bp, Artificial Sequence
  derived and/or modified sequence
atggagctgaaatcacctgaggaagaggttgtggccgctctaccggagggcatgagacctgactctaacctatatggctttccttgggagttggtgatctgtgctgccgtcgtgggatttttcgcggtcctattttttctctggcgttcttttcgctcagtgcggtcacgtctgtatgtcggccgggaaaagaagctagccttaatgttatctggcttgattgaagagaagtccaagttgctggagaagttttcccttgtgcagaaggagtacgagggctatgaggtggaatccagcttaaaggatgccagctttgagaaggaggccactgaagctcagtcactggaggccacctgcgaaaagctcaaccggtcaaacagcgagctggaggacgagatcctgtgtttggaaaaggagctcaaggaagaaaagtctaaacactccgagcaggacgaactcatggcagatatctctaagagaatccagagtctagaagacgagagcaagtcactgaaatcccaagttgccgaagcaaaaatgacattcaaaattttccaaatgaatgaggaaagactgaaaatcgctatcaaagatgcgttgaacgaaaattcccagctgcaggagagccaaaagcagctcctgcaggaagctgaggtttggaaggagcaggtgtctgagctgaacaaacagaaggtaacgtttgaagactcaaaggtgcacgcagaacaagtgctgaacgataaggagagtcatattaagacattgactgagagactgctaaaaatgaaagactgggccgctatgctgggggaagatatcaccgatgacgataatctggagttagagatgaattcagaatccgaaaacggagcgtatctcgataacccccccaagggagcattaaaaaaacttattcatgctgccaaactgaacgcctcgttaaagactctggagggcgagagaaaccagatctacatccaactgtccgaggttgacaaaacgaaagaggagttgaccgaacatatcaaaaatctccaaaccgaacaagccagtcttcagtctgaaaatacacacttcgaaaatgaaaaccaaaagttgcagcagaagctaaaggttatgacagaactctaccaggaaaacgagatgaaactgcaccggaaacttacagtggaggaaaactatcgacttgaaaaggaggagaaactttcgaaggtggatgaaaaaatctcccacgctactgaggaactggagacctacagaaagagagcaaaggatctggaggaggagctggagcgtacgatccatagctaccagggtcagatcatctcccacgagaaaaaggctcacgacaactggctggctgccagaaatgcagaaagaaacttgaacgatctgcgcaaagagaatgcccataataggcagaaactcaccgagacagagcttaagttcgaactcttagagaaagatccttatgccctggacgtgcccaacacagcctttggcagagagcatagcccgtatggccctagcccactcgggtggccatcctccgagacccgggctttcctgtcaccccctaccttgctcgagggtcccctgaggctgtcacccctgctcccaggcgggggcggcaggggctcgagagggccaggtaatccactcgatcatcaaataacaaacgaaagaggagagtcttcatgcgatcgcctgacagacccccacagagcccctagtgataccggttcattgagccctccgtgggatcaggatcggaggatgatgttccccccccccggccagagctaccctgacagtgcattgccacctcagcggcaggatcgtttttgttcaaactcagggagactgagcggccctgccgagctgagatctttcaacatgcccagtttggacaaaatggatgggagcatgccatctgagatggagtcctcaaggaatgatactaaagatgatctagggaatttaaacgttcccgatagttccttgccagcggagaacgaggctacggggcctggcttcgtcccaccacccctcgccccaatccgaggtcctttgtttccggtcgatgcccgcggacctttccttcggcgcgggccgccattccccccacctcctcccggagctatgttcggggctagcagggactactttcctcctggtgattttcctgggcctcctccggctcccttcgccatgcgaaacgtgtatcccccacgcggcttcccaccgtacctacccccccgccccggcttcttccctccgcccccgcatagcgaaggccggagtgaattcccttccggcctcattcctcccagcaatgagccagcaacggaacacccagaaccccaacaggaaacatag

SEQ ID NO: 263022 - DNA, 2019 bp, Artificial Sequence
  derived and/or modified sequence
atggagttaaaaagccctgaggaggaggtcgttgccgctctcccggagggcatgaggcccgatagtaacctgtacggatttccttgggaacttgtcatctgcgctgcggtcgtagggttttttgcagtgctcttttttctgtggaggagttttaggtctgtgagaagtcggctgtatgtaggtcgtgaaaagaaactcgcactgatgttgtcaggcctaattgaagagaagtccaagttgctcgaaaagttttcgctggtccagaaggaagcaacctgcgaaaagctcaaccgatcgaacagtgagctggaagatgagatcctgtgcctggagaaagagctgaaagaggagaagtctaaacacagcgaacaggacgaattgatggcagatatctcaaagcgtattcagagtctggaagacgagagcaaatccctgaagagccaggtcgcggaagcaaaaatgacattcaagatcttccaaatgaacgaagagcgacttaaaatagcaatcaaggacgccctgaacgaaaacagtcagctgcaggagtcccagaagcagctgttgcaggaagccgaggtgtggaaggagcaagtcagtgaactgaacaagcagaaggtcacttttgaagactctaaggtccacgcagaacaggtacttaacgataaggagtcccatataaaaaccttgaccgagcgccttctgaagatgaaggactgggcagccatgctgggggaggatatcaccgacgacgataatctggagcttgaaatgaactccgagtccgagaacggagcttacttggacaacccccctaaaggagctcttaaaaagttgattcatgctgccaagcttaatgcttctctgaaaaccctcgagggcgaacgaaaccagatatatatacagctgagtgaggtagataaaactaaggaggagcttacagaacacattaagaacctacagacagagcaggcttccttacagtcggagaacacacacttcgagaatgagaatcagaaactccagcagaagctgaaggtcatgaccgagctataccaagaaaatgaaatgaagctccaccggaagttgacagtggaagaaaattaccgtttagagaaagaggaaaaactgtcaaaagtcgatgaaaaaatctctcacgccaccgaagaacttgagacgtacagaaaaagagctaaggacttagaggaagaattggaaagaacaatccactcctaccagggccagataatctctcacgagaaaaaggctcacgataactggctcgccgcccggaatgccgagcgtaacctcaacgacctgcggaaggaaaacgcccacaatcggcagaagttgaccgagacggaactgaaatttgaattattagaaaaagatccttatgcacttgacgtgcccaatacagccttcggccgggagcatagcccctatggacccagtcccctcggatggccatctagtgagacaagagcctttctctcaccaccgacgctcttagaggggcctttaaggttgtcgccactcctgccaggggggggtgggaggggctctcgcggtcccgggaacccacttgaccaccagatcaccaacgagcgcggtgagagtagctgtgaccggcttaccgatccccaccgggccccaagcgataccgggtcactttcccccccgtgggaccaggataggcggatgatgttcccaccccctggacagagctatccagacagcgccctgccgccacagcgtcaggatcggttttgtagcaactcagggcgactgtcagggccagccgaactgcgttcctttaacatgccaccaggaccccccccagctccattcgccatgcgtaatgtgtatcctccccgtggcttcccaccctaccttccccctcgcccaggtttctttccccccccgccccatagcgaaggtcgcagtgaattccccagtgggctcatccccccctccaacgagcccgccactgagcatccagagccacaacaagaaacgtag

SEQ ID NO: 263023 - DNA, 2379 bp, Artificial Sequence
  derived and/or modified sequence
atggagctgaagagccctgaggaggaggtggtggccgccctgcctgagggcatgaggccagacagcaacctgtatggcttcccctgggagctggtgatctgtgccgctgtggtgggcttctttgctgtgctcttcttcctgtggaggagcttccgctctgtgcgcagccggctgtatgtgggccgggagaagaagctggccctgatgctgagcggcctcatcgaggagaagagcaagctgctggagaagttcagcctggtgcagaaggagtatgagggctatgaggtggagagcagcctgaaggatgccagctttgagaaggaggccacagaggcccagagcctggaggccacctgtgagaagctgaacagaagcaacagcgagctggaggatgagatcctgtgcctggagaaggagctgaaggaggagaagagcaagcacagcgagcaggatgagctgatggctgacatcagcaagaggatccagagcctggaggatgagagcaagagcctgaagagccaggtggccgaggccaagatgaccttcaagatcttccagatgaatgaggagcggctgaagatcgccatcaaggatgccctgaatgaaaacagccagctgcaggagagccagaagcagctgctgcaggaggccgaggtgtggaaggagcaggtgtctgagctgaacaagcagaaggtgacctttgaggacagcaaggtgcatgctgagcaggtgctgaatgacaaggagagccacatcaagaccctgacagagcggctgctgaagatgaaggactgggccgccatgctgggggaggacatcacagatgatgacaacctggagctggagatgaacagcgagagtgaaaatggagcctacctggacaacccccccaagggggccctgaagaagctgattcatgctgccaagctgaatgccagcctgaagaccctggagggggagaggaaccagatctacatccagctgtctgaggtggacaagaccaaggaggagctgacagagcacatcaagaacctgcagacagagcaggccagcctgcagagcgagaacacccactttgaaaatgaaaaccagaagctgcagcagaagctgaaggtgatgacagagctgtaccaggagaatgagatgaagctgcacaggaagctgactgtggaggagaactaccgcctggagaaggaggagaagctgagcaaggtggatgagaagatcagccacgccacagaggagctggagacctacaggaagagggccaaggacctggaggaggagctggagaggaccatccacagctaccagggccagatcatcagccatgagaagaaggcccatgacaactggctggccgccagaaatgctgagaggaacctgaatgacctgaggaaagaaaatgcccacaaccggcagaagctgacagaaacagagctgaagtttgagctgctggagaaggacccctatgccctggatgtgcccaacacagccttcggccgggagcacagcccctacggccccagccccctgggctggcccagcagcgagacccgggccttcctgagcccccccaccctgctggagggccccctgcggctgagccccctgctgcccggcggcggcggccggggcagccggggccctggcaaccccctggaccaccagatcaccaatgaaagaggagagagcagctgtgaccggctgacagacccccaccgggcccccagcgacaccggcagcctgagccccccctgggaccaggacaggaggatgatgttccccccacctggccagagctacccagattctgccctgcccccccagaggcaggaccgcttctgcagcaacagcggccgcctgagcggccctgctgagctgcggagcttcaacatgcccagcctggacaagatggatggctccatgcccagcgagatggagagcagcagaaatgacaccaaggatgacctgggcaacctgaatgtgcctgacagcagcctgcctgcagaaaatgaggccactggacctggctttgtgcccccacccctggcccccatccggggccccctcttccctgtggatgcccggggccccttcctgcggcggggcccccccttccccccacctcctcctggggccatgtttggagccagccgggactacttccccccaggggacttccctggccccccaccagccccctttgccatgagaaatgtgtacccaccccggggcttccccccctacctgccccccaggcctggcttcttccccccaccaccccacagcgagggccgctctgagttccccagcggcctcatcccccccagcaatgaaccagccacagagcaccctgagccccagcaggagacctag

SEQ ID NO: 263024 - DNA, 2019 bp, Artificial Sequence
  derived and/or modified sequence
atggagctgaagagccctgaggaggaggtggtggccgccctgcctgagggcatgaggccagacagcaacctgtatggcttcccctgggagctggtgatctgtgccgctgtggtgggcttctttgctgtgctcttcttcctgtggaggagcttccgctctgtgcgcagccggctgtatgtgggccgggagaagaagctggccctgatgctgagcggcctcatcgaggagaagagcaagctgctggagaagttcagcctggtgcagaaggaggccacctgtgagaagctgaacagaagcaacagcgagctggaggatgagatcctgtgcctggagaaggagctgaaggaggagaagagcaagcacagcgagcaggatgagctgatggctgacatcagcaagaggatccagagcctggaggatgagagcaagagcctgaagagccaggtggccgaggccaagatgaccttcaagatcttccagatgaatgaggagcggctgaagatcgccatcaaggatgccctgaatgaaaacagccagctgcaggagagccagaagcagctgctgcaggaggccgaggtgtggaaggagcaggtgtctgagctgaacaagcagaaggtgacctttgaggacagcaaggtgcatgctgagcaggtgctgaatgacaaggagagccacatcaagaccctgacagagcggctgctgaagatgaaggactgggccgccatgctgggggaggacatcacagatgatgacaacctggagctggagatgaacagcgagagtgaaaatggagcctacctggacaacccccccaagggggccctgaagaagctgattcatgctgccaagctgaatgccagcctgaagaccctggagggggagaggaaccagatctacatccagctgtctgaggtggacaagaccaaggaggagctgacagagcacatcaagaacctgcagacagagcaggccagcctgcagagcgagaacacccactttgaaaatgaaaaccagaagctgcagcagaagctgaaggtgatgacagagctgtaccaggagaatgagatgaagctgcacaggaagctgactgtggaggagaactaccgcctggagaaggaggagaagctgagcaaggtggatgagaagatcagccacgccacagaggagctggagacctacaggaagagggccaaggacctggaggaggagctggagaggaccatccacagctaccagggccagatcatcagccatgagaagaaggcccatgacaactggctggccgccagaaatgctgagaggaacctgaatgacctgaggaaagaaaatgcccacaaccggcagaagctgacagaaacagagctgaagtttgagctgctggagaaggacccctatgccctggatgtgcccaacacagccttcggccgggagcacagcccctacggccccagccccctgggctggcccagcagcgagacccgggccttcctgagcccccccaccctgctggagggccccctgcggctgagccccctgctgcccggcggcggcggccggggcagccggggccctggcaaccccctggaccaccagatcaccaatgaaagaggagagagcagctgtgaccggctgacagacccccaccgggcccccagcgacaccggcagcctgagccccccctgggaccaggacaggaggatgatgttccccccacctggccagagctacccagattctgccctgcccccccagaggcaggaccgcttctgcagcaacagcggccgcctgagcggccctgctgagctgcggagcttcaacatgcctcctggccccccaccagccccctttgccatgagaaatgtgtacccaccccggggcttccccccctacctgccccccaggcctggcttcttccccccaccaccccacagcgagggccgctctgagttccccagcggcctcatcccccccagcaatgaaccagccacagagcaccctgagccccagcaggagacctag

SEQ ID NO: 263025 - DNA, 2379 bp, Artificial Sequence
  derived and/or modified sequence
atggagctgaagagccccgaggaggaggtggtggccgccctgcccgaaggtatgcgcccagattctaacctctacgggttcccttgggagcttgtgatctgcgccgcggtggttggcttcttcgctgtactgttctttctctggcgctcattccggtctgtgagaagccggctttacgtgggacgggagaagaaactcgccttaatgttgtccggtttaattgaggagaaaagcaagctgttggaaaagttctcccttgtccagaaggaatacgagggttacgaggtggagagctccctgaaggatgcttctttcgagaaagaggccactgaggcacagtctctggaagccacttgcgagaagctgaacaggagtaattccgagctcgaagatgaaatactctgtctagagaaagaactgaaagaggaaaaaagtaagcattccgagcaggacgagctaatggctgatatctctaaaagaatccaaagtttagaggacgaaagcaaaagtcttaaatcgcaggtggccgaggctaagatgacctttaagatctttcagatgaatgaagagcggctcaagatagctattaaggacgccctcaatgaaaacagccaactgcaagaatctcaaaagcagcttttacaagaggccgaagtgtggaaggaacaggtctccgaactcaacaagcagaaggtcacttttgaggatagcaaggtgcacgctgagcaggtgctgaacgataaagagtcgcacatcaagaccctaaccgagaggcttcttaagatgaaggattgggctgcaatgttgggcgaagatatcacggatgatgacaatttagagcttgagatgaattcagagtctgagaatggagcttacttagataacccgcccaagggagcgctgaagaagctgatacacgccgcgaaactcaatgccagccttaagacacttgaaggtgagcgaaatcagatatatattcagctcagcgaagtcgataagactaaggaggagctgaccgagcacatcaagaacctgcagacagaacaagcatctctgcagagcgaaaatacacactttgaaaacgagaatcagaaacttcagcaaaagcttaaggtgatgacagagttgtatcaggagaacgagatgaaactacacagaaaattgactgtggaggagaattaccgcctagagaaagaagaaaagttatcaaaggtggacgagaagattagccatgctacagaggagctggagacttatcggaagcgggccaaggacctggaggaagagctcgaacgaaccatacacagctatcaggggcaaatcatctctcatgagaaaaaggcacacgacaattggctggctgctaggaatgcagaacgaaatctgaacgacctgcgtaaagagaatgctcataaccgccagaaactaaccgagaccgagctgaagttcgaactcctggagaaagacccatacgctttagatgtccctaacacggcttttggacgggaacatagcccttacggaccttcgcccctgggctggccttcgagtgaaacaagagctttcctttctcctcctactctgttggaggggccattgaggctgtcaccacttttgcctggcggaggcggccgcggctctcgcgggccggggaaccctttggaccaccagatcacaaacgagcgcggagagagttcctgcgatcgtctgacagacccccacagagccccatcagacacagggtccctctctccaccttgggatcaggacagacgcatgatgttcccaccaccagggcagtcctaccctgactccgccctgccacctcagagacaggacaggttctgcagtaacagtggaagattgagtgggcctgccgaactgaggagttttaacatgccgtccttagataaaatggacggatccatgccatcagagatggaatcttcgcgcaacgataccaaggatgacttgggaaacctaaatgtgcccgattcatccctacccgcggagaatgaagccaccgggcccggttttgtacctccacctctggctcccataagaggccctctgttcccagttgacgcccgaggccccttcttgcggcgcggtcccccatttccgccccccccccccggagccatgttcggcgctagtcgggattattttccccccggcgactttccagggcctccccctgctccattcgccatgcggaatgtgtaccctccaagagggttccctccgtacctcccgcctcggcccgggttcttcccacctccgcctcactcggaagggaggagtgagtttcccagcggcttgatacctccgtcgaatgaacctgccacagagcacccagagccgcagcaggagacctag

SEQ ID NO: 263026 - DNA, 2019 bp, Artificial Sequence
  derived and/or modified sequence
atggagctgaagagccccgaggaggaggtggtggccgccctgcccgagggcatgaggccggacagcaacttatacggatttccatgggagttggtcatttgcgctgcagtcgttggatttttcgccgttctgttcttcctgtggcgctccttccgcagcgtgcgttctcgcctgtatgtggggcgagagaagaaactcgccttaatgcttagtgggctaatcgaggaaaagagtaagctacttgaaaaattctctctagtgcagaaagaagcgacatgcgagaagctgaaccggtccaatagtgaactggaagacgagatcctgtgtctcgagaaggaattgaaagaagaaaaaagcaagcactccgaacaggacgaattgatggccgacatcagcaagcggatacagtcactggaggacgaaagcaagagcctcaagtcgcaggtggcggaggctaaaatgacttttaaaattttccagatgaatgaggagagattgaagatagcaattaaagacgctttaaatgaaaactctcagctgcaggagtcgcagaagcagctcctccaagaagcggaggtgtggaaagagcaggtgagcgaattgaacaagcagaaagtgaccttcgaagacagcaaagtacacgcggagcaggtgctcaatgacaaggaatcccacatcaagactctcacggaacggctgcttaagatgaaggattgggcagcaatgttgggagaggacattaccgacgacgacaacctagagctggaaatgaactctgaaagcgagaatggggcgtacttggataaccctcctaagggcgcactcaaaaaactgatccatgccgccaagctgaacgctagcctgaagacgctagagggcgagcgcaatcaaatatatatacagctctcagaagtagacaagactaaggaggagctgacagaacatatcaagaatctgcaaacagaacaggcgtcactacagtccgaaaacactcattttgagaatgaaaatcagaagctgcaacagaaattgaaggtaatgactgagctgtatcaggagaatgaaatgaaactacacaggaagttgacagtagaagagaactacaggctggagaaggaagagaaattgagtaaggtcgatgaaaagatctcgcacgccactgaagaattggaaacttaccgaaaacgcgctaaggatctggaggaagagctggaacggacaatccacagttatcaagggcaaatcatctcgcatgagaagaaggcgcacgacaactggctagcagcacggaatgctgagagaaacctcaacgatctgagaaaggagaacgcccacaatcggcagaagctgactgagaccgaattgaaattcgaactgttagaaaaggatccctacgcccttgacgtgcccaacactgccttcggcagggagcactccccttacggccccagccccctgggctggcccagctctgaaactcgcgcctttctgtccccccccaccttgctggaggggcctttgagactgtcgccactgctgccgggaggtggaggtcggggctcccgtggccctggcaaccccctggatcatcaaattactaacgaaaggggggagtcttcgtgtgataggctgactgatccccacagggcaccttcagacaccgggtccctgagccccccttgggatcaagatcggcgcatgatgttccccccgcccggccaatcttacccagactctgcactgccaccgcagcgccaggataggttctgctcgaattcgggaaggctgtctgggcccgctgagttacgtagcttcaacatgcccccgggcccaccacctgccccattcgctatgaggaacgtttatcctccccgcggattccctccctacttgccacctcgtccgggtttttttccaccccctcctcacagtgaagggaggagtgagtttcctagcggcttgattcccccttcgaacgagccagccacagaacatcccgaaccacagcaggagacttag

SEQ ID NO: 263027 - DNA, 2379 bp, Artificial Sequence
  derived and/or modified sequence
atggagctcaagtcacccgaggaagaggtagtcgcagctctccccgaggggatgagacccgacagtaacctgtatgggttcccttgggagctggttatttgcgccgcagtcgtgggttttttcgcagtgctgttcttcctgtggcgttcatttagatccgtgaggtccaggttatacgtggggagagagaaaaagctggcgttaatgttgtctgggctaatagaggagaagtctaaactgttggaaaagttctccctggtccagaaagagtatgaaggatatgaggtcgagtctagcctgaaagatgcttcgttcgaaaaggaggccaccgaggctcagagcttggaagctacatgcgagaaattgaaccgctccaactccgagctagaagacgagattctttgcctggagaaggagctcaaagaggagaaatctaagcattccgagcaagatgaactgatggccgacataagtaaacggatccaatccctagaggatgagtccaaaagcctcaaatctcaggttgccgaggcaaagatgacttttaaaatttttcaaatgaacgaagaacgtttaaagattgcaattaaagacgcactgaacgagaacagccagctgcaagaatcgcaaaaacagctactgcaagaggccgaagtgtggaaggagcaggtgtccgaactgaataaacagaaggtgactttcgaggattctaaggtacacgcggagcaggttttgaacgataaagaatcacatatcaagactctaacggaacgtttgctaaaaatgaaggactgggcagcaatgctgggtgaagatatcactgacgacgacaacctcgaactagaaatgaactctgagtctgaaaatggcgcttacctggacaacccacctaagggtgctctgaagaagttaatccacgctgcaaagctgaacgcaagtcttaagaccctggagggcgaacgtaatcaaatttacatacagctttccgaagtggataaaaccaaggaggagcttacagagcacatcaaaaatctacaaacagaacaggcttcgctgcagtccgaaaatacccatttcgagaatgagaaccagaaattgcagcagaaactgaaggtaatgacggaactttaccaggaaaacgaaatgaagcttcataggaagctcaccgttgaagagaattataggctcgaaaaagaagaaaaacttagtaaagtagatgagaaaatttcccacgccacagaggagcttgagacatataggaagagggccaaggatctggaggaagaattggagcgaacaattcatagctaccaggggcaaatcataagtcacgagaaaaaagcacatgataactggcttgccgctcggaacgcagagaggaatcttaacgatctccggaaagagaacgctcacaatcgacagaagcttacagagacagagctgaagttcgagctgctcgagaaagacccatacgccctcgatgtccccaacaccgcatttgggagagagcattctccgtacggcccaagtccactaggctggccctccagcgaaacccgggcattcctgtctcccccaacactcctcgaagggcctctgagactgagccccctcctaccagggggtggagggcgaggctcaagggggccaggtaatcctctggatcaccaaatcacaaatgagcgtggagagtcctcctgcgatcgactgaccgatccccaccgagctccctctgacaccggcagtctttcccccccttgggaccaagataggaggatgatgttccccccaccaggccagagctaccccgatagtgcccttccccctcaacgccaagaccggttctgttccaactctggtcggttgtctggtccagcggaactcagatccttcaatatgccatctcttgacaagatggacgggagtatgcctagcgaaatggagagctctcgaaatgacaccaaggatgacctaggcaatcttaatgtgccagactcctctctgcctgccgagaatgaagcaactggacctggctttgttcccccaccactggccccaatccgaggcccactttttcccgtggacgccaggggccctttcctgagacgcggaccgccattcccaccccctcctccgggagcaatgttcggggcttcacgggactacttccccccaggtgatttccctggtcctccgccagcacccttcgcaatgcgcaatgtttatccacctcgaggcttccccccatatctgccaccgaggcccggtttttttcctccccctccacatagcgagggacgctcagaattcccgagtggtctgattccgccatctaatgagcctgccacagagcatccggagccacagcaagaaacatag

SEQ ID NO: 263028 - DNA, 2019 bp, Artificial Sequence
  derived and/or modified sequence
atggaattaaagtcacctgaagaggaggttgtggccgctctgccagagggcatgaggcccgactccaatctctacgggttcccatgggagctggtgatatgtgcagctgtagtcgggttttttgccgtcctcttcttcctgtggaggtctttccgttccgtaaggtcccggctttatgtcggcagagagaagaagcttgctctgatgttgtctggcctgattgaagagaagagcaagttgctggagaagttcagtcttgtccaaaaggaagctacgtgcgagaagctcaaccgtagcaactccgagcttgaagatgagattttatgcttggagaaggaattgaaggaggaaaagagcaagcattcagagcaggacgagctgatggccgatatctccaaacggatccagagcttggaggacgaaagcaaatccctgaagtctcaggttgccgaggctaagatgacattcaagattttccagatgaacgaagagcgactgaagatagccatcaaggatgcccttaatgagaacagccagctccaagagagtcagaaacagttactgcaggaggcagaggtttggaaggaacaggtgtcagaacttaataaacagaaagtcacattcgaagactccaaagtgcatgcagagcaggtcctgaacgacaaggaatctcacattaaaaccctgacagaaagacttctgaaaatgaaagactgggccgcaatgcttggggaagacattacagacgatgataatttagaacttgaaatgaactccgagagcgaaaatggggcttatctcgacaacccccctaagggtgcgctgaagaagctgatccatgcagcgaaactcaacgcctctctgaagacccttgagggggagagaaatcagatctatatccagctgtcagaggtcgacaaaaccaaggaggagctgactgaacacataaagaatcttcagaccgaacaggctagcctgcagtcagagaacacgcacttcgagaacgagaaccaaaagctgcagcagaaattgaaggtcatgacggagctgtaccaggaaaacgagatgaaattacaccgcaaacttactgtggaagaaaactaccgcctcgaaaaagaggaaaagctgagtaaggtggacgagaagatttcacacgccactgaagaactggagacctaccgcaaaagagccaaggatctggaggaagagctagagaggaccatacactcatatcaaggccaaatcatcagtcatgaaaaaaaagctcacgacaattggctggctgccaggaacgctgagcggaacctgaacgacttacgaaaagagaatgctcacaataggcagaagctcacagaaaccgaattaaaatttgagctgcttgagaaggatccatacgccctcgacgtgcccaatacggcattcggacgggaacattctccttacggcccttcgcctcttggatggccctccagcgaaaccagagccttcttaagcccccctaccttgctcgagggtccattgcggctgtcacccctgttgcctggcggaggtggtcggggttcaagaggccctggcaaccctctggatcatcagattacaaacgagagaggagagtccagctgcgataggctcactgacccccaccgagctccgtctgacacaggatcactcagcccaccttgggaccaggataggaggatgatgttcccccctccaggtcagtcatatcccgattctgctttaccccctcagaggcaggaccgtttttgctccaacagcggcaggcttagcgggccagcggagctgcgctcattcaatatgccacccggaccaccacccgcacctttcgcaatgcgcaacgtttatccccctcgcggattccctccttacctgccgcctcggcctggcttttttccacctccccctcactctgaaggcagatcagaatttccttccggcttgatacctccaagtaacgagccggcaactgaacaccccgagccccagcaggagacttag

SEQ ID NO: 263029 - protein, 761 aa, Artificial Sequence
  derived and/or modified sequence
MEEPGVTPQPYLGLLLEELRRVVAALPEGMRPDSNLYGFPWELVICAAVVGFFAVLFFLWRSFRSVRSRLYVGREKKLALMLSGLIEEKSKLLEKFSLVQKEYEGYEVESSLKDASFEKEATEAQSLEATCEKLNRSNSELEDEILCLEKELKEEKSKHSEQDELMADISKRIQSLEDESKSLKSQVAEAKMTFKIFQMNEERLKIAIKDALNENSQLQESQKQLLQEAEVWKEQVSELNKQKVTFEDSKVHAEQVLNDKESHIKTLTERLLKMKDWAAMLGEDITDDDNLELEMNSESENGAYLDNPPKGALKKLIHAAKLNASLKTLEGERNQIYIQLSEVDKTKEELTEHIKNLQTEQASLQSENTHFENENQKLQQKLKVMTELYQENEMKLHRKLTVEENYRLEKEEKLSKVDEKISHATEELETYRKRAKDLEEELERTIHSYQGQIISHEKKAHDNWLAARNAERNLNDLRKENAHNRQKLTETELKFELLEKDPYALDVPNTAFGRGSRGPGNPLDHQITNERGESSCDRLTDPHRAPSDTGSLSPPWDQDRRMMFPPPGQSYPDSALPPQRQDRFCSNSGRLSGPAELRSFNMPSLDKMDGSMPSEMESSRNDTKDDLGNLNVPDSSLPAENEATGPGFVPPPLAPIRGPLFPVDARGPFLRRGPPFPPPPPGAMFGASRDYFPPGDFPGPPPAPFAMRNVYPPRGFPPYLPPRPGFFPPPPHSEGRSEFPSGLIPPSNEPATEHPEPQQET

SEQ ID NO: 263030 - DNA, 2286 bp, Artificial Sequence
  derived and/or modified sequence
atggaggagcccggcgtgaccccccagccctacctgggcctgctgctggaggagctgagaagagtggtggccgccctgcccgagggcatgagacccgacagcaacctgtacggcttcccctgggagctggtgatctgcgccgccgtggtgggcttcttcgccgtgctgttcttcctgtggagaagcttcagaagcgtgagaagcagactgtacgtgggcagagagaagaagctggccctgatgctgagcggcctgatcgaggagaagagcaagctgctggagaagttcagcctggtgcagaaggagtacgagggctacgaggtggagagcagcctgaaggacgccagcttcgagaaggaggccaccgaggcccagagcctggaggccacctgcgagaagctgaacagaagcaacagcgagctggaggacgagatcctgtgcctggagaaggagctgaaggaggagaagagcaagcacagcgagcaggacgagctgatggccgacatcagcaagagaatccagagcctggaggacgagagcaagagcctgaagagccaggtggccgaggccaagatgaccttcaagatcttccagatgaacgaggagagactgaagatcgccatcaaggacgccctgaacgagaacagccagctgcaggagagccagaagcagctgctgcaggaggccgaggtgtggaaggagcaggtgagcgagctgaacaagcagaaggtgaccttcgaggacagcaaggtgcacgccgagcaggtgctgaacgacaaggagagccacatcaagaccctgaccgagagactgctgaagatgaaggactgggccgccatgctgggcgaggacatcaccgacgacgacaacctggagctggagatgaacagcgagagcgagaacggcgcctacctggacaacccccccaagggcgccctgaagaagctgatccacgccgccaagctgaacgccagcctgaagaccctggagggcgagagaaaccagatctacatccagctgagcgaggtggacaagaccaaggaggagctgaccgagcacatcaagaacctgcagaccgagcaggccagcctgcagagcgagaacacccacttcgagaacgagaaccagaagctgcagcagaagctgaaggtgatgaccgagctgtaccaggagaacgagatgaagctgcacagaaagctgaccgtggaggagaactacagactggagaaggaggagaagctgagcaaggtggacgagaagatcagccacgccaccgaggagctggagacctacagaaagagagccaaggacctggaggaggagctggagagaaccatccacagctaccagggccagatcatcagccacgagaagaaggcccacgacaactggctggccgccagaaacgccgagagaaacctgaacgacctgagaaaggagaacgcccacaacagacagaagctgaccgagaccgagctgaagttcgagctgctggagaaggacccctacgccctggacgtgcccaacaccgccttcggcagaggcagcagaggccccggcaaccccctggaccaccagatcaccaacgagagaggcgagagcagctgcgacagactgaccgacccccacagagcccccagcgacaccggcagcctgagccccccctgggaccaggacagaagaatgatgttccccccccccggccagagctaccccgacagcgccctgcccccccagagacaggacagattctgcagcaacagcggcagactgagcggccccgccgagctgagaagcttcaacatgcccagcctggacaagatggacggcagcatgcccagcgagatggagagcagcagaaacgacaccaaggacgacctgggcaacctgaacgtgcccgacagcagcctgcccgccgagaacgaggccaccggccccggcttcgtgcccccccccctggcccccatcagaggccccctgttccccgtggacgccagaggccccttcctgagaagaggcccccccttccccccccccccccccggcgccatgttcggcgccagcagagactacttcccccccggcgacttccccggccccccccccgcccccttcgccatgagaaacgtgtacccccccagaggcttccccccctacctgccccccagacccggcttcttccccccccccccccacagcgagggcagaagcgagttccccagcggcctgatcccccccagcaacgagcccgccaccgagcaccccgagccccagcaggagacctag

SEQ ID NO: 263031 - DNA, 2762 bp, Artificial Sequence
  derived and/or modified sequence
gacaggccggggttactgtggcgaccacgagagcagctttggcgctatggaggagcccggggttacccctcaaccgtatttggggctgctcctggaggagctacgcagggttgtggcagcactgcctgaaggtatgagaccagattctaatctttatggttttccatgggaattggtgatatgtgcagctgttgttggattttttgctgttctcttttttttgtggagaagttttagatcggttaggagtcggctttatgtgggacgagagaaaaagcttgctctaatgctttctggactaattgaagaaaaaagtaaactacttgaaaaatttagccttgttcaaaaagagtatgaaggctatgaagtagagtcatctttaaaggatgccagctttgagaaggaggcaacagaagcacaaagtttggaggcaacctgtgaaaagctgaacaggtccaattctgaacttgaggatgaaatactctgtctagaaaaagagttaaaagaagagaaatccaaacattctgaacaagatgaattgatggcggatatttcaaaaaggatacagtctctagaagatgagtcaaaatccctcaaatcacaagtagctgaagccaaaatgaccttcaagatatttcaaatgaatgaagaacgactgaagatagcaataaaagatgctttgaatgaaaattctcaacttcaggaaagccagaaacagcttttgcaagaagctgaagtatggaaagaacaagtgagtgaacttaataaacagaaagtaacatttgaagactccaaagtacatgcagaacaagttctaaatgataaagaaagtcacatcaagactctgactgaacgcttgttaaagatgaaagattgggctgctatgcttggagaagacataacggatgatgataacttggaattagaaatgaacagtgaatcggaaaatggtgcttacttagataatcctccaaaaggagctttgaagaaactgattcatgctgctaagttaaatgcttctttaaaaaccttagaaggagaaagaaaccaaatttatattcagttgtctgaagttgataaaacaaaggaagagcttacagagcatattaaaaatcttcagactgaacaagcatctttgcagtcagaaaacacacattttgaaaatgagaatcagaagcttcaacagaaacttaaagtaatgactgaattatatcaagaaaatgaaatgaaactccacaggaaattaacagtagaggaaaattatcggttagagaaagaagagaaactttctaaagtagatgaaaagatcagccatgccactgaagagctggagacctatagaaagcgagccaaagatcttgaagaagaattggagagaactattcattcttatcaagggcagattatttcccatgagaaaaaagcacatgataattggttggcagctcggaatgctgaaagaaacctcaatgatttaaggaaagaaaatgctcacaacagacaaaaattaactgaaacagagcttaaatttgaacttttagaaaaagatccttatgcactcgatgttccaaatacagcatttggcagaggctcacgaggcccagggaatcctctggaccatcagattaccaatgaaagaggagaatcaagctgtgataggttaaccgatcctcatagggctccctctgacactgggtctctgtcacctccatgggaccaggaccgtaggatgatgtttcctccgccaggacaatcatatcctgattcagcccttcctccacaaaggcaagacagattttgttctaattctggtagactgtctggaccagcagaactcagaagttttaatatgccttctttggataaaatggatgggtcaatgccttcagaaatggaatccagtagaaatgataccaaagatgatcttggtaatttaaatgtgcctgattcatctctccctgctgaaaatgaagccactggccctggctttgttcctccacctcttgctccaatcagaggtccattgtttccagtggatgcaagaggcccattcttgagaagaggacctcctttccccccacctcctccaggagccatgtttggagcttctcgagattattttccaccaggggatttcccaggtccaccacctgctccatttgcaatgagaaatgtctatccaccgaggggttttcctccttaccttcccccaagacctggatttttccccccacccccacattctgaaggtagaagtgagttcccctcaggtttgattccaccttcaaatgagcctgctactgaacatccagaaccacagcaagaaacctgacaatatttttgctctcttcaaaagtaattttgactgatctcattttcagtttaagtaactgctgttacttaagtgattacacttttgctcaaattgaagcttaatggaattataattctcaggatagtattttgtaaataaagatgatttaaatatgaatcttatgagtaaattatttcaattttattttagacggtataactatttcaatttgattaatccactattatataaacaatagtgggagttttatatatgtaatctttcaggtggggaggctttaaattctgaagtctgtgtctttatgccaagaactgtatttactgtggttgtggacaaatgtgaaagtaactttatgcttaaataaattatagttgatttaaagatttgtttggcattgataataataaaatcagtagtttttctataa

SEQ ID NO: 263032 - DNA, 2286 bp, Artificial Sequence
  derived and/or modified sequence
atggaggaacccggcgtgactccccagccctatctgggcctgctgctcgaggagctgagacgggttgtggctgcactgccagaaggcatgcggcccgacagcaacctctatgggttcccctgggagctggtgatctgtgccgctgtggtgggttttttcgctgtgctcttttttctttggcggagtttccgatctgtgcggtccagactatacgtaggcagggagaaaaaactggcactgatgctgtctggcctcattgaggagaagagcaagctgttggaaaagttttcactggtccagaaagagtacgaaggctatgaggtcgagagcagtttgaaggatgctagcttcgaaaaagaggctaccgaggcccagtcactggaggcgacttgcgaaaagctcaacagatccaattccgaattggaggacgagatcctgtgtctagagaaagagttgaaagaggagaagtcaaaacatagtgaacaagatgagctgatggctgacatctctaaacgcatccagtcattagaagatgaatctaagtcactgaagagccaggttgcagaggctaagatgacttttaagattttccagatgaacgaagaacgtctgaagatagcaattaaagatgctcttaacgagaacagccagctgcaagaaagtcaaaaacagctgctgcaagaagccgaggtgtggaaagaacaggtctccgagctaaataagcagaaggtgaccttcgaagactccaaagttcacgctgaacaggtgctgaacgataaagagagccacataaaaacactgactgaaagactgttaaaaatgaaggattgggctgccatgctgggggaggatatcacggacgatgataaccttgagcttgagatgaattccgaatcagaaaacggagcttacctagataaccctcccaaaggggcgctgaaaaagcttattcacgccgctaaactcaacgcaagcctaaaaaccctggagggggaacggaaccagatttacattcaactgtcagaggtggacaagactaaagaggagctcacagagcatattaaaaacctgcaaaccgaacaggcatccctgcagagcgaaaacacacatttcgaaaacgagaaccagaaactgcagcagaaattgaaggtgatgacagagttgtatcaggagaacgaaatgaaactgcacaggaagcttactgtggaagaaaactataggctcgaaaaagaggaaaagctttcgaaagtagacgagaagatatcacacgcaactgaagaactcgaaacataccgcaagcgcgccaaggacttagaagaggaactggagcggaccattcatagctaccagggacagatcattagccacgaaaaaaaggcccacgacaattggcttgcagcaagaaatgctgaacgcaatctcaacgacctgaggaaggagaatgcccacaacagacaaaagctgaccgagacagagctgaagtttgaactgctggaaaaagacccatacgcccttgatgtgcccaacaccgcatttgggcgaggaagccgcggtccgggcaacccactagatcaccagattaccaacgaacggggtgagagcagctgcgaccgtctgacagaccctcaccgggcaccaagcgatactggtagtctctctcctccgtgggaccaggatcggcgaatgatgtttccaccccccggccaaagctatccagactccgctcttccgccccagcgccaggacaggttctgtagcaactcaggccgactgagtggcccagcggaacttaggagttttaacatgccgtctctggataagatggacggctcgatgccaagtgagatggaatcttctagaaacgacaccaaagatgatctagggaacttgaatgtccctgactcatctctgccagctgagaatgaggcaacaggcccagggtttgtaccgccaccgctggcacccatccgtggacccctattcccggttgacgctcgaggccccttcctcaggagaggaccccccttccctccacccccgcccggggcaatgtttggcgcctctagggattacttccccccaggcgattttccaggcccccccccggctcctttcgccatgcggaacgtctatccaccacgcggatttccaccctacctgcctccccgacctggcttttttcctccgcccccacactctgagggacgatcggagtttccctctggtctgatccccccatcgaacgaaccggctacagagcatcccgaaccccagcaggaaacttag

SEQ ID NO: 263033 - DNA, 2286 bp, Artificial Sequence
  derived and/or modified sequence
atggaggagcccggggtgaccccccagccctacctgggcctgctgctggaggagctgcggcgggtggtggccgccctgcctgagggcatgaggccagacagcaacctgtatggcttcccctgggagctggtgatctgtgccgctgtggtgggcttctttgctgtgctcttcttcctgtggaggagcttccgctctgtgcgcagccggctgtatgtgggccgggagaagaagctggccctgatgctgagcggcctcatcgaggagaagagcaagctgctggagaagttcagcctggtgcagaaggagtatgagggctatgaggtggagagcagcctgaaggatgccagctttgagaaggaggccacagaggcccagagcctggaggccacctgtgagaagctgaacagaagcaacagcgagctggaggatgagatcctgtgcctggagaaggagctgaaggaggagaagagcaagcacagcgagcaggatgagctgatggctgacatcagcaagaggatccagagcctggaggatgagagcaagagcctgaagagccaggtggccgaggccaagatgaccttcaagatcttccagatgaatgaggagcggctgaagatcgccatcaaggatgccctgaatgaaaacagccagctgcaggagagccagaagcagctgctgcaggaggccgaggtgtggaaggagcaggtgtctgagctgaacaagcagaaggtgacctttgaggacagcaaggtgcatgctgagcaggtgctgaatgacaaggagagccacatcaagaccctgacagagcggctgctgaagatgaaggactgggccgccatgctgggggaggacatcacagatgatgacaacctggagctggagatgaacagcgagagtgaaaatggagcctacctggacaacccccccaagggggccctgaagaagctgattcatgctgccaagctgaatgccagcctgaagaccctggagggggagaggaaccagatctacatccagctgtctgaggtggacaagaccaaggaggagctgacagagcacatcaagaacctgcagacagagcaggccagcctgcagagcgagaacacccactttgaaaatgaaaaccagaagctgcagcagaagctgaaggtgatgacagagctgtaccaggagaatgagatgaagctgcacaggaagctgactgtggaggagaactaccgcctggagaaggaggagaagctgagcaaggtggatgagaagatcagccacgccacagaggagctggagacctacaggaagagggccaaggacctggaggaggagctggagaggaccatccacagctaccagggccagatcatcagccatgagaagaaggcccatgacaactggctggccgccagaaatgctgagaggaacctgaatgacctgaggaaagaaaatgcccacaaccggcagaagctgacagaaacagagctgaagtttgagctgctggagaaggacccctatgccctggatgtgcccaacacagccttcggccggggcagccggggccctggcaaccccctggaccaccagatcaccaatgaaagaggagagagcagctgtgaccggctgacagacccccaccgggcccccagcgacaccggcagcctgagccccccctgggaccaggacaggaggatgatgtttcctcctcctggccagagctacccagacagcgccctgcccccccagaggcaggaccgcttctgcagcaacagcggccgcctgagcggccctgctgagctgcgctccttcaacatgcccagcctggacaagatggatggctccatgcccagcgagatggagagcagcagaaatgacaccaaggatgacctgggcaacctgaatgtgcctgacagcagcctgcctgcagaaaatgaggccaccggccctggctttgtgcccccacccctggcccccatccggggccccctcttccctgtggatgcccggggccccttcctgcggcggggcccccccttccccccacctcctcctggggccatgtttggagccagccgggactacttccccccaggggacttccctggccccccaccagccccctttgccatgagaaatgtgtacccaccccggggcttccccccctacctgcccccccggcccggcttcttccccccaccaccccacagcgagggccgctctgagttccccagcggcctcatcccccccagcaatgagcccgccacagagcaccctgagccccagcaggagacctag

SEQ ID NO: 263034 - DNA, 2286 bp, Artificial Sequence
  derived and/or modified sequence
atggaggagcccggcgtgaccccccagccctacctgggcctgctgctggaagagctccggcgcgtagtggctgccctgcccgagggtatgcgccccgactctaacctgtatgggtttccatgggaactagtgatttgcgccgcagtggtcggattcttcgcagtcttgttctttttgtggcggagcttcaggagcgtgcggagcagattgtacgtgggacgcgagaaaaaactggccctcatgctaagcggactgattgaggagaaatcaaaattgctcgagaagttcagcctggttcagaaggaatacgagggctacgaggtcgagtcttcactcaaggatgccagtttcgagaaagaggcaaccgaagcccagagcctagaggccacctgtgaaaaactcaacagatccaatagcgaattggaggatgagatcttgtgcttggaaaaagaactgaaagaggaaaaatcgaaacattccgagcaggatgagctgatggccgatatctcaaagaggatacaaagtcttgaggacgaatcaaagtctctaaagtcacaggtggccgaagctaagatgaccttcaagatatttcagatgaacgaggaaaggcttaaaattgccatcaaagacgccctaaacgaaaatagtcagctgcaggagagccagaagcaattgcttcaggaggccgaggtctggaaggaacaagtgtcagaactgaacaagcagaaggtgaccttcgaggatagtaaagtgcatgcggagcaggtgctgaatgacaaagagtcacatatcaagacgctcacggagagactgcttaagatgaaggattgggccgctatgcttggagaggacatcacagacgacgacaatcttgaactggagatgaacagcgagagtgagaacggcgcttacttggataacccccctaaaggcgccttaaagaagctgatccacgccgcaaaattgaacgcttctcttaaaacactggagggggagcgaaaccagatttatattcagttatccgaggtagataaaaccaaggaggagctgactgagcatatcaagaacctgcagactgaacaggcatccttgcagtcagagaatacacactttgagaacgagaatcaaaagttacagcagaagctgaaggtgatgactgaactgtatcaggagaatgaaatgaagttgcacagaaaattaactgttgaggagaattacaggctggagaaagaagagaaactcagcaaggtggacgagaagattagccatgccacggaagagctggagacctaccggaaaagagccaaggatctggaagaggagctcgaaaggaccatccactcatatcagggtcagattatctcccacgagaagaaagcccatgataattggctggctgctcgcaacgcggaaagaaacctgaacgatctgcgtaaggaaaacgcacacaatcgccagaaactgacagagactgaactgaaatttgaactgctagagaaagacccatatgctctggatgtccccaacaccgccttcggccggggatcacggggccctgggaaccccctggaccaccagatcacgaatgaaaggggcgagagctcctgcgacaggctaaccgatccacatagagcccccagtgacaccggttcactctcaccaccttgggatcaggatagacggatgatgtttcctccaccaggccagagctatcccgattctgccctccccccacagagacaggatcggttttgctccaacagcggacggctctccggaccagcagagttgcggtcattcaatatgccaagcctggacaaaatggacggatcaatgcctagtgagatggagagtagcaggaatgacaccaaggacgatttaggcaacttaaatgtgccagacagtagcttacctgccgagaacgaagccactggaccagggtttgtgccacccccactcgcacccattaggggccccctcttccctgtcgacgccaggggaccatttttgcggcgaggccccccctttccgccccctcctccaggcgctatgtttggggcctcacgggattactttcctccaggggacttccctggaccaccacccgcaccctttgcaatgagaaacgtgtacccacctaggggttttccaccgtacctgcctcctcggcccgggttcttcccaccaccaccacactcggaggggcggtctgagttcccctctgggttgatcccaccatctaacgagcctgccaccgagcaccctgaacctcagcaggaaacatag

SEQ ID NO: 263035 - DNA, 2286 bp, Artificial Sequence
  derived and/or modified sequence
atggaggagccaggagtaactccccagccttatctcggtttgctcctggaggaactcagaagagtcgtggctgcactgccagaagggatgagacctgactcaaacttatacggcttcccctgggagctcgtcatttgtgcagcagtagtcgggttcttcgcagtgctgttctttctctggagatcttttaggtctgtaagatctaggctgtatgtcgggagagaaaaaaagctcgccctgatgctttccggtctgatcgaggaaaagagcaagctgctggagaaattctcccttgtccagaaggaatacgaagggtatgaagtcgagtccagtctgaaggatgcatcgtttgaaaaagaagccaccgaagctcagtcgttggaggctacttgcgaaaagttgaaccgttctaacagcgagctggaagatgagatactatgtctggagaaggagctaaaggaggagaaatctaagcactcagagcaggatgaacttatggcggacatcagtaagagaatacagtctctggaggatgaatctaaaagcctgaaatcccaggtggctgaggcaaagatgaccttcaagatctttcagatgaacgaggagagactgaagattgccatcaaagatgcactgaacgagaactcgcagttacaggaaagccagaaacagttgctgcaggaagccgaagtgtggaaggaacaggtttccgaactgaataagcagaaggtgacatttgaggacagtaaggtgcacgccgagcaggtgttgaatgacaaggagtctcatattaaaaccctgactgagaggctgctgaaaatgaaggactgggcagcaatgcttggcgaggatattaccgacgacgataatctggagctagaaatgaatagcgagtccgaaaacggagcatatctggataaccctcctaagggagcactgaagaaattgatacatgctgcaaagttgaacgcatcactaaagacactggagggggaaaggaatcagatctacatccaactgagcgaggtggacaaaacaaaggaggagctaactgagcacataaagaatctccagactgagcaggctagcttgcagagcgaaaacacacacttcgagaacgagaaccaaaaacttcaacaaaaacttaaggtaatgactgagctgtatcaggagaacgagatgaaactgcataggaagctcacagtcgaggaaaattatcgactggagaaggaggaaaaactgtccaaagttgacgaaaaaatttcacacgccacggaagaactagagacctaccgtaaacgcgcaaaggacctagaggaagagctcgaaagaaccatccactcgtatcaagggcaaattatctcccatgaaaagaaggcacacgacaactggcttgcggcaagaaatgccgagagaaacctgaatgatctgcggaaggaaaacgcccacaatcgtcagaagttaactgaaacagagctgaagtttgagctgctcgaaaaggacccttacgcacttgatgtaccaaacaccgcattcggccgaggatcccggggtcctggcaaccctctggatcatcagatcaccaacgaaagaggcgagagctcctgcgaccgcctcactgatccgcaccgcgcaccatctgacacgggctccttaagccccccttgggaccaagatcgccgtatgatgtttccccctccaggtcaatcctatcctgacagtgctcttccccctcagcgtcaggaccgtttctgcagcaattccgggcgtcttagtggacccgcagaactgagatccttcaatatgccttctctagacaagatggatggtagcatgcctagtgaaatggagtcctcacggaatgatacaaaagacgatctgggcaacctcaacgtgcccgacagcagcctgcctgctgaaaacgaagctacaggacccggattcgtgccgcctccactggcccctatcagaggcccactctttccagtggacgcgagaggaccatttctaaggaggggacccccatttcctccgccaccccctggagcaatgttcggcgcaagtcgagattactttcccccaggagacttcccaggccctccaccagctccctttgcaatgcgaaacgtctacccaccaaggggatttcccccttatctccccccacgtcctggatttttcccgccaccacctcactcagaagggcgatctgagttcccttccggcctgatccctcctagtaacgagcctgcaacagaacaccccgagcctcaacaggaaacttag

SEQ ID NO: 263036 - DNA, 2328 bp, Artificial Sequence
  derived and/or modified sequence
atgagacccgacagcaacctgtacggcttcccctgggagctggtgatctgcgccgccgtggtgggcttcttcgccgtgctgttcttcctgtggagaagcttcagaagcgtgagaagcagactgtacgtgggcagagagaagaagctggccctgatgctgagcggcctgatcgaggagaagagcaagctgctggagaagttcagcctggtgcagaaggagtacgagggctacgaggtggagagcagcctgaaggacgccagcttcgagaaggaggccaccgaggcccagagcctggaggccacctgcgagaagctgaacagaagcaacagcgagctggaggacgagatcctgtgcctggagaaggagctgaaggaggagaagagcaagcacagcgagcaggacgagctgatggccgacatcagcaagagaatccagagcctggaggacgagagcaagagcctgaagagccaggtggccgaggccaagatgaccttcaagatcttccagatgaacgaggagagactgaagatcgccatcaaggacgccctgaacgagaacagccagctgcaggagagccagaagcagctgctgcaggaggccgaggtgtggaaggagcaggtgagcgagctgaacaagcagaaggtgaccttcgaggacagcaaggtgcacgccgagcaggtgctgaacgacaaggagagccacatcaagaccctgaccgagagactgctgaagatgaaggactgggccgccatgctgggcgaggacatcaccgacgacgacaacctggagctggagatgaacagcgagagcgagaacggcgcctacctggacaacccccccaagggcgccctgaagaagctgatccacgccgccaagctgaacgccagcctgaagaccctggagggcgagagaaaccagatctacatccagctgagcgaggtggacaagaccaaggaggagctgaccgagcacatcaagaacctgcagaccgagcaggccagcctgcagagcgagaacacccacttcgagaacgagaaccagaagctgcagcagaagctgaaggtgatgaccgagctgtaccaggagaacgagatgaagctgcacagaaagctgaccgtggaggagaactacagactggagaaggaggagaagctgagcaaggtggacgagaagatcagccacgccaccgaggagctggagacctacagaaagagagccaaggacctggaggaggagctggagagaaccatccacagctaccagggccagatcatcagccacgagaagaaggcccacgacaactggctggccgccagaaacgccgagagaaacctgaacgacctgagaaaggagaacgcccacaacagacagaagctgaccgagaccgagctgaagttcgagctgctggagaaggacccctacgccctggacgtgcccaacaccgccttcggcagagagcacagcccctacggccccagccccctgggctggcccagcagcgagaccagagccttcctgagcccccccaccctgctggagggccccctgagactgagccccctgctgcccggcggcggcggcagaggcagcagaggccccggcaaccccctggaccaccagatcaccaacgagagaggcgagagcagctgcgacagactgaccgacccccacagagcccccagcgacaccggcagcctgagccccccctgggaccaggacagaagaatgatgttccccccccccggccagagctaccccgacagcgccctgcccccccagagacaggacagattctgcagcaacagcggcagactgagcggccccgccgagctgagaagcttcaacatgcccagcctggacaagatggacggcagcatgcccagcgagatggagagcagcagaaacgacaccaaggacgacctgggcaacctgaacgtgcccgacagcagcctgcccgccgagaacgaggccaccggccccggcttcgtgcccccccccctggcccccatcagaggccccctgttccccgtggacgccagaggccccttcctgagaagaggcccccccttccccccccccccccccggcgccatgttcggcgccagcagagactacttcccccccggcgacttccccggccccccccccgcccccttcgccatgagaaacgtgtacccccccagaggcttccccccctacctgccccccagacccggcttcttccccccccccccccacagcgagggcagaagcgagttccccagcggcctgatcccccccagcaacgagcccgccaccgagcaccccgagccccagcaggagacctag

SEQ ID NO: 263037 - DNA, 2328 bp, Artificial Sequence
  derived and/or modified sequence
atgagacctgatagtaacctctatggctttccttgggaattggtgatctgtgcagccgtagtgggatttttcgcagtgttatttttcctgtggcgctcctttagaagtgtaagatcaagattatatgtcggccgcgaaaagaagctggccctgatgctgtcaggcttaatcgaggagaagtcaaagttactagagaagttcagcctggtacagaaggaatacgaaggttatgaggtggagagctctttaaaagacgcaagttttgagaaagaggccacggaggctcaatcactggaggccacatgtgaaaaattaaatcggagtaattctgagctcgaggacgagatactttgcctagaaaaggagctaaaggaggagaagtccaaacacagcgaacaggacgagctgatggctgacatctctaagcgtattcagtctcttgaagacgagtcaaagagcttgaagagccaggttgctgaggccaagatgacctttaagatttttcagatgaatgaagagagattaaaaatcgctatcaaagatgccttgaacgagaattcccaactacaggagagtcagaagcagctgcttcaggaggcagaggtctggaaagagcaggtgtccgaactgaacaaacagaaggtcacgttcgaggactctaaggtgcacgcagaacaagtccttaacgacaaagaatctcacattaagactctgacagaaagactgctgaaaatgaaggattgggccgccatgctgggagaagatattacagacgacgacaatcttgagctggagatgaactccgaaagcgagaatggggcgtatttggacaatcctcctaagggagctctcaagaaactcatccacgctgccaaactgaatgcatctctcaagacactcgaaggagaaaggaatcaaatatacattcagctatcagaagtggacaaaacaaaggaggagcttactgaacatatcaagaacttgcagactgagcaggcgtcacttcaaagtgagaacacccactttgaaaacgaaaaccagaaattgcagcaaaagctgaaggtgatgactgagctgtatcaggagaacgaaatgaagttgcacagaaagttaactgtagaggagaactaccggctagagaaggaggaaaaactttctaaagtggatgagaagattagtcacgccactgaggagcttgagacatatcggaaaagagccaaagatttagaggaggagctggagcggaccatacattcataccaaggtcagatcattagccacgagaaaaaggctcacgacaactggctcgcagcaagaaatgctgagaggaatctcaacgaccttcgaaaagaaaatgctcataatcgccagaaattgacagagaccgagctgaagttcgagcttcttgagaaagatccctacgctttagatgtgcccaacaccgcctttgggcgcgagcattctccctatggcccaagtcccttggggtggccgagcagtgaaaccagagcttttctctcgccgcctacattacttgaaggtcctctgcggctatctcccctcttgccaggcggaggaggtagaggatcacgaggacccggcaatcctcttgatcaccagatcacaaacgaaaggggggaaagcagctgtgatcggttaactgaccctcacagagcaccttcagataccggatctctgagtcccccgtgggaccaggaccggcgtatgatgtttcctcctccaggacagtcatacccagatagtgcactgcctccacaacgacaggataggttctgctctaattctgggaggctgtcgggacccgccgaattgcggtcctttaacatgccaagtcttgacaagatggatggaagcatgccgtccgaaatggagtcctctcggaatgataccaaggatgacctggggaacctcaatgtcccagatagctcgttgccagcagagaacgaagccaccggcccaggctttgtgcctcctcccttagcacccatccggggtccacttttccctgttgacgctcggggcccttttctgaggagaggtccccctttcccacctccgccccctggtgctatgttcggagcatccagagactattttccaccaggtgatttccccggtcccccgcccgcgcctttcgccatgaggaacgtctatccgccgcgaggatttcccccatatttacccccgagacccgggttctttcctcctccaccacactcggaaggaaggtcagagtttcccagcggactgatccccccttcgaatgaacccgccacagaacaccccgaaccccagcaggagacttag

SEQ ID NO: 263038 - DNA, 2328 bp, Artificial Sequence
  derived and/or modified sequence
atgaggccagacagcaacctgtatggcttcccctgggagctggtgatctgtgccgctgtggtgggcttctttgctgtgctcttcttcctgtggaggagcttccgctctgtgcgcagccggctgtatgtgggccgggagaagaagctggccctgatgctgagcggcctgattgaggagaagagcaagctgctggagaagttcagcctggtgcagaaggagtatgagggctatgaggtggagagcagcctgaaggatgccagctttgagaaggaggccacagaggcccagagcctggaggccacctgtgagaagctgaacagaagcaacagcgagctggaggatgagatcctgtgcctggagaaggagctgaaggaggagaagagcaagcacagcgagcaggatgagctgatggctgacatcagcaagaggatccagagcctggaggatgagagcaagagcctgaagagccaggtggccgaggccaagatgaccttcaagatcttccagatgaatgaggagcggctgaagatcgccatcaaggatgccctgaatgaaaacagccagctgcaggagagccagaagcagctgctgcaggaggccgaggtgtggaaggagcaggtgtctgagctgaacaagcagaaggtgacctttgaggacagcaaggtgcacgccgagcaggtgctgaatgacaaggagagccacatcaagaccctgacagagcggctgctgaagatgaaggactgggccgccatgctgggggaggacatcacagatgatgacaacctggagctggagatgaacagcgagagtgaaaatggagcctacctggacaacccccccaagggggccctgaagaagctgattcatgctgccaagctgaatgccagcctgaagaccctggagggggagaggaaccagatctacatccagctgtctgaggtggacaagaccaaggaggagctgacagagcacatcaagaacctgcagacagagcaggccagcctgcagagcgagaacacccactttgaaaatgaaaaccagaagctgcagcagaagctgaaggtgatgacagagctgtaccaggagaatgagatgaagctgcacaggaagctgactgtggaggagaactaccgcctggagaaggaggagaagctgagcaaggtggatgagaagatcagccacgccacagaggagctggagacctacaggaagagggccaaggacctggaggaggagctggagaggaccatccacagctaccagggccagatcatcagccatgagaagaaggcccatgacaactggctggccgccagaaatgctgagaggaacctgaatgacctgaggaaagaaaatgcccacaaccggcagaagctgacagaaacagagctgaagtttgagctgctggagaaggacccctatgccctggatgtgcccaacacagccttcggccgggagcacagcccctacggccccagccccctgggctggcccagcagcgagacccgggccttcctgagcccccccaccctgctggagggccccctgcggctgagccccctgctgcccggcggcggcggccggggcagccggggccctggcaaccccctggaccaccagatcaccaatgaaagaggagagagcagctgtgaccggctgacagacccccaccgggcccccagcgacaccggcagcctgagccccccctgggaccaggacaggaggatgatgtttcctcctcctggccagagctacccagacagcgccctgcccccccagaggcaggaccgcttctgcagcaacagcggccgcctgagcggccctgctgagctgcgctccttcaacatgcccagcctggacaagatggatggctccatgcccagcgagatggagagcagcagaaatgacaccaaggatgacctgggcaacctgaatgtgcctgacagcagcctgcctgcagaaaatgaggccaccggccctggctttgtgcccccacccctggcccccatccggggccccctcttccctgtggatgcccggggccccttcctgcggcggggcccccccttccccccacctcctcctggggccatgtttggagccagccgggactacttccccccaggggacttccctggccccccaccagccccctttgccatgagaaatgtgtacccaccccggggcttccccccctacctgcccccccggcccggcttcttccccccaccaccccacagcgagggccgctctgagttccccagcggcctcatcccccccagcaatgagcccgccacagagcaccctgagccccagcaggagacctag

SEQ ID NO: 263039 - DNA, 2328 bp, Artificial Sequence
  derived and/or modified sequence
atgcggcccgacagcaacctgtacggcttcccctgggagctggtgatttgtgctgcagtggtgggttttttcgccgtgctgttcttcctttggagatcctttagaagtgtgcggagccgtctctatgtgggtcgagaaaagaagcttgctctgatgcttagcggcctcatcgaagaaaaatccaaattactggagaaattctcactggtccagaaggagtatgaaggctacgaggttgaatcaagtctgaaggatgcatccttcgaaaaagaggccactgaggcgcaatccttggaggcgacctgcgagaaactgaatcggagcaactcggaactggaagatgagatcctgtgtctggaaaaagagctcaaagaagaaaagtccaagcattccgaacaggacgaactgatggccgacattagtaaacgaattcaatctttggaggatgagagtaaatctcttaagagtcaagtagctgaagctaaaatgactttcaagattttccagatgaatgaagagcggctgaagatcgccatcaaggatgccctcaacgagaacagtcaactccaggagtcccagaaacaactcttgcaggaagctgaagtgtggaaggagcaggtgtccgaactgaacaaacagaaggtaacattcgaagacagtaaggtgcatgctgagcaggtgctcaacgataaggagagtcatatcaagacgctgactgaaaggttgcttaagatgaaggactgggctgcaatgctgggagaggacattactgatgatgacaatctggagttggagatgaatagcgaatccgagaacggtgcatacctggataatcctcctaagggcgcccttaagaagctgatccacgctgccaagttaaatgcctccctgaagaccctggaaggtgagaggaaccagatctacatccaattgtctgaggtcgataagaccaaggaggaactgacagagcacatcaaaaacttgcagactgagcaagcaagcctgcagtccgagaatacgcacttcgaaaatgaaaaccaaaagttgcagcagaaactgaaggtcatgacagaactgtaccaagagaacgaaatgaagttgcatcggaaacttactgttgaagagaactaccgactggaaaaggaggaaaaacttagcaaggtggacgagaaaatcagtcacgctaccgaagagctggagacctaccggaagcgtgctaaggatctcgaggaagagcttgaacgcacaattcactcctaccaggggcaaataatttctcacgagaagaaagctcatgataattggctggctgctagaaacgcggaaagaaacctcaacgaccttcgcaaggagaatgcacacaatcgacaaaagctaaccgagacggaactgaagtttgaattgttggaaaaggacccgtacgctctggacgttcccaacactgcattcgggcgggagcacagcccttatggcccctccccactgggatggcccagctctgagactcgggcgttcttgagcccccccaccctgctggaggggcccctgcgcctttccccacttctgcctggggggggtgggcggggctcacgcggcccgggtaaccccctggaccatcagatcactaacgagagaggagaaagcagctgcgataggttgacagatcctcatcgggccccctcagacactggctcactgtcgcctccctgggaccaggaccgcaggatgatgtttccacctcctggacaatcttacccagattctgctttaccgccccagagacaggatcggttttgctcgaacagtggaaggctatcagggccggcagaacttagatcttttaacatgccctccctcgataaaatggacggttctatgccctctgagatggaatcaagcagaaacgatacaaaagacgacctgggcaacctgaacgtgcctgattctagtcttccagcagagaacgaggcaacagggcccggctttgttccaccacccctcgctccaatccggggaccactctttcctgtagacgctcgggggcctttcctgcgtcgtggcccgccttttcctccgcccccacctggtgccatgtttggcgcctcccgcgattactttccacccggagacttcccgggtccgccaccagcgccttttgcaatgagaaacgtgtatccacctaggggtttccctccatacttgcctccacgtcccggtttctttccccctccgccccacagtgaggggcgctccgagttcccgtccgggcttatccctccttccaatgagcccgcgaccgaacatccggagccccagcaggagacctag

SEQ ID NO: 263040 - DNA, 2328 bp, Artificial Sequence
  derived and/or modified sequence
atgcggcctgatagcaatctctatggattcccttgggagctcgtaatttgtgccgcagtggttggctttttcgcggtacttttttttttgtggaggtccttccgctccgtgcgttcaaggctgtacgttggcagggagaagaaactggcgttaatgttatcaggtctcatcgaggaaaaaagtaagctgctagaaaagttcagcttggtccagaaggagtacgaaggctatgaggtcgagtcttcccttaaagatgcttcatttgagaaggaagctaccgaggcccagtctttggaggccacctgcgaaaagttgaataggagtaactccgagctagaagatgagattctctgcctggaaaaagagttaaaagaagagaaaagtaaacatagcgaacaagatgaactgatggccgacatttctaagcgaattcagtcacttgaagatgagagtaaaagtctcaagagtcaggtggcagaggcaaaaatgacctttaagatcttccagatgaatgaggaacgattaaagatcgcaattaaggacgcattgaacgaaaattcacagctgcaggaatcacagaaacagctgctgcaggaagccgaagtttggaaggagcaggtgtctgagcttaacaaacaaaaggtgacatttgaagacagcaaagtacatgctgagcaggttttaaacgacaaggagtcacatataaagaccttaacagagcgtctgctcaagatgaaggattgggcggctatgctgggggaggacatcactgatgatgacaacctggagctggagatgaacagcgagagtgagaacggtgcatacctcgacaaccctccaaagggcgctctgaagaaactcattcacgctgcaaagctcaatgcatcgctcaagaccttggaaggagaacggaatcagatttacatccagctgtctgaagtcgataagactaaagaggagctgacggagcacattaagaacttacagaccgaacaagccagcttgcagagtgaaaatacccatttcgaaaatgagaatcaaaaactgcagcagaaactgaaggtgatgacagaactgtaccaagaaaatgaaatgaagctccataggaagctgacagtcgaggagaactatagacttgagaaagaagaaaaattgagcaaggtggacgaaaagatctcgcatgcaacggaagagctggagacttaccgcaagcgagccaaggatctggaagaagagctcgaacgtaccatccattcctatcagggtcagatcatttcccacgagaagaaggcccacgacaactggttagcagcaaggaacgcagaaagaaacttaaacgatctccgaaaagagaacgcgcataataggcagaagctgacagagaccgagctgaagttcgaactgctagaaaaggatccatacgctctggatgtacccaatacagcctttggcagagagcattccccatacggaccatcccccctcgggtggccctcttctgaaactagagcttttctgagccctcccacactgctcgaaggccctctgcggctgagccctctactgccaggcggaggcggtcgtggcagtcgcggtcccggtaacccccttgaccaccaaatcaccaatgagagaggtgagtcttcatgcgatcggttgaccgacccacatcgagctccatcagatacgggaagtttgtcccctccctgggatcaggaccggaggatgatgtttccgccacccggtcaatcgtatccagattcagccctccctccccaacgccaggatcgcttctgctccaactccggacgcttaagcggccctgcggagctgcgttcctttaatatgccttcactcgataagatggatgggtctatgccatccgaaatggagtccagtcgcaatgacaccaaagatgatctgggcaatttgaatgtccccgactcatccctcccggcagaaaacgaagccacaggcccaggatttgtgccgccacctctcgcaccgatacgaggtcctctctttccagtggatgccaggggcccttttttgagaagaggacccccttttccccctccaccgcctggcgcaatgttcggagcgtcccgagactactttccaccaggagactttcctggccctcctcccgctccttttgctatgcggaacgtatatcctcccaggggtttcccaccataccttcctcccaggccaggattctttcccccaccgcctcatagtgaggggcgtagtgaatttccttccgggctcatcccgccatccaacgagccagccacggagcatccagaaccccagcaggaaacttag

SEQ ID NO: 263041 - protein, 694 aa, Artificial Sequence
  derived and/or modified sequence
MPSATSHSGSGSKSSGPPPPSGSSGSEAAAGAGAAAPASQHPATGTGAVQTEAMKQILGVIDKKLRNLEKKKGKLDDYQERMNKGERLNQDQLDAVSKYQEVTNNLEFAKELQRSFMALSQDIQKTIKKTARREQLMREEAEQKRLKTVLELQYVLDKLGDDEVRTDLKQGLNGVPILSEEELSLLDEFYKLVDPERDMSLRLNEQYEHASIHLWDLLEGKEKPVCGTTYKVLKEIVERVFQSNYFDSTHNHQNGLCEEEEAASAPAVEDQVPEAEPEPAEEYTEQSEVESTEYVNRQFMAETQFTSGEKEQVDEWTVETVEVVNSLQQQPQAASPSVPEPHSLTPVAQADPLVRRQRVQDLMAQMQGPYNFIQDSMLDFENQTLDPAIVSAQPMNPTQNMDMPQLVCPPVHSESRLAQPNQVPVQPEATQVPLVSSTSEGYTASQPLYQPSHATEQRPQKEPIDQIQATISLNTDQTTASSSLPAASQPQVFQAGTSKPLHSSGINVNAAPFQSMQTVFNMNAPVPPVNEPETLKQQNQYQASYNQSFSSQPHQVEQTELQQEQLQTVVGTYHGSPDQSHQVTGNHQQPPQQNTGFPRSNQPYYNSRGVSRGGSRGARGLMNGYRGPANGFRGGYDGYRPSFSNTPNSGYTQSQFSAPRDYSGYQRDGYQQNFKRGSGQSGPRGAPRGNILWW

SEQ ID NO: 263042 - DNA, 2130 bp, Artificial Sequence
  derived and/or modified sequence
atgcccagcgccaccagccacagcggcagcggcagcaagagcagcggcccccccccccccagcggcagcagcggcagcgaggccgccgccggcgccggcgccgccgcccccgccagccagcaccccgccaccggcaccggcgccgtgcagaccgaggccatgaagcagatcctgggcgtgatcgacaagaagctgagaaacctggagaagaagaagggcaagctggacgactaccaggagagaatgaacaagggcgagagactgaaccaggaccagctggacgccgtgagcaagtaccaggaggtgaccaacaacctggagttcgccaaggagctgcagagaagcttcatggccctgagccaggacatccagaagaccatcaagaagaccgccagaagagagcagctgatgagagaggaggccgagcagaagagactgaagaccgtgctggagctgcagtacgtgctggacaagctgggcgacgacgaggtgagaaccgacctgaagcagggcctgaacggcgtgcccatcctgagcgaggaggagctgagcctgctggacgagttctacaagctggtggaccccgagagagacatgagcctgagactgaacgagcagtacgagcacgccagcatccacctgtgggacctgctggagggcaaggagaagcccgtgtgcggcaccacctacaaggtgctgaaggagatcgtggagagagtgttccagagcaactacttcgacagcacccacaaccaccagaacggcctgtgcgaggaggaggaggccgccagcgcccccgccgtggaggaccaggtgcccgaggccgagcccgagcccgccgaggagtacaccgagcagagcgaggtggagagcaccgagtacgtgaacagacagttcatggccgagacccagttcaccagcggcgagaaggagcaggtggacgagtggaccgtggagaccgtggaggtggtgaacagcctgcagcagcagccccaggccgccagccccagcgtgcccgagccccacagcctgacccccgtggcccaggccgaccccctggtgagaagacagagagtgcaggacctgatggcccagatgcagggcccctacaacttcatccaggacagcatgctggacttcgagaaccagaccctggaccccgccatcgtgagcgcccagcccatgaaccccacccagaacatggacatgccccagctggtgtgcccccccgtgcacagcgagagcagactggcccagcccaaccaggtgcccgtgcagcccgaggccacccaggtgcccctggtgagcagcaccagcgagggctacaccgccagccagcccctgtaccagcccagccacgccaccgagcagagaccccagaaggagcccatcgaccagatccaggccaccatcagcctgaacaccgaccagaccaccgccagcagcagcctgcccgccgccagccagccccaggtgttccaggccggcaccagcaagcccctgcacagcagcggcatcaacgtgaacgccgcccccttccagagcatgcagaccgtgttcaacatgaacgcccccgtgccccccgtgaacgagcccgagaccctgaagcagcagaaccagtaccaggccagctacaaccagagcttcagcagccagccccaccaggtggagcagaccgagctgcagcaggagcagctgcagaccgtggtgggcacctaccacggcagccccgaccagagccaccaggtgaccggcaaccaccagcagcccccccagcagaacaccggcttccccagaagcaaccagccctactacaacagcagaggcgtgagcagaggcggcagcagaggcgccagaggcctgatgaacggctacagaggccccgccaacggcttcagaggcggctacgacggctacagacccagcttcagcaacacccccaacagcggctacacccagagccagttcagcgcccccagagactacagcggctaccagagagacggctaccagcagaacttcaagagaggcagcggccagagcggccccagaggcgcccccagaggcagaggcggcccccccagacccaacagaggcatgccccagatgaacacccagcaggtgaactag

SEQ ID NO: 263043 - DNA, 2085 bp, Artificial Sequence
  derived and/or modified sequence
atgcccagcgccaccagccacagcggcagcggcagcaagagcagcggcccccccccccccagcggcagcagcggcagcgaggccgccgccggcgccggcgccgccgcccccgccagccagcaccccgccaccggcaccggcgccgtgcagaccgaggccatgaagcagatcctgggcgtgatcgacaagaagctgagaaacctggagaagaagaagggcaagctggacgactaccaggagagaatgaacaagggcgagagactgaaccaggaccagctggacgccgtgagcaagtaccaggaggtgaccaacaacctggagttcgccaaggagctgcagagaagcttcatggccctgagccaggacatccagaagaccatcaagaagaccgccagaagagagcagctgatgagagaggaggccgagcagaagagactgaagaccgtgctggagctgcagtacgtgctggacaagctgggcgacgacgaggtgagaaccgacctgaagcagggcctgaacggcgtgcccatcctgagcgaggaggagctgagcctgctggacgagttctacaagctggtggaccccgagagagacatgagcctgagactgaacgagcagtacgagcacgccagcatccacctgtgggacctgctggagggcaaggagaagcccgtgtgcggcaccacctacaaggtgctgaaggagatcgtggagagagtgttccagagcaactacttcgacagcacccacaaccaccagaacggcctgtgcgaggaggaggaggccgccagcgcccccgccgtggaggaccaggtgcccgaggccgagcccgagcccgccgaggagtacaccgagcagagcgaggtggagagcaccgagtacgtgaacagacagttcatggccgagacccagttcaccagcggcgagaaggagcaggtggacgagtggaccgtggagaccgtggaggtggtgaacagcctgcagcagcagccccaggccgccagccccagcgtgcccgagccccacagcctgacccccgtggcccaggccgaccccctggtgagaagacagagagtgcaggacctgatggcccagatgcagggcccctacaacttcatccaggacagcatgctggacttcgagaaccagaccctggaccccgccatcgtgagcgcccagcccatgaaccccacccagaacatggacatgccccagctggtgtgcccccccgtgcacagcgagagcagactggcccagcccaaccaggtgcccgtgcagcccgaggccacccaggtgcccctggtgagcagcaccagcgagggctacaccgccagccagcccctgtaccagcccagccacgccaccgagcagagaccccagaaggagcccatcgaccagatccaggccaccatcagcctgaacaccgaccagaccaccgccagcagcagcctgcccgccgccagccagccccaggtgttccaggccggcaccagcaagcccctgcacagcagcggcatcaacgtgaacgccgcccccttccagagcatgcagaccgtgttcaacatgaacgcccccgtgccccccgtgaacgagcccgagaccctgaagcagcagaaccagtaccaggccagctacaaccagagcttcagcagccagccccaccaggtggagcagaccgagctgcagcaggagcagctgcagaccgtggtgggcacctaccacggcagccccgaccagagccaccaggtgaccggcaaccaccagcagcccccccagcagaacaccggcttccccagaagcaaccagccctactacaacagcagaggcgtgagcagaggcggcagcagaggcgccagaggcctgatgaacggctacagaggccccgccaacggcttcagaggcggctacgacggctacagacccagcttcagcaacacccccaacagcggctacacccagagccagttcagcgcccccagagactacagcggctaccagagagacggctaccagcagaacttcaagagaggcagcggccagagcggccccagaggcgcccccagaggcaacatcctgtggtggtag

SEQ ID NO: 263044 - DNA, 2130 bp, Artificial Sequence
  derived and/or modified sequence
atgccttcagctactagccacagcggctcggggagcaaatcctccggacccccgcctcctagcgggtcttcaggtagcgaggccgcagccggggccggtgctgcagccccagcctcacagcatccggcaacgggtacgggagctgtccaaacagaggccatgaaacaaatactgggcgtgattgacaagaaactccgaaatttggagaaaaaaaaaggtaagcttgatgattaccaggaaagaatgaacaaaggtgagaggctaaaccaggaccagcttgacgcagtgtcgaaatatcaggaagttactaataatcttgagttcgcgaaggaattgcagcggagctttatggccctatctcaggacattcagaaaaccattaagaaaaccgctcgtagggaacagctgatgagggaggaggccgaacagaaacggctgaaaactgtgctggaattgcagtatgtcctggacaaattgggcgatgatgaggttcgaactgatctcaagcaggggcttaatggcgttcccatactgtcagaggaagagctctccctgctggacgaattttacaaactcgttgaccccgaaagggacatgtccctcagactgaacgagcagtatgaacacgcctctattcatttgtgggatttacttgaaggaaaagagaagcctgtttgtgggacaacctacaaggttctgaaggaaatcgtggagagggtcttccagagcaattattttgactcaacccacaatcaccaaaacggcttgtgcgaagaggaagaagcagcaagtgctccagccgtagaggatcaagtgcctgaagccgaaccagagcccgcagaagaatatacggaacaaagcgaggtggaaagcaccgaatacgtcaatcgacaatttatggccgaaacccaatttacaagcggagaaaaagaacaggtagatgaatggaccgttgaaacagtggaggtcgtgaactctctccaacagcaaccccaagccgcttctccaagtgtacccgaaccccattctctgacacctgtggcacaggccgaccctctggtgcggaggcagcgtgtgcaggatctcatggcccaaatgcaaggcccttataatttcatccaggatagtatgctcgattttgagaaccagaccttagatcccgcgatagtttccgcgcagcccatgaatcctacccaaaatatggatatgccccagttagtttgcccccctgtgcactccgaaagcaggttggctcaacccaaccaagttcccgtccagcccgaggccacccaggttcctctggtgtcgtccacttctgaaggctacacagccagccaacctttatatcagccgagccatgcaaccgaacagcgcccacagaaggaaccaattgaccagattcaggctaccattagtcttaataccgaccaaaccacagccagcagcagtctgcctgccgcctctcagccccaggtgtttcaggcaggtacctccaagcctctgcattcctctggaattaatgtcaatgcagcacctttccagtcaatgcagactgtgttcaatatgaatgctccggtcccaccagtgaacgagccagaaaccctgaagcagcaaaatcagtaccaggcctcatacaaccagtcattttcctcccagccccaccaggtggaacaaacggagttgcaacaagaacagctgcaaaccgtggtaggaacttaccacggttcccctgaccagtcccaccaggtcacaggtaaccaccaacagccaccgcagcaaaataccggcttcccaaggagtaatcagccttattacaatagcagaggtgtgagtagaggcggctcacggggagccagaggtttgatgaacggttaccgtggtcccgccaatggctttaggggcggttacgacgggtacaggcccagcttcagtaacactcctaactctggatatacacagtcccagttctccgctccaagggactacagcggctatcaacgggacggctaccagcagaactttaaaaggggttccggacagtccgggcctaggggagcccctcgaggaagagggggccctcctagaccgaatagaggcatgccacagatgaatacccaacaggtgaactag

SEQ ID NO: 263045 - DNA, 2130 bp, Artificial Sequence
  derived and/or modified sequence
atgccctcggcaaccagccatagcggctcaggaagtaagagttccggtcccccacctccctccggctctagtggttcagaggcagctgccggcgctggagcagcggcgccagcctctcaacatcccgccacaggaaccggcgctgttcagactgaggcgatgaaacagattctgggtgtgattgacaaaaaattgcgaaacctcgagaaaaaaaaaggaaagctggacgattatcaggagagaatgaataagggggagcggctaaatcaggaccagctggacgccgtgagtaagtaccaagaagtcactaataacttggagttcgcgaaagagctgcagcgttcttttatggctctcagccaggatatccagaagaccataaagaagactgctaggagggaacagctcatgagagaggaggcagaacagaaacgtctcaagaccgtcctggagctgcagtatgtgctcgacaagctaggcgatgatgaggtgcgaacagacttgaagcaaggattaaatggcgttcctatcctgtcggaggaagagttgagcttacttgacgagttttataagcttgttgatcccgagagggatatgagccttcgcctgaatgagcaatacgaacatgcttctatccacctttgggaccttttggagggcaaagagaaaccggtgtgcggaacaacatataaggtgcttaaggagatcgttgagcgagtctttcaatcaaactattttgattcgacgcacaatcaccaaaatggcctctgcgaggaggaggaagctgcaagcgcacctgccgtggaggaccaggttcctgaggctgagccggaaccagccgaggagtacactgagcagtccgaggtcgagtcaacagagtatgtaaaccgccagtttatggcagaaacccaattcacctcaggcgaaaaggagcaggtcgacgaatggactgtggagactgtggaggtggtcaattcgctgcaacagcagccccaggcagcatccccctccgtgcctgagcctcacagtctcacgccagtcgcccaggccgatcccctggtgagacgccagagggttcaggacctgatggcccagatgcagggaccctataatttcatacaggattccatgctcgatttcgaaaatcagaccctggatcctgcaatagtttcggctcagccaatgaaccccacacagaacatggatatgccacagctggtttgccccccggtccatagcgagtctagactggcacagccaaatcaggtcccagtccagccggaggccacccaggtccctcttgtgagctccaccagcgaaggatataccgcttcgcaacccctttatcagcctagccacgctacagaacagcgacctcagaaggagcccatcgaccagattcaagccactataagcctgaataccgatcaaaccactgccagtagcagcctcccagccgcttctcagccacaggtgttccaggcagggacaagcaaaccattgcacagctctggaatcaacgtgaatgccgcaccttttcagagtatgcagaccgtcttcaacatgaacgcaccagtgccaccagtaaacgaacctgagactctgaagcagcagaaccagtaccaggcaagctataaccagtcattcagtagccagccacaccaagtggagcagactgaattgcaacaggagcagctccaaactgtggtcggaacctaccatgggtcgccagaccaaagtcaccaagttactggaaatcaccagcagccaccccaacaaaacacgggattccctcggagcaaccaaccctactacaattctcgaggcgtcagccggggggggagtagaggtgcgcgcgggctgatgaacggttatcggggcccagcgaatgggtttagaggcgggtatgatggatatcgcccctctttctcaaacaccccgaacagtgggtacacccagagtcagttctccgctccccgggactatagtggttaccagagggatggttaccagcagaattttaagcggggtagcgggcaatccgggccacgaggagctccacgcgggcggggcggcccacctcgaccaaatcggggcatgccccagatgaatacacagcaggtgaattag

SEQ ID NO: 263046 - DNA, 2085 bp, Artificial Sequence
  derived and/or modified sequence
atgccgtccgcaacatcccactcgggctctggtagtaagtcctctggcccgcctcctccaagtgggtcttctggatcagaggcggccgccggggccggcgcagctgcacctgcatcccagcacccagcaaccgggacgggcgctgtccagaccgaagcaatgaagcagatattgggcgttattgacaagaagctccgcaatcttgagaagaagaaaggcaaactggacgactaccaagagagaatgaataagggagagcggctgaatcaggatcaattggacgcagtcagtaagtatcaggaagtcaccaataatctggaatttgccaaagagttgcagcggagtttcatggcactgtcacaagatatccagaagactataaagaaaacggcccggcgtgagcaattgatgagagaggaagccgaacagaagaggctgaagacagtgctcgagctacagtacgtcctggataagttaggggacgatgaagtccggaccgatctgaagcagggactgaacggcgtgcccattttaagcgaggaggaactttcgctgctcgacgagttctacaagctcgtggaccctgagcgagatatgagtcttaggttgaatgaacaatacgaacatgcaagcatacatctgtgggatctgttagagggtaaagagaaaccagtgtgcgggactacgtataaagtgttgaaagagatcgttgagagggtgttccagagcaattatttcgattctacacacaaccatcagaacgggctttgtgaggaggaagaggctgctagtgcccccgcagtagaggaccaagtgcccgaggctgaacctgagccagcggaggagtataccgagcagtcagaggtcgagtcgacggagtacgtgaataggcaattcatggccgagacccaatttacaagtggtgaaaaagaacaggtggacgagtggaccgtggagacagtagaggtagttaattcgctgcagcagcaaccccaggcagcctccccttccgtccccgaaccccactctctgacacctgtcgcccaggcagaccctcttgttcggcgtcagcgtgtccaggacctgatggcacagatgcaggggccatacaattttattcaagactctatgctcgactttgagaatcaaactctggaccctgctatcgtgtctgcgcaaccaatgaacccaactcagaacatggacatgccccagttggtctgtcccccggtccacagcgagtctagattggcccagcccaatcaggtccctgtgcagcccgaagctactcaagtccctcttgtgtctagcacatccgaggggtacaccgcttcccaacccctctatcagccaagccatgccaccgagcaacgcccgcagaaggaacctatcgatcagatccaggcgaccatttcactaaatactgatcagacgacagcttctagtagcctgccggctgctagtcaaccccaggtgttccaggcaggcacctccaagccactgcactcaagtgggattaatgtcaacgctgcaccttttcagagcatgcagacagtgttcaacatgaacgctccggtgcctcccgtaaacgagcccgaaaccctgaaacagcagaaccagtatcaggcctcttacaaccagtctttttcatctcaacctcaccaagtggagcagactgagttacagcaggagcagctccagactgtagtagggacatatcacggtagccccgaccagagccatcaagtgaccggaaatcatcagcagcctccgcagcagaacacaggctttccaaggtcgaaccagccgtactataattccagaggcgtctcccgcggagggtctcgtggagcgcgtggcctaatgaacggttatagaggacccgcgaatggcttcaggggcggatacgacggatatcgcccttctttctcaaatactccaaatagcgggtacacacagtcacagttctctgcaccacgagactactccggatatcagagggacggatatcagcagaacttcaaaagagggagcggtcagtctgggccacgcggggccccacgggggaatatcctctggtggtag

SEQ ID NO: 263047 - DNA, 2130 bp, Artificial Sequence
  derived and/or modified sequence
atgcccagcgccaccagccacagcggcagcggcagcaagagcagcggccccccacctccttctggcagcagcggcagcgaggccgccgccggggccggggctgctgccccagccagccagcacccagccaccggcaccggggctgtgcagacagaggccatgaagcagatcctgggcgtgattgacaagaagctgaggaacctggagaagaagaagggcaagctggatgactaccaggagaggatgaacaagggggagcggctgaaccaggaccagctggatgctgtgtccaagtaccaggaggtgaccaacaacctggagtttgccaaggagctgcagaggagcttcatggccctgagccaggacatccagaagaccatcaagaagacagcccggcgggagcagctgatgagggaggaggccgagcagaagaggctgaagacagtgctggagctgcagtatgtgctggacaagctgggagatgatgaggtgaggacagacctgaagcagggcctgaatggagtgcccatcctgtctgaggaggagctgagcctgctggatgagttctacaagctggtggaccctgagcgggacatgagcctgcggctgaatgagcagtatgaacatgccagcatccacctgtgggacctgctggagggcaaggagaagcctgtgtgtggcaccacctacaaggtgctgaaggagatcgtggagagggtcttccagagcaactactttgacagcacccacaaccaccagaatggcctgtgtgaggaggaggaggccgccagcgccccagctgtggaggaccaggtgcctgaggccgagcctgagcctgctgaggagtacacagagcagagcgaggtggagagcacagaatatgtgaaccggcagttcatggccgagacccagttcaccagcggggagaaggagcaggtggatgagtggacagtggagaccgtggaggtggtgaacagcctgcagcagcagccccaggccgccagccccagcgtgcctgagccccacagcctgacccctgtggcccaggccgaccccctggtgcggcggcagagggtgcaggacctgatggcccagatgcagggcccctacaacttcatccaggacagcatgctggactttgagaaccagaccctggaccctgccatcgtgtctgcccagcccatgaaccccacccagaacatggacatgccccagctggtgtgcccccctgtgcacagcgagagccggctggcccagcccaaccaggtgcctgtgcagcctgaggccacccaggtgcccctggtgagcagcaccagcgagggctacacagccagccagcccctgtaccagcccagccacgccacagagcagaggccccagaaggagcccatcgaccagatccaggccaccatcagcctgaacacagaccagaccacagccagcagcagcctgcctgctgccagccagccccaggtgttccaggccggcaccagcaagcccctgcacagcagcggcatcaacgtgaatgctgcccccttccagagcatgcagaccgtcttcaacatgaatgcccctgtgccccctgtgaatgaacctgagaccctgaagcagcagaaccagtaccaggccagctacaaccagagcttcagcagccagccccaccaggtggagcagacagagctgcagcaggagcagctgcagacagtggtgggcacctaccacggcagcccagaccagagccaccaggtgacaggcaaccaccagcagcccccccagcagaacacaggcttccccaggagcaaccagccctactacaacagcagaggagtgtccagaggaggcagcagaggagcccggggcctgatgaatggctaccggggccctgccaacggcttccggggcggctatgatggctaccggcccagcttcagcaacacccccaacagcggctacacccagagccagttcagcgccccccgggactacagcggctaccagagagatggctaccagcagaacttcaagaggggcagcggccagagcggccccaggggggccccccggggccggggcggccccccccggcccaacagaggcatgccccagatgaacacccagcaggtgaactag

SEQ ID NO: 263048 - DNA, 2085 bp, Artificial Sequence
  derived and/or modified sequence
atgcccagcgccaccagccacagcggcagcggcagcaagagcagcggccccccacctccttctggcagcagcggcagcgaggccgccgccggggccggggctgctgccccagccagccagcacccagccaccggcaccggggctgtgcagacagaggccatgaagcagatcctgggcgtgattgacaagaagctgaggaacctggagaagaagaagggcaagctggatgactaccaggagaggatgaacaagggggagcggctgaaccaggaccagctggatgctgtgtccaagtaccaggaggtgaccaacaacctggagtttgccaaggagctgcagaggagcttcatggccctgagccaggacatccagaagaccatcaagaagacagcccggcgggagcagctgatgagggaggaggccgagcagaagaggctgaagacagtgctggagctgcagtatgtgctggacaagctgggagatgatgaggtgaggacagacctgaagcagggcctgaatggagtgcccatcctgtctgaggaggagctgagcctgctggatgagttctacaagctggtggaccctgagcgggacatgagcctgcggctgaatgagcagtatgaacatgccagcatccacctgtgggacctgctggagggcaaggagaagcctgtgtgtggcaccacctacaaggtgctgaaggagatcgtggagagggtcttccagagcaactactttgacagcacccacaaccaccagaatggcctgtgtgaggaggaggaggccgccagcgccccagctgtggaggaccaggtgcctgaggccgagcctgagcctgctgaggagtacacagagcagagcgaggtggagagcacagaatatgtgaaccggcagttcatggccgagacccagttcaccagcggggagaaggagcaggtggatgagtggacagtggagaccgtggaggtggtgaacagcctgcagcagcagccccaggccgccagccccagcgtgcctgagccccacagcctgacccctgtggcccaggccgaccccctggtgcggcggcagagggtgcaggacctgatggcccagatgcagggcccctacaacttcatccaggacagcatgctggactttgagaaccagaccctggaccctgccatcgtgtctgcccagcccatgaaccccacccagaacatggacatgccccagctggtgtgcccccctgtgcacagcgagagccggctggcccagcccaaccaggtgcctgtgcagcctgaggccacccaggtgcccctggtgagcagcaccagcgagggctacacagccagccagcccctgtaccagcccagccacgccacagagcagaggccccagaaggagcccatcgaccagatccaggccaccatcagcctgaacacagaccagaccacagccagcagcagcctgcctgctgccagccagccccaggtgttccaggccggcaccagcaagcccctgcacagcagcggcatcaacgtgaatgctgcccccttccagagcatgcagaccgtcttcaacatgaatgcccctgtgccccctgtgaatgaacctgagaccctgaagcagcagaaccagtaccaggccagctacaaccagagcttcagcagccagccccaccaggtggagcagacagagctgcagcaggagcagctgcagacagtggtgggcacctaccacggcagcccagaccagagccaccaggtgacaggcaaccaccagcagcccccccagcagaacacaggcttccccaggagcaaccagccctactacaacagcagaggagtgtccagaggaggcagcagaggagcccggggcctgatgaatggctaccggggccctgccaacggcttccggggcggctatgatggctaccggcccagcttcagcaacacccccaacagcggctacacccagagccagttcagcgccccccgggactacagcggctaccagagagatggctaccagcagaacttcaagaggggcagcggccagagcggccccaggggggccccccggggcaacatcctgtggtggtag

SEQ ID NO: 263049 - DNA, 2130 bp, Artificial Sequence
  derived and/or modified sequence
atgcccagcgccaccagccacagcggcagcggcagcaagagcagcggcccgcctcctccctcggggtcctccgggagcgaggccgctgcgggcgccggggccgccgcacccgccagtcaacacccagctacaggcaccggagccgtgcagactgaggctatgaagcaaatactgggcgtgattgacaaaaagttacgcaatctggagaagaagaaggggaagctggacgactatcaggagcgcatgaacaagggcgaaaggcttaaccaagaccagctggacgctgtctcaaaatatcaggaagtcaccaataacctcgagtttgctaaggagctgcagagaagtttcatggcattgtcacaggacatccagaaaactattaaaaaaaccgcaagacgggagcagttgatgcgggaagaggcagaacagaaaaggctcaagaccgtgctagagctccagtatgtgctggataagttaggtgacgatgaggtcagaaccgatctaaaacagggcctgaacggcgttccgatactgtccgaggaggagctgtctctgctcgacgaattttacaagctagttgaccccgaacgagatatgtctctgagactgaacgaacagtacgagcacgcctcaatccacctttgggatcttctcgaaggaaaggaaaagcctgtctgcggaaccacctataaggtcctgaaggagatcgttgagagagtctttcaatcaaactatttcgacagcacccataatcatcagaacggactgtgcgaagaggaagaggccgctagcgcacctgccgtagaagaccaggttcccgaggccgagcctgagcctgcagaggagtacacagaacaatctgaggtagagagcactgaatatgttaaccggcagttcatggctgaaacccagttcacttcaggtgaaaaagaacaggtggacgagtggactgtcgaaacagtcgaggtcgtcaattccctccagcagcagccccaggccgcatcaccctcagttcccgaaccgcacagcttaacacccgtggcacaggccgaccccttggtacgccggcaaagggtacaggatctgatggcacagatgcaggggccctataatttcattcaggattctatgctggatttcgaaaatcagacccttgaccccgcaatcgtgtccgcacagcctatgaatcctacgcagaatatggatatgccacagctcgtatgcccccccgtgcacagcgaatctcgcttggcccagccaaatcaggtccccgtgcagcccgaggcaacacaggtgccactggtctcctccaccagcgaggggtacacagcttcccagcccttgtaccaaccttcacacgcgacagagcaacggccacagaaagagccaatcgaccagattcaggccactatttcactgaatactgatcaaacaaccgccagctcaagcctgcccgccgcatcacagccgcaggtttttcaagccggcacatctaaaccactgcacagtagtgggatcaacgtgaatgccgcccctttccagagcatgcagacggtgttcaatatgaatgccccagtcccccctgtgaacgaacctgaaacactaaaacagcagaaccaataccaggcatcatacaatcagtccttcagcagtcagccccatcaagtggagcaaactgaacttcagcaagagcaactgcaaaccgtagtggggacgtaccatggcagccctgaccagtcccaccaggtcaccggcaatcaccagcagccaccccaacaaaacaccggttttcccaggagcaaccagccttactataactccagaggcgtgagccgtggagggtcacgcggggctcgtggcctgatgaatggctatcggggaccagccaacggctttcgagggggatatgatggatatcgaccttcattctctaatactcccaacagcggttatacccagtcacagttttcggcacccagagactacagcggctaccagcgcgacggctaccagcagaacttcaagcgcggttctggccagagtggccctagaggcgcccccaggggtagggggggacctccacgcccgaacaggggcatgccacaaatgaacactcagcaagtcaattag

SEQ ID NO: 263050 - DNA, 2130 bp, Artificial Sequence
  derived and/or modified sequence
atgcccagcgccaccagccacagcggcagcggcagcaagagcagcgggcctccacctcccagcggatcatcaggatccgaggcagccgcgggagctggggccgcggccccagcctcacagcaccctgcaaccggaacgggcgcagtgcaaaccgaggctatgaagcagatactgggggtgatcgataaaaagttgcgtaacttagagaaaaagaagggaaaactggacgactatcaagagcgcatgaacaaaggcgagcggctgaatcaggatcagcttgacgccgtctcgaaataccaagaggttactaacaacttggagtttgccaaggagctccaacggagttttatggccctcagccaggacattcagaagaccatcaagaagacggcaaggcgcgaacagctgatgcgcgaagaggccgagcaaaaacgtcttaagaccgtactcgagctgcagtacgtcctggataagctaggagatgacgaagtgcggaccgacctaaagcagggattgaacggtgtccctatcttgtcggaggaggagctctctctcttggatgagttctataagctggtagatcctgagcgcgacatgtctttaaggctcaatgaacagtacgagcacgcatccatccatttgtgggaccttttagaagggaaggagaagcctgtatgcgggaccacctataaggtattaaaggagatagtcgagagagtgtttcagtcaaactattttgacagcacacacaatcaccaaaacggactctgtgaggaagaagaagcggcttctgcccctgccgtggaggaccaggtccctgaggcagaaccggaaccagccgaggagtacaccgaacagtctgaggtagaatccaccgaatatgttaatcgtcagttcatggctgaaacacagtttacatccggcgagaaggagcaagtggatgagtggactgttgagaccgtggaggtggttaatagcctgcagcaacagccccaggcggcaagtccctctgttcctgaacctcattctctgaccccggtagcacaggctgacccactggtcaggaggcagagagtccaggacctgatggcccagatgcagggaccatacaacttcattcaggacagtatgttggactttgagaaccagacgttggaccccgctatcgtgtcggctcagccaatgaatcccacccagaacatggacatgccgcagctggtttgtccaccagtgcactccgagagccgcctggcccagcccaaccaagtccccgtgcagcccgaagcgacccaagtgcccctggtaagttctacctcagaggggtacacggccagtcagccactctaccaaccttcacacgcaaccgagcaacgacctcagaaagaacctatcgaccagatccaggcgaccatttctctgaacacagaccagacgaccgctagctcctccctgccagctgctagccagccacaggtgttccaggccggcaccagcaagcctctgcattcctcgggaattaacgtcaacgctgcccctttccaatctatgcagacagtgtttaatatgaatgcccccgttcctccagtcaacgaacctgaaaccttgaagcagcagaatcagtatcaagcatcatacaatcaatcctttagcagccagcctcaccaggtggaacagacagagctgcagcaggaacagcttcaaacagtcgttgggacataccatggctcccccgatcagtcccaccaggtgaccggcaatcaccaacagcctccacagcagaatacaggttttccccgatccaaccagccttactataatagtcgcggcgtcagcaggggaggttcccgaggcgcaaggggccttatgaacgggtaccgaggccctgccaacggattcagagggggctacgacgggtatcgcccatcgttctcaaacacccccaatagtggctatacgcagtcacagttctccgctccgagggattatagcgggtaccaacgggatgggtatcaacaaaatttcaaacgtggaagcggccagtctggtcctaggggcgctcctcgtggcagaggagggccacctaggcccaatagagggatgcctcaaatgaatacgcaacaggtcaactag

SEQ ID NO: 263051 - DNA, 2085 bp, Artificial Sequence
  derived and/or modified sequence
atgcccagcgccaccagccacagcggcagcggcagcaagagcagcgggcctccaccaccaagtggctccagcggtagcgaagcggctgccggcgccggggccgcggctcccgcatctcagcatccagccacgggaactggagctgtgcagaccgaagctatgaagcagatcctgggcgtgattgataagaaactgaggaatcttgaaaagaagaaaggaaagttggatgattaccaggaaagaatgaataagggcgaaaggctgaaccaagatcaactcgacgcggtctccaagtatcaagaggtgaccaacaatcttgagttcgcaaaggagttacaacgatctttcatggccctgtctcaggacattcagaagacgattaagaaaacagctcgaagagaacagctgatgagagaggaggctgaacaaaagcggcttaaaacagtactcgagctccagtacgtattggataagctgggagatgatgaagttaggacagaccttaagcaaggactgaacggtgtcccgatcctgagcgaggaggagttgtccctattagacgaattttacaagctcgtggacccagagagggatatgtccctgcggttgaacgaacagtacgaacacgcctccattcatctttgggatcttctagaggggaaggagaagcccgtgtgcggaaccacctacaaagttttgaaagagatagtggagagggtctttcagtcaaattacttcgatagtacccataaccatcagaacgggctgtgtgaagaagaagaggccgcaagtgcgcccgccgtagaggatcaggttcccgaagccgagccggagcccgccgaagagtacacagagcagtcagaagtggaatccacagaatacgtgaatagacaatttatggctgagacacagttcacctcaggagaaaaggaacaggttgatgagtggactgtagaaacagtggaggtggttaatagtctccagcagcagccacaggctgcttcaccctctgtgccggaacctcattcactcaccccagttgcccaggccgatccgttggtgaggaggcagcgtgttcaggatctgatggctcaaatgcagggcccatacaactttatccaagactcaatgcttgacttcgagaatcagaccttagatcctgctatcgtgagcgcccagccaatgaaccccacccaaaatatggacatgccgcagctggtgtgtcctccagtgcacagtgagtccagactggcccagcctaatcaggtccccgtccagcctgaagcgacacaggtgcctctggtctctagtacttctgagggttacacagctagccagcccctttaccagcccagccacgccacagagcagaggccgcagaaggagccaattgaccagatccaggccaccatttctctgaacacggatcagaccactgctagctcatccctgcccgcagccagccagccacaggttttccaagccggaacttctaagcccctgcatagttctgggataaacgtcaatgccgccccctttcaatcaatgcagacagtcttcaatatgaatgccccagtcccgcccgtgaacgaaccggagactctgaagcagcagaatcaataccaagcctcttataaccagtccttcagcagccagccacaccaggtggaacagactgagctgcagcaagagcaactgcagacagttgtcggtacttatcacggcagccccgatcagagccaccaggtgactgggaatcaccagcagcctcctcaacagaacacggggtttcctcgtagtaaccaaccgtattacaattcccggggcgtgtctaggggcggaagtaggggagccaggggactgatgaacggatatcggggtccagcaaatggattccgcggcggctacgacggctacaggccatcctttagcaatacacccaacagcggctatactcaatcccagttttccgccccccgggactactcaggataccagagggatggctaccagcagaactttaagcgcggaagtggtcaaagtggacctagaggggctccccgagggaatattctatggtggtag

SEQ ID NO: 263052 - DNA, 2130 bp, Artificial Sequence
  derived and/or modified sequence
atgccttcggccacctctcatagcggatcaggctcaaagagttcagggccaccaccacccagcggctctagcggctccgaagctgccgcaggagctggcgcagccgctcccgcatctcaacaccctgccaccggtaccggagccgtgcaaaccgaagcgatgaaacagattctgggagtgatcgacaagaagctgcggaatttggagaaaaagaagggtaaactcgatgactaccaggagaggatgaacaaaggagaacgactaaaccaggaccagttagatgctgtatctaagtaccaggaggtgacgaataatcttgagttcgctaaggagctgcaacggtccttcatggcactgtcgcaagacattcagaagacaatcaaaaagactgcgagaagggaacagctgatgagggaggaggcagaacagaagcggctcaaaactgtcttggagttacaatacgtcctggacaagctgggcgacgatgaggtgcgaaccgacctgaagcagggactaaacggtgtccccattctgtccgaagaggagttgagtttgctcgacgaattttacaagctggtcgatccggagcgggatatgtctctcaggctgaacgagcaatatgagcacgcctctatccacctgtgggatctgttagagggaaaggaaaaacctgtgtgcggcaccacctacaaagttctgaaggagatcgtggagagagtgttccaaagcaactatttcgacagcacgcacaaccatcaaaacggcctgtgtgaagaggaggaggccgcaagcgcacccgctgtagaggatcaagtgcccgaggccgagccagagcctgcagaggagtacactgagcaaagtgaagttgaatccaccgagtatgtgaatcggcagttcatggccgagactcagtttacttcgggggaaaaagagcaggttgacgaatggactgtggaaactgtggaggtggtcaatagtctgcagcagcagccacaagctgcctctccctccgtcccagagcctcatagcctgacccctgtggcccaagccgaccctcttgtgcgcaggcagcgggttcaggacttaatggctcagatgcaggggccttacaacttcattcaggacagcatgctagacttcgaaaatcagaccttggatccagctatcgttagcgcccagccaatgaatcccactcagaacatggatatgcctcagctcgtttgtcctcctgtccattcagaatctagactcgctcagccaaaccaagtccctgtacagcctgaagcaactcaggtgcccctggtatcttcaacttctgaggggtatactgcatcacagccgctgtaccagccctctcatgcgaccgaacagaggccccagaaagagcctattgaccagatccaggctaccatctctctgaacaccgatcaaactacagcttcatcttcacttcccgctgcctcccagccccaggtcttccaggctggtacttccaagcctctccactcatccggaataaatgtgaacgcagccccattccagtcgatgcaaaccgtatttaatatgaatgcgccagtgccacccgtgaacgagccagagaccctgaaacagcagaatcaataccaggctagttataaccagagcttcagttcacagccacaccaggttgaacagacagagctccaacaagaacagctccaaaccgttgttggcacttatcatgggtctccggaccaaagtcatcaggttactggaaatcaccaacaaccccctcagcagaataccggatttccgagatctaaccagccttattataatagccgaggggtgtcccggggaggatctaggggagcacgaggcttgatgaatggataccgaggacctgccaacgggtttagggggggatacgatgggtatagacccagctttagtaacaccccaaactcaggctacacccagagccagttttccgcacctagagactactctggttatcagagggatggctatcagcaaaacttcaagagaggttccggccaatcagggcctcgcggtgcaccacgaggacgcggaggtccccctagacccaaccggggaatgccccagatgaatacacagcaggtgaactag

SEQ ID NO: 263053 - DNA, 2130 bp, Artificial Sequence
  derived and/or modified sequence
atgcctagcgcaacttctcacagtggctccgggtctaagagttccgggcctccacccccatcaggcagtagtgggtctgaggctgctgccggtgccggagctgctgctccagcatcccagcatcccgctacagggaccggcgctgtgcagactgaggctatgaaacagatcctcggcgtcattgataagaaactgcgcaacctagagaaaaagaaaggaaagctggatgactaccaagaacgtatgaacaaaggtgaaagactcaaccaggaccagctggacgctgtctccaagtaccaagaagtgaccaataacctggaatttgccaaggagctgcagcggtcatttatggcactatctcaggatattcagaagacgatcaagaaaactgctcgcagggagcagttgatgagggaggaggcagagcagaagcggctcaagaccgtgctcgaattgcagtacgttctggataaactgggagacgatgaagtaaggacagacctcaagcaggggctgaacggcgtgccgatccttagcgaggaagaactgtccctcctggatgagttttacaaacttgtggatcccgaacgagatatgtccctaagacttaacgaacaatacgagcacgcaagcatacacttatgggatttactggaggggaaagaaaagccagtgtgtgggaccacatacaaggtactaaaagagatcgtggagagagtgtttcaatctaactattttgacagcacccacaaccatcaaaatggactgtgtgaagaagaagaggctgcctcagcccctgcagtggaagatcaggtaccagaggctgaacctgaacctgcggaagagtacacggagcagtcggaagtggaaagcaccgaatatgtcaataggcagttcatggccgaaactcaatttaccagtggcgagaaggagcaggtggacgagtggaccgtcgaaacagttgaggtggtaaacagcctccaacaacagcctcaggccgcttcgcctagtgtcccagagccacattcactcacaccggtggcccaggccgaccccctggtgaggcgacagcgcgtgcaggacctgatggcacagatgcagggaccatataactttatccaggatagcatgttggatttcgagaatcagaccctggatcctgcgattgtgagcgctcagccgatgaatccgacccagaatatggatatgccccagctggtgtgtcccccagtgcactccgagtcaagactggcccaaccaaatcaggtgcccgtacaacctgaggccacccaagtgccactggtaagctctacatcagaaggatacaccgcgagccagccgctctaccaaccctctcacgcaacagaacagagaccccagaaagagcctatcgaccaaatccaagccacaattagcctgaacacagaccagacaaccgcttcttcttctctgccagctgctagtcagccccaagttttccaggctggcacaagtaagccccttcacagctctggaatcaacgtaaacgcagctccctttcagagtatgcaaacggtcttcaatatgaacgcccctgtcccacctgtgaacgaacctgagactttaaaacagcagaaccagtatcaggctagctataatcagagcttcagcagccagccacatcaggttgaacagacagagcttcagcaggaacagttgcagacagtggtgggcacctaccacgggtctcccgaccagagtcaccaggtcaccggaaaccaccagcaaccccctcagcagaatactggctttccccgtagcaatcaaccttactataatagccgcggagtcagtaggggtgggtctagaggcgctagaggactcatgaatggctaccgcggtcctgccaatggatttcgcggtggttatgacggctaccggccatccttctctaatacgcctaatagcgggtatacccagagtcagttttccgcacctagagattacagcggctaccagagagacggctaccaacaaaattttaaaaggggctccgggcagagtggcccacgcggagcgccacggggtcggggtggccctcccaggcctaaccgtggaatgcctcagatgaatacacaacaagttaactag

SEQ ID NO: 263054 - DNA, 2085 bp, Artificial Sequence
  derived and/or modified sequence
atgccctcggctacctcgcactcaggttcaggaagtaagtccagtgggcctcctccacccagcgggagctccggctccgaggccgcagcaggcgctggcgcagccgctcctgcctctcagcatccagcaaccggaaccggggcagtacagaccgaggcgatgaagcagatcctcggggtgatcgacaaaaagctgaggaatctggagaaaaaaaaaggcaaactggatgattatcaggaacgcatgaataagggcgagcggttaaatcaggatcaactggatgcagtctccaaatatcaggaggttacaaacaatctcgagtttgctaaagaactccagcggagtttcatggccctttcacaggacatccagaagaccattaaaaagacagctcggagggagcaactcatgagggaggaggcagagcagaagagattgaagaccgttctggaactgcagtacgtgctcgataagctgggtgatgatgaggtgcgcactgatctgaagcaaggccttaacggggtgcccatcctgtccgaggaagagttaagcctgctcgatgagttttacaagttggtggacccggaaagagatatgtctctgcggctgaacgaacaatacgagcacgcttctatccatctctgggacctgctggaaggcaaagaaaagcctgtttgcgggaccacttacaaggtgctgaaggaaatcgtcgaacgggttttccagtccaactatttcgacagtactcataaccatcaaaacggcctttgcgaggaggaggaggccgcatcagcaccagcagttgaggaccaggtcccggaggccgagccggaacctgccgaagaatatacagaacaatcagaagtggagagtactgaatatgtcaatagacagtttatggctgagacccagtttactagtggcgagaaagaacaagtcgacgagtggacagtggagaccgtggaagtagtcaatagcctgcaacagcagcctcaggcagcatcacctagcgtcccggaaccccatagcctgacaccagttgcccaagccgatcccctggtcagacgacagagggtgcaagatctgatggcccagatgcagggcccatataatttcatccaggactcgatgttagattttgaaaatcaaaccttggacccagccatagtgagcgcccagcctatgaatcctacccagaacatggacatgccacaactggtgtgcccacccgtacactccgaatcccgtttggcacagccaaatcaggttccggtgcagcccgaggccacacaggtgccgctggtctctagtaccagcgaaggctacacagcttcccagccgctctatcagccctcccacgccactgagcagcgaccccagaaagagccaattgatcagatccaggcgaccatctctcttaatactgaccagaccacagcctcttcttcattacccgctgcgtcccagcctcaagtttttcaggccggaacttcgaaacctctccacagctctgggattaatgttaacgccgcacctttccagagtatgcagactgtatttaatatgaatgcgccagttccacccgtgaacgagcccgaaactctcaaacaacagaaccaataccaggcctcatataaccaaagcttctccagccagccccaccaggtggagcagaccgagctgcagcaggagcagctccaaacagtggttggcacctaccacgggagtcccgaccagagccaccaggttaccgggaatcaccaacaacccccacagcagaatacaggctttcctcgctctaaccaaccttattacaattcgcggggagtctcgagagggggaagccgcggtgccagagggttgatgaatggctacagggggccagcaaatggcttcaggggtggctacgacgggtaccggccttcatttagtaatacaccaaattctggctacacgcagagccagttcagcgcccctagagactactcaggctaccagcgtgatggttatcagcagaactttaagcgcggaagtgggcagtcgggcccaaggggtgcgccacggggaaacatcctctggtggtag

SEQ ID NO: 263055 - DNA, 4108 bp, Artificial Sequence
  derived and/or modified sequence
cagagggctgctggctggctaagtccctcccgctcccggctctcgcctcactaggagcggctctcggtgcagcgggacagggcgaagcggcctgcgcccacggagcgcgcgacactgcccggaagggaccaccacccttgccccctcagctgcccactcgtgatttccagcggcctccgcgcgcgcacgatgccctcggccaccagccacagcgggagcggcagcaagtcgtccggaccgccaccgccgtcgggttcctccgggagtgaggcggccgcgggagccggggccgccgcgccggcttctcagcaccccgcaaccggcaccggcgctgtccagaccgaggccatgaagcagattctcggggtgatcgacaagaaacttcggaacctggagaagaaaaagggtaagcttgatgattaccaggaacgaatgaacaaaggggaaaggcttaatcaagatcagctggatgccgtttctaagtaccaggaagtcacaaataatttggagtttgcaaaagaattacagaggagtttcatggcactaagtcaagatattcagaaaacaataaagaagacagcacgtcgggagcagcttatgagagaagaagctgaacagaaacgtttaaaaactgtacttgagctacagtatgttttggacaaattgggagatgatgaagtgcggactgacctgaaacaaggtttgaatggagtgccaatattgtccgaagaggagttgtcattgttggatgaattctataagctagtagaccctgaacgggacatgagcttgaggttgaatgaacagtatgaacatgcctccattcacctgtgggacctgctggaagggaaggaaaaacctgtatgtggaaccacctataaagttctaaaggaaattgttgagcgtgtttttcagtcaaactactttgacagcacccacaaccaccagaatgggctgtgtgaggaagaagaggcagcctcagcacctgcagttgaagaccaggtacctgaagctgaacctgagccagcagaagagtacactgagcaaagtgaagttgaatcaacagagtatgtaaatagacagttcatggcagaaacacagttcaccagtggtgaaaaggagcaggtagatgagtggacagttgaaacggttgaggtggtaaattcactccagcagcaacctcaggctgcatccccttcagtaccagagccccactctttgactccagtggctcaggcagatccccttgtgagaagacagcgagtacaagaccttatggcacaaatgcagggtccctataatttcatacaggattcaatgctggattttgaaaatcagacacttgatcctgccattgtatctgcacagcctatgaatccaacacaaaacatggacatgccccagctggtttgccctccagttcattctgaatctagacttgctcagcctaatcaagttcctgtacaaccagaagcgacacaggttcctttggtatcatccacaagtgaggggtacacagcatctcaacccttgtaccagccttctcatgctacagagcaacgaccacagaaggaaccaattgatcagattcaggcaacaatctctttaaatacagaccagactacagcatcatcatcccttcctgctgcgtctcagcctcaagtatttcaggctgggacaagcaaacctttacatagcagtggaatcaatgtaaatgcagctccattccaatccatgcaaacggtgttcaatatgaatgccccagttcctcctgttaatgaaccagaaactttaaaacagcaaaatcagtaccaggccagttataaccagagcttttctagtcagcctcaccaagtagaacaaacagagcttcagcaagaacagcttcaaacagtggttggcacttaccatggttccccagaccagtcccatcaagtgactggtaaccaccagcagcctcctcagcagaacactggatttccacgtagcaatcagccctattacaatagtcgtggtgtgtctcgtggaggctcccgtggtgctagaggcttgatgaatggataccggggccctgccaatggattcagaggaggatatgatggttaccgcccttcattctctaacactccaaacagtggttatacacagtctcagttcagtgctccccgggattactctggctatcaacgggatggatatcagcagaatttcaagcgaggctctgggcagagtggaccacggggagccccacgaggtcgtggagggcccccaagacccaacagagggatgccgcaaatgaacactcagcaagtgaattaatctgattcacaggattatgtttaatcgccaaaaacacactggccagtgtaccataatatgttaccagaagagttattatctatttgttctccctttcaggaaacttattgtaaagggactgttttcatcccataaagacaggactacaattgtcagctttctattacctggatatggaaggaaactatttttactctgcatgttctgtcctaagcgtcatcttgagccttgcacatgatactcagattcctcacccttgcttaggagtaaaacaatatactttacagggtgataataatctccatagttatttgaagtggcttgaaaaaggcaagattgacttttatgacattggataaaatctacaaatcagccctcgagttattcaatgataactgacaaactaaattatttccctagaaaggaagatgaaaggagtggagtgtggtttggcagaacaactgcatttcacagcttttccagttaaattggagcactgaacgttcagatgcataccaaattatgcatgggtcctaatcacacatataaggctggctaccagctttgacacagcactgttcatctggccaaacaactgtggttaaaaacacatgtaaaatgctttttaacagctgatactgtataagacaaagccaagatgcaaaattaggctttgattggcactttttgaaaaatatgcaacaaatatgggatgtaatccggatggccgcttctgtacttaatgtgaaatatttagatacctttttgaacacttaacagtttctttgagacaatgacttttgtaaggattggtactatctatcattccttatgacatgtacattgtctgtcactaatccttggattttgctgtattgtcacctaaattggtacaggtactgatgaaaatctctagtggataatcataacactctcggtcacatgtttttccttcagcttgaaagcttttttttaaaaggaaaagataccaaatgcctgctgctaccacccttttcaattgctatcttttgaaaggcaccagtatgtgttttagattgatttccctgtttcagggaaatcacggacagtagtttcagttctgatggtataagcaaaacaaataaaacgtttataaaagttgtatcttgaaacactggtgttcaacagctagcagcttatgtgattcaccccatgccacgttagtgtcacaaattttatggtttatctccagcaacatttctctagtacttgcacttattatcttttgtctaatttaaccttaactgaattctccgtttctcctggaggcatttatattcagtgataattccttcccttagatgcatagggagagtctctaaatttgatggaaatggacacttgagtagtgacttagccttatgtactctgttggaatttgtgctagcagtttgagcactagttctgtgtgcctaggaagttaatgctgcttattgtctcattctgacttcatggagaattaatcccacctttaagcaaaggctactaagttaatggtattttctgtgcagaaattaaattttattttcagcatttagcccaggaattcttccagtaggtgctcagctatttaaaaacaaaactattctcaaacattcatcattagacaactggagtttttgctggttttgtaacctaccaaaatggataggctgttgaacattccacattcaaaagttttgtagggtggtgggaaatgggggatcttcaatgtttattttaaaataaaataaaataagttcttgacttt

SEQ ID NO: 263056 - DNA, 3438 bp, Artificial Sequence
  derived and/or modified sequence
gtgcgaggcccagccgggcgccccgctggcgggtcgcgcgcgcgcccgcgcactcttcctgccctcgaggcgcgccgcgccccctcccccacccgctcgcgtaggctaccgctcgctgcgcgttttgtcccgcgtctcgccccgtccgtctcctgactggccgctcttgtccttcctcccgctttttcttctctctccttgcggtctgaagatgccctcggccaccagccacagcgggagcggcagcaagtcgtccggaccgccaccgccgtcgggttcctccgggagtgaggcggccgcgggagccggggccgccgcgccggcttctcagcaccccgcaaccggcaccggcgctgtccagaccgaggccatgaagcagattctcggggtgatcgacaagaaacttcggaacctggagaagaaaaagggtaagcttgatgattaccaggaacgaatgaacaaaggggaaaggcttaatcaagatcagctggatgccgtttctaagtaccaggaagtcacaaataatttggagtttgcaaaagaattacagaggagtttcatggcactaagtcaagatattcagaaaacaataaagaagacagcacgtcgggagcagcttatgagagaagaagctgaacagaaacgtttaaaaactgtacttgagctacagtatgttttggacaaattgggagatgatgaagtgcggactgacctgaaacaaggtttgaatggagtgccaatattgtccgaagaggagttgtcattgttggatgaattctataagctagtagaccctgaacgggacatgagcttgaggttgaatgaacagtatgaacatgcctccattcacctgtgggacctgctggaagggaaggaaaaacctgtatgtggaaccacctataaagttctaaaggaaattgttgagcgtgtttttcagtcaaactactttgacagcacccacaaccaccagaatgggctgtgtgaggaagaagaggcagcctcagcacctgcagttgaagaccaggtacctgaagctgaacctgagccagcagaagagtacactgagcaaagtgaagttgaatcaacagagtatgtaaatagacagttcatggcagaaacacagttcaccagtggtgaaaaggagcaggtagatgagtggacagttgaaacggttgaggtggtaaattcactccagcagcaacctcaggctgcatccccttcagtaccagagccccactctttgactccagtggctcaggcagatccccttgtgagaagacagcgagtacaagaccttatggcacaaatgcagggtccctataatttcatacaggattcaatgctggattttgaaaatcagacacttgatcctgccattgtatctgcacagcctatgaatccaacacaaaacatggacatgccccagctggtttgccctccagttcattctgaatctagacttgctcagcctaatcaagttcctgtacaaccagaagcgacacaggttcctttggtatcatccacaagtgaggggtacacagcatctcaacccttgtaccagccttctcatgctacagagcaacgaccacagaaggaaccaattgatcagattcaggcaacaatctctttaaatacagaccagactacagcatcatcatcccttcctgctgcgtctcagcctcaagtatttcaggctgggacaagcaaacctttacatagcagtggaatcaatgtaaatgcagctccattccaatccatgcaaacggtgttcaatatgaatgccccagttcctcctgttaatgaaccagaaactttaaaacagcaaaatcagtaccaggccagttataaccagagcttttctagtcagcctcaccaagtagaacaaacagagcttcagcaagaacagcttcaaacagtggttggcacttaccatggttccccagaccagtcccatcaagtgactggtaaccaccagcagcctcctcagcagaacactggatttccacgtagcaatcagccctattacaatagtcgtggtgtgtctcgtggaggctcccgtggtgctagaggcttgatgaatggataccggggccctgccaatggattcagaggaggatatgatggttaccgcccttcattctctaacactccaaacagtggttatacacagtctcagttcagtgctccccgggattactctggctatcaacgggatggatatcagcagaatttcaagcgaggctctgggcagagtggaccacggggagccccacgaggtcgtggagggcccccaagacccaacagagggatgccgcaaatgaacactcagcaagtgaattaatctgattcacaggattatgtttaatcgccaaaaacacactggccagtgtaccataatatgttaccagaagagttattatctatttgttctccctttcaggaaacttattgtaaagggactgttttcatcccataaagacaggactacaattgtcagctttctattacctggatatggaaggaaactatttttactctgcatgttctgtcctaagcgtcatcttgagccttgcacatgatactcagattcctcacccttgcttaggagtaaaacaatatactttacagggtgataataatctccatagttatttgaagtggcttgaaaaaggcaagattgacttttatgacattggataaaatctacaaatcagccctcgagttattcaatgataactgacaaactaaattatttccctagaaaggaagatgaaaggagtggagtgtggtttggcagaacaactgcatttcacagcttttccagttaaattggagcactgaacgttcagatgcataccaaattatgcatgggtcctaatcacacatataaggctggctaccagctttgacacagcactgttcatctggccaaacaactgtggttaaaaacacatgtaaaatgctttttaacagctgatactgtataagacaaagccaagatgcaaaattaggctttgattggcactttttgaaaaatatgcaacaaatatgggatgtaatccggatggccgcttctgtacttaatgtgaaatatttagatacctttttgaacacttaacagtttctttgagacaatgacttttgtaaggattggtactatctatcattccttatgacatgtacattgtctgtcactaatccttggattttgctgtattgtcacctaaattggtacaggtactgatgaaaatctctagtggataatcataacactctcggtcacatgtttttccttcagcttgaaagcttttttttaaaaggaaaagataccaaatgcctgctgctaccacccttttcaattgctatcttttgaaaggcaccagtatgtgttttagattgatttccctgtttcagggaaatcacggacagtagtttcag

SEQ ID NO: 263057 - DNA, 3498 bp, Artificial Sequence
  derived and/or modified sequence
actaggagcggctctcggtgcagcgggacagggcgaagcggcctgcgcccacggagcgcgcgacactgcccggaagggaccaccacccttgccccctcagctgcccactcgtgatttccagcggcctccgcgcgcgcacgatgccctcggccaccagccacagcgggagcggcagcaagtcgtccggaccgccaccgccgtcgggttcctccgggagtgaggcggccgcgggagccggggccgccgcgccggcttctcagcaccccgcaaccggcaccggcgctgtccagaccgaggccatgaagcagattctcggggtgatcgacaagaaacttcggaacctggagaagaaaaagggtaagcttgatgattaccaggaacgaatgaacaaaggggaaaggcttaatcaagatcagctggatgccgtttctaagtaccaggaagtcacaaataatttggagtttgcaaaagaattacagaggagtttcatggcactaagtcaagatattcagaaaacaataaagaagacagcacgtcgggagcagcttatgagagaagaagctgaacagaaacgtttaaaaactgtacttgagctacagtatgttttggacaaattgggagatgatgaagtgcggactgacctgaaacaaggtttgaatggagtgccaatattgtccgaagaggagttgtcattgttggatgaattctataagctagtagaccctgaacgggacatgagcttgaggttgaatgaacagtatgaacatgcctccattcacctgtgggacctgctggaagggaaggaaaaacctgtatgtggaaccacctataaagttctaaaggaaattgttgagcgtgtttttcagtcaaactactttgacagcacccacaaccaccagaatgggctgtgtgaggaagaagaggcagcctcagcacctgcagttgaagaccaggtacctgaagctgaacctgagccagcagaagagtacactgagcaaagtgaagttgaatcaacagagtatgtaaatagacagttcatggcagaaacacagttcaccagtggtgaaaaggagcaggtagatgagtggacagttgaaacggttgaggtggtaaattcactccagcagcaacctcaggctgcatccccttcagtaccagagccccactctttgactccagtggctcaggcagatccccttgtgagaagacagcgagtacaagaccttatggcacaaatgcagggtccctataatttcatacaggattcaatgctggattttgaaaatcagacacttgatcctgccattgtatctgcacagcctatgaatccaacacaaaacatggacatgccccagctggtttgccctccagttcattctgaatctagacttgctcagcctaatcaagttcctgtacaaccagaagcgacacaggttcctttggtatcatccacaagtgaggggtacacagcatctcaacccttgtaccagccttctcatgctacagagcaacgaccacagaaggaaccaattgatcagattcaggcaacaatctctttaaatacagaccagactacagcatcatcatcccttcctgctgcgtctcagcctcaagtatttcaggctgggacaagcaaacctttacatagcagtggaatcaatgtaaatgcagctccattccaatccatgcaaacggtgttcaatatgaatgccccagttcctcctgttaatgaaccagaaactttaaaacagcaaaatcagtaccaggccagttataaccagagcttttctagtcagcctcaccaagtagaacaaacagagcttcagcaagaacagcttcaaacagtggttggcacttaccatggttccccagaccagtcccatcaagtgactggtaaccaccagcagcctcctcagcagaacactggatttccacgtagcaatcagccctattacaatagtcgtggtgtgtctcgtggaggctcccgtggtgctagaggcttgatgaatggataccggggccctgccaatggattcagaggaggatatgatggttaccgcccttcattctctaacactccaaacagtggttatacacagtctcagttcagtgctccccgggattactctggctatcaacgggatggatatcagcagaatttcaagcgaggctctgggcagagtggaccacggggagccccacgaggtaatattttgtggtggtgatcctagctcctaagtggagcttctgttctggccttggaagagctgttaatagtctgcatgttaggaatacatttatcctttccagacttgttgctagggattaaatgaaatgctctgtttctaaaacttaatcttggacccaaattttaatttttgaatgatttaattttccctgttactatataaactgtcttgaaaactagaacatattctcttctcagaaaaagtgtttttccaactgaaaattatttttcaggtcctaaaacctgctaaatgtttttaggaagtacttactgaaacatttttgtaagacatttttggaatgagattgaacatttatataaatttattattcctctttcatttttttgaaacatgcctattatattttagggccagacaccctttaatggccggataagccatagttaacatttagagaaccatttagaagtgatagaactaatggaatttgcaatgccttttggacctctattagtgatataaatatcaagttatttctgacttttaaacaaaactcccaaattcctaacttattgagctatacttaaaaaaaattacaggtttagagagttttttgtttttcttttactgttggaaaactacttcccattttggcaggaagttaacctatttaacaattagagctagcatttcatgtagtctgaaattctaaatggttctctgatttgagggaggttaaacatcaaacaggtttcctctattggccataacatgtataaaatgtgtgttaaggaggaattacaacgtactttgatttgaatactagtagaaactggccaggaaaaaggtacatttttctaaaaattaatggatcacttgggaattactgacttgactagaagtatcaaaggatgtttgcatgtgaatgtgggttatgttctttcccaccttgtagcatattcgatgaaagttgagttaactgatagctaaaaatctgttttaacagcatgtaaaaagttattttatctgttaaaagtcattatacagttttgaatgttatgtagtttctttttaacagtttaggtaataaggtctgttttcattctggtgcttttattaattttgatagtatgatgttacttactactgaaatgtaagctagagtgtacactagaatgtaagctccatgagagcaggtaccttgtctgtcttctctgctgtatctattcccaacgcttgatgatggtgcctggcacatagtaggcactcaataaatatttgttgaatg

SEQ ID NO: 263058 - DNA, 270 bp, Artificial Sequence
  derived and/or modified sequence
atggagcagctgagcgacgaggagatcgaccacggcgccgaggaggacagcgacaaggaggaccaggacctggacaagatgttcggcgcctggctgggcgagctggacaagctgacccagagcctggacagcgacaagcccatggagcccgtgaagagaagccccctgagacaggagaccaacatggccaacttcagctacagattcagcatctacaacctgaacgccctgaaccagggcgagaccgtggacctggacgccctgatgtag

SEQ ID NO: 263059 - DNA, 519 bp, Artificial Sequence
  derived and/or modified sequence
atggagcagctgagcgacgaggagatcgaccacggcgccgaggaggacagcgacaaggaggaccaggacctggacaagatgttcggcgcctggctgggcgagctggacaagctgacccagagcctggacagcgacaagcccatggagcccgtgaagagaagccccctgagacaggagaccaacatggccaacttcagctacagattcagcatctacaacctgaacgaggccctgaaccagggcgagaccgtggacctggacgccctgatggccgacctgtgcagcatcgagcaggagctgagcagcatcggcagcggcaacagcaagagacagatcaccgagaccaaggccacccagaagctgcccgtgagcagacacaccctgaagcacggcaccctgaagggcctgagcagcagcagcaacagaatcgccaagcccagccacgccagctacagcctggacgacgtgaccgcccagctggagcaggccagcctgagcatggacgaggccgcccagtag

SEQ ID NO: 263060 - DNA, 270 bp, Artificial Sequence
  derived and/or modified sequence
atggagcagctctcagacgaggaaatcgaccacggtgctgaggaagacagcgacaaagaagaccaagacctagacaaaatgttcggggcttggttaggcgaactcgataagctgacacagagtctggacagcgataaaccgatggaacccgttaagcgctcccccctgagacaggaaactaatatggccaattttagttacaggttcagcatatataaccttaatgcactgaaccaaggagagacagtcgacctggacgccctcatgtag

SEQ ID NO: 263061 - DNA, 519 bp, Artificial Sequence
  derived and/or modified sequence
atggaacaacttagcgatgaagagatcgaccacggcgctgaagaagactcagacaaggaggaccaggatctggacaaaatgttcggtgcctggctgggagagttagacaagctaacacagagcttagattcagacaaacctatggaacccgtcaagcgctctcccctcagacaggagacaaatatggcaaacttttcctatcggttctccatctataatctaaacgaggccctcaaccagggcgagacagtggacctggatgcactaatggcggatctctgttccatcgaacaggaactgtctagcatcggctccggcaattccaagaggcagataacagagacgaaggcgacacagaaactgcctgtttccagacacaccctcaaacacggcaccctgaagggattgtctagttccagcaaccggattgcaaagccatctcatgcctcctatagtttggacgatgtgacagcgcagctggagcaagctagtctgtctatggacgaagctgcacagtag

SEQ ID NO: 263062 - DNA, 270 bp, Artificial Sequence
  derived and/or modified sequence
atggagcagctgagtgatgaggagattgaccatggagcagaagaagattctgacaaggaggaccaggacctggacaagatgtttggagcctggctgggggagctggacaagctgacccagagcctggacagcgacaagcccatggagcctgtgaagaggagccccctgcggcaggagaccaacatggccaacttctcctaccgcttcagcatctacaacctgaatgccctgaaccagggcgagaccgtggacctggatgccctgatgtag

SEQ ID NO: 263063 - DNA, 519 bp, Artificial Sequence
  derived and/or modified sequence
atggagcagctgagtgatgaggagattgaccatggagcagaagaagattctgacaaggaggaccaggacctggacaagatgtttggagcctggctgggggagctggacaagctgacccagagcctggacagcgacaagcccatggagcctgtgaagaggagccccctgcggcaggagaccaacatggccaacttctcctaccgcttcagcatctacaacctgaatgaggccctgaaccagggcgagaccgtggacctggatgccctgatggctgacctgtgcagcattgagcaggagctgagcagcatcggcagcggcaacagcaagaggcagatcacagagaccaaggccacccagaagctgcctgtgagccgccacaccctgaagcacggcaccctgaagggcctgagcagcagcagcaacagaattgccaagcccagccacgccagctacagcctggatgatgtgacagcccagctggagcaggccagcctgtccatggatgaggccgcccagtag

SEQ ID NO: 263064 - DNA, 270 bp, Artificial Sequence
  derived and/or modified sequence
atggagcagctgagcgacgaggagatcgaccacggcgccgaggaggattctgataaggaagatcaagatctagacaagatgttcggcgcttggctgggggaactggacaagttgacacagagcttggactcagataagcccatggaaccagtaaaacggagtcctctgagacaggaaaccaacatggcaaactttagctatagatttagcatttacaatctaaatgcacttaatcagggcgagacagtagatctggatgccctgatgtag

SEQ ID NO: 263065 - DNA, 519 bp, Artificial Sequence
  derived and/or modified sequence
atggagcagctgagcgacgaggagatcgaccacggcgccgaggaggactctgataaggaagatcaagacctcgacaaaatgtttggtgcttggcttggtgagctagataaattaactcagtccttggactccgacaaacccatggaacccgtcaagcgctccccattgcgacaagaaactaacatggcaaacttctcctacagatttagcatttataacctcaatgaggcacttaatcagggagaaactgtcgatctggacgccttaatggccgatctgtgttccattgaacaggagctgtcaagtattggaagtgggaacagcaagcggcaaataactgagaccaaagcaacccagaaactgccggtgtcacgccatacgttaaaacacggtacactaaagggattgagcagctctagcaataggattgccaagccttcacacgccagttactctttagacgatgtgaccgcccagttggaacaagccagtcttagtatggatgaagcggctcagtag

SEQ ID NO: 263066 - DNA, 270 bp, Artificial Sequence
  derived and/or modified sequence
atggagcaactttctgacgaagaaatcgatcacggggctgaagaggattccgataaggaggaccaggatctggacaaaatgttcggcgcatggctgggcgaattagataagctcacacagtcccttgacagcgacaagcctatggagccggtgaagcgctccccgcttcgacaggagacaaatatggcaaacttttcatatcggttttcgatttataacctgaatgccttaaatcaaggcgagacggtcgatttggacgccctgatgtag

SEQ ID NO: 263067 - DNA, 519 bp, Artificial Sequence
  derived and/or modified sequence
atggagcagttaagcgatgaggagatagatcatggagcggaagaggactctgataaggaagatcaggacctggacaaaatgtttggcgcatggctgggcgagctcgataaattaacacaatccctcgattccgacaagcccatggagcccgtgaaacgaagccccctaaggcaggagaccaacatggcaaacttctcctatagattcagcatctataaccttaatgaagcgctcaaccagggggagaccgttgatttagatgcgttaatggccgacttatgctcaatcgagcaggagctgtcatcaatcgggtctggcaattcgaaacgtcagattacagagaccaaggccacacagaagctgccggtgtctcgccataccctcaagcacggaaccctaaagggactgagttcttcttccaatcggattgccaagccctcgcatgcctcatattccctggatgacgttactgcccaactggagcaggcaagcctgtctatggacgaagcagcccagtag

SEQ ID NO: 263068 - DNA, 492 bp, Artificial Sequence
  derived and/or modified sequence
gcggccgccccgcccccgctcccgccgccgcccgccagtcagtcagtcagtcagtcagtcagtcagtcagtcagtcactgagcgcgcggcgcgggagctgctggcagtcgctgcgtctctggcgagggagcgccgcgcctggggaggaggcggaggcagcggctggaggagcgcgagcggcggtttccttgcccggggccgcgggaaggccgaccgactgccgcgatggagcagctatcagatgaagaaattgatcatggtgctgaagaagacagtgacaaggaagatcaggacctggacaaaatgtttggagcctggcttggagaactagacaaactcactcagagtttggattctgacaagcccatggaaccagtaaaaagatctcctcttcgccaggaaacaaacatggccaacttttcttaccgcttctccatatacaacttgaatgctctgaatcagggagagactgtggatctggatgccttgatg
